United States Patent Application Publication US 2014/0057251 A1 - sequence listing, part 5

SEQ ID NO: 6915 - DNA, 596 bp, Cannabis sativa
agcatatactcaatgacgcacaatcaaatgtcatgctttcctatttaatataaaatataaatatatataaataatatatatttaatatgaaaactttaattagaagatagtcaaaagaacgacttaatcccaatgacacaaaactatgatcacattcacacatagtagtgttatttattagatattgggttcttctaatggttttgcaattgatgagatagtggtggacaatctatgattctatatataactcttaattacatgtaaatgaaaatgaaaggttgatggtggcactacattatcacaatgtttggctaggtttttctttcttgtttctctcattagtactttctttgaaagttactaaaattagtttttattaaaaacaaaattagagttaaaaattgaaattcagtaattatccgatcaataattaaggcgggtacagtgtaattgaatttgtatgtaattggaggtaattacacaatttaatatgtttgtttgatcatgtacttacaatgtagctgtatgattagaggtaattgaagagttctaattacactctcaaattttcatgaccaccatggaaattgagt

SEQ ID NO: 6916 - DNA, 717 bp, Cannabis sativa
ttggtggaactattttgttgataggatttttaatggagagccttaactttcatgtttagacatctcgaagaaaatttggatgattggttaacagaagaattggaaaattacttggatgatgagtatctagtttttgactgtccaggtatccattattgtccaaattttactttaaactatgtttctagtttcataactgtgaaagtccatgtgctgcggtgaaaagtagaatggaaggaaaagaaaatagggtattttgttgtcttccgtacgtatataatatttgttatcttgccctgtcaatttttgtgttttctctatagttgattatagcttaaatttatgacaatacatttatatttataaactctgtaggtcagatagaacttttttcgcatgttcctgtgcttcggaattttgtggaccatttgaaaagtagaaactataatgtttgtggagtatatttgcttgattcacaggtaaatgtgattcttcttgttcttccttcatttttatgctacccttttttatgttgcattcatggcagctataccctgctttcttttgttttttaatcatactgaggaagtatttaattctttctgaaacgatcagtaagttgatgtctgcacttttgtatatatcacaccgagaaacttttctattcctgctgaaatgattgttaagttgatgttctagcagattttgaattccccc

SEQ ID NO: 6917 - DNA, 1538 bp, Cannabis sativa
ctataagccacaacctcatatatggataagaaattttgcaatatttaataataaatattaataacttaacattcatgcatatatcaaaatattcaactctttattaataatcagaaaatgtctttatagttttttcaaggcataaaccctaacagtcttgatgatgcttatgattttcatcttaatcatgttgacatctagcgatgctttgttcttgttgaaatttttcctctacaaggaatcttagttcttcgtagtgcttgtcttgtgcagtcattctttggtttatctttctcgtttcaactactagaacaacggtaggatcaacaatccgatttgacgtatctccttcatttgcaaccataattttctgtgcactctcaaacactttcttagatcccatcctagactttagccttgtaaagtccccacttcaagcctctattgggcccttacatccataaattaatggctcttatacacgattacatcactctagctgtttcctaagatgacgactgaccttacaaaccaacacgagtgtttctagtgtcctttatcctcacttgcacacttcttgggaaaacttcccaggaggtcattcgtcctgaaattatcccaagtcaagcatgcttaaccgtggagttcttttttgatgggctaccaaaaaaacaagatacaccttattgataaaggtagtactagtcaatctattaaaacccacttcaactatgtagtcgcatacctacacagtcttagaatcatcacacatgaccttccccagtcaatgtgagattgtacaactcccggtctttccccttcagatcacgggcctctgtctatcacaatcacccccttttgggggtgtgacgtcctcgtcgaccacacttctggctaggtcaaggctctgataccattttgtaatgtccccgcttcaagcctctattgggcccttacacccacaagatgatggatcttatacacgagtaggtcactctagatatttcttggagtgatgactacaaaaccaacacgagtgttttcaatgtgatttgtcctcactcgcacactttctggaaaaatttcccaagaggtcacccatcctaaaattaccctaggtcaagcacgtttaaccgtggagttctttcatgttgggctaccaaaaaacatgatgtaccttgctaatataggtaatattaatcaatccatttaagtcctattcaactatgtagtctaatacatacacagtctcagaatcatcacacatgaccttccctaggtgttgtgggattgtacaactcctggtcattctccttcagatcacagggctctgactgtcacaagcctagtccttagcttttcgttcttgtgttttccacaaacggcaccagttgttgatgctgaagattagctccacaataaatttgtatttgtactttgagttctttaaactatgattatcccaattgaaaagtataactctgctttattacataattcctttaagataagcgatgattctctctctctctctctct

SEQ ID NO: 6918 - DNA, 936 bp, Cannabis sativa
aaaaaaaaaaaaaaaaagctagatactatccatgttatttttatgcttggaagattgattagttgctccatcaatatcttatgaagaaaatacaaaaaataaataaataaataaaaaattgttggtataaaataatatatactaataccaaaaatgaataattagaaaataaatttaaaaattattgttataaaatgttatttgtggatgttcaaatcaccatattaattatcaccattaatacttgattgtattttcctttattacttattaatttagttgctcattcctttaatcaatacttttgtataaatagagttcaccccattagaataaacaactgaaaaattctcattcactttctctttatctcttcatcatcatcttcttcttcttatctattttatattattctatattagtttataataacttgaacttatatatatatatatatagtttactttctctacacacaattaatctcttcataaaaaaaattacaatataaaaaaaattacatacgcaacaagcataaaaatagaacacaatcaaaaaatatgaaaactaccttaaattgagcccacaattgtagttctctgatatataaatttgatgaagagatagattacatcaagctttaaaagtggaagtcaaaaatgtccaaattaattaagtggaaattgaaatgtccaaattaattaatagccaacctatagtagggaggtactttgcagaatttttttggaggattggtttatgttaatggtggtttagggaaagaaattaatggatagttttttcttcatttgaagtttataatttatttatatgaatgattgtgtaactgaaagaataagttacactccactaacatctcaaaaaaaaaaacattcttttttttaaagataccatatgagtatcaatttaaattat

SEQ ID NO: 6919 - DNA, 609 bp, Cannabis sativa
tattagtggatgacatggaatctccttcactagcatatgcagttgagatcttgttctccacttagtggcttttgtgatggaaatgcgaggcttggttttacctttaagtatgccactcaacactttttccataccagccacactagtttctagcctcttgttctaccatcggaggtcgcttattcatctttatagtagtgagctcgggagcttgaactcaccgagtacacttacttttcctttcttggcccacaccttgaagtgttggggtttgatggcacagatggtggaaggtaccgcactgaaaatggctttctcaatagttgaatacttctatcgttggggttatcaagtcatgtaatgttgggggctctttttgagtgttttcctggtggtccacacattggttattcttcctttggccttcttcaatgacaggaggttgatttatcttattatggtggttggctacttttcatctaaatgaatcccattttctcggagacgatgggaatgtcttcacctcttgaaaataatagtgaatgctttagaaactaacgtagccagagcttgtcattctcacagacgacaccaaattattgacggtaa

SEQ ID NO: 6920 - DNA, 1548 bp, Cannabis sativa
cattaaacataaaacgagtggtcggaatggtattgctactttcaaacttgatatgagtaaagcgtttgatagggtggaatggagatttattgaggaagtcatgaggaaaatgggttttgctaaaagatggatagctttaattatgggctgccttacaactaataatttctcttttctcataaatggagaagttacaggggctctaacccctactcgggggctccaacaaggttgtccattatctccatatttattttttatttgctctgaaggcctctcaagattgcttcaacatgaacaacactcaggccatttgaaaggcttcaagttaactcgaagtgctctgccaatctctcatttgttttttgctgatgatatcctattgttttgccaagctgatgaaagttcttgtcttgccattaaaagagttctggatatctaccataaagcctttggtcaatctttaaatttggacaaatctgtgatgtccttctctcccaacacaactttagctgctcaggtgttttttcatcgacaactctccatgcctatttgtgaatgtcatgaaaagtaccttggtctgccctcatactctggaaggaataaaaaagaattattcagcaatatcaaatagaagatttggagactaatgaatacttggaatgagaaaaaaatttcagctggaggtcgggagatccttctcaaagctgtagtccaatcaatccctacatatgccatgagttgtttccgtcttccggtctatttttgcaatcagattgagtccatgatggccaatttttggtggggttcgaatgaaaatggatcaaaaatatattggcgctcttggaactttctttgtaagtccaaattggatggtggcatgggttttcggtcttttgtccattttaatcaagcttttttggccaaacaagcttggagaatccttgagctactcgactctctacttggtaaggtacttaaaagtagatattttcctcacaatggttttcttgatgcaaccttgggtcattcaccatcatacacatggcaaggaatacattggggtagagagcttcttttaaagggccttcactggaaaattggcgatggcagaacaataaaatgtggttttgatccatggatatcgggacataattctttttttcctctccactactccggacatctaatggtgttgttgctaactttattacagatgagaggcaatggaatgtccctgatttacaacagtattttacctttggatgtggaaagaattttgactatccctctaagtttcttctcaagcaaggatacattaatttggcaccatcaccactcagggaactacacagccagctctggctatcacttcgcagcagcccttgaagaaatggatcaaagttcgacctcaaaaaatgcttcatcttggtggactttttcaggtccatgcaactacctcctaaagtaaaaatttttgcttggaaagcaatacatgatgcacttcctatttctacagctttagttaaaaggaaaattataacagat

SEQ ID NO: 6921 - DNA, 1144 bp, Cannabis sativa
tctttcctttcctcccagacagcaactattctacttttctttttcctctttcacttttctctatgtaatttgctttcctctcactttaacctttatccttataatgtaaattagagttctttaccaaacataagaaatcaaggcccagattataacgtgtcaaggggtttttatttttttggagagagaaaatgtcagaattccttataataaatattatttttaaaatgtgtcacgtacttattgaattttctttttttttttttatataatctcacacttctcatttaatttaatcatactcttcaatatattttttttaaatagttacatttttttcaaatatatcttccattcgcagttcttcttacttagcaaaggaagatgcgcacttgtgtcgtatttatgttgacatttattaagatccaatcatatgaaaaaaccaaacaggtaataatttttggacaaaagttgaattagagtaccataaaaataaaaaaatttaataataaacctcgaccagtaagatctttgcaaatagtgcagttacaaaattaaaggggtagatcaatcaaattaaaaataaaaaatcaagtagtgtttcaacagaagacattgtaagtgcttgttattataatttatttattgttactatcttattttttaattttttattgacgctattacttaatttatattttaacagttaatttaaacgaaaatgttaatagcccaagataaaaaaaaaaaaaaaatacgacgaaggctttaaatttgatcatgtgtgacacatcctcaaaagtattcagaaattttcaaataatgacaacatcaatgcaccatgtagattccaacatgaaggtcctagtttcatttcatccaaattactgtatcacaattttgagtctctaacatcggcatccattggtgtgagttcatttgatctaaacgtgaacaatgagaaaattaatgcttatccaacagaaagactatgtggtatgaaaaaagcaaagaaaaaacaattaggtaatgatcaatccaacgaactaatggaacaaaataaaagacttcttagtgaaaagagtaacaaggatagaaatgaatgtcatagaaaaaaagctgactaaaaattttagtcacgaat

SEQ ID NO: 6922 - DNA, 546 bp, Cannabis sativa
tcaagcaatgtgggattgtacagctactagtattttccttgcagattgcggggttctaactgttgcaatttaactcatgtcccctttaaactcattttcttctttattataactagatcaactcacaaaaaaaattatcgccttcaattcacctagaattctgggaaatactcttaaattgtcccacccttactatactaaattacttctagacaaaaaattattttctgtgaatcaattaaatggatgtcttcattggttactcatgtcctatattccacataggaataccagcgaatttaactcatattatcatttccctaaccggtctaccccgtcgataagttaccactaactaatatacatgcacagtccattcagatcttttgatatcccctcactgagtgtacaatgtttaatatcgatatcaattgaaatagtaactataatattgcccataaaattctaacttgagttggccgaaaatctgatacccgagtccccttgaatcattactgggacttaggcatgactcgtacacttttc

SEQ ID NO: 6923 - DNA, 1499 bp, Cannabis sativa
aaccaagtgatgatcaacttgtcgtcgaatctaccggttgtagttgagtacaaagttgcagatatggattatgtaaagttctacttgactcccaagatagaagaagaggatattgaagctcaaatggagttcacaccttaagtcgaaatcaaaccaaaaaccaagctaaaaaaacagactgagcctatagaagtagaagatatcaggctggatatcaaattaaaattggagaataaaaaacctgagaaagaggataataacggtaaaagtaaccctgaaatagaagtaatggatgatgactgatgaatagtttgtttcatctataatctaggtataatcttagcaaaattagatgttcatatatcttgaactgattttgccattctttgatatgtgcaacccttagttcttccatttttttgtgctatatattgcttagtacttgaatgggtctgtaattattattttattttttttcaaataggttagtttggttattctcacttctcaaggtctcaatttttgtatcacaacccacaagtcaagctaatatcattactttacttttcaagtggaatcaaattagaggatgctgcttttcttgaaacacaagtgttttagtttgcatagccaactcagcagtaaacaaatttgtgggagataatagataaataataaaaacaatagacatgaaagattaaagtacgaaaatgtaaaattataattgttttcttcattaattaatcaatataagaaatgttaataacagagtgactgtgtggagacgaattctacaaccctgtgccaaaagaataaaagataaagaacatttttctccataaccctaagctgggaataacagagacaagagtgtcacttattaaatttgttcctatgatgactaaatcctgcgttgttgctgatacaagtcgaaaacactctctccgaggtttccagatgaaaaaatagaatgtagagggaaaaaagaaaaacctgataccaaaagataacatgtagaacttaactttgcctccaggctctgggtaggctgccgcgctttccttgcattaaaggaaaaaaaacaaaatgttgggaaaatccattttttactgctttcccagggtgattctatcatttacttcttttcttggcttcactgtataggataactcccatgactgtaagagagtaaccaagcattccagtcacagaaacgggatttctgaaaattaaaattgaaaccaccactgctacagctccctttgcatttcctagcacctgtggagccgagccagccatacaacttaatttagctttaatacaaacttcaaatgaaacattgcattgttatagtggaaaagataaggaaatttagtaggcggaagtgaaacaggtaatacaaagcatctacaatgttataaactttaagcctcgaggatgattattctgctggcccaccgctatctataatctaccccaccctttctttgtttatctca

SEQ ID NO: 6924 - DNA, 579 bp, Cannabis sativa
gggtttcacgattttcatcaaactatttgggaagaagaagatgaaaaggtaaagttcgcaaaatcaaacaaatacaatgatatttacaaatatatattaaaaatataattgagcaatagagacatacctggagagagggaatggagaataaaagaatgaaccgccatggaaaatagctttgaagagctttttgccgccttaacagcggcgaccttcctttatctttctttttctgaattaagagaatatatgtgtgtatatatatatgtatagtgtagttatataaataataatatgtgtagtgggaggagagagagttcgtatagattctaatactattttggtgtttgaattttcaaggagaaaaagttggtaagaattggagttcttctattttaggtcaatgttttccagttaaatacttccaatttccaagcccacaaaataaattaataaaggaaaaaaaaatgagagatctataaaaatcaaacatttattcttagaaataaaatatatgtgatgagagagctctgtatatatatttttttgaaagggataaaaaaaaaaaaaacaaaaaaa

SEQ ID NO: 6925 - DNA, 695 bp, Cannabis sativa
atatatatatatatatctcccactcatgtccacttaccatacacatatacaattcatatattaattatatatattcatcaacttaaataataaattaaaattaattaactaaacatactttgactaataaccaaatgtaaacaccatgaaacttccatatctttttcctatcaaacaaaatatattgatagcccttcacaaaagaaacatcactttacataaagtctcagacctgaattttagttggttatagaaaaaaaaaaatagacttttatttaaaaaatgtggtatatattttttaaaattggtaaaaaagaaatatgtaattttaaaaaggtgataatttttttttaacttttaggttaggtaggtagatcctagacacaaatttaaatctatattcagagctaaacatgtataaagtattgttattaaacatcagtagtagttaatattatcacaagataatgtcgtacattaattttctataataattattacttaatttaaaaatatattaaacctaatttactagtacttagttataaataccaataaaaatatgacaactcagtactatatactaatatataccttttaacatttatcttttatatttaattatgtgaagtccaccttccttggtaagctgctatgtactagtacttttcttataataatatatatatatatat

SEQ ID NO: 6926 - DNA, 1480 bp, Cannabis sativa
cacttcaagcctttccccgcagctacacagaaagagaaagaatttgaatgaatgtttgttgggaagtaagatgttagaaggtgcaaaatatttcttcttaattatgaaatacagtaccacattctgcatgcaactcttcaaagcaagaaattctttcagacacatatcccgttcaacctctggaacttttgctgcaacacaactcccatattcttttgcctaaagaaaggaactctggtaattcaatgctagcaaataactggtacaacaaaatttctaaagcactataaggcatttgatactatcctaaacaaaataagtacatggtttttagttttacatagcaagaacacccatttccagatcttgagttacttttgggtagaccaaatccaactatcaatagttaacgagtgttttgtaaaaatagtcttaatgaaaaagtttattagcaaaataaccacgttcgtgcgaccataaatttacattgtacgactataatgtgtgcaaccattatagtcgcaaagtgtaaattcaatatggttattttgtaaattttacaatttcatgttgttagtttgccaaatttcgcatagttaacaaaaactttcccaaatatttagcatttggagactgaaaggaactcactacaccaacttcttacaatatataagaaatgatactactgtatcattatatattcctaataatatcacagccaaaagaattgtgatgaacaagacagcacaaacgccatcagaaactcagctaaaattaaagtatctgaaaactgaaaacacggcaatgacaaacttcaaacagaaatatgttaaatcaaaacctccaagtctctcaaaaacagagaagtaaaagggtttgttaattctctcatgcttataagccaaactgcaacccaaaaatttgttatcccacatacaatctagaaaattctccaggtcctgaaaatttctatgatttctttccagccaaatcagacatacgtgcataaggtcattgtgcataacaacatcttggagtaacccaacttttacttaatgactttcttgtaccaaaattgtgtgcatgacgttaacaactatgacagatcccttctttaaaaaaaaaaaaaaaaacagctataacagatcagatcaagtcacgtttggataatggaatgaatagaaatcaaataaattaaactaaaacatatcagagaaaaaaatgcagaaaaataaatgtgttgatcattggccaacaataatttagaagaaactaggttggaaacaacgcaacaattcttttttcctccacgaaaattatcaaatagggattggattggataaaattgtcctaaatctttcagagggattacgctatcccaaactagggattatttagattgttggaaaaatgttttcaatatccactctaatttgaaaacaaaaacacaatccactccaatctcactttccaaacatga

SEQ ID NO: 6927 - DNA, 1037 bp, Cannabis sativa
gcttccttcgacgcctacggtctcgacggcgacgatctcaactccgccgaccgccatttcgacgacaacgacgtcgtcgtagtcgacgatttctcagcctacgattcattctcttcctcaacttttcccgccgatcaacaccaatccgatgattatgttgctgtagatcactccaccgccgctacttctcccttcggattcgaagatccgaacccgaactattcagattcgtctccttttggttctgttcacgttgagaatgggaacgggaacgggaatggaaataatggaaacggaagtctgtttgagtcttatggcgttggtgaggatggaattggtaatggtgatggagtgttctcgacgcttgatggtcctgttcttccgcctccgacagagatggagcctgaggaaggttacgctcttcgtgaatggagacggtgagtttccgatctgactggcttagcttagatctgtgtatattcgcttgcttacttattgaatttgcgtagatctgtgattttagaaattgagttttacttgattattaccttagattttgtagcactatgtgatcgaattcgaatcccaaaattgagtagaattctagttctttaagagtttattcagcttagatccatacattttcctcataataatgagaatgagaaactattttgagatttattaattattcataatggagatctaatcaaaaagtatcccattgctttgatttttttgtccaatctttgcaaggcttgaaattctagcatatgactaatttattctaagtaaattgaagtgagaaattgaatcaagaactcataagagcaaatcatgagcctggaaccgcttttgttttgattcaaataggaattacagagaaaattttgtagctttcttcatgaatttgttagtaatgaaaaatggtacacattttaattataataaagattaaatttagtttagaagtagagttttagcaggtcatgtttgttccaagatctttaggttgtagattgtttatttgacatgtt

SEQ ID NO: 6928 - DNA, 643 bp, Cannabis sativa
caggagctccacctcctgccactccccaaacgagcggaatacagttctctgctaccccaacgtacaaccagagcctcgccttaactctagcgttgtcgcattttaatgtgcctgtaagaaacccctctggggtaagcgtccaactttcgtcccaatccgcaccagctactagtatggccggagcccaacaaagctcctagagcaagagatcttctaaaggtagcacgtggactaaggagaaaaggtagcgaagggggtataccccacaatacacacagtacactgaattaacagattctcaggaacgtgtgtactttgccacccggcaaaatacgcattaccggaagcctccacccttgtataaggatagctcctagagagaccccaacaaaagattcaactatcacaacgacagcggtcacaccacaatcgagtgtaaaaacgtgaaggacgaaattgaaaacctaattcgattgggtcatttgtacgagtggatcaagaacaggctgtcgcacttaaacccagcccaagtgagaggccccttacatcaaggaggagccgggggtatgctcgagggaaaagtacctccgagaggggtaactccttagcagacgcccggactgccaccccggccaatgggaga

SEQ ID NO: 6929 - DNA, 1595 bp, Cannabis sativa
gttactcttcctattgtcaatttgttgcaagatcattcactttctcccaaattctaacaatattcaatgatattttgtaataattattaaaataaataaaaaaatgaagaaaaaactcaaattctaatagcaaaaatatttagatttttctattttttttaatttccttaatacccattctagtatatctgttaattattttcatagatatcactactggatctcctccaacccattatatatacaggactcttctatggtggagatttaaaaaaataccttatttataagaatttaaaaataaaatgggtctcattgcattttgtggatgtaaaaaaacgttcatggccactaaaatatagtgtattgtaagagattataattgacttttgacctgaatctcacttatttaatgttatgtttcattgatgtaagaaaaaatatactcatttttcttttttttttcttttaaattacacaataaattaaagtacgatgatttttcttataaaaattaattaaaaaactcttttgatattttattacacttatgtcattttaactaatcacttcactatttttttagttgacaaaactaaattaatcataaataattatatatttattttaaaaatactacatttcattttttttagtcacattataattttaaacttttttataattacttttaatccatttttttaattatattacactcatacaaattataattttttttcgtttttaaaatgttacaaatttttaattcagttgcaacatacaataattaaaagaataaatttctaatcgtcttcaaaatatcacactaaataaatatttttattattgttattaaatattttttttttttgaaaataagcctaattattattataaaatattaatatttaattatattcctttattactataataatatttaattataatttagataagcatatatctaaatttaatgtttaaagagggattagttttattttattttttaaagcattagattatttgtttttaacatttagtttggtaggcaaattcatcaaaaagaattaagaggaaattacactcactatgggattttaaaagttgttatgataaatatgacacatttaagtttgaccaatttatatggtattttttttgtttttaagttttttatggtatttgatatgccatatatatgtaattaggttttcaaatcacatatttaatgtttttatatgtttagaaagttttatttgtcattgatgccggaaaagttaccggagtttgctgccggtgtcagaaaagtcgtcggagtagtagtcgatgccgggaaagtcgtcggagttactgccggcgccaaaaaatttgtcagaattggcattgtcatcggaaaaatcactgaaaaaatcaccaagaaactggtttctaagaaaccggtattagtttcttggtaatttttctgttgacaatgtcaattctgacgacttttctgatgctagcagctaccccggcgacttttccgacactcgacagtaaacttcggaaaatttatcagaattggtatagtcgcctgaaaaattaccaag

SEQ ID NO: 6930 - DNA, 1624 bp, Cannabis sativa
acagttagagccttgtgattcgaagggaaaaaaccaggtaaactgtgcaattccatcgactgtggaatatcaagtatgatgattctgagactgtgtaggtatgagactacacagttgaagaggtcttaaatgggttgattggtactgcctatattaacaaggtgcattttattttccggtagcccatcatgaaagaactccacagttaagcgtgcttgaactggggtaatttcaagataggtgacatcttgggaagtttttccaagaaatgtgcgagtgaggacgaaacacgatagaaatacttattttggtttgtagggttagtcgtcattctaagaaataactataatatatagtgacgtactcgtgtacaagagtcattattctgtgggtataagcctccaatagaggcttgaagtggggatgttacagacctttttgttcatgaccttgtccctaataaagtaaagatcgatctcgatatgctttgtgcgagaatgaaatcgaattagctgccaacattactgaacttatgttgtcacgccatatgaagaatagcaggttgagggactttttttaattcaaaaagaagtgactaaatccaagcaattttagagcctacaactgctatacttctaaattatgcttcaattgaggattttgagtgttggtcgcttcttggattgccaagagatcaaatttggtctgaggaaaacacagaaactagttgtagacctttgatcatcttgatcaactacccgatcagcatcatagtattcttataaatgaaaagaaggagttgcttgaaggtgcaaaccaaaatctaatgtgtcagccagataccttaatattcttttaatagcaacccagtgtgcttaaagtcgattgtgcaggaattgacatactttgttgacacggaatgctatgtttggtcaagttatggtagcataatgcaaagcaccaactattgaccaatagtgagttagatcaaccaaaacattactgacataactagacaatctaaggccaccattcattggtgtgttgttagttttagccccttgtagttgtgccttgcacaattaactttggaggtatttcttttgagagagcgtaccaccatttgtatgttacaacacttgaattctcaaaaaataattgagttattgtcctagatctttgagagcaaatgtgatgttgagagatgtaatgagagaaattacttcagtttcatatcaatataaatgagaacatataagcagctagtagaagtgactttaatgagcagtgagcgatctattttggcagaggagaaaccaagaagaggtaatattaaaaagagcttttcaaaccatacttttggtgcttgcgaaaccaaggagaggcaatattgaggagagcttttcaaaccatattcttagggttggcttgagactataaatgaccttttgcaacttccaaactttgtaagaaaaccccaccatataaatttctttatgtgaatatccattgacaaatctattattcacatccaattgccttagggagcatgcttgagaattgcattatatttacatctaattataatatttaacttaactaggcaataggcaatgcatcatac

SEQ ID NO: 6931 - DNA, 1045 bp, Cannabis sativa
aatgaccatacttataattaactaagcagaagaacgatgtaatattagaactaaaaaatatatatttaacaattagatggcgtttaattgaaaggaataaaaatgtgaataaaaatataaatagaataaaattaaacttagaatgattaaaataattgataaaaaaattattaaatttttttctatcttgcattaattggaatggtcattcattttattttaaaataaaataatcattccatcaaaataatgcaaccaaacaaaaggataaaataaaaagtatttcttttctgtttcttttcatttcattacctccaaccaaacgtgtaactagcatacttgcagttgcaagaataatactatggtatcatgtaccttatttatgttgactaataaggtagccatgtcacggcgtaggcgtagccttgtaagttgtaagagcccaaattttattttaaatagtgttgaagttgaataatttttttaaaacaaatgaaggactagcaaagaagactcgagattaacacatcacactttctctctcttctcttacctgatttcctcttccacttttcacgaccttcttcccccatttccttcattcttattcaaatttaaagtcagccaccaccaccattattatagatcattttggcgacccatactcttatcgtcgtccttggaaatctattggagcttcatcatcacctcaggcaacatccttcacgactattaacttttccttaatatttgtttgaacaattttttatattacttaattgagatctccataaataagaggtgtctaattttgacccttagctccagatatactctttactcaaagagtgtcacaaaatttttgttgaaaatgggtagatcaagtttgtaagtttgtaactttgaactatttttcactaatctaggcttcagtgacattagcaaagttggcgagtttctgaagagcaaaacattagtgggtttagttcacaccacgactcatcgaaaacaaccactatcattgttgtccgtacacccatgtgag

SEQ ID NO: 6932 - DNA, 684 bp, Cannabis sativa
tacttttgactaagggaaaatggatgcacgtgcagaaagtataaaacagactacagaggaagttccctttggttttgtgatcgttcaaagctcttaatacagtgcttgagtttatggaccaatcaaattatataacaggagcaattttcaaaataaataaagaaataatgcaaatttaattcagcttggggaagattcaaaaattaataaatggcaaatcatttgaatcaaaccaaacgccacgccaagactcagaaagagagtaaaatgtaaaaaagtttaaataacaaaaaaaaaaggtaaaagtgtcttctggagacacgggcacttgtttgtaataccataatttaaggtttaagcgttatattgattttattttatttgatctcttctaaataaaaacaaaattatacgaatcacaatcaaaacctatatgaccaaacttggctttttatggttgccaaaataataataataataatcattaatttgaagaaaagaaaacttttcttccccaggtaaactttttgaaggagtctttggaagaggctaagctaaataatggtggcatttaattttgaaggaggactgcaaatcagtaatgcccaagtttctttcagaaaaaaaaaaatctcaatttctttcaaaaaaagaaaacagtttgaagaaggattgcaaatatca

SEQ ID NO: 6933 - DNA, 726 bp, Cannabis sativa
acaaaggctatatccacaccaatgggtgccaacatatctctcagtaagggcattggggctcccatttcagatcccgcctcttataggagtctcattggaaaacttttatacttaacattaacccagcctaacataacatatgttattgattgtctaattcagtttctaagtgatccatgacaactccacatgaaggatcctgcaatatcttaaaggaacacctagacaaggccttctcttcaactcctctattcctaaacaagataatgctttccacctccatgcctttactgatacggattggggtacatgtccagatacaaggtgatcgatcactagtttctgcattatcctaggtaattctctcatatcatgaaagtgcaagaagcaaaccattgtatcaaaatcctctatagaagcttaatacaagtccttggctaacacaacgtgcaaactcctctagctcttcaacatacttaagactttggcatctctcattcaactctagctactctctattatgacaaccaagctaccctgcatatctctgagaatgcaatatttcatgagcgcaccaagcacatagacattgactgccatatggttcgagaccaaatcactaaaaccaaatcaagttcatacatgtcccttctcggcataatattgcagatatcatgaccaaagcacaatttccaacccaagacaactttctcttaaccaaaataa

SEQ ID NO: 6934 - DNA, 628 bp, Cannabis sativa
aatgttagattagcatgaatcaattggagtagtgtttgctctagcataaatcaagtggagtagctattatggtaaaaagttacatcaagcatagttgtcagtattttattatataagtttgtaattagaaattaaattagtagagttactatttcaaataatatttgcaaatggcatatatagtagagtagcttaaactctctattaatttaattttctttatgaaagcagaaacaaacatgaactgaaaatatatttcaagagatgggagcactttaatccgaaaaggtttttacttaattatattttggtcattatattgctaacaccttgattcatattataatatatatgagtatcgttatgagatatttataattcttagcaccacgataaaatgttgatttataattagttaataattttttataatatttattagaataaaataagtgaaactcattatttaattatactaatagcaatattatatcttacaaaaatgcgtaccttttaacatttctctctattatatatttgtgatgggacacgaaaaatgtccttgaatttaaccatggttgctttttgtaaatatgaccatatatcatgacttatcctcaaaatttca

SEQ ID NO: 6935 - DNA, 1257 bp, Cannabis sativa
gagacttgtgcttgtctaaagctgaagatgaaaactttatgaagttcattgacttgagggaaacagcgaagaagaagccattatattatgcatctacaaatgtacgaagtgttgccattcatctgtgcaatgatggtactaatgatgtttttcgttttgttagtactataaatgactctcttagatgtcttatagtagatattaggaaccatcacccccgaaaacatgaactgagacttgtgtttaatcgctttctcatgcttagagttttcaaacttcatggctcttattatagaattaaccttggcatcagattgcctaatgaaattggaaagcttattcacctaaggttgttaagtattggtggtggtatctcattggaaaatttcccatcttccattggcaatttgagatatctgcagactttaaaggtacacagttcatatggcatacttataccaaatgtattgtggatgttgaaacaactaaggtatttatacttgccctatttgtgtcgcaaaacttttagtagagggatgaagttatctaatgttggaaatcttcaaacattggtaggtgctccaatcacttaccttgctaggagtgattttctgcagttaacaaatctcaagaaattaaagattcggggagaatttaccatgatcccccaaatgtcacattcaatcgccttttgtctttacaagtgtatcctaatggtaatgaaatctggcacgaaatgacagatattgttcctatcatattaacctatcctcgaatttataagctaaaattgatgttgcctatagtaaaattacaagaagcaagccagttctctccaaaccttatcaagttaggcttgagtaaatgtggtcttgagaatgatccaatggcaacactagaaaagctatcgtgtttaagagtcctcacaattggtatgagtagctttaaggggcatgagatggtgtgctcagaaggaggtttccctcaattggaatctctcaagattaaatgtgtatttgacttaaaagagtggaaggttgaggaaggagctttgtctagtcttcattacttggagattaaccattgttgtagattgaagagagtttcggatggattaagatacattactacgcttaagaagatggtgatcaaaaagatggctaagcaattcaaagaaagggtagacgaaagaggagaggatttctacaaagtcaagcatgtgctatcccgtgtatttctcaactgtgatggaggtat

SEQ ID NO: 6936 - DNA, 1982 bp, Cannabis sativa
ttacgccacaaattactcttgtatcaatatcaataaactacctgttctgtgataagtaatttaaactgaatttaaaacacatataactaatgcttttcgtttatattgattaaatttaagttcattcagagtctgaaaatctataaaacactggtttaaaaaacaagaacaagaatgtaccttcaagtttgacatggtgaataatcccagaggtataatttagtagcccttgaaatggatacaattgactgtaaacagtagaaacccctttctgtacatttgaatagtttccacttcttttgccataccatacttcactggcaaccaatgaaggatcaatgggtgtcacattcaaaccaatctgtgcatcccctgacccaattcaaacaaaacccacttcaccaaattacctatatacatatatatacatattaataaatacataaaaggcaaaatagagaagtagtaatagtagtgtaccagtgacccaagaaacccaaatggaagttggagaagaagacaatgcaatagcaatctgttctgggaaatttgaggtaacatttttcatcaacctgggatgattcatgggcaaatcatcactaccccttctaagtgatgaatcaaactgttgtgtaatgggctcaaatgggccttccaaagttgtgggaatatgggctttagtcatcatcatcatcatcaccattgtcaaaataatgcttagctgaatccataataaattgggatccataaacttgaattgttgatgttgatgatgatgatgatttaatttgctaacatgaaataaaacccagttgtagaaaaagcttaatacaaatttggacttgtattggtatctttgtaatgaaaatggaatatgctacaacataactttactttgtttttttttttttaataataataataatatgaattttcaaatgtttttttaaggttatatagcttagttatgctcaatatatggagaaagacaaagtagaggccaacaaacattgtcttgcacaaaatatgaacacaagttcaatcttattactcaaatctatcttttgaaatttggaactaatgataaaacatagtggaatagctttctgttttaattcaagagaaatttatagtttataaaaatttattattattattattattaaattttaaaaacataaactttacttttatttttgtgataaattaaaaaataaaagtgttaaatgtattttataactatttttattttttaattttgaaaacataaaacaaaagtgttctataagttttaattttattttatttttttacatttttatatcaatttaataattttaacttatttttaatatgaacttttgttaatttagttttattttatttttgttgaaactaatttaatattaattagatttataaaataatttctaattttttgtagagataatactcaatttatcactttattacttgtttgacgattgtgtacacttgcacattaattttcccaacaagaataaagtgccaacttttgggagaaggttactcaagctttcagggaaggtggttcaagtgttacttcgggaggaaagcaaatcgaagggagatcgtattcttgaagggtcagcaaagttcatttgtgaaggtgtaatacattaagtttgtgacatataataagatggttctattagtatttatgcataagtcaaaaatctcgtatttttgagattgtttacccaaattcgacaagggtgacatagtgaggatgatgacacgtagcacgagagtacctcgagactaaattaataaggaatatgttaagtcacttgacacaatgatacaattccataaaaagaaggatggacccttagtttgaactatatacgagaggaagtaaagctaatacatctacctaaggtgggtaaagtgactatctcggggatatattaaatgattatcccaagtgggttgagtgacta

SEQ ID NO: 6937 - DNA, 557 bp, Cannabis sativa
agactaattctataaagtctaatactcaaaaatatacatacaaatacaaaaagtgtagtttaattgaattcatcaattaatcaagtaatcgagattgtattaatgtataaaagcttgttaatcttcaaatgcaaaaacaggacatccaataatccaaaactaatttcatgtaaaatctaatcacaaatctgttaaaacaagtttttttaatgtaattttctctaacacaaactatattaactgaacatgtgagcctcaaaaaccaaacaaagaaaaatgttgttattcatatcatggagataaaccaaatcaaatattccgaccaccaccatttttccgaccaccaaatttaccgccattattcgggttggcagaagtagaagcaattgctgttcttgtgttgtgttgtggtggttccgcctcaacaggcacagcattgtcggccctagcccgcaacgattttcggtaccttgtctttttatgtcggttgtcatatggtatgaaacttccaaaaacaatctgtcatttaaaaacaaataaacatcatcaatataaaa

SEQ ID NO: 6938 - DNA, 868 bp, Cannabis sativa
gtgttccttttggagggcaatttttgcactttgtgttgccattttgccctcttgttgcttcagtctttccaaaatctctcgccatggtggaatttggggcaacctttcattgttgacattttcggtgttcatctaggtttaatgagtgttacccagatcgccatgtagggcgagatcttcttgttcattcgtcatgtctttccacttactttttcagaaaatttcctccttcttttctttgtgtaagtgtgaattttgtaatgaaaaggtctcctaaaaaagaaacggtgctttcccacagacggcgccaaattgttttagcaaaaaacaatcgtaattttttgtgtgagtcccctctttttcagttcctaatcttgcccctttttatgtattttatttcttatttatatggtacgtcctttgattgcatggatgacctatttttgatctattcttttcctgacgcgtgtcttttctctttgctctccctagtttgccacctgtctaattattacaatggatgctattccttgcctcctctaggtccgatggtattgtgtccttttcctagattgtttatctcaccttttttgggtcgcggccttttttccgtcagaactccttttcctacctgaggtgaatgggaaatcgcaatgtcaaactttattctaatgcctctttctgactgagacatttgttcatcattctaaaatgctcttgttctctattgccctatactctttaggaagcgagtcttccatcggtgagctggacggaagactctctttgggtctcttttgaatctatcaatcgtctgggtcttcctctgtcggtccgagatgataagctttaatccctcatctccttt

SEQ ID NO: 6939 - DNA, 574 bp, Cannabis sativa
aaaaaaaaaaaaaaaaacagctaagctatctttcgagtataaaattatttacaagaaaccaaacagaaaaaaaaaattaaagaatcaaagaatcttatattggcatataataatttacatgttcttgtttgtaagaataaacaaactaatatacaaaaaaaaaacaaaaacaaaacccaataaccaatcatattaatattaaaaattgacaatttggagaaataatgctcttaaaaaacaagcacaaactctccatcatcacaaacccgaaatcaattaattaaaaaatgaaaaaatttaacaaaccttaatattaataccacattatttaattaaataataattataataatcaaatattcaaaaccaataaaccctagccaatttagctaagctcaaacctttgatcatgttcatcatgatgatgataattaattaaggactcctccaattaaagctattaagcctattggaatatcgaatttgcaaagaaatttgcctctccatttgtaattgacgacgaaaattgttgataaacatctccgccctttgatcaacatcataattactacaa

SEQ ID NO: 6940 - DNA, 1419 bp, Cannabis sativa
tttttttttttatcaccactaccattattaccataaatcaaacaaaaaagagagaaataagataatcaaacaactccatcaatccaacaaataggggaattcccttttaaaatcttaatcccaaatttgaaatgaaaacccacaatccagtctagatctaaaatttcaaatagcacaaactaaaatacaaaatcaatttgagggattgagagagaaggcaaagagagattggagggtggggagctgatgggaggttcgcttgagccattagtgtttgggctgtcgtcaaggttttggggtttaggctctcggtctagagttgtcagtcgaggttgtcggtttaggatcgtcggtcggggttgggtggtggtgataatggtagttatggtggttgaagaaggaggaaggaagaaattggggttcgatggttccagtaagtcaaaaaaagaagaagaaaaaataaatatatttttttttttggagttttctttttaatttttttaataatttttagattatcaatattatatagaccgaccttacaaaaaaaattatatagaccaatgaaaatatgttatgagctagtagtccactctggcatttaaaagaccaaaatagacagaaaagtgaagatcgaaacataattgaagtttggagagtttagtctctaaaaattcataggggattgatcgtaccaaatcttaaagttcatgtagtttagccgcaaattacccatcttgatttatctactaagttttgcgcctagttttagtgtagtagctgtaacttaaaattgtaatttattgattaaattggtctacttgtgtataattgagaatactaataatttatgagggttgtattgtattaaataataaataacactatgtttggaaaaaaatattttattgtattaattattatgaccataaattttaagacaatgcaagtcgtattatttaatacaaaacaaatgattcatatatttaaaaatggtcaacggtcaaccccgaccctgaccccagccccggacccataccttgaccatggacttggacccccatctcaaatttggacccagaccttgccccggccccagacctagactcaaacctcgagttgtactcgaacctgagcctggatctcggttatcgaaccccgaatcgagacccaaacccaaaccttgacctaattatagacccagaccctaaacgtggacttggatctcgatccttagtaaaactattatgtcactcacttttcataaatacgttttttttaatatattttatttacacacgatatatatttttttgcaattatataaatttatttaaaaaaaatacgattttgaagttttaaaaatacaaaatacgttagttatagaaaaataataaagtgtaaaaaaataactaaaaa

SEQ ID NO: 6941 - DNA, 745 bp, Cannabis sativa
tgcttgctaaaaaagcttggaaaatcttcactatccctaacttccttctggcgtacctcttaaaagcaaaatacttcaggcataacgactttcttcaagcaaatcttggacatgtcccatctttctcttcgagaagtctcctttggggtagggacctttttttaaaagggttaatttggaaggtggggaacggtaaatccattcaaatctcaagcctgaattggattcctggcttcaaatctgtcccattaaaaaataataatatccctcttgaggatactgcttccttttttatcaaaatcaaagtcatagggatatctcaagacttgactcttactttgacaaggacattgttgattctttccccaaaatcctaattactccttctattaaggaatgtctcattagggggcatagtccttcaggttctcttactgttaaatcttcatatcatttagccaattctaacaaccctaacctaagctcttcaaatcctattgttttccaccagtggtcgaaaactgtttggtccttaaaaatccctcccaaaataaaacacttcatttgcagagtctttcataaatttctccattctaacctcaacctttattccagaaaaattcttgacaaccctttttgctccctgtgttttagccggtttgactccaacttgcactgagtgttccagggctcaaaaatgttggaagagtaccagtttctcgaccttttacaataaaaataagca

SEQ ID NO: 6942 - DNA, 1195 bp, Cannabis sativa
taccgtattctatcgagataagttccttcgattgatgtccaataaattatatgattacgttgattgaatctaatctcagaattgcctaaaaagcttagggatgatataacttgccactctagatttatatcttccctgaaaacagttaccattaccccataatcacaagcatcctcgtacgacaagtctgcataagtactaggtttgatttcaacaacgtcataacctcctgtttttcttccaatttttacttcaagtctatactgagagcaatcattgtaacacctcaccacctctcctatcttattcccaattaacatgttcatggctttattcacaaaataccaaataataataattattattatgagacaatacagaagagatgtatattttctttgctatacgtatatatattaataatctatataaccaatatccttatcctaattggaaaaggaatgatacttttaatttgttaaatttgaaaaaaaaaaagataattatcttttaaatgtagattacctgttatatattagattttattttttaaaataaaaacaaatttaaatatgatattattccattaaaaaaaaaaacaccccatctttttgatcttcaagagcaatgctactcaacttagttgagtagttgaattggttataactttttttaaaatatatataaatatgcttaaattagacatataaattaatttccaattcctataaattttaaattttccaattgaatcttatcaattagattaaattaaatattttatgaacacaacatgtaaaactttaaaattcatagtttacaaaatatttagttcagtttttttctacaattctactacagttattttttctttttactaaacagttataacaattttttttcatggcacaattgtgccaaactgagcataaagatccttagctatggaaaagagaagcacatgatctatgacaattcttgaaaattaattttaaaataaaatattgtatctaattttataatttaaaatgtaaaaatccacgtaaaatataaatttctttaattgtattttcttcgtgtgaattggaatataatatttttgttacctagagcaatattaatatggaatatgtctacgttttttatcttataataaaaaaacataaacatatcaccaaagtggctgtagtttagt

SEQ ID NO: 6943 - DNA, 835 bp, Cannabis sativa
catgaaactgagcttgaggtggagttagacaccacaaatgagacaacaacaccaagtgatcctgaaagtagtgactctaaggatgagattgcacaactaggcctggaaagttgcaggtttgcaagggacatgtctagaagagaaattaaaccactagacatgtatggttatgcaaatttaattgcttctgcttttaacattgctattaaagttgtgatgtaggaacctacaagctatgttgaagcaatgaaaagaaatgaatggtgtaatgtttgatgaaataaagtcattgcacaagaataatacctagatagtaatcaaaaagccaaaatgtgccaaggtaataggttgtagatgtgtatataggtacaaggagggtataataggagttgaaccactaaggtacaaggcaaggttggtggctaaaggattttctcaaactgagagtgttgattacaatgagatttttttacctgttgtcaagcacatgtctatcagggtaattctttcattagttgatcaatataatttagaacttgagcaactagatgtcaagattgcaattttgtatggaagtctggaagaaagaattttgatgaagcaactagaaggcttcctagtacctggaagggaagatgaggtatgcttgcattgtataatttggtttatttattaaaaaaattggtttttgaccattcaagacctcatatggtgatttttgatttaaaacaacaatgagaagcatgttaatgagatacacaacagtgtagaaagcatcacacaaaaatttgattggcatgtgagcacgagcaagaagagtgaggcccatttccac

SEQ ID NO: 6944 - DNA, 766 bp, Cannabis sativa
agagagagagagagtattatatttcctcaacgtgcttcgagcgttatatgactctagaagctgatgatccattaatacaaaatatgaccttagtagattatcaaaagtgctcatggattaattatttactgtgataaattaatgataagtgggttgttgtaattttgtaagcatatatatatacctatgctatatgtatatgtactgtagttttcctatatataattgagtgacatttattaaaacgtattcatatgctcattgtgatagttgaaggccaagacaggatatatattaatagagctataaataatataaactttaagtatatggtagattggtagttgtaatcttattaagttataatcagtgacaactgaaaacacacatcgaatttagtaattctgcacggattctacctaacaagttgtaaataaattggctgacaatatttctatttcatgtcatacataaattacaatattaaatgtatcaatgtaaatattagcttattatagatgatatatacaaatagacacataatatagggatacagacattatagaagatgaaaaccaaactttatgcatgcatcatgcatggcttgttaattatataataggcttgttaattaataaatatatataaatgcatttaatgcatgataggacaagactagtattgcaaatataccagttaggtttttttacgtgcttaactacgactcgacacgacaaatacaaatgacatgacacgtaagcatgaa

SEQ ID NO: 6945 - DNA, 665 bp, Cannabis sativa
acccttttgtggatgttaactatgttggaacagtgatgttaaagtgtaagaagagtgagttcgttttacgtggcgagttggctcaccatgttgttgttgagtacgaagagttcaacacagacgtcaccccactctttctcgcttctcattctggcaacttcacccttgttaggaagttactggtaactataactgttataactatttactattgttattatcttcctcttcagttcattgtggtccttttttacttaacacccttgatttgctgaattagttaacgttcataaatgcagctcatgccatttttcttttacttttacatgtatatataatatcttatcagctcataatgtgcatgcacacactttaattgtattgtctgttattataaattttgtttttaacttttttataaattttattgtgaacatttttttaagagctgaatattattagagaaatgctggacaggttctaattaacaccaccaaccaccattgttataagttatcggtgtagttaagtactcagtcctacttattttaattaaataactagtataaaaaaatctatttggtgatggtattaggcaccacacatgtttaaggccatctccaacgctaacaaggtaacgtaaaaggattgcttgtatagaatta

SEQ ID NO: 6946 - DNA, 682 bp, Cannabis sativa
atttttatttatatcaatttactcaaatatgacaagtaacataaaaattagaataaataaatatttccatcaattaccattaaaattataaaatatttaatttatattaatttaatatgcataattaatgactaaaaatatacaaatttgagccttaatcacatacaatgattccttagttgtgtatcctaacagaatacttagccccgtagctttttcccgtgacacattcttcacaaaacttcagttttccatccagtttctctttcaagggaccttgtttatttaattcaatcatacctctctcactaacattacctaagttcatgtgccaaagcttggtgttgttaacacctactctccctgctgtagtgcgcacacttcatttagtagcaacaactgccttgctaatatttgtcttccctatagtacatagatacaattcttgagttcacccaatataaccaccatagatcctttaagatccttgagtgaactttctattttgatagggcaacctttagaggtcaattacccaactgagaacatacttctcttaagtacatggagatatctcacatcaattacagttcttggaataccattatacattttgataacaacttaccctatgccttcaaccctacaagctttgttatcaccaagtagaacaaaaccatca

SEQ ID NO: 6947 - DNA, 2232 bp, Cannabis sativa
cttgacatggatgacaatgtgccactgtcctgaatagcccggggtttggagaggagagagtggggcccctgctagtggatggctcgtggggggcacagttggagatgctactatctagatgaatccttttctaagaattatggtatctgatagttgattacaccatcttttatattcttatcttgcattgaataattgtcacttgtattctgactttgttactttttcgtttcagacctttacaggagccttcgagtggtccgagggccaagggggctcaaaccacccgtgctggagatgccacgaggtcatgtcctcctcctcctcttcctgtagggcatgcactgaccaagcatcctatgatggttgaccctcttgtgaggagggaacgatctttgggcaggggtgccctaaggcctagttagggagtaggctcagccatcaggcagagagccatggaggtgacccgtgggcatatggatagggcctatcctactatggatagcaagttgtaggtgcatggtgacagtgcgctagagatgctttcctccgttagtcttcaagagttggcctcgataagtgccacatttaactttgctaactttattctttgttatttcatgctaggcagccataggggttgtgtagtaagctagtcaaccatgagtagtgtcttggataagttggccggccttgggcgcatcgcgcaggggctggtcagccagtgttgtttcttgcactaatcatgattttgtttatgtttcaagcctttatgaagctgaccctattgcatggcaactctaggggtattcatgaagtgctctatgagagtagataaagatcttagaggctaaactcttcgaaaagggcaaggctttacgtgagatggaggctcttggcctttagaaccgaaacatgatttcttgtttggaggccatgctcggtaccaagaaccacaagaataccttacaaattactaatgtatccaagttggagactggcctcacgaggtgtgaggagaagctgagggcagccctcaattgcccgcaggccataagggacgaatatgtttgcttgtcttcataactcatttatgagttcaagctatgcaaccccaacactaatatttcctaaaagggggatgattctttcctagagagcacattggcccaagggagagaagtgtttgagagtaggtttgaagcggactagacaactatccagccagaaggattatccttgatgcattttgatgaggaaatggccagcccatctactatggaggttatcggcgaaagctttgaccaggtggcaggccaacctttagaggctatggttggcccacacatgtagttttcaacttattagtatttcaacattatggttttatcaatatagacattttatttcatgttcggtatggcctacatgccttttacttttgaataccacttatttttagcctcaggactttcatgtttgtactcttggcatattggcactctatttttgaacgttactactatttagccctgttgctttttattatcgatggtgtgaccgaccagaaggtctttaatcctagctatcttcttattgccttggcatgtaagattccagatttacatttctttatgccaagctaaagtatggctacaactaacttagaggttggtttagtagcttgtactaagtgttaaaatgtctctgcataagttctctatgctagtttaatgccccgtaaggtgtgggtgcctcccaagtgagcatgcagacttatgatctcttggtaacttgcaattcaccaagtttcatagaaattgtttgggaattttcttggggtgctaccaattgtatgcatgtggaactaaaatggaataactttaagaagttaatcttgttagcaagtggttttgacaaaataatttgaagataaatattattttttattcattaattagtctttgtagctgtgaaacttacataaattgaatctacaagcttacataatgaagttttgcttcaagatatcaaatagctaccccttcttgacttgcatagcagatgccaccgttgaagaatggtgggcggccaccccaaaaaggtcgtgggtactagctctttttaactttaattttaagttggtagaactactattgcaaagtagcgttctataagctggtcattggtaagtatttgcgaaggtactctctataatagtatgttggtagg

SEQ ID NO: 6948 - DNA, 996 bp, Cannabis sativa
atgtctctaacaacacatcaaaattttactattttgattcccttcttgtaatcagaattggtttgaaaagatctctttttgcataagaacctcaaataactcagctttagcgttcttaaaatttcaaagagaatcaacatctctaccattcttcacttggcctcacttttccaatacttgattcgagctgagaaattagtagaataatctttgccccaaacaagtaaattgctttcacaaacacgaattacaaaatgctcaaagtttggctccaacaaaataggacagtggttcgaagttggcaactctaaattaaagagcttaccataagaaaacaacaacaacaacaaccaagagttaatattagaggcaagagttctgtcatctaaactctagccaaccactagtgacactcaaaattattatgtccttttaaatattactattggagttggccttactatacttgtacgacatgtttgtttcagttagtaaactcaagcaccttttcttggaagaaatggatttttgtatggaggctactgggcctatgaatatctggcctttctcattattgggccaccttatgatccaaagcgatttttttaaaaaaagtggcaggttgtatttattgaaatatatacttgatacgttatgttcttaataatgctcattgggtacatgttatttgaaattgtacatatactttgatactctagattcaaattcaccaaattttattaataagactaaattgccataaattatatgtaattaattgtaatttccactagggagaaataggtaccttaaaaattttgcttagtgattaattaatttgggcttggttttaagaaagtcacccaataatgatttttgtaacattttaacattaaaaaacaaatgaaaacaacagtacttacatgtgagattttggagtatcagattatgaggttcttagtacctatttatctttctctgtttttctgccttgaa

SEQ ID NO: 6949 - DNA, 766 bp, Cannabis sativa
ataatttctctaatgttattatgagatgcatattcagttccgtcttacgtgataatttctctaatgttattatgaaatgcatattcagttttgccttagtgacttcgcctctaataatcaaattgttaatgtagtgtgaatttcaattaattatttttatttaaattgagtctcactaacaagtaattaatttactacatattaagtacttgtgtgtaatttatatgtacaaataatcattactcataaacaagtatatataatatcataacatccttaaatattattaaatgtaaaaagtaataagtaacaataaaaacttagagaatccataatatatagaataaataactcattattattaatcatttgttaacataagattcaaaccatataatatattattttgatactttgtatacatacatatatataatatgcatgttacataaagaaaatacatacatactttttaggtatttaaaactctaaaaattacatacataatcaaattatatatgtaaaactcattgccaaaggattgaaaaattgccctgaataaagagagaaaatagttatcatcataagtaaccataatccataaaacctggaggattagggcactgcatggtgatagtgttccatccaaaagctctgatattaagtaaaaaatttgagttcatcactctagaagaaaagaaatattgattatataatatgatttagtggatgagtatatagaattaagtgatcaaacaatatatat

SEQ ID NO: 6950 - DNA, 790 bp, Cannabis sativa
aagcaattatgaatccgacatttgggtataaaaagtgccaattgacaaccatttagataggcaaccgagctgataactcaggcatattggctaactggttggataccagttgatgacaccccactcatacgggacaaaaaggggggaaatatccacataacccatacaagtcgggatatgagccagagaaacatctgaccaactactcccatgaaatccaagttaacaaattgttcaatccgaggccacaaaattcaactatgggcaacacagtagacgagctggttctgtctaaccgtaatcttagaggagatggttagtataacttctgtccttatacatctatactattcacaatgcccatatcagaagacccctaaatgaatcagtcttcaatagattgggatccgtacatgatctaagggaagatttaaatcacataagagaaagtcgggacagacaagcaatccctcctaacatccaaccaatcaatgtagacaattacatgcctggtaaagctctaaggggtccacatgtgacataggttggtcaacaggtaggtcaagttgatctagtggtgcaagcccaaatagatcaacttaagagcctagtccaaagcctgaccggcctaaaattcaccgacctaaaacttgactggacaaggagatcaccctttccacctcacatcaatgcccttgaactattgcacaacttcaaaatgcccacatggaggatgtataaaggcaaagaagatcctctgtctcatatgaagtgttggaaagtattttac

SEQ ID NO: 6951 - DNA, 796 bp, Cannabis sativa
aggttagggcttaccttggagcaacatttctctaaccacttgaaaaccttgctgaaattccttgattaaagtctgaaaatggtggaagaagttcttctgtttccttggtttcttgctttgccaaagctagacggatagagccaagaggatggtatcgttttatttgcttttcgataataacaactcaatcattctcttttattcaggttagtgctatctaaaaaaacttagggattactaaaaatctaatttaatttcaatagtaaaatataacgcaaaaagaactttttaacccttaatccaataagaaataaaccaaccacttaggggtaaaatggttcaaaaccataaccccataaaatcacaatattcaaaatgtccaactatcttgtgccgataattttaagatactttatcgtgtttaagtaacactaatggctaaattatcacattccactattatcggacataaaacatgaaattcgtaaaaattcacatatatcaatataatgcatctagaattcaaatatatctcaatatttaagaaattatttccatatggcctatttcttatgataagccatattttctactaagaagtacacaatcataaattaataattaaatcattaattatctactattttccattatttaactatgtggtcattacattggaactcctaaatataatttactgtgccttcaactcgtagtgtcttcactaccatattagcataggtagtcgtatcatctgtagtaatcattagctcatgcgtcacttttgtcttcaatc

SEQ ID NO: 6952 - DNA, 1050 bp, Cannabis sativa
agagaaaatgttgtaaagcaaaggtcagagtgtgtgtagcattgatggagacgcgcgcgctattggagagtggcattaatctatatataaaagggtaaagcgcgaaagaggactggttcagaaaaatgagactatagcaacaaaaacggcatgccgttttaagtgaagttgctaaattcctccccggtagtagacatgatataaccgttgacaattttctctaactcctctaaatatttgtgtaatcttctcaactaggaagtttaggaattttaataagtattttttgttttaaaaaaaaaacaataaataaattcattaaaaatacccaagagatccacctaggacggcccccgggcaggttaattctcagtcaccaacggcagctgaacatactactcctaaaattggaatcccgtcaacttcaaatactcaaaggccgatcggggatgatactgaaatacaaaatttgaaagatgcattggggctaatgcaaggccaccataacaatcttcaccacgaccagcaagatatctaagcacctataaaccttgctcttgatgagcaaagatgtcagtttgaagaatggagagatcgagagatggagatcgtgagagcctagtaggtagctattgacaaccattctaggcaggtcattgtactgatctgaagagcttatcaaatcaccggcaagcagccagtgactgatgctagtattcccatagggtcacagaatgagtcagaagagtaattagctgattacacccccacaaactcatgtcagtggaccgtccaatccaaggccacgggttcaaactatgggccaagtggtagacggaaagattttactagaccgtccattgggagggaatggtcagcttaatactcatactcaaacggagatattaggccaacctcttgttcaaactggtcagacacaaaggcctcttgtcacatcagtatttgactgactgggtaccgtgcacgacctcaaaaatgttttaaatcgcagaagaggactggacggacaaaatgttcctcctaccgtcc

SEQ ID NO: 6953 - DNA, 1655 bp, Cannabis sativa
agtcagtatcgcaacaacaaaaataaactcgagcaaagaaagtgagtcccatgaaaaagagaaaagatgaatccgaagattcagctaaagaaaagaagaagcaaaagaaaaagaaaaaatatgtacaagtatacttcatttatacagagttgaatgaaactcatgaaaatatgtttctcgcaaacgaaaaatagggtcactttttgaagaccagaacccatgagaaatgtgaggagcaaacagtattaaaataaatattaccaattctatagagacatcagtcatactaccgaggagttttgacaactcaaggatgagattgaaagcttcatttcttgacgttacttccgaaaatatttgcgaaatagggaaaataaacaaaatccaaccaataacttgaaccaaaactagaacatccaacaaccaccagttgagggcaaggatattctagtaatttctagaggttctcatctttcaagaaccagtaataatacccaaaagaggtacataaaccacataaagaattagagctcaatatttgcgtgtgaattgcttaaacatgcaaaacctaaagaaactcctattattttcactaaggaagatgcatcacatgttcaattctcacatactgatccacttgtaataatagaatacctcgaaaaaaaagagcaaaacaagttttgttgataatagaagctcagtcaatatcatgtataaagaaacattgagaaaaatgggatagagagtgttaagttaaagccgtacatagaaaacttgtgtggattcataagaaatagtattgcgagcttgggaataatagaacttccattaacaatgggagagccaccattattaataacacaaatgcaacagtttttggtgatctaccttcattatataacatgacaatgggatcatctgatttgaccgggatgggggcaataagctctctaaagcatttatctttaaaattcccaactcggtctggaataggcgttgttaaaggggatcagttaacagtgagacaatgctacattttagagttgaagaaaagagcaatgactcatcaagaaatagtagttataactgaggagattgataacaagaaagttgaagatttagatacaaggattatttatgaacaatctgaacttaggcctatagaagaattggaagaggtgatgttagatctcagtgactctacacagattgttaagattggtaaagttggggaagaattaaaatagcaattgatttgctttttaaaggcaaactaggaacaattttcttggagccacttaaacatggttgggatttacttgaatgtcatatgtcatcacctcaatattgatccattttatcctccaaggcagcataagagacgcctccttgactcagaaaaacaaaattccttaaaggaagagattaatgaacttttaaccaaaaacttcataagagaggcattttaccctctatgggtttccaatcaagtgttggtcccaaagccaaacaacaattggagaacttgtatagacttctctgacttgaataaagcatgcccaaaagattattttcacttgcccttgattgcttagcttgtcgatgccacagctgggcacgaactcatgttgtttattgatgcatattctggatat

SEQ ID NO: 6954 - DNA, 2008 bp, Cannabis sativa
ccttgggggggggggggagcttaggtgtatgtcacccagggtatacctatgctcccaaagccacccgaggcgagggaagggggagcacaagtgtatgtcgcccagggcatatatgtgctcccggaacaacctagggggagcacaggtgtatgccacctagggtatagttgtgctcccggaaccacccgaagagagcacatgtgtatgttgcctaagttacacatgtgctcctagaacggtattgtgttgtcttatttccttcttgcgaatcatgtcttatctcttaagtaaaccctatgtgcaaggattgtatcgcggggtaacaaacatagttgagataattcttccttcgtaccctaattgtacgcttcacaagtgtatacatggggaaataatctttaagttgttgatacacttagtttaattgtcatacttgatttaattttagaaggtcccaaactgtggagagtacaagataacttgatatcaaaaatctacaccccaaaatctacccagaacaaagtcatgtagcccaggttatagagcaatatatctgggcacatcgggcttcactttttcttcctgcagagcgtatcatatcactttctgtgaaggcgacttggaattgacaaattgcaccccaaagaccacttgggaggcacctatatgttgcccaagtgtatacctagggcatgtcatactttatttctcattttcttgtggggtgtacctcacaatccttcttcatgataatatgtcttctctttaattacgtgtcacgttacttagccaaaatattaggtaacttaattttttaaaaacatatgtattatttattaatttataatatattttgtttgagaaaatatattttaaaacttacaataatacttttacatatgcacacattaatacttaaatctgcttttaacggtaataacatacaattttcacaaaagagcattatcatataaaaaaaagtgttccttattaatgtcttaaataatttttaatattatataataaataaagtatttttttttttttttaaaaaaaaagtaaaaagagtaacttcattgatagaaaaatgatcatacaactctataaaaaaagtgggcaatacacctttcaatagttgaaaagataacttggaataatcttcctatagacaaagttttgccaagtaatgagttatcttattctttttatggggaacaacataacatgaaccaacatgataaagtcgcataaaaagttagatatccccaacaataatatcgtctaaacttctatcattactatcaaaatgacctcgaattgcaacaatgacattaagacaatcactttcaaaagtctatattaatatgttccttgtaacaccattggagagcttctaaatttgccaagagttcagttgtaaagggtgaatgataagcttgaattcttgctatgtagaatagaactaaacctcctttctcattttgaattatttcactgaatcccaggaagccacgactggaacagatagccgcatcgatgttcatcttctagagaccagatgtggaggggcgccacacattcaaatcagactaaagagaggtacaaatagattgttcatcattagtctaaggttgtagaaatgaaagccgccaaggtgataatcgttcccatgaagttgtcaatttttagattagcatttgctagattcttaaaattcataaagtagcaaaccagctgccacactcacgtggttgggcctccaacactcctcaccatgtcataccttattatgttcaaaccaaacaagccataacactattacaatagcctctaactcttgaataaggaccgatgagaataaataatctagcacatcatacatgcaccccttacaccaacctttaagtttaccacaccaagaagtagtctcccctccaaaataatatatattaaggacaataaaaaagtgcatggaagatagtctcagattgcttaccataattaaaaa

SEQ ID NO: 6955 - DNA, 1322 bp, Cannabis sativa
ggtcggacctgagtacgtggtctgaatatgacgagtgagtaaataaaaagaaaaaaaatagtataaatcataaatagttattgagatcaaagaaattcaaattaatattaagtactaattatttgatatatttcgaggtacgtacttttaattaattaaaattatttaatcagtcttatatatagagttccagttcctaattactaccgctttgctatggaaattatacatatactagttagtacttattatgtagggcatatatatagtgtttcattacatataaaatatttcaataatatataatgatggataggccttattaattgatcaattactcatcactaagcctgtgtgtggttgtgtggatctgatcttatcttatcaagcattatatgaaatgaaataatttaatgactattatatcttccttttcctttcgctatataagggacaacgcttgccgtttccaaaaaagaaaaaacaatgcttgtttatttctgagtggactgtgggacttccatctacttaaatttacatacataatacatatgtatgtgacattgacatatgaattattgatcattttctgtcctttttctctctccccccaaaaaccatatacattctctcttaattactttttattttctctctgcttttttgtaagttgtaacattcaaaatgttaagccaattcccctaaattattattattattattattattattattattaaagattcttcttctctttgaaacagtaaacatatataaattgtgaacttctaatatatgttcaacaaaattactttttattttttgtaaggggcatcaattaatattaacttatttccacgtgatccacgaaagtacccttacgtagtgttgtatgtgtatcatcttatattttttttagctattataaacaaaataagattagttgtatgtgcttatcaatattagatgatgtgcgctagcttcaataatatatttatggtaataattgagaataatattgtacatataattgtaaacaaataggacaggagtggaatatgcattattttcaaaaggtaggatatttcatagttgctagggcctcgcctaataatcattttaagaatatataattactaattttagtttttgaattttcgacattactaatcttaccttttaatttagtttttaaatttttttttttttttatgaatttttcctataaaaacactctttaaaagaagaaaaaaaaaattatatttgtgcacatagtaagaagccataaaatctataatagtgaagttttgatagtaacaaga

SEQ ID NO: 6956 - DNA, 655 bp, Cannabis sativa
atgatatagggcactgcccctgcccccccccccctttcaagagcaatgcaagcgaaagacatcataccctaatcacagtgtgaagtcacacgatgaggggcgagaggagtactaatcgcaggctccatgcaagctgccaggaaaacctgagttctaatcaccatctttggagaaaggatgaataaaagaatgaaggagctagaaccagagatgcaagatctacgttgaatgattgctactacaccatagggaaattcggaggatgattggttcactaaagaatcatctttctcaagggaaattcaaattcaaattcatctacccaatttcaaggagccacgcatgactccatttgatggtagaaatgatctaaagtgtcatcaaggagcttttaacaacctaataaagattaataggtatcatgcaaggcaaggtgccaatgctttgtggtcacacttaagggagctgcatataagtgtttcaaaaggatcggactaggaacaattacatcctaaaataaatttttagaggaatgccttcaacagtaccagtcaacaagtgattacattatgcatataacaagtatcaccaatgtgaagcaaggggaaaaggaatgcttacgaagctacatccagggcttcaatgtgaaagtcac

SEQ ID NO: 6957 - DNA, 1005 bp, Cannabis sativa
aagggatcatttgtataatacttatttttgtggtggtgggtttggaataaaaaaatattatgtttgaatggtttttttttcttttctgaatatgtttgaatggaattgattagctgtatttactttttgtttgggtcctgaatcatgattaatgttcacttttatatatattttttaattattaaaaaaaatgctagggtttacacatatatatttcccccttttttattgccataatattaaagaaaatattttattttcctatttatttgttcccatccattttttaaatatatgttaaatggttttgggttttgtgttgtttacctctagaaaggaataaattatccaaaaaatcacaaaattataaataataaaaaataaagcatcttgtgatgtttggattggtacccaatagactttatcaactactttccatcaaatttatactttaattcactttttttttaataatatatatttgccaatgcatgcttgcatttttatttaatttcattcattacaatctaaaaaagagaaaaacaaaatacctaatgttatttatttttttttcttggacaattgttaattaattaatatgaaatgaaaaaaaaaaacaatatctaatttccactcataataattgctatatgccccacatttattaaacaaaattgaattctcatttcttagttgtttcttttcatttcccatttcattttttattttttttataaaattattttgggaagaagataagcatttattttgggactaattagtgatataataataataataataataataataataataataatttatcctctagggttttgagcttagcttgagatgtgttgtctgtctattttgttcctatatgttatgttagggatagagtttacatttgagtttgactttatattattactatattgagttatgtatacttgtatagggttactatatgtattttgggtcacaaattaagttaccatatga

SEQ ID NO: 6958 - DNA, 604 bp, Cannabis sativa
accttattctaggtctattgttggcgccacattggaggttatccaaaagagaagagctgagaagccagaagtccgtgatgctgcaagggaagctgcccttcggtatgtgttctgatcttttcagctaattttttactttctgatattcccattttgtacatattataattgcaagttcatgttcacctaataataaatataaaagcaaggattgaatctctcttttagtagttccattttttttaagaacttgaagtttgtgatttttatcaagttcttgccaattaaatcaatccagtcagccatatttttcatctctaaatcttatctaatataacaattataaactattaatatatttctctagtgcattattcttatcacacaaggtcctatttggctgtgtaaatagaatggatttgatcaaaagatttaagtttcattctattcttttatttggttgttatctaacacgttagcatagtcattctgaattattattctttctaaaaatgagatataagactattttcagcaaggagtgcttactgaatcatttcatatcttatgccttgtgctatttagtgagatcaaggaaagaatc

SEQ ID NO: 6959 - DNA, 1872 bp, Cannabis sativa
caacttcacatatatcagcacctatatctttccacattaccttgaaaaaactagagccatagccatctggtcctaggggtttattttcaagaatgctgaaaaaagctttcttgattcttttctagtgaaaggctttagcatctctagctactgctccagatctaggcgcttacctctttctatacaatacttattaaacttcaaactggctttgctcttactgcccatgtagccatgcaaatgttccatgaaatgatcaataacctaggggaagtcatttatcacaacaccatttgcagagacaaaagtagctatacagttttcaaccttccctttttttcatgctagcatgaaagaacgaggtattctcatcacctttttgaagctaatctattttgctacgctgctttaggaagctaaggtacattttttcctggatacaaaatgcttcagtagctgatttctctttggcttgaatctcaagattccttgggttttcttgggcttggattttggcgttgaaatggtaattcttagcctcccaataaaatcttaccacatctcttgtggactctctgttgaatgtcttaagcttatgttttagacacataagcttaaggtaaatcccctttaaactagaagcttgtaatggctgattccaactcgttctaactatgtttttgaactcatcatattgagtccaaaaattatggaaacgaaatggtttaagcccgatttgcttcgtaattgtcatagtaaccacacaagaatagtggttcgagatggtttcccagttgagtcgagccatggtattcgggaacaaatcattctaatctttgttagtcagagcatgctcaattcttgaataattctaagaagaccatcttggttgtttgttcaagtgtagttcgagccatttttcttgagggcctccacttgagcttgaacttgccaagttgaagaatcgacaatgccaatcaagctaatttggttaccccgtattcaatcatcaaggtaaaatcctgcattgaaatctcctaatatgagccacaacttaacaggaaatctaagttttaggagatctgtccacaaatctttcctctcctctatagtgttaaaaccataaatgaaagtgacacaaaaagcttccttttggttagatcacttcacatggcaatgaacaaattgaggcccttcaactatcacaattactctagcgaaattcttcctctaaagaaccaacagtctaccctcaatattactactagtaaagtaactccagttcttgaatttattttccatcatctcaacaatcttattacccttaagcttagtttcaagtaaagctccagctcccattttattcatacatcaaaaatttaaaacaacatcttgttttctaaccttattgatacctctaacgttccaactagtaatattgcaattatccatagtcaagtatttgtgttacctgttcccccttcttcaactgcatttatctcctttctcatatccccttctatctcttacagcacaccgaaagaattcccagagttgttcgaatcattatcctcttctgacctccgtttcccaactgaactttgttttgccattgctggtttcttgggaataatccattctgtatcttgaccctttgtgggcttcttttcaccatttggatcaccaatcttatttctcgtatctgtcttcgttacagcagcttgaactggagctttttgagtgttatctcttactttttgtcccaaaggtttgcttttctcattccctccttttcgacaatcagccatgatatgtccatatcttgagcaacttttgcatttcactgccagccattcatagtcgatactctgc

SEQ ID NO: 6960 - DNA, 565 bp, Cannabis sativa
tttgttccaccaaattgggaacaagtttatcataatatcaagttataattaccttatatgaatgaggagagcaagttttgtttcaataatgattggctagccagcctatatatttatatataggccagttctaatcttcctaaatattatgattacttctttgaagcctttaattattttcatggcagtagtaaaagtggacgaataaaacttctttatcgaaaaaaaaaaaaaacaagctctcttttaattttatgttatgatacgagtagtatagtactccaaagcataattaattaactttgccaaaaaaaaagcataattaattaagctaatatatggctaggcggtttaaaaattttatggggcttgcggcttctcttaaaattttattaataaatcttttatttaaaaaataaaataaaatttaaatgaatttttaaacaattttttaattaagttccaactaattgaccttcattaagaaaaaaaaaaagtatggctattttgttaaacgcattactattgagcactatttgtgtacgattactaagaaggatgtaag

SEQ ID NO: 6961 - DNA, 875 bp, Cannabis sativa
agtaaactagtatgcatagttaatatatattctaaacattttacatatagtaattaggtgatcaaatcaaaatgttgtttttttattttagggcatacgtggattttataagagtattgttaattattaatgggttagggtgtctattactctgaggtgacgtactataattaattggtattttttttataatttttattaaatatttaaaataagtgagatccataaatattaaattacaccaataacaatattacatttcacagcgctagacactttagcatttctctaagagtattgttggacaccacccaacattcacaggtataacattgtacaattggttagcgatattttctaagaattattatcttaagttatatgtgatacgatatttaattacaccaaaaaaataatataacacgaggtggagattaggcatgcaccaataatactctttaattaatttattaatcatctttagtaatagattgttaagctcgttaaatatatgatatataattgttttaatttgttagacaagtatattatcaaatatttcgagatcaaaaattattttaataacaattcatacttcattttttttgaacaataattaatataaaaattcatactttagtacactatatatatatatcgatcatataagaatttttgactatatattgtctacacaaatattatttacatatatataatgcaaaattagaaaaagaatttgctggaaactgaaatgtattatatggttaatgtttgtatatacacaatatggttgctaattgatgaatattatttatttatttatttatttatttttattatgaaatataatattaaagtggagaaggacatga

SEQ ID NO: 6962 - DNA, 691 bp, Cannabis sativa
ttttaaaaaaaataatataaaaatcattacaaaaaaatattaagtaaaattgtaatatacgatagaattaaattttcttatccattatttcaatctcttttgggtcacaaaggcttgttgaagtgtgttagaaatattatgtatgttaattagtcgtactgtttgttacgataattgttgtgtatttgtaactaattatggccctaactaactgatatcctctttatatttattgactatatatagtcaataactctattcactcaacaataaggttgccctttgttcattcaatttttctttcattactctttcttctgtcttttcctttttgctctgcttcaccttctttttctctgattcaacaatggccaagaggtttaacatgatatcagagtcatttcatcgattaacaacaaacatggcaaacgttagaacatgcaccgatgtaaatcagaacagctccaacatcagtaggccatcaaaccagcaaaatggagcctcaaacctcaatcgatcgagaaacaacttagatgagctcaatctagtatatttcaatcataacatgtggattaggctaaatgatcacaattttttttttttttttgtagaaacaacaggttcttggtgcaattcgaggagacaggttacagaaagtcatccaagatcgagatccaccacctcagttctt

SEQ ID NO: 6963 - DNA, 681 bp, Cannabis sativa
ctcgactcaactctctctactcacttgcttttttgttctctcaagccaaacgcattaaacaaaaaagtgagttcctttttcttcttttcattatgatctttccaatattttgataacccatttttgggggttttcttttcaactctttttctgggaattttccttttgcactattggatcgtttgtctgctttcaagttttgtactttcgtaatgggattttggctttctttattgggatcttggatctggttttgttccatttattcagatttgaaaaattggtgaattcttggttatgggtaattcttgtgtataggtttgggatttcttctttaattgtatgaaataggtttcttcgatttttgttcttctgtttgtgtttataatatctgattttttcttcatgaattgcaatttaagctttctgggtatgtggaagtttgaatcttttgaagttttgcttcaaaatttaaatggtggaattttttagttaacatggtagcttgtaacaaagcttcaaaattttcttctttaacattgttataacaatctggttggttcatatgatatatatgaagatagttcaatcttttaggacccaaatttactctctttaacattgttctaataatatgcttggtttatatctttaacattgatactttacttgaaaataatt

SEQ ID NO: 6964 - DNA, 3521 bp, Cannabis sativa
tacttgagtattacttgttaaaatagcatgtatatttgcgtgttggatctatcacaatatctacatcagcaagagattgatgacgatgaacaccgatacccactcatagagaagctgacctacaacttgctcttgatatctaaaaagttgaggtcatactttcaagtacaccagataaaggtgtacactgaccaaccgttgcggtaggttttacaaaaacctgaagcatctagccgactactcaagtgggccattgaacttggccaatttgataccacatatcaatcaagaatggccataaagggtcaagcccttgcatacttcgtggctgaatctacagacacatttcttaaaatctctcaagttttaggagaaaagcaggagccagagaagaagcgagagcaagagtaatagcaaaaacctaaagaattaacatggaaactacatgttgatggaagctgtactgacaagttgtccggtgcaggcatttccctcatagcacctgggggcaacaggattgctaatactgcaagaggattgctaatacatatcctcgagtgctgaattgggagagtacaaacaagaagaaaaccggagattattctgaacttgtcttagaggtgtttaataatcttgaggtagtattttatttttaactgattttttttccttattaatttataattggtttcttacctttttttttattatttttgtcaggccattgtgaatgatttctatcctgttggtcgtgagctcaaaaaatatgcactgcaaaaccttaagtttgaaccaatttatttgccaaagaaacctccaggatttaatggcaaggtaaattttctctgtgttttgtttgtgtgtgtgttttttatgttattgtttattttttgtttttttttcagttggtttttcataattttttaatgttgttattttattttttttttgttttcagtttgctaaggttgagtctactttggcttgagagatgagtttaggattaaacttgatgaacttattgatcttttgaagagtaagggtgggtcgtctgtgcccaataatgtagatgataaggttgaggattcttgttctgagaatatggatgtcaatggcaatgatggtgacttaccaaatccattatcctcagaggtatttgctttattttttattttgttcaattttataattggttattttctttgtgcattgtttgttttaggtgttattatttttaaacattgcattttatgagattttgtctttatatattttttttatgtttcataacctaatatattttagtatatgcatggtttttttaagttttttttttctttttcaagaaactggttttgttaatgattttttgtttttttaggtatttttgaaaaattgatgtccctgattttgatgaggagtctggtagattgcagttgtctattgtacgggaagataatgtgatttatttgctttttgttattagttatgcgtttattataacattttttaatgacggtggcgaagcttgacttgtacttcgttgacttttagtctcttggatattggatatgcacttggactattggagtggaatgcaactaaattactttggtcacatattaacatttttctaattggttaatttacatctaaatctaaaaatattaaaacattttatcttcactcttctttttggtttttttaattcgttagggcttctacaataagcattagtggttaactcatctgacgtagataagttggatgcagaattgcgtgcttacgaacagagtttgcctgcaaggaggccaccctccaatttgcaggcttgagtaagaggaaaggaattaagtatgatgcttctaacattgctgcttcttcaagttcaaatattaaaacaattgatagtcgtactattcaatgttcaaattgtgacgagaaggtaacaattgttaattatatgatttttaattagtttggtctattagttataaaattttgagaggtttacctatgaagaagtgaacttttatttaagtttcagttcattttcagcttatcattaccatgaattttgttattttgttaattggtacataattaagtatttgtaataagttttttctttatggagtgggagagcttctttagcatccatactctgtacctgcaacataggattttttaggagcttattaaatggttttgcttctaatctttttttactcttgaaaacataattaaacgtgatcgaataaatgaattgttatctcattaattttcattcatgctttaattcctactcatccttttgaatcagtgatatttttctattaagaaggttgggaagtatacataaccttttcactttgtgagccaagaaatattgatcaaatgaatcatggtgcacatgtatatgttttttcttccaggagattgtcttatttatttgttagcattcatcatatactaataagttttatgtgtgattatgtgattaggtttttgtatgaaatatagagtactttggttttttattgtatgtgtttagagcttagatttgttgcttctgaaaattctaagcttcatatctcctttgtgttttatgttgcaagttatggtgaatgtgtatataaaattctaatagattatattttcgataccgataccatatggatatggtaagtattaatattaaggagttgttaaatttatgcagctcaataatttagttggttgtagtgttgtttctactgtccaacacatatggtattggacactttgttctattattattaaaacatatatattacactctcttgattaccaattcactataactgagaaatattgttcttttctaataggactatacttttcattgcggctgccatttctacttttaattgtaagtacgacacaaatgcacgaacaattagtacagatgctatgattaatatattctaattaatttcttccttatttaaaacccaacttatggtaatataaattcattgatgatgatcaatatggtaatttcacaaattgcagataatattaatggtgagaactaagcttcaagtaatcattacaaagatgaaattaagcacagctgatgaatactatgttctctaaggatgtctaatgtcgaaaacgactactataaacctgaaggcacaccatctcccagcaatggaccagctgcagcaagtgaaacacaagagaataactataaagttgagaaggatataagtgaggaagtggttcaggagccaagctcctcctcacaacaaaatgaggtaaagattttcttatctcacttttcatttaggaagtgaaatagataacactactattttactcttataatatttttttcctttttttctttcttttcttttggtcatgtacattttgttgaagatgatgatatgtataaggttgaacttggcaaaaattgcttaatacatactggtaaaaatatatttaatactaatacatgttgtattgatagatta

SEQ ID NO: 6965 - DNA, 710 bp, Cannabis sativa
cgtcagagatactcgttgatcgcaacccaaatgcccaagatgaaccaccgtcgattgggaaggcaataattttgaaaccagacaatcgtggtggtggtgctagtttgggattatttctagcagtgagaagaagaagaagacgaagaagaaaagaaagaaaaagaaaaaagaaattattttaaaataatttatttattaaaatgaaaataataatttagatcaataatatttcaacacgtagtaattttaaaaaagtaaacagctcagttaaaattaggactaatggacaaataaaaaatatgacattaaggactattaccgctacttttggagaaaaagacaaaagttttgttagttttaacactttagttagtggaaaatacttattagtggaaaaagacaaatacttattttttaaaaatttacagtttgggttgctccaatgatttttatgtggactgctatgtaaatttttgttgcgatttaaatttttttattaattgttatgtgagtttctatccttaaaaaaaaacctacttttaaaatataaaaattaaaaaaatcctaaattttaataaagtcaattttaaaaaataaaaattaaaaaaaaaaaaaaactataagaaaagaacatactaatataaataaataaaaaaaaaaaattcaacaaacataatattgtattcttctctttatttagagatttcagt

SEQ ID NO: 6966 - DNA, 642 bp, Cannabis sativa
tgaagaatttacataaaaagccaatttctgtctataagcttgttaagaatttcaataattaagttttcttttaaaatttattcattttttcttcatttattattggtattattggaaactttcgatattaaacaatataaattatgaaggaattagcttaatcatgtgccttgtttggtgacaaataattgtagtctttgattctagtccatttcaaatcatgaagtggttccatccagcccagggaattgtaggatcaaccttagtaggagtttttgcctatagtgtcttaattaatctatatctagctagtaacttagcaattgtggttgaatggatcagttcaattttacatatttattattcatttatataatagcatcaaaaaatattaatctcaaattttggtaaatatataattagtttaataatatggttgaagagaagttatttctttgcataatgggcttgaaatgtttgctgaatttaaatgtttgttgtaagtgtcgggaatgatgacaagtcaaatgctaagcacgcaaaggcctttgataaggggaaaaatatagttacggctgaggtaaatttaacatgtatatgcaaatgtgtgctcttacatcatcattattatcgtattgtatt

SEQ ID NO: 6967 - DNA, 661 bp, Cannabis sativa
gacataaaaataaacttaatcacaacaaaaagtaatttttatgactaatatatttagtagcagactttttagtcataatgcaagaataataatttataattagtcataattttttcacttttaattacaaatttgattgagcccaaaagtaaaaaaatttatggtgtatttataacaaaaatatatgatgatgatatatctaaatattttatattggatcatcacaaacaaacaaacaaaccagagcaacaatcaaattcaaaacgtttttcttactttttctaagttttttccataactgaatcaaatgaacaaagataatgaagttatatattaatggtccaaataattgatgtagtggtcctctcaggcttcacgattttaaaaaacgtgtttaattataagtagtttccacctacctataaaggaattttgttatccatatacaatactactcaaaaattataaaatccactctctaaaagaattatatctatacacgttatttgtttagacattaattttttagccttgtttaaaataggattcaatcaatctatacaaccaactgtttgaacctattctaaaaaaatatattatcttatcatttctaatatttcaagcaaaataaaatcaattataaaagtgcacgataaattaa

SEQ ID NO: 6968 - DNA, 516 bp, Cannabis sativa
cactttccttcttaagagatattaatttaaattatacttagacatttccttggccatttacatatacatattacatagaaggaagggaggcataagtcaaagttctagggggtcaaaggattaaaaaagaaatatagggaaagtgtatagtaaaagcttgcagctgcaatcgacacaccaagagcagtaaaagtcaccagccacaatcttccaaggcaaagaaaaaactctccaggtcctaatcctacacaaactaaacacagagaaaaatagggaaaacaatactaaaagtaaataaaacagatctaaccaaaagattataaactattaaaaatttagaattaagataatgatctaaccaaactagaagaattttattttttctttctaaacaaacgagttgaaaaaattgctaaatcatcaaagtaaatgcattccttaaatttctacaggaggaaataaatctgcaaaaccctaataatttatttgattatgtttgatcaattcctttaatgg

SEQ ID NO: 6969 - DNA, 1242 bp, Cannabis sativa
aattgcaaggataaggcgtgcatgcaaagtgtgtacaaccacgccgtctgtaagttttgatgccaaggaggtacgagttgtggaggtaccacatctagaagtgctaacatctcaatcaatatagcacacaaccactaccccaacaattcaagaccacctagcacaagacaagggtataaggcgcaagaccaccacctacaccttgcaacttgtagctcatggatgtcacattgtatatgaggacaacaagtatacctctgaacattacagcctataactaccccattctcaaatgtgagttggaaaatcattgtaacacttcatgccaagaaaatacagttgtttctctccctccatttttgctctgaacatttatttttgtttttgaattttcacattttcatcttcattctgggtctagtgtttgagtttcaattttttgaccttaagttacttcttgagttttcactgtaaacagcttgacgccatctctggaatcgataagctcaagctaagttgcttcctcacatacaatcatcataaaatgtctagacgctcccatcatcttcaaggtatggagattcacctagataacactcagctaatcgcctcaaggtgagaccccaagcacatgtctctagagaagaaggtgctaatgattgaaggactcaagtgagagaagaacacgaccatcttaagaatgtcccagtagacatacaacgtgatagagcgaccacttcctcacattgagggtgaaggtgagtcaaggtagagactcccattgccaattagacaccccttgctgctagcatcaagatcctaaaatctcacacgactgacccaaaaaagaggaaagggttgacttagtgagttcatgattatgaactcatgttcaccatgaggagatgaacaagctaaagatggacaactaatggttagaggaaaccattgccaacatgcaaagggttcttgatgaagtcttaaaaggccgctttgatgcacctttagaccaacgaagagagaagaagaccaaagagaactacgaagatgagaaagagatgaaggatttcaaaatattcaacaaaaaacaccctaaatcctcatcgtcgaagtttcaatcctgaaaggatcaagaatcctcgtcatatcctaaaaagattgaatctaagttggtccacaatgatctatgggaaaactcaacaaaaaggctaatgccagtaatcaagcatcgtcactaattag

SEQ ID NO: 6970 - DNA, 972 bp, Cannabis sativa
ttccaacagaagcatcatcgatgcacttcaatacctcagtcacacgaggcctgacatctctttcgctgtaaacaagcttagtcagtttttgaaggatccaacaacatactcgagtgccacaaaaagggtgcttagatacctcaaaggcataatgcatcacaggctcacttaacaccaagtgacaatttgactcttcaaggcttctcaaatgctgtttgggcatgttgtcctaatgatcgcagatccgtagctggctattgtgtatttttcggatagtctcttatttcttggttatccaagaaacaaatggtgcttgctagatcgagtaccgagtctgaatatagatctctttcacatttaccagttgagatagcttagcttcaaaagttgttagaggaaatgaagtttaagtctccagctaccccaattatatggtgtgacaatatgagcactagtgcttttgcatccaattcagtttatcaccctcgcacaaagcacatagaacttgatgtgcatttcataaggataaggtgttacacttgatattcgatacattcatttgcacgaaaaaaattacagatttcttgacacagggactttcgcatggcagatttaattttttgatcgacaaagttgaactaatggaatcaccctatcacttgaggggtggagttaagaaatgaagaaagtatactaagagtcttttagtcatttaccaaatattccaagatatttggaaacaactttattcctttatttatgtgccatgttgaaataattgtagtcagtcatttttcttaatttattgtaacaaactctacacgtgttgccattttaatgacccttgtgattttttgtatcctagcctttaggctatataagctaatgcatttacctcactcattttgagctgagaaaacaatatatgtcttatactaatttttgaactcgttatagttacaatattatttt

SEQ ID NO: 6971 - DNA, 594 bp, Cannabis sativa
cttgtgagtagatctaagtacttggtaaaataaaatccaacataattttgttttgtggagaatcaaaatgaaggaacttcttgttcatcaagggatctttgaagctttgaatgcagatgacttgaacaacatcaaagatgagaaaaccaagaaggacacagagagcaaagcacatagtgcaatcatcttgagccttggagatgaagttttgagagaagtctcacatgaggagactgctgctgcactttggaataaacgtgccttaatctacttcaagaaatctttagcaaacaatatgtatctcaagaaaaatatatacactctcagaatggaagagacaaaggagcatagaaagtacctggatgaggtcaatagaattatccttaaaatgtctaatattggtgtgaagagtgattaggaagatcaaggtaaaattcttctcaattctcttcctaaatcctatgaacattttattgatactatattatatgggaaggatactctaaccctggcagaagtgaaagctgctttcaatttcaaggagattcaaaagaaatcagaaaaaagggagaaactagtggagaaggaatcttg

SEQ ID NO: 6972 - DNA, 747 bp, Cannabis sativa
tgctggtatgttgattgaaactacttccaaaaatttgacataaaagtaaaagttttgtcatgtaaatttctttttttttttttttttaagtaattttacttttttggcaaagtttataaaaatgtggttttttcttgaaaaaaaaaaattattttaggagaaaaattcaaaaaaaatacaagaaaaccggttcaagataattagttaccttaaggcaacaagaagagtaaccagttacctcttcaagtaaccaattaccattttaagtaacaagttaccgtatactattttttttttcgagcattactatagtggtgtccagcaccttctataggtgactctctacgattagttagcgatattgcttaaaaattattttttaaaattatataagaccccatacttaattacactaattgcagtatgacaccgaagagagtgttaaacaccaataatgtcttttagcaattctcttttttttctcatatattttttaatttttccttataaatgagtttttgaaataaagaaagttatattttataaaaatcataaaatgtgtaattgccttttttcttttttcaatatttttgttttaagtactaataatgcaagtgtggcaggggagatgtggttgagattgatacttgggtggatgcagaaggcaaaaatggaatgcgtagggattggattattagagactaccatacaagagagatcataactagagcaacaaggtactttttt

SEQ ID NO: 6973 - DNA, 554 bp, Cannabis sativa
tcactatatcaatgttaaaactttgaaacaaattacacagctgaaactatatcgatggtgtctttgttagaaagtcccacattgataatgtgtatgaacttaataccatacataacaagcatagactactcctctcattgtcaattgccttttgagatggaacccatgccatgcaccttttttctatattactaagtaatgaacttaatggctatatctaggttactgcaaaacacatttttatatagtactttcaataccaaacttagtactatataaagaaaaatgttatcccaatcacaatgtaatactataaaataccatacctcataataacacatcctgagatagattcaattgagtgaatgaccaacttctcgttcttatatatctgtttattataagttgattgttgctcagtgaaaaagttccattcagagatcatgatgtttaggggagaatgtattatttatatgctgtttgtttcaaaattgttgtagctaagtactaagaactgttaatttgtgccgagttggttctgtggtggcatgtta

SEQ ID NO: 6974 - DNA, 1252 bp, Cannabis sativa
aagctgctgaagttagagtcttctactaaaataaagaagtcgcacaaggaagaatattatgcatagccctccaaccaaaaattttgactttgggaagaagctttagattctaaaaggatttccacgtctctagagtaacagaactggatgaatgattctcttctgctagggagcatcctagaaaataacatgatttcacagtatagtcaccacatgtaaggtgccaaatcgactcatcctttgcattataaatagagagaagaagggaaaggatgtattcgatatcaggggagaaattctgctgcaacttatttaaatcctactcaccatcagtagacatatattcacaaactctgtttgaagctgctccagagtatcgcaaaggaaggaagacagtaggaatcagaggatctgatccacaaacaatattagagccatcacaaaatttccaccttaagccttatatcaataaatcacggccccaacatattccttgtcaagttaaaggagacataccaccactttcagcctcaaaaaaattattggtagagaaataccttccctttaaaagcctgctcaaaagagattgtgaattctgaaaaatacaccagacttgtttagctaacagagcttgattaaagtgaatgaaatcttgaaaactcatgccaccttccatttttttaatgtattttttttcttgtcattagaagtaccccaccaaatttttccatccatttgactcaatatatttacaaaagttgattggaaatttgaaacaactcattgcataagtaggaatagattgtacaactgctttcaataaatctttatttcctccaattgaaaattttttatcagtccaagcatgcataagcttcaaaattttttctttaatattattaaataattacttcttatcacgctctaaaaaagcgagaagactaagatatgttttatagcactcataaattggcatttccaaaatctgttgaaaagaacgtttcacaacctcaaatgtatttggtgagaaagccataactaatttatttgtgttgagtgttgaccagaggctcaatgataagtatctaatgcacgctttaagagactatcgtctgcaaagaacaaataagagattataggagatcgacgagaaataaccatccctttgaatcttctaatatttttctcatattgtaataatgttgagaacccttctaagaaaatgaggaataaataaggagaaagtgggtct

SEQ ID NO: 6975 - DNA, 633 bp, Cannabis sativa
ttcgagaggcaaaaattctaattaccctttttattttttaaaaataaaattttaaaaacacaattttttttttcatttttgtgattaaaaaattaaaaaataaaaatgttactaaacgccacctaattatttttacatttgtcaaaaataatttagctaagtataaataacgtattcctttgtttacgtatgtttcaatatcttatatcatgcatttctgtctttcatcttttctctctcattttttaacttttaaataaaaaattcgtcgtatcattacttggttaaccctaaaaaaatatcattatgatttactatttaatatgaacatttcaacatgtgagaattttttttttgctattttcaaaaaagaaactatttggttactaatatagtaattagttactattttataatttttttaaatgaacttcgttgctcatctcctcggaggagctaagctaagttgagaggtaaaacctagattgcttttcttcttcaaggcttcaatgtctctgatcgaattgctcgcctcgtcggtctgattggttcatcgaaaaatagcttgtaaatcttaaagagttttgagatgatagacgatatttattatatttttgggtctagatctttcca

SEQ ID NO: 6976 - DNA, 666 bp, Cannabis sativa
gaccaattttggattgagttggtattttggttgctgaagtggtaggtttctcttgtgtaccttgtgaagattcagcatgaaatttgttattagaattggtgtcatcaggtttgtccaagatatgtggaatgtctgctgctttatcatcattagaagcaggcattgtattgctttttgctggtgaatgattgtcaccaggattaatttctgatgtgggaatgacatcagggatctgaatttctggtgtgagattgtcaccaggattaaattctgatgctggggaattataaggtgcattagaaagatctgaatttgacaaacttgtgtcaattgagggatctggtgtgggagagacaccaggtggtgggatgggagttttggcccaagttagagggctaaaaactggttttatgagaggctgaaataactggtgtatagcagtggtagactgctgtcaagttaataggaaaatgtcctcataaaaaataacattgcgggagtggtagatttgcttggtttcaatgtcaagtaaggtgtaggctttcataccttgggggtacccaatgaaaattgaggcacgactccgaggagaaaatttgtgcctactagatggaagagtggaggcataagctaagcatccaaaggatcgaagatgatcatagagga

SEQ ID NO: 6977 - DNA, 591 bp, Cannabis sativa
attgactaatatgatccaacagttaaacaaaaaaataaaaagaagactaaacagagtttgctatttagacagtattaatgttacttcgacatattaaagccaactaccgtggaactatcaaagtatacttcgactaaaaaattgaagtattttcttcctagaacaaagagtctaatctaaagatgcgtgtatgcataatcagttcaacaaaacaaaatttgctacgtatatgaattggttaaagcctaaatcagttgtactatgacaaatactgtttttatttaagaatccgagccaaaaacttgcatacaatgacttgctaaataaaagtttcttaatgaaaatgaatgatacagcctatgagaacacatataggtgagcttgtgaaacaaaatcttaagatggagttacattcatcaatttttaaggaaaggaagcaatcccaaattacagcaaaccaatttgtgatcttaagtcattgaaacatcgtgaatcgaattcaatcgttattggacaatattgttctacatggatcaaatgtttacattgagctatatataataacattggttactccactcatcaccaatt

SEQ ID NO: 6978 - DNA, 615 bp, Cannabis sativa
tcaacagtacaaaatatgaaatctcaattcagattataaagtatatatctgagaatcaacatttgtcacatgaatagatcattaaaaatatgtgagaataaccaattatgacaaagtaaaccaaacactcttggatcaaacttgagtgtcggtagagtagatatgagaagaaccaatagcatagagaccaccttcgctaaagaaggatgtttgtgtcgacgccgacgaagtcatccctgtgttgctccttcatgccaatgttgagttttggcgatatggacaggtggtttgatgcttcacttgctagaaacatacaacacaaaatacctcttttattgcttaattattggccatcctaaaagctttaaactggtgccatcatcaaggtattgttattcattctcttgaaagtgattgtcaaaaatgtcatcatcgccatctctagttgttgtgaaagttttgtagcgattattgttggggatatccaacattttctgtttacttgtcaagttaattgcttcatgacagtttgtactttatagagcattaatatatgagacactcatgtttagcattacaatgaagtgtcgtcttataattgattagtaatttttt

SEQ ID NO: 6979 - DNA, 584 bp, Cannabis sativa
tgatagtgtaatttgtctcgttttgtaggactcggtgtctgggataaaagccggggtagcggctgggatgccggttgttggtatagccactagaaacccagcacagttactgatggaagcaaagccaatcttcactataaaagactatgcagatccgaaattgtgggaggcactagaagagcttgataagaaaggaggtaatggtgctaccaatgaagcttgaaacactttttgaagttggaaaaatgacaataattttgtaggagccttgttgtgttggtcctcctcttaccattcattatctatttcacttgagaatcataacatatcattcttatttatgacattgttacagaagcttcatagctacatacatatatctatagaaaaaatattattactatcatcttcttctttatgatttgattctctttttttattccccttttcctcaagagtgagctgaatctcagaagggtagaataataatattgacttacatttagaaggaataaatttggaattgttgaatatatttgtaaatggaatattacattacatcatacatgttttaattgcactat

SEQ ID NO: 6980 - DNA, 931 bp, Cannabis sativa
tctaggtatttttgaaatgattgctagtatagaaacgacttttccaaagtttgtcgttcccacagacaacgtcaaactgttgacggttagaagtcaatcaagttagtcagcggaaaatatgtaattactcagagatgagataaagaggagaagtaaaatgaaagtgaaatgatgaatactctactctgtattgcattcactatatgagttacaaaaatgaacttccaaccccctctcatatctgagatgggggtacttataggcactagtggctagtggtacaacatggtcaaaaggtatcaacacatcgctttcaagctgtgggctgcaggtgctagtagtggccttgcgccttgtactcttgtctggtgttaggtgatccctaattacaggcttgtggtcctaggttgcaggtgcgtggtccccaactgtaggagggtgatcccgagctgcaggtgtgtggttcctagttgcaggagggtgatcctgagctgcaggagtgtggtcttgagttgcaggtgcgtggtccccagctgtagacgcgtggttttgagatgcaggtgtgtggtctccagttgcaggtttgggggtcccctcctgcaagctttaggtgagtgatcatggtgtacctttggtcggaccctcagaccatacaggtctgttgttgccgctactcgtactcccttgcattcagaggtttcaaaaggcgtgggagtaggtcttcctctgcacgccatgtcctcagagttcccatccaatttcacccatgcatgcaatctcatacttgactcccttctcccacaacctcacacttggcttccttatctcacaacttcacacttggcttccttctctcacaacttcacacttggcttcccctatacgcacacaccacacccctcacacacacgcatgtcccccctcgcacaca

SEQ ID NO: 6981 - DNA, 897 bp, Cannabis sativa
cctaaagagacgaaagaaaaaaaaaaaaaaagagtactggagagtggagaatcaagtttagcttcatcacttaatcatttttctctatcaaaattacaaaagtaagtagtttttactttgatattttttttataaaaattatatgttatttaacttaaaattatatgtttatattgtcaatataattttgagaaattttttccatttatttggtaacaactaaaattaaaagctttggtaattttattctattattttgatttgtgttatttaacttttttttatattttaataataattaagattaactttttagtttttacagtatatgtaataatgtaaatataatgtatcaattcaatgaaattgatatattatcaatcacgattttgatttattagttatattaatatggttttcaattataagtagttcattaattttgtttgctcaatattcacttgtaggtaatgggtcctattagaaaatacaaatctgaatcagaaaaaagaaaggagaaattgaggaaagaagctttgcataaaactcaggttggttctctaaacaaatatttaagttatggaattgatgtgaatggaattgagaatcaacatgaaattgaaagtaatgtgaatggggtagaaaatcaagttatggatgatttgaaaaaagtaagccaaacaatgaatgagaatgagagaacttcaagtgatataaattattttccttttgacatagatgatccaggaaattgggataaaattagttgtaataaaatagactttatagttgaaagaggaccaaaaaaaaatcattgatcacatatttccctaggatgattttgatagaagattttctacaaggcattacattagagagtaaccaaatggggggaaa

SEQ ID NO: 6982 - DNA, 883 bp, Cannabis sativa
tgggtgcccacagcgcatacctactaacttttgtgttcaactgtccttttattatgcataagtctatttatatgttttggtaatcctattccttattagtgtcgaaatttttttaaaataattattttttatgatcatgacataagtttttaaaaaatttataacaatttataatgttaaaaataaattttaatattttgttagaagtatgattatttttttcatatacatgtgataaataattgtttaaatcttatttttaacacaataaattttttaattttttttttaaaatttttcaataatcataaataacaacaacacacataattataaaataaaatttatactaaaaacctctcctattctaagtaacaaaataaaatgaaagtaaacgaaaacatcctttaaaatgggtgtattgtagaattttctttatttatttctaataagtatctttaattttttactcaataaaattataataatgttctttttcacagtaaagagtctgctcaaattattaagattattgaatttaaatatttttatttaattttacaaacaaaaaatgtgacatgaatgaaaatttaagcgccacaatttaataaatatcaaaatttgaggtacgatttgattgatattaaaatttgaaggcacaatttaatacatgaacaattattgtattagtaaaattgaacaaatttttttaaatctaactatcttaataatttgagaaaattaaaatttagaaacatcatttagtatatattaatattttggaagataaaaattataatcagccaaactaaaatgtagaaaagtaaaaaagagaccaattttcattgggcatgttaaaaaaaaaaacataaacaaaacaaat

SEQ ID NO: 6983 - DNA, 1599 bp, Cannabis sativa
aagagtagtcattagtgtccactgagagtagccatgaaacctcatttttaagggtaaatgaaaatttctatatataattacattaaattgagaaatgctcatacaaaaaggtgcaaataacacataattttgtttatcgattttctctgtctcaggctttttaagactttcactattcttgtagtcttcgttgcttttagattcaaccagggcttgttggtggtttctgaccctgggcatgcctctgctggtgaggctttgccttgattactatagcctcttctgttatattatttgttatttaacaaataatataatataagattaatgagagcgattaacataatagagattatattatataatagttttatacacttacattgtaatataagagaggttacaaaatttaaaataatattattagtaacctatgaatcataattgcactaaaaaaaccaacctttaatgataattttttactaacaacataatttttttatcactaatattgacttttagtcagaacaaaatattaattttgactaaaatataatatttagataaaagttctcactaaattagttttagccacaacaaatattgttactaaaaatatatttagtgacaaaaaattataatttttttgacaaatatttttaaccacagactttttcgttataacataagaatggttatttaaattagtcacaatttttttactttttagtcacaaattttattgttactgaaactaaaaatttttgtagtgttggtaatatgtcattaagagatgtaattacatataaaggttatgaaatcaaatggggaagtttctagatgctagaaactgtaaaaaatatatttatatcatattattgtgtgttagaatgtttgggaataagttgcctcagagaagagctttgaaaactcaaaaatggaagctggaaattgtttcaggcaatatgtcacctcctactgagtgaaatgtcacttaaacattaattaatctttaaacaatcaaacaattaacaaatgataggaataacaaattgagaacgacaatcgacagtaaaacaggggcaagcagagtaagtataatcaagagccataaatgcagaaaataaagaaatcaacaccaagatatatactgattcaagtcctatagattgatgtgatctacggctctacttcagttctagaacatcactataattcttatttattgattgagcaagaataggtacaataaattcgagaaaaaaaattctttgttgagtcctcactaagtgtcttaactctcacacttacacccaagaatcttcttcatctacagaagattattattacaaaatctaaacccaatctctctcttttctatgcatctctctctctctacctctcaatctttactctctcaaacactcaatctcaactctatttcatgtcgccaaaaatagctagataaggtggtatttataggcttaggatcaagatcctgaagtcagcggctgcaacaaatgaggttgttaagttagttgaaaataactaacttagtcaaatcctctttaaacaaagtctctgttgggttttatgccc

SEQ ID NO: 6984 - DNA, 2080 bp, Cannabis sativa
ttattttttttctacatcattaaaatattttattaattaaaatataagataaaagaataaaaaagaattaattaattattaattgagttacttaatcaaatgactcaaacccatatgctgatataatttaatcatgatttgtgaataaattaaattagattaattgtcaatcaaattacgtttgcgtttgaaaatcacagattaattacttgatactggatatagtctatacgtaattactatcatagtataagatgtttttgcatgtcaaataattaagaattacatataaaattgtatttttatgtttgatacatatatatatttaattgggtcaataatatatatatctataatttgttcattgatatacattaggtcattattgctactcttacatttatatttatgatttatgaaggtataattattttataaaagcaaatttataagtgctttgtattaataatattgattactgattagtattacaaaattatcttttatcacataacctaatatatatttttaatgatgtaactaataaatatagattgtattacatatattaactaaataattattattatcatttgaaatactacgtcgtattgttattatatactattgacacctaattaataataatgctctattattttaaaatgctaaagccccgcattattaaggattacagatattttaatttaataattatttgtaattgaagaagtaatatgttactgaattagaatttactgaaaatgaacattaattgtttaataataaattatgataagattttttttttctttttttaaaaaacaactccacaaattaaatataaataagtaataagtaattcaaatattgatcgacaaatttaataactacgcagaaataattaaagactacaattagctagggtgcgtcgttggtggagctggaggccgatgatgatgtcttatgtttgcgccggccggtgaaactctttggttgatttatggtctggtcgggttaggtgatggaggcttgtttgcccctctttgaagtgatgacatgatcaataatatattatcttgatcattatggagttgttgtagtactctaccaccttcaatgggattaacattaaaactcatcatcacataaacaataatgatcaaaacaatcataatcattttgtaatttcttgacctaaaataataataatattgactactcatcatctctattaataatattgcttgaatatgtggagacaaagatggatgagattttgagctaggtaggtagtgaatatatataattaatggtacaatattaattagtgttataaatgtgaagaactcaacatggagttaaggggtttttataccactaactataatactttggtatgtttgtcttttcaatataataaaaagtttggtttgttgaccgttgactatattatatgtgtatgtgtatttttaaaagagcgcggttttgaaatttaattttgaaagggtcatcaagaataagtaatttaactcggttttacaaattgaatgtaaattaaatatatacactttaaaatttaattcatatataattagtttgagttaacatgaatatatatatgtatgaacgtttgcctccaatttttcttatattagaaaatagtcaaataaattataatatcccataacgtaatagtgccatgcatgcatagtacatgcatttatatatatatatatatatatatctcatatttaaattttaaatcaattaagatataatttttttctacattctcaatgtatatggtagtatatatattttgtaaaattgttgttgatgttcaatgaacactaataaaaaattatttagcgatgttattactttaaaatattatatcactataaatagagaatacacccttgtattcttttcattatatatactccgtacctacaaattattagaaggagcataactatgataacaaacacacattgtatatatgtgactatatatcgatagtattaataattataaaaattatacaggaaggagagacatatatacattaaagaaa

SEQ ID NO: 6985 - DNA, 917 bp, Cannabis sativa
agaaactatgagcgagcatccaaaagaactcaaactcgagatcacagacctacaagtccaatacaggcaaatgctaggaccaaccacaactttcctcgaagcaatttgaataatgtgagaaaccaatctcctccgtgggattctcttcacaagtctaatgactctaggccaccccgtgaccctgcaaagggaaagggacttgcaatcaaccttaggagaaggacctacaagctctaccacaaaagtaaagagtatgagatttggagggtgaagaccagcgaactactccacatgcaaaatattttcgtgatgaatgttgtgcttggggtaggtacttcacccttggtcctaatgtccatcagtacgaatacttctcacgggtgcatgaagatgtattgaacttgagaaattagtttaattccctccacacatgtcattctgaggaagactatttcgatgaaaatagttggtatagtattacgagtagctgttcatgaagcgaatgcttgagagacgactttatcatcatacggaataaattctcatagtttctagcaaggccacacgaccaggcaacaaccacaaggccgagatcaatcaatgcctttgactaactcggaagtaaaagaacctacaaagcgacaccaacaagaagtgaccaactgagatgcatatcaccacccatgatgtttccaaagccgaatttgatactctttctgccttggtgaagtgcatcatagctctaacacaaactgagtttgagctagaacaggagatacgttcacctcttttagatcgaataaaggctttggagatcccctcaaagttcagatatctaatgtggcacccatacatcggtaaagaagaccccccctctcatatacataacttctaagtacaaactaacctgcaaggca

SEQ ID NO: 6986 - DNA, 843 bp, Cannabis sativa
tctgtgaacatctccaccaaacgaagactagtgaagaagtcacccatttccgtggaccgtaacgagcctaatagtcagatcgtacggtgtcgtctcccgccacgtggcttttcggtaacggccggattgaaacctaaagacgacgacgacgacatcccagtttatctcccaacgaacaatcgatgggactcgctcgcgtacgaagccctaatcgatcgcgacaacacaacgatcgtgttcgtcaaaggatttaatctacggccagaaagaatctccaatgcttcgaaattcgaatgcgtttacggttgggatttcaaaagccccaaattccttctccgatcagaagtaatctcaatcgcacaggagatcgtacggtgcaaaacacctctcacattgttgagcggctcgatgaggctgaacagctcagtcatcaaggtatccgtacgaatgaaaggtaggggaaacataaacaccgtagcccgaccgaaacccagaatcgaacctgacccgtattcgacccgaaaagctcacgagatgtgtgtatgtaccatggtccgaaaccaagcctggtttttgaaggaatgggttatgtaccactccataataggagttgaacgctggttcatctacgataacaacagcaacgacgatctcgatctagtggtggagtcgttacgagcccagaaatacaacatcacgcggcacgtgtggccgtgggtgaagacccaagaagccgggtttgctcactgcgcggttcgggcacgagacacgtgcgaatgggtcgggtttatagacgtggacgagttcattcacctgcccacgaatttactccttcacgatgtt

SEQ ID NO: 6987 - DNA, 920 bp, Cannabis sativa
cacatagataattgaaatctattatgtcatctttaagatcactagtttatattgctgccttttgtagtgactcaactttgaagaatgcgtctactgattttaagaagttaggacaacgtatattcatatttatcgttggcggggcaactcgatctgaggtttgatgtggatcaatttccctaaatattttccatatatctgcttttgtagttcataatttacactgctgggattttttcttctacttaatcttatgatattatctatcagctacgagtctgtcacaagctcacagccaagttgagaagagaagtaatcctgggctcttctagtatttatgatcctccccagtatataacagtaagaatatgagttcatcatttttacattggcaaaattgggttcaattgcttgtaaaacctactgattgattactcttctgtatgtcccagaaattgaagctgctgtcagaaacagatatatcgcttgatggcctcaaattttaaaatcctttctgatgccataaacaccaataaatatgtacttttagtaatctaacggacaactatatactaccacaacagaacaagaaatgcagtcgaggaatgtgaacaataacaaagcaaaaaatttagtttataattaggagttaaacgtttttttttttttgtctcttttccatatatttttttaacatcatactaccatcattcttgatctctattcagatcagaaaaggaacaagatttccgccactgcctttactgtctggaggctcataacttagtatgactgaggattattggttaccagctagttaaactatcaacttggtgatacaaataggctggtttacttggaatgagctgtaggtaccagaaaggcatgataataaattatgcattttttttttttttttt

SEQ ID NO: 6988 - DNA, 820 bp, Cannabis sativa
agcttcccaaaggacttaaccttcccgagtcaatggatcagaattccaacttggtctgcaagctcaacaaatccatttacggattaaagcaatcctcaaggaagtggtatcgaaagctttcagacgccctcatacaggaaggattcacgcagtacaaggccgattacaccttgtttaccaaaggccacaatgaatccttcattgccttactagtttacgtcgatgatatcattctagcacggccaaatcttcaactattgcaccagttgcaaactaacctacacagcaggttctctctaaaaacgctaggcaatctaaaatatttcttgggatttgaaatagctcgagcagcagaaggtttatttctatcccaaagaaaatatactcttactttactcgaagatcacggttttagtggtagcaagcctgccaagacaccaatggatcccaagattaaacttgatgatcaacaagggacacctattgaaaatcctttacaatatcgccaactggtaggaaaattgctctatcttaccctttccaggcctgacataacttacgttgtcaacaccctaagtcaattcatgaacactccaaggacaccacatcttcaagcagctcatcatctgctacgatatttgaaaggcagtcctggacaaggcttgctctattcgacacaatcatctctgcatcacagagggttttccgattctgattgggcttcttgtcaaaccacacgtcgctccacaaccggtttttgtatattcattggagattgcctagtttcctggcgcacgaagaaactgttgggttttgtgcc

SEQ ID NO: 6989 - DNA, 1140 bp, Cannabis sativa
aattctcttggattaatcatcaaacaaaagctcagccggtcagattccacagacacacatttatatatatatatatatatatatttatactgcttgcttggtgcgtgtgagagatatttttgatcataataacgcacctaactcccggtgctggctgatctagttactgtacaaactcttcaattttcaaccaaattggagaaatcagacatggggtcgattgccaagaaagggttgaatcaatacttaatgcagcttcagcaacaccctctcagaactaaggttccaattcatggttctctttcttattttgtagtttttttcaataacttaatcaactcgtactgagattgaccttgaaatcttttctcctttctcttttatgggtatgttgttctgaataatttttattgctagagcaggcaattacagcggggacaatagcagggcttagcgatatagtttctcaaaaactgactggtatacagaaacttcaattgaaacgtattcttcttaaagtggtaagctcactttcatagtgttattactgtatagttaggaaccaattgatccttttattgttctacgaaatggacagtgattattttgaagcttgcgagtgctagacaacattcttttttaataatattgcattgcaatataatgcttgtaaataccatatctggattataccatgaatgcatggtatgattgtgtaatattttcattaaagcaacatttttggatttgttcaatctagctgttttatttattgattttatcttaaaagactagtgcttagggaaatactgggttcaataaatttgtagcccaaatgtaacatgttctttagctttagagttgttactgtgctgtttgtaaggctatgttaaatatagtgttacaccaaccacaacactaaaaattatattaaaaaaatattatttattactatatgattttttagtcctattattattattattatgatactgttctttattacactaaagtgggcattctggtagaattctttatctatttaatttaacgttaagtaaagtctttaattttatttttttgtatggtataattatttagagtcacttattatcatttaaaattttttaaatagtttat

SEQ ID NO: 6990 - DNA, 1232 bp, Cannabis sativa
tacctaaaactctatatatcatcctattttaacgttaccatttctctaatctaattaatctttgcattaaattaaatataatataacttatataattcagaataaaaactgatcaactatatcaaatatcatcatcgtccatgattcatcatataaactaaagatattttcatgaaatctacaaggatttaaacgagttgagttgagagttgagaccgagtcaaagtctcttaactcagttctctaaattacatttaattaattgacccctactagccctcatttggttacttagctgtacataaatagaaattaaagcttccgttcaggggcaaaattggaaattcatacctccacaataaagagtaaagcctcttaccacacgtgtgtctctagtctgtgtccccctatactattttcgccggagaatcacagttccggcagctcagaacaacggcgccggcagattcagatcgaacaagaacggtttcttctctttaccgatcatcatcttcttattcttattttcctgctcgttcacaaccacatccacattctcaagcttatatcccttatactccgatctcgccggcgccgatgcaggcgaaacgccgtgaaagtacaccggttgtctccacaactgcatacactctccgacaaccacagactgattcggagacgccgccacaacaacaggtcctcctgagatgcttccgtgaccgaagttagttttagctttaggaccgcggagactccgtgcggcgtcgtcgtacgcacgcgccgcttcctccgccgtatcaaaggttccgagccacttccgagtcttcttccacggatcgcgaatctcagcggcgaatcgtccccacggccgttttcgtactcctctgaagtgagattccttcatcggcggaggtactctgaagtgctgcgattcaggtggagaaatcggcgatggcgcaatagatctagggtgaggtggagatccgtcgttgagagagttgttgcgaagacgaagtgtatcaaccgccattgatagtaaaatttgcagagagaaaaaggttagaacttagagagaaagggtagggtttttgtgagggtatttatagtggaggagacaggctgggttaataccgacagctttgccttttaatttttttatttattttttaattatattttttattctttccttgtattttggatcatatttatcattcttttcactaaaaata

SEQ ID NO: 6991 - DNA, 849 bp, Cannabis sativa
tgatgtgaactattgttttaaaattctattaaagttatcattttaatataatgggttgagagagaaatggtcatctaccttttctctcggttttgtgtgccgtttttcttcgtgtcttcatcgagtatcccggagtccttgtttagtgtgtggtcttgattctctttccaatcgtttttggtttctctcgtgggtgttttagcttgctctgagccctttttttttttatagttttcatgtgttttgtctcatgtttgtttactgtgtgtttttgagtgagggtgtcttagtttttatcttttttctctctgtgtctctttctctctcgtgcttggtgttgttttgttgttcctgttgactttgtgcgggttgttgtgtgtttcttatttcagtgttctccagtttgtttgttagttttttgttaaggaggttggtaagattcggttaggtgtgtgagttatttctttggggtccatttactcttgtcctctgctgtttgtatttatggagtcaatcattgctatctcttctcctcagaaaggcaaatgcttctcatgcaacgaaacttctgtaatactttccccgtgtgcttcttcggtaaaggcactgtctgcatgctgtttgtatgggaaagtaatagctcccatgtctgtggatgaatcttcggtgtgggattttgtggcaaaaacttggaagaaaccggtctctgtggtgcccatggtggatgataagaagatgtctaatatcttcaagtttggctttgaaactgctgaagacagggactgggctcttgttaatggcccctggtgtgttcgcggttacaccttggtgatgcaagcttggtctccg

SEQ ID NO: 6992 - DNA, 570 bp, Cannabis sativa
tccgtacgtacttacttataagaccaacaccaaactccatccatcaattctatatcctctcacttttaacatgtcaaataattattacattcttatattacaacacaccaaacattttttgttttattttcttcactactacacctaccttttcttatttaatatttgaagaaggatattgtatatttaagtatattgtatctatatttgctacaatatatattttgttgggtctctttttttactctgtgatcatgctgctattttagcttgattctcatattagtataattcatcaaaaacatcaagagaagaccgcgagtaagattgcaagatagttcacaacgattcaagatattctctaatgaaaatgaaatgttgagtgtgaacttattatatataatgatttagaattggcatcactgaatcatcatcagtattgaaccaaataccaaaattaatccctcaaaagcaacgcaaaattgcacgacttaaagttgtacatcattatgtttactatcattgatttcttttacgacacccttattcaaatttagcttcggttctgta

SEQ ID NO: 6993 - DNA, 807 bp, Cannabis sativa
ctcaacaataataatagtaaaaaatcataaacaacatagagtcataaaattactagttataagtcttagaaacataaactaaattcagtaaatctccaagaagtcatcattttcatgatcattatgactattgttgacactttctgaagagtaatcaaattgtatagctcgaccatcatcttcatccatcatcactgtcattttctcctcctttaatttcatatttctcgtccaaattcacatgaggattttgtgatttttgagagtgagggggaaatgggaagaggtgttgtcgcggtgagaaaagaagagagagacaaagtgtttttagagtttcattttgtcttgcctattttatttgcaaaaatctactaaaaataggtcctaaccaaagcacattaagtcatttaaaagcctaaaaacacccctgaaaaacagctaagaaaaagcccaagtaagccgacaataaaacacagcttaacacacaattaagctgaggtgtgtgcctcatcaatgtgaggcgtatgcctcaatgtcaaattgtcaatggcaatagcagaggcgtagcctcagattcggctttgaaccgcctcacctcgaggtgtacacctcgatcgattttgaaaagaaaaaaaacaagtctgcaatttatgctcagtacatctatcttagattcaaatttgtgattctgaggtctgatagcttttgtggtaagaacttgaaagaagtaaacaattttcatgcaattgtgaaagcaattagatcttctgtttctgttgttacctgaaaaacaatattgattataag

SEQ ID NO: 6994 - DNA, 520 bp, Cannabis sativa
tgttttgtaaactttcagtatcttacacattattcatgtttatattctaacaatctactagttggttaaatatgaataaatgattactagctagaatatgagtattgtatgatgcacaaagcaatgacctatactaataaatcttattataaggaataactagttcaaagctttgagttactcgagatttaaaaaattcttaagcagttaaatagaaaaatactttgctttacactgtttattcatattaaccaagtaaaatgagcaagacccacattgaaaatctataaaacaagtacaagaagaaatattcacttatgatgaattactaataggtgggcctaatagagtgattgggtaacccaatggtgggactcctacttgcaaacatggtgtggacgttaaagtgctttaagcacatcttaggtgcttccttggcgtttggatatattgagttggtatgaaaccacttttttggacaaggactgagtgtgaataaagtggttactgagtggtcagg

SEQ ID NO: 6995 - DNA, 994 bp, Cannabis sativa
tttttcaacattaatactaactctgacacgcaagtagttcctccaaatgccattaaaattcttaggatccgatttgacatacgtgccgatgtaattagcaactcgatggactatagaatcagacataaacccaggtcttaggctatgcaattgcacccatatatctagacgacagagcttcactaacataggatcctctccattcttcaatcgttcaaaaaccaactgaaacttgttaaaagtccagggacttccctctatgaccctttcaatatcggcttcatagtagaattgaaagagatacaaatttgtttgaagttccttcacaaacataccctttccaggttgccatagcgatgccattatgtgttgcatggacagaaagtcgatgactctgcttgttagaaatttacccactagacaccatttgtcttcaattggctgacccacatcttctgtcaaatcacataactgagcttcttcttcttcttcttcttccagtttgatattcaaatagctatcttcaaagtcttgtggtaaagtgctgctagaagccatgacaaagacaaaaatattaaaatacagattctcccttttgcaaaaacaactgacacaaacaaagaaaaactgagaaaaaactcacactcatgctcacaccacactcatgtcaaaagacaagacctttagtcattggtatccttaatttcgattgtttgtgaatttgaatttgaataaaatcataggtgtttgaatattattaagaaaatatctttttttaagtaaattaagacttatgtaaattattttaattttaaaaataacttttcgaaagtgtttggaaaaaaactacaaatcctaactgcttctaaaagaatttttaaattaatataaaactttttattttttatccagatactactagaagaatatatatatatatatatgtatttttttaattttaaaagctaagcaaacaacaccaatataaaaaatg

SEQ ID NO: 6996 - DNA, 1031 bp, Cannabis sativa
caatgtgcttcttatagctgctgcccttttcaagaaaaaaatcattgactcaactgcatgttcactttgcacttcaaattggaaatcaagaggacattctctttttggttgtaagcatgctaaagcaatatggaaggattcaaaattcttaattgacttccataaagcatagacaatgcataatggtgactaccttcaacatttatcttccatttacgataaagaggattttgagttgcttatatatatatatatattatgtgtggaatatggtcagatcgtaacaaggtttttcatggtgaaaaggcacgactgagttcttcaatcattacatatgtaactggttttcatcaagaatatacatgtgccaaagcttacaccacaccagctgctacaacatcacttttggccaataaactagctaccaatatcaggcagcagcaggcagttccatggtctccagctagaattaatggtttcaagttgaatgttgatgcagcaactaatcttgagcaaaaaatactgggagtaggggctatacttcgaatcataatggcatggttattgctgctctttcaaaaaaagtgcaaggtagctttcgatcagatgaaatggaagcaaagtctcttttctatgctctcaattgggcatcacagttacaactatctataacacatattgaaacgaatgcgttgagagtttctgctgcactaaattctacttcagctgatttatcttgcttttcggatcttaaatttgatgttcattatctcttatcctttttccctcgtgttttagtatcccatataaaaaagaactgctaatcaagcagttcatgggttagctaaatttgctttagggttggataaagacatatgttggataggagaaattccctatcctattttctctgttgttgtaaatgatttcaatttataatagcattgatttcctaaaaaaaaaaggtcaatttaacttgcagtgaaaaacaaagtaacaatatacagttagaaaaatgcaagaccgcaagg

SEQ ID NO: 6997 - DNA, 1110 bp, Cannabis sativa
ctttagtctcttgattcatctatagaaaacaaaacaagaattattggtatagttataatattattaataatctcttagaacatgttaaacttaattacccttttatatctgtgattagcataagatgatgaaccctggagactgggatacaaatactttgctctatttgcaatatttttctttgatctttctatgtgttttggattcaaaaaatgagaaattaatttatatatcccatgttgcagcatcttgtccttctggtggatttttttagctttctccacatcatcataaccaccaacatccttaaagtgttgtttgtgccttgattttcggtctttgtaacgtctcttacactcgttatcgatactagaaagtacttcgtgccagtaaggccaactgcgatccaagtgaaaatattccttcaaccaaaaatacagaatattagttattatgaataacaaatattgatattaaaaaagaaataaatattttaaagatatatacttacaccaaatttgggtggtattggcatcttgtacgccttaggaatattttcccaacaaccataatatggagggacattaaatcccataatgtttcctataagcctaataaataattttccattatcaccatcagctttcaatgttctaccttttacatcaaaagtgacctcaaagaggttttcgtttattattctcaaaggcctcctccaaatttagcgatttagactttgatcttgttttcttcgcttgcgctacatttaaataaaaaattatattagaatattaacaaaaaaatcattatgtgattaattaacaaaaaaaaaaaaaaaacctacctacctcacacgttgtgggtatcctactaaggcttgggggaggttgactcccaccatctccatcatgggatcgagcaacataactttatatgcatatatattgaaataattaaatttgaagcaataacaaatatgacaaaaattaagagtttaatatattaaaaacatctacaaaattacaactaattaatcagaatcatcactagaacaatattgaactacatcattatcactactaagatataactacatcaatatcatctaca

SEQ ID NO: 6998 - DNA, 834 bp, Cannabis sativa
taaggttttcgtcaaaaacccactattgtggtaaaatacatgtaaataactgtttgttgggcccccaagaaggtgtttgctcatgtcgagaagtagttggacaatgaggattattggtggtattgtacaagtgttgctaaaaagtttcaccttgaaaaggagatgcctaaacaaaccatcaaggaaaaaggtatgtttagaggtggggtgcgcgcactaccatggtttgacataggggtcaagatctaatattgtgtcagagaaagcataaccgtcactggggagatctgaatctctctttatatggtagacatccgactttctttgggcgattaatgtcagtgctagactcttcaagtgccctccgaatgcctcttggacatatattaagcttggccatctttggattctgaagaaatagtaaggtctctgggccccccatggtgatatgtcgagagataaacttccgagtagttgttgagcttaatcccttcttggccctggctaattaaggggacttaattaacgatggtttacatcgatactcttcactttacgccatgtatctctcgtccaaaaatatgaataatatttacccccaagcttttgagactctcgagtggtggaagcttgtagccttcttccagattataaaagcacatttgtgacatgtaggtgcttttggagaacgaggatgcattcttcatatttagcccataataataaggtcaagaaatttttcgtgagcacacctgctgttacacgtgtaacacatgtttcttaatctggtgagtagcacgtgcctgagaaaggcgttcttcatggagtgatcca

SEQ ID NO: 6999 - DNA, 1348 bp, Cannabis sativa
tttgatcagtcaattgacacgatgctatctatggtacctattgaggtttttaggcacaataaaaagggcacgacttgacctgcctacatattcattgatactaaaactgagtttgttggcactaatttaattgtacctacattatttttttcttataaaatttatgttataattaaaaaattatcattaaaaagtatttattttttataatatttatcgataataaaaaattaaatttaagtatttctactacaaattactcaaataaaaaatattatatatgtaacgtaaatttgctaagaatccgcaatttttgtctttaataaagagggtgtcttttctctcattcatgcttatctcgggtccctttctttctttcttctttaccgttataataaacgatcatataaaatcgacggtcaagattaagccatttggtacccaaacacccaaagccatggcggttttacttatgcactgtcctcaacacgtgtcactctcatttcgagtacatttgatctctgtaatttttcattacatgcaaatacttagatctctatatatataacctctcttatacaatatctcaatatatagatatagatataattaataatggcaggcggttattcagtggatccattagtggtgggtagagtgatcggagatgtggtggatatgtttgtgccggcggtgagtgtatcagtctactttgggtcaaaacatgtcactaatggatgtgatattaaaccctccatttccattactcctcctaaactcaccatttctggtcactcccaagatctctacactctggtccaattctctctctttctctctctctctatatatatatatcatttgcatgcaattatacacaatgcaccttatttttctgactttttttttttttattgttgtggagattatttatctcttagctgttgttggtggtagtttttgttgtaccatttcgcgtgttgcgaatggtgtggttcacgcactagtaaagtctattactagttttacaggggttgatttgtggacagatgcttgttctaaatttattagtggtctgacaacagctgatttgatttaatgtgatacattccttaaaaaaaaaagtcttttgatattttacgaaaattgatataaaaattaataactcatcaacttaaattgtaactaaaatttacataataattaccaaaacaacccaaatcgtaaaaaaaacaaaattattttgtatttaatttttgtaagaaaatgattaaaatattcagaattttataattcaatattaattagttattaataatgtttatatatacatgcatgtaggtaatga

SEQ ID NO: 7000 - DNA, 1340 bp, Cannabis sativa
tatctaatcaaaatatgtgagattcaataatgaatattaccaatagcagcgttatttttattttttttttaatgttagctttaaactttagtgagtcataaaaaatgtgtatattttaaaaggaattttttagacctctaggctaggcgagccttaagtacaagtctaacccacctatacttaagatcgggcctcagcgtcttaaggtgtcttttaacatttctttatatgtgaacacgtgttcaaagtaattaggatttgtttggttaatcataaaatagaattgaaatgaaatgaattagtttttatttcattttgtttgactgcaaatgaaatgaaagcacggaaatgtcattttatatatatttttgtcaaacaccctcttgagtataatattgcataaatttacatttgcaggatacttgttcagaattgtgtgagaaatcttcatttacattgcatagtaagttcttctgtttcctttgcctctattttaatttttattattgcatagtaatttttataagaaatcttcatttacaatagtttgtaaaaatcaatattttctttcttccgaataagtgcattgctaataatgtaaatgaaatttaatcttgtgttgcagataatagtgactcgaaatcgggtactattgatcaaaggtggtctagactcttggagctaaagaattcatcaaattattcataacatataatctaaattgcatttctagaaaatattaaaatgtaattatatattttttttgaaaatgtaattatatattaatatatagacatctgtgtatagtttataaatatatacaacatcttagatggtctaaaaattttattgtgtaagataatatatatttttttttccattatagttatgaattatattataatctctcaatcgaatctctatagaatattaattcaaatttaaatggtgttgggcaccatgtatcaaattgtaattaaaatttgtgtttattataccaaatttaataaagtaatatttggtgtctaatataatacaacttttagcataaccattgcttcagttctgttatttcgggctctaaggtaccttgcacctttcgctataagttggctggtttttaggtgggttctgctcaatggtgttatttcaagtgtttctattgtcactcagatccaattccaaaccttcactattaaatcggattaaaattaccattttggttgaaaatactagacccttggaaccaaaacaaatactaccattgctcataatgtttatgaaaaatgaagaggtgattttgcagttgaaacttgaaagaactttcaataacttcttat

SEQ ID NO: 7001 - DNA, 522 bp, Cannabis sativa
ataacggtagaaggcatcatcactatttgctgcccctatgttctgtaaggccatcttcacttcagcaataaagttggaatttaagtaaaagtggatgtcacagcagggaaatactggaatgaagagtataagcagctgatttatttccttcaaggattctctcagcaaagatggattgatcttcagcagaaaaagaaggttgcatacacttgcaaccacaccaagaatattcctcaaatggcccgagatgcatacagccaacagcttttgacaaggacctgttcttttttcttgatgaaggacaatactcaccaagcaacccaattgtttccaagaagaatatggcctgttctgacataaaataaactacaacgttcacaacttcaccttgaaaatcagcagacaacagaaaacctgcaatgtttgacagcataattatttggaattagaatgtaaatatataagcacctctgataatcataaaggaaaactttaaattaaatccactgggaaactattaaa

SEQ ID NO: 7002 - DNA, 1879 bp, Cannabis sativa
agtcgtcagagcagctatcgtctccaaaaaaatcactggagcaatcgtcgtcgcacgacaaaagttgtcggagtagtcattaccaccggagtttttcatactccccaaaatttgtcattgtcgtcagaaagtcattggacaactccctggagttgtcatcatcgtcaaaaaattcatcagagttttcatcgtcattggagttagatgtcagagttggatgttagaatatgacataaagaaatcggttacattcactacaagaaatgttacttttaccagcacagtttgctattacttttaccagcgcacatttgcagtggctaaaatctaaattttaccagcgcatttacgcgctggaaaaaattatttttgccagtacttttcattttgtgctggcaaaagttctaataccaatgttgatttaccaatcccttttgccaacacatcagtatagtaaattctattttaccagggcaataccaaacttttgccagcacaaaaatgtactaggaaaagtgacattttttgtagtgatttatcaactagttaaaactttgagataaaagattggttctacaaagcaaccaatataaaaactaacacacaaaaatatgttaaataaataaataaaaaaaatagttcatttaattaactaaatcaacaattactaaattaaaaagcaatttcttgaattgactaaatcaaaaactggttattgaaataaataattcaagaaccggtttctaaaataactaaataaaatactagctacgaaacaaagcaaatagaatacaacacagtctttgcaacttattagcaactcatggttctggtcaatctttaaatatgttagctagaaaaaaaataaaacaacataaaaaatattaggaatcggttaactttaacaaaaaacataatatacaaagagtaatttgcggcataaatatctaagttttatgtcgagtaacagataagtacttaagtcgtatttttggcgataaaaatacattttgttactagtgtgaaacttgtgtaggtacctgactgttatgtgacaagtcagtgtccacgtgtcactatgtgattagttcaaatcatttaattttaattttttatttgtaaatcaatttaaaatattaaaaataaaacaaaaaatagtttaaaatcaaatttaaataataaatatttaatattcatattttaattaaattaaaatagaaaaatcattaattaaaacccaaaaactaaagctctaaccctataaaaattaaaatatacatcctcttcgtcatcctttttttcttccttctgaaattcatacctttgaaaaaaaaaatcatgaaactcatgttcatatacatttataagagtaacactatttcatcatcatcactttcctcattagtcagttgcgacaaaagaaaaaggagcaaaaagacacaaacataaagaacaatctgagacccactcactcaaaatcaactcttttaatcagatctagttcaatcagcaatcgtcaccagcaacccctaacaaaacgacgaagtttcagcaatcatgacgatgtcactagtattgcgagcatctgagaaccccaatgttggttctccctcacgttcttcactgtctccatctctttctcaacttctctcttcttagagtcgaatggagatgctccgactttctatgaccaaaacaaacttcaccacgaggttcgcaacccttagatatggatctccttcactttgtctccctcctcgaagtgtccttttctctgcttctctttgcttgatgtcgaacagagcatttcaagtgtttttgtattttttttatgggttttgttatggaactattattgttcttgtcattttaattttgc

SEQ ID NO: 7003 - DNA, 895 bp, Cannabis sativa
gttactttgagtttatattaattgtgcaacccgttgctaattagcgagttagttgaaaatcgagattaattaaaacattatttatttacccttaaattaaaagtaaatgacttctatttaaaccgggatcccgtatttaaaatttttacaactgtaatacaaaatttttgatataaaagttgtctcctagagactactcaaaacgcagcctattatcccaaagatcgtatgctccaggtctaaccaccccaacatgtataatcttcatatgctcgcactcactgctgttcaactttagctttgctcttacctacacatgaaaacagtagctgtgagtcgacagactcaataagaaaagcataggcatatcataaacataaactggattataattatgcacctatacacctaatcgtaaccctatcccgcgtctcacgcatactgagtctagaacgttcgtacgatagtactattgaccataatatcagcctatactcagtactctagtcgtaccgatgtgatagcatcaatcaatacttatgccaatcatacattcattggtatccaatataactctatgtatactgataccgctatttcaatgtaatctaacatgcaatcgtaaacatgcatactaaacatgtaatcacaattgcatataattatactaatcttatctcatttcctgtataaagtgtgttggtcaacttgaatgaaaattcacgtgctaaacggaggccttatctcacaatgtaaaacggataaatatatactctagaacacttctctaatgcccaaatagaacctatggcttttgtaccgaactataaagtgaaaacacctttataaaaaaataatacatagtttagctctaactcatatggtagagcttatc

SEQ ID NO: 7004 - DNA, 974 bp, Cannabis sativa
ggttataaaagtaaattgacgaaaaatatttaaaacgaaatatttcgatataaatttctaaatatatatagttataatattaaatattgaaatatttttttcaaatttatttttatagcagtatttgttataattataatattgttttcggtgtttttttttaaaaaaaaaaattgaatattttaccgtaccgaaaatagaatttattttattttagtttaccatgttcaaaaaactcaaatttattttcggtaatgtaaactatttaaaatttttaaaaattttacagaaatgatattgttactataacgaatatagtgatgaaaaaaaaaataataatacaaaaatcttacaacctttcaaaaattatattgctttttcttttctcgtttccaaaaaggaagaatttcattctaacacaatagttagaaatgaatgggcatttcaatgtaattgtttggtaaaattaaagaaaaataattaacataaaattgttacatcttatatttcattttgaagggatatattttttagaaatgtgtggaaaaatctgcaacaaaaaaaaaaaagtaattgtggttcggtatcttgtgtgtttgacatatgtattccttttataattctaataaatatataaaaaaaaaaaaattgacaaataatccttaaaacttacattatatatttctatttttttttaagtatgaaataaaaggtttcacatgagctctcattctgcggtgtggcacaggaccgatagaggattggcttccggtgtaaattgggtaaaattgtaggggttaggaagaatttcattcaaacccgttacaaactagtgctgtaaatacgggtcgggcactaaaaaatatagatttagacaggggacggcacgatcctacaaattggcacgatacgatacgaaaatatatccttaagcacgatacgacacgaaagacacgatacgtaaatacgaatag

SEQ ID NO: 7005 - DNA, 1204 bp, Cannabis sativa
aaattattggacattttaatgtgtcatgttttgagctactctattcgtccttacgtgttgtatttttttaagcttgtcgtgcctaagtccatattttttcatgtcatacgttcgtgcctaagcacatattttttctgtgtcgggtcgtgctcgtgtctctcaaactcgtcattcgtgtcatgtcaaaaagctcgtcttatatttacaacactacccatgatccatgcaattaagaaaaaaatgaagtacgagtacaattggcacatgatttttgagattgtattagctcccaaaggaatagagaaaaaatctatatgtaattgattttttcccaataatctaaaaactcttaataattttagttatttttttggtgataaaacttaataaaaatttaaaaaaagcagaatggtgacttctaatttgtaatgatggggttctagaaatcagttttagccattcacatttttccttttaaaaaaatatttttattaattatattttaaaatttcagggaaagagataaagtactcactcaggtgaaaacaatatcttaaaccaaatcatatatatacgaaaatacatttttaatcagagatttttaactcatacctaacttaactgaggacagtatttacctattgcaattacatttctatatttacttttttttttggttgcaaattatgcatatgtatttatataaaagcattccccaatttctctaaattttaaattaattaattatttaattcataatcatacgtaatgtcagaacaaattataaatatgttaatatattaattatcatgtataatacaattgattaaaaagagttgttacgtagcaaaacacagtatagaaaattaatataataatttggtgtacgtttagttacagccagcaattaatttcattactttgcgaaaagttgttctcacatttttttattaaaaacaaaagtttggtactgaattttacttttaaataaatacataaattaatagtaatatcttggtgatcgatctgtatatattgttactgaagtattatattgtgttcttgaattttttaaaccgttataaataattcacaatattataaaatagtatttttgtcaaattttattacagttgataaataaatgaatgacatgactgcttaaccaattactacatcagtcgacacatattaaaaaaattaa

SEQ ID NO: 7006 - DNA, 520 bp, Cannabis sativa
tttattataattaacaaatttgtggagttacctgagtgacatcagaatcgtgttttgcaccgtatttggttatatcaaaggagacacagttaattgtgactgaaatcgtcaaaaatacaagcaaagagattgcattcttgtttcgttcgatgagacccattttgtatttgtatatttttttttttaatttttttttttgcttttgctttttgttttgattgaagaatgaaagttacattagatttccatcagttttataggcccgatacaaatatgaataccaatgattcccaactaaatattactaaattaagttaatttactattgattctcccatattttcgaccaaggatttaactctaaaattagcacattcttcctttaatctctccatttttgacctgacattggttataactcagatttagtaagaaagacaaattaataaagaaaatgatccagaaattctcgtcatattttaacttaattgacatggaatcaccatgtcatatatatata

SEQ ID NO: 7007 - DNA, 1636 bp, Cannabis sativa
gatgcaccatcacagagatcaatgaatgtataccagatgctaaaggcaagaagtgtgtggattttcggtttggggcttcggagacttgcccggaaagtctccaatgtcgccatgagaatttagcttggaactgtcgtggtctcaggaatgccgcgacagttcgacaactagcgcacctggtgcgtcactacaaacccgagctactaattctctctgaaattcgcctcccctcagataaattcactagtacttgcttacgacttcactttgagcatagccattatgtcccacctgtggggctctccggaggtttgggaatgtgttggatgaaaggagtcaaatgcactatacaacagtccgataggaatttaattactggagtgataacatcggaccctccagggatatcttggaggctaatgggaacatatggccctcctaataaatcagagaaagaaagattctggcatcaggtgggggatttagtccttaatgccacggatccggttcttatgttgggagacttgaatggaactctaagtgacaatgaatgctataattacaatggaaatatggcacgatatgcgtttgatcttagaagaatggtgcatagatcgggtctaatcgatcttggtttccaaggaccggtatacacatgggcgaaaggggggtcaagctccaatggggtaagcaaaatgaagagggcaagactcgatcgtggacttagttctactgattggcgaatcctttttcccaatgccattgtcaaccacctctcggcctcccaatcagaccacagaccgctgcttcttgatactctgggcggtgcgaattgtaaaaggcggcagtttaagtatgaaaacatgtgggcaagagaccctcgctgcttttgggttgtgaaagaggcgtggaaaggaaggttgcactcgaatcctatgatcaactttcaccgcaaagttaaggcaaccagtaaaaaactccagtcctggaacaagacacatttccttcacctatctcaccaagtccaacatgctcgtgatcaacttcgggaggctgaagagcggaaccatgacaactttgtggaggttgatagagcccaatataagctcacagaggcgttgttaagggaggaactacattggaaacaaaagtcccgagtccaatggcttcaagaaggggataagagcactaaatttttcatggcctctactataatccgtcgaagaagaaactacatccagtgtatcaaagataccccgggaagtgagtggattacggaacctaatcgcatagctgaatgcttcctccgcaagtatcaagaaatcttcaagaagagtatccccacccccactccgcttaaggaaggcactatgcagaaacttatttctgagtatgacaatgccgagttaaacgcaatcccagcggctgaggaaattcaaaaggcaatatgggatatggggcgagacaaagcgccaggtcccgacgggcttcccacgagcttctacattcaccattgggggacggtcaatgcagatgtggttgatatggtcacccacttcttcacacattttgaactgccgaggttcgttaatgacacttccattgtattgatcccgaagaaagactctccctctct

SEQ ID NO: 7008 - DNA, 783 bp, Cannabis sativa
tgaaagtctcaataaagtaaaaccgcattgttgatgaaattttttggcaatcaactcagctttatacctattaagagaaaattgctgtaaatatctccaaaaaatttattttgatgcagataagtctccaacatcgaaaaaatagcagtaatagtgtctaaattcgagattcttgtaagtccgttagtactcattttaacaaatctgttagttgctctaaaatacatattaatattaaatttcgacataagtcttccaaaaaattactttgatgcagataagttcttaattttaaaaaattgtggtaacgacctcaagctcaagattctcgttaagccgtatatactcaatatttcaataattgcattaaaaaaaaaccatatgttgatattttattggcccaactcataattttactttaaaataatttaaaataaataaataaatgaataaataactaaaagaaactaaaataagaacactcaaagattttacgtgattggagcattaataaatattagtccacgagccaatattattatcagtggctagaaaagcctaaaggccatacaataaagtatgagcactctatttttgcatgggcaatggagccacaaattttaaccctttgtatgtaaggttttagtagtatttatagtttgtagatgtcataccaattactttttcctctctaatggagagttttcaaataacatactaattttgggctaatatggtgaaactcactcatgagcgccttgtgtatatatggtgatgtgaatg

SEQ ID NO: 7009 - DNA, 808 bp, Cannabis sativa
agttcaaaagaattttagacgatcaaataagttgagaaaacataaaagtaaccaaattattataagttaagaaacaaaatgctgagtacttttaggttaggaaaagttaatgttggcaaatttccactcctaacaaaggtaactaccaactctctataaagtctttttctcaaactactttctgccatcactttaatagtttgtacgtgtactattattagttaaacatatgtgatcgattaaaacgtgttgtgattatttaattatgtactacactaatcatatgatttagtttattggaaaatttatataatttgtctttaattgggaatacatatataatatatatataatagtagattataacgttctaattaccaaattaattattagagatggcaacaaggaaggagggtctgatcaactccatacaaatcaagcagttgaactgtcaaagtaagtgaaatttcaagaaacatttgctttctttttgttatttttttgttttttcatgtaataaagtggcatttacatctacttatcaaaatattatgcttgtggtggtgtaattttagacagaaaaccatccttaatttataccaatataatatagttgtcccctcaaaactctcaataattttattaaaattcttaaaaaaaaaaaaaaaaaagtcgggtcggatctaattcaatttaagtatctgatctagtgggtgggcgagacaaatccttacatgatctggatcaaatcagatcatagccggatcagatatgacccgacctattcacactcctaattataaaaata

SEQ ID NO: 7010 - DNA, 604 bp, Cannabis sativa
agtttagccccccaacgtcctccatgcacacatgacaaggttttccctacaagatctatccctgaaccttcctaatgtttcatggaggccatcattccataggatgaaagtggggaaggttacgtgttccctgacagagctacccaactgttgaagcgctttgaccccctgtctgacactgggagagtggccaaaatggatcagctggcagatgcaagggaaagatctctcagaggtgaaggagatttgaggaggacatgaacaccagatagggaggtccaaataaggcctcaactatccgtaacccctagccaaccgcaaccgcaacaacgccaacgccaacgccaacaaaactaccaaaaacaacaataatacaaccaacacgaacaacaacatcaacaccaccaacaacaacaataagaaccaactcgacaactttctaccgtcctttcagccataccctccttgaattcaattggcctctccttcccaaagaaaatgcgactgaggtctttaaaaaggtgccaaaggctaacctctaccttaagaagcattgtgacctggaaatagtcagtaccctaaagaaagtcaacatcttgcaggc

SEQ ID NO: 7011 - DNA, 512 bp, Cannabis sativa
tgtgctttataaaagttactgatcgaattttttatattatttaaaatggcacaagataaaacagtgagctcaaaatttgtacaaaatactattggaattataatttaacaaaataaaagtcctaatcaataacttttgtgaaataaaagttctaattagtaatttttgtgaaatacagattataaaaaaaaaaaaaaaagaacttttgtgaaatacaaaatttaaaataatattcacccataaatatacactcttagtcatcaaaacatatatttttcttgacgggacatattttttttatttcatagtaaacttaaattttaataaaagattttacataatttatgtttagcaccaactaaatttcaataccaaatactttttcgatgcaaatcgatacaataatcggccctccaagatctcctgcccaacaacctgcaagaaggaaataaagaagatcattttgattaatcatagatgataatatgattaaatagagacaaaatatatgc

SEQ ID NO: 7012 - DNA, 875 bp, Cannabis sativa
ttagaaatttgatggttttggaaataaaaggagaagacctattttagaaatttgagataatgggtcgatagatactgctgatgtcactatgggcttgagtgaaatggaagttataaaaaaattttctgggacagattctgtttcacaaatccaccatacattatgaatgtgttaaattagaattgtcgcgggcttaaggatcgatggattgttcccttaaaaaaattgtatctcaaaagaaatcctattttattttttatgtgaaaccaaatgtaatgaaacaagaattgagtggctaaaaaggcatttgggctttgaaggtagttttaagtggtggtggacttgactttgtggaaaattaatttttttggttgagttcgaagatggtattcaatggtgattggtgaggttctacagtgaacctaactgtgctcttcatcgtagctcttaggatcttttatggtggttggccaacacaaattccttgccttggtttgtaataggttaaattaataatattattagccatgatgaaaagaggacaagccagagatactcgaattagcttactgacgggttctagaaaaaccctttttgactgtgagttagtcaacctagagcttcccggccacctgttcatttgggagaaaagtagaggtacagaagcttgggtggatgtgtgtctccaccgtgctatgggtaagttcttcttgggctcaatcttttccttcttcaaaacttaccaatttagaaacctctaccttcaatcattcaccttaatttttggagccggtgatccatcaggaagtggttcattttgaaaatgcattgctcaaggagccgatgtgctatcagatcgataaagagagctgaga

SEQ ID NO: 7013 - DNA, 924 bp, Cannabis sativa
cctattctttgcatctctacctcccaattctgtgttctcattttccttctctattgaaacaataaaagcagtaaccgttgaggggtaaaatatagcgaaggcccaaagaaatacccccaatccataaaatgaaatgattatccaaactatagaacgagagaaaggcaattccatccgaacaagagaaaataccagtatagaaccataaaatccttctgagcaagaaaggtaagaaagtgaatatgattaagataagaagagattaccaaaacagaaaagggaccccgcgaaaattagctcaatcgggtattagtataatagcgtgggctacctgagctacaacgaacatgtgacacctagtccgagggacaaagagagggtctaaatatggaaaagggggtataatatgctacaaaaatacttttatctttaaattctatattaagctgctgaagattaaaaatattcagatttaacaacatactccacatccttctttactagtaatatataagaaataagaacacatccttcctagaaaggagctaagaacattcaatgttgagatacttaaataaggggaagaaaaaaaagaccaaatgacccaaattggctctagttaaagcatgcatttgcattattaggttcaaaggttggaaacaacacatacatccatatcaacccagcttgcttgctgaacaaatcaataagcaacaattcaatccatttgacaataataaggttctaggatatattgatcaatattcttgggtaggtgaatcaatatttactcactagaaaatacacaccaatacaaattaaattattatttagaaagccttaaactacattcaacaacagtataaacatcttcaacaaatttttcttcacttttattcttttaaggataaattatttgtaaaa

SEQ ID NO: 7014 - DNA, 863 bp, Cannabis sativa
cttcacgcatatagataaaaaaactccctcattcaaaaagacaaatgaattcttgctcacatcagactagtcgaaactctgtcgaaatacattctcagaaacacttcaagcttggaaagcaaacgaaccaaacaaattgaaagaattaagagaaaatttgtgtaaactaattgagattatattttgattaaaccgaatctagtgtaaagaattcaaagtcggaatacaatttattgttgaactaattttcgacatcaatatttacaaaatcataataattgtaaaagacagaagtagttttaaaaaattgagtaattattcgatgaattaactagatatttggtgattttaaatggcattttttttttcaaaatcgaatgctgatctcacatatttaaaatttgactaatttaaatttttgcccccttaaactttgacatgtaccaaatcataccccttgaacttttcaggatattaaaatttcccccgaactattgaatttgttagatttaagaacttttgcccaattttactaaacaaaatttaatgtagatgaaaattttgagagcacaatttctatacttttgaaagttcagagagcatgatttaataaatatcaaaattcaagaacaaaatatagtatataaacaatcacaatattagtaaaattgaatcaaattagacaaaaatccttaaatctaacaatttcaataattcaaaagaaatttttaacaagttaaaaaattcaaaagcataatttgatacatgtcaaaattgtaaaaatcataattagcattgaaattgtattcttttaaattagaaaacatattagcccaaaactgaaggatcatatttgagaaatc

SEQ ID NO: 7015 - DNA, 897 bp, Cannabis sativa
aagatattgaatccaaagaaggtggtgtgtgatccattgttactaattgaaatcgacgaaatgcgcacacagtctagggcaactgctactgaagttatcgaagatttcaccgagcttggtgaagaatagcaatgtcaacagctaacctcttcggattttgaatgtatatgaagcaaaatttgtacaagctactaatgaatggtaatggctgcttagatgctctagaaaattattttaggccacatttcaaagggaaacaagttacttttcttttcttttttgtgcaattcaagagcatgaaggtttaaaatgccttcttaatatggtaaaaggtaacttttgaacatggtaatactaatactatctccaacctttatcttctaacaaatgagatagatttggttgaaaaagaaatgagtaaattatgtattttaaaataagtagtggtaataatattgtaataaaaaatgtgtattaatattgcaaataaaatatattgatattgcattacaaatttgaagaagctctaatagtgcactttctggccttttgtatggaaatggaacatcttttaaatcaaacttgttttaattatagacattttctttgtttctttctcttgctttgataaaaaattgcataaacatttcttgaatttctatgtgcaaaatcctcttctcttttatacacaattaccaattgacatgagattaaggttcatgtttgggtagagaaattgaataagattggattggataaaatatgaatataagtgtattaaaaaaaaaaaaaacatatttgatcatttgccaacaagttagatgcaatcattgattttttttttctttacatagatgaagatggacaaatcattttctaattgtgttttatttccaa

SEQ ID NO: 7016 - DNA, 714 bp, Cannabis sativa
tcatatcataaatattaacaaaatagtaaattattaccaatattatatttgacacattaatgtgaagttccaaaaactttcttattaaattgactaaattgttgaatctttgacaaagtcttgacatttcccaaaagagtggcattaagctactcaatgacattgtaactgcaagtgcatgccactttcgatctacaatgatcagatttagggtacttgcatttccattcttgaaatcaaacaaaaaaatgtaaatatgaaaataaatagtgaacacagtgtaaataaactacaatactactgttagcaaactgttaaaaaacaacaccataccaaatcaaaaaaatagtaaacactcgcccaaagaatatcgaaaaacataaaaataaagaggacaaatattcactacaaaattaagtctaaaatgaatggaaacaaatacattaatgaacaattatttatgatgaggaaacaaaaaaaacaacctaaatctaacaatattccaaatcaaaaaacttaccgctaagaaaataacaaaacaaataaaatatataaaatcctagaacttaaatcacaagtatagacactaaacaaaacagagacaacatttctaaactaaagaaaaacaaaaatcaatttttaggcgtttgattgacacgcttcctccttttaacttctgaaattgaactctgatcagcttcattcctcttcgat

SEQ ID NO: 7017 - DNA, 1269 bp, Cannabis sativa
gctttgttttttgctttggattatttagaggagtttcagtctgctcgacaccaatcagcctctgcaggctcttcgacaactgccactgcaaggtctcaacaataggaggtgtcgtggatgaatcctccatctagaaggctggagttaaacactgatgcagcagtaaacgcagtggaaaatacatctggttttggtgcaatccttcgtaatgacacaggtgatatcatagctgccatggctatgccttttcaaggttgtttcaaaccagaaatcatggaagctttggccttgatctatagcttgcaatgacttaaagactctcaactaccagtccattatatagagacggattccttattggtggtcaaaggagtgcaagctactcaaaggcatatttctgatgtccattgtttgctgaataatatttcccttttagtttccaattttcttgaggctcaaatctctcacatttatagatctactaataatgcggctcacttgttagccaaatatgctctctcggtggatattaaatgtacatggtggaaggaattaccttccccaataaagcccattgtattataacttttggttattaataaattggctttatctcaaaaaaataaataataatattgagattttatcttcaaaattgttgaataaacggtatgaatggaagaatttaaggaacaaaaaatgtataatcagaaaaaaaaaatcaaaatactgacattgaaaataaacttcttagaattcacaagctaaaattataaataaaattattgatcatgattctaaaaagaactgaatcaatatgaacagttgatggaattaacaacatttacatcaatactaaaaaaataggaaaagatttattaaatcctaaactaaataaaaatcagcacgacataaaaaaatagaaaacttaatcaatagtgtgaagtaatgtgggagaagaaatctatgcgaattattgagaaagcactcgaaaaagcatatccacattaaatggaataatcaccatgaaatcattttgaaaaccatacagacaaataaaacagtaagcaaaacttagttgaagacaaaaatcatagcatcaattgcagtaattatccctgtgaaatcacctttcttccatcaccgctcttcttcaagtcaaggatcggtccattacaagtggcttctaacctgttctctttttcatccaaattttggttcttccaaatgtttgtttgtttgtctcaaagatcatttaaatccaatctt

SEQ ID NO: 7018 - DNA, 1303 bp, Cannabis sativa
gtctctactttaacttgttgtaaatttaattcctttacccaactaagagcttcctgaattccaatagcttcgacaaggacaagttccacttgatcatgggcaaggatggtacggccttcaatcatcataccattggcatttggcatcactagcaaccatactcaaaccataactacgacccctccaaacatctacattaatctacattattttttttctattgttattagtttggaaccggtttcttgtacttggttggtcttcattttgttgtcataaatttaggtatgtgtttttgcagtaattatatagtgtgttttatattatgtgtttatcaaacaacaacataatgaaacctgccatatgtatatatgtatacatatcaacattacaagttggtatttaataacaatacactagaatagtgaatagtaatactaaaacaaaattgctgagtcaaatgggtgcataacagaataatcaatcaatgtcacaccccaaatactaatcagaatactttatctgcagtgtaaaaatttcatcgaaaaagaagctcaccgagcaatgttcatgttggaaacaaagggttccacctcccttgaatcaacaaaaccaaactgattgttagaagcagcccaggccgcaagaccgtgagctgccacattcaacttgcgggacaaccaactaagctccacccctgaaagttgatcaataacagaaaacaattcaaacaacaaagggcttaatcttccaacagggagattttttcttcttcataccctgaactaagttcaagcaatcagaaaaaatagacgggttccagcagtgttggtatgtatataatgtatatatgtatgtatgttatgtgatgtgtagtccatttctggtgctacatgttcaaagctcaacctggtcctgagagagatgctttctctggctatataaatatatataaacatatacatatatatgtatcttgagagaattgaaactcaaactcatgtcattatctgtcgtcatcaaactcttacacatttgtcatcaaggttggcttgctcagtttctgattttatagatattacatacattaaaaatggcagtaagaaaataaataaataaataaaatcatgtcaattaccaaaaaatatgaggtaaatattttgataagagtcaatatgtcaactactagcattcttctcagttctgacttatatgtatatatacagaagactcactcaagaaccaacttattgaaagagggaaaagtagccaatgcaaaaatgtagagcttgagcttgtaata

SEQ ID NO: 7019 - DNA, 933 bp, Cannabis sativa
gtattgatgataatgaccaacatcaaagtactactactagttgtagtagtagtagtgatagtgatttttcaagtgtcacggctgaattattacaccaaaacgacaataaagagattgtcgtaattaaggatgaggaagaagaagaagaagataatagtaataatcaagtctcatcatcatctgctaggagttgtactaatattattattgatgatgagagcatgatctggccgttggatcaagtggtgtctagttttgacggtcatgatcatcacgatgatgagtcattattgttcgtgaataatggtaatgatgaatatgatatggagttttggtatgacattttcattaaagctggtggctcaacagaattaccagaattttgaatataggagagtttaattttggatccaaaattttctaatgtcggacgcggggcagtaacggtaattttgcagatcatttgaccaattgcatgttgccacgtggcttctatcgcaaaatgaaacattctacactacttgaccagaaaagctacatatttgcctataagtctttcattttgtaagagattaagataatttttatttttggaattagtacacaataatatttgtaggcatttttaatgagaagacaataaccaaataaaagattatctacatcatgacttgttcaaatatttgtgtaaagtaaatttagtgtaatatatatataagtacttatcgtacctagtagttagaatttagaaaattaattatttgtttttgtcacatgcatttgatttataattagtttatataattgtttcgaatatttttcatttcttattttaattatgaaatttatggttaatatgtgtagaattaattgaaaatactagaattaattaagtgctctttgtcaaaaaaaaattaagtgctcatttagtat

SEQ ID NO: 7020 - DNA, 735 bp, Cannabis sativa
taccaacctcaccatgtaattgttccaatacctcctgacccctgccgagcccactgtgactgcccccagcgacttcacacagagcagaagaagcgataatttccttacccttgcccaacgcacgagctttattcttaatagacagcctcctcctttgactaatcccagctgcccccgatgccttgacacccactccctgaacaaaagaaccccccatacccacatcctggagttcatggacaacttccttgcccttcccttccaatcgcccaatccgtgaatggtcctccttcccagatcgcaaaccacccccctgagaatcacactttcgcttctttaagtccgtctcgccaagttgactatcacccaaccccaagtcatcaaccgtcttcgcgttctgagtcgatcccaacaaaggagaagtcccaaagccagttgtatcacaattggtggtaggtggaagcccaggcccattgagacacgccccattttcctcatatactccactattattctctttattaacccggcccactaaagagttagaataatccaacttgggcccaacagtaggccctgtgggtaatacctcacccctttcatcacaggtacttgtccggtttacactccccacgatcccaagctctcggatttgctgataactaccatcccctcgttatttccaacaattgctaccggaggagacttttgagtatcaaccagtaccggccggca

SEQ ID NO: 7021 - DNA, 990 bp, Cannabis sativa
accaactaaggaatgatcattattgaaaaggcgccaagcttgtttaccaaatatagcaatattgtggtcaggaagacatctagaccccatgcgccccactttttttttatgaacaagcaatctgtcccaagcagacactcatggcgtagctaggaagagcttcagccacaatcttaattaaaatctcttttaccatcccaactttcaactttttttcttactctatcattcgaaaaacctaggacaacagtcttgtttctacccatcatgccacgaagccccaggtaagaactataagcatttgcttgggccataccagtaattttcatgattcttttcctcaagtcattttcagtgttgttactgaaaaatattgaagacttttcaaatttattttctgcccagactcactctcagacttatcataatattactcacgatgttaaatatataatatatagtattatccaaaaataaataaaaaattgcatagatgaagattggtttgacattttgtaaatgggtgtagttgttttaagaagttttacaatcaggcctttatgataaaaaaagtgttgcatatttgtaatgttcagttgtgttcaatataattcttgatttaccaaaatatatatattaatatatatatatataagcagttaatatttattacatattattttgtgtaataaatctgtccaatttgagtgtgaattcatcactcatattatatattctagcaacacctatacaaattttatgtatatatattatataacttttagcaactactactatgcaatcattagaacagtgaatggtgtctatgctatacacgtccttttgatatggtatttatggctactatcttttacaatacgttattcacaaaatagttcatgatatgtattttgaaaagcagtatatatagtataatatttctgttgtaagcagaagaatatttggtcagtatgcataataatattgttg

SEQ ID NO: 7022 - DNA, 1709 bp, Cannabis sativa
caacaaaatattgaaatatgtcattatacaaaatttactagagacgtacgtgtctttatagagaatgtacctaaaaatagtgtactctactagagacgtcacctaattttgtacttttcctatatcaaataagcatttcaaaattcttacaaaaaaaaaaaaaaaacttttattcttacatttatacttcgagattctaatccgtaaaaatccaatttatatttctagaataagttatttaaagtttttttttttattttatagcaaacttttataatatattatacatgattttttttaagtaaatcattaaaaattttatttttttaaaattttaatatattttattctcaaatatataatattaatatattcttctataaaaaattattcaaataaaaaataattaataaaatatatttacaatgaataatagaatataaacatagagcataaatagtaaatttaatataatgtgtctttattttgattatttaaatatttttaagtacttttattttagagcatttaatgttagtgttcttacaaattttaaaaaaataaaattatttattcaaaagttaaaataaatactttcaagaaaaaaaaagttaaaataaataaatattagattacttttgagaaatttctgtagtagattgcttaaaatattattttgccattctaaactatttgaatttttttaaaaaatttaagtagtgataataagtacaaagtaagcataaaaaaattgaataataagctatttcttatgcggaaatagataaaaaatttacagaaaaaagattttaagaatgtactgcagtgtacattttatatccatctcaaaaaaaaaaaagttttttttattctagcaaaaaaaatatattgttttttgttttggtgtcgaatataattacaataaatgtttaacaagtattttaaaaagaaaattgaaagaaagaaaaaaaagaaaaagaaaaagaaggttgaggccgaatatattatttcaaattcaatctcagccaaatcctagcatgcatcttgttgatcttgaggccgtatgaaccaattaactctgatctgaatcaacgaacggaacaggtaatcttttcttcgccattattattgtgtttctgtggtcctatcgaaaaaccctagctagcttctgcaacgacggtaatggcgttcgttattcttttttagtttgattgtttgtcccttctttttttggttaaagaagtaaaaaaaaaaaaaaaggtttttcaacgcggaggggcaaaattgatattttcacagaaactttagagagcggaaaaaaaaagatttttctaagtctaatattgtgtgtatatatacatatattctcagaccaaagctgtcaagcaaacccagataccgactccatctccatctccatctccatctccttcttcttcttctttctcctttttcaatggtgacttcgattgcttaaacccttcctctccaactctatctggtatttttcttatttctcctttcaatttgtaagaattctatctggaaattcaacctgttcctttctttctttattttaatgtttgcacgcggattcgatttttttttcttccggaaatgattaggttttcaagacttgaagagctgaatctttggtagagtttagtgtgatattttcagcattctttgatactttttttttttttttt

SEQ ID NO: 7023 - DNA, 1056 bp, Cannabis sativa
ttagaaaaatttgaatctagcatttttttggtctataaaattcaatataggctcattgctgattcaatgatgtgttcatgtttatgtttatgtgcttgacagtatgaattctatggtgactcaatagtggttggatgtaaatcaaagtattataaattaccaattatactgatggaaccatctatttagatcatgttatttttataccatcaaattagctttaatttttataggtttttttatataaaaaataaaaataataattgcaaaaaatcttggttgattctttgtgttattttagaaaaaattaatcaaacaaatttcagttaaaatgagaaagtgagatttcggaaagagacacttggaatgaaaaggaaagtaggaatttcatctctcaacgattacaaactgtcataggccaagtattgtgagttgagagaagagaagaaaaaaaaataaacatggatgacaatgataattttatacaattttacttttggagtagttttctaataatttttttggatagaatattgtgttttgtattattcgaattaggaaacgacattatatacacatgtaaatgctgtgaaatgattagtggtgccaaaactagaagggggtaagcctagcctcctagataagtaaatctagcatgtgtatattgttgtcatatattttgtcccaaactatgtcagaaaacgcaagagcttacaagtcacaaccaaactactgtatatatattattgtcatacaaatctttaactttaatgttttcattcattttcgggcgaaataagagtggacgcccgtttttccttccttctagtacgctactttctttatataaaataaaaaataatgctattttaaactatctataaatattgctacaaaaatgtaaatatttactatattatagtatgtgaaaaataaatccttatttttattaaaaactcataattcaatcacaagcctaatgctttgtttggatggagggagagaataagtaagagatggtggtaaagtaaaatcttattttaaaggagaagactt

SEQ ID NO: 7024 - DNA, 768 bp, Cannabis sativa
ttagtgaagttccatcttacaattttttttttacctattttatttattttataaaattaataaatttagttacattatgaacatttcatttttttagcagaagtgtggtttataaataataatatgggttgtatttctaagctataaataaagtagttttacatttttttcattttgccattagtgattgaaattaaataatttaatcttctgtaattaaattagatgttttttttggattaattagtgtgtgcatattgaaattataatttattttgttttcatttttggtatttattttgaatcatttttcctctatcatattcatatcatgttatacagtgatttcgttcatgaatatgatttgaataaacattaaaacatcgaaattttcttaagaatatgtttttttggattcgaaatttttccttaaaattaaagtccaattttcatatattttcaatgcttaaaattaatatggatctcttaatctcttcatttagatcattttggaattggttttatgtattttagacgtcaaaaaacagttttatggtcaggttttgccccctaaactataagacatgcatgattgtgccccctaaacttttcaacccgtttaaaatagtccttaaactttttctgtgttgtataatggtactttcgtccaaaacatttcatttttgtaactgaaggatgatgtggctttttatcttatgatgtggcatgacaacaaaagtgcttaatgtgtatttttaaaaggaaaaa

SEQ ID NO: 7025 - DNA, 2259 bp, Cannabis sativa
tgaagctatagcccaaatatacttcccaatggctgctttattctaaaggcaagtatttttgaagccaagccctccttctgccttctgtttacatagatgatcccatgccacatagccagggccagttgtttcaaccatacctttccacaaaaaagcacgaaaaatcgaattaaccttcttcaaaacagtttttggaagcaccataatctgtgcccaaaatatatgtaaggttaataatactgaattgaataaagtagctcggccagcaaaggagatatttcttgttccccaaacccgaattctctacactattttctcaactagtatgtcacattcagccactgaaagtcttcgagaacatattggaatcccaagatattttaaaggaagcatgcatcttgagaagccagatgcatccacaaccctctgagcttagaatcttccataccacaacagtaaaaggctgatttctcttcacttggtttcaatccagatgactctgaaaacagtttcaatccctgtagtagataataaattgatttaaagtccccatgacagaacaatatcacaccatctataaaacataaatgattcagcttcaaatccgaacatctatcatggaacttaaaatcctccatatcccaactcgagttagtactctagaaaagtattccatagctagcacaaagattagaggagacattgggtctccctgacgaatcccccttttagcctcaaagtaaccatgcatcgagccattgaataacaggctgaatctagatgttcttatacaaattattactaactgaataaatttttgtggaaagttaagtgcctggagcatttcttctatgaagtcccattctagagtatcatacgccttccttaagtcaagtttaatcatgcagtttggtctagttgctttccttccataatgctttaccaaatcctggcaaatcattatattatatgctatatatcttccatgtacaaaactactttgattctgggatataatgtgaggcaggatcgatcttaatctaccacaaatcatcttagttgtaaccttatacatgacattacaacaagcaattggccagaaatcacttacattgctcgggcattttactttcggcgtaagtgtgataacagttgagttcgattccttaagtagcttccccaaatgtagaaaggataaaattgcttggcatacatcctcttttactagatcctaattgtcttgaaaaaagtaactgctgaacccatctggccatgacgattaatttgcttcctggaatgctaaacaaggcctctttaacatcatcaatattaaaaggatagtttaagaatttttgctgctgctctgttagaataggcccctggtttaccaccttttcgttcacagacttccgttcaatcattttagatcccaacaaattcatatagaatagcaagaaagcatcattcacctggtttggctcatccacccagtcacctgccatgttttcaataaagcatattcggttgacacttcttctagctctcaagctagcatgaaatagagtcctgttatcatcctcttcttttagccaatgtatcttcgctttctggtgcaagaaagataaataagagacacgaatctctttatatctcatttgagcctctaattcttgctggcatcggacttcatttagtggctatttttggagctcagtttgacatttgcataattcttgaaatgcttgaatctctgctgcatttatatctcccatgtcctctctattcatcttcttaaagatacttttcagcttttttaatctcccaactagcttgtagataggagttccctcaattttttcaagccaacatattttcactttctcttcataccctttaacattcttccacattcggaaatacctaagtagttttttccccaactgcacctccggatacacagataatattgctagcgtatgatcaaattgaccttccgttaagaagactacttccgcattgtcaaatctacccaaccattcttgattagccatcactctatcaatcttcgagtgaatccttatttcccatccttgcttgttcgaccatgtataaaaggagccaataaatttgatatcttcaaatctacaagcttctacacattctctaaaggcccttgacttactcggtctaactgtcttccccactctctctttcggattcaaaatatcattaaagtctcacaggaccatccacgggttg

SEQ ID NO: 7026 - DNA, 714 bp, Cannabis sativa
ctttttttcaaaacatgatacgtgtaggggtattagctagggttttaagagggtgtgccgtacgtttaactcattgtacggacatattaagtaagtagataaataaataaaaaatatatataataaaaaaatatattattattgagcactactatatttttttaaatttttttaaattatataaaatcgataattatttatactgatattaaaaaaatactaagtattaatgatatattttagcatattctcaacaaaaaaaaaagtcaaaatctttgggcaaaggaacttattgacaatttattacttatttaaattatgatcgattcattgatctctttactattattagttgttttgtttggtacaacaagcaacagataagatattaatgagagtattaattaatttagatcaatatatatatacatgttggatatttaagctatatatatacatatatattaattgttgtacgtgttttgatgagtacgttgatagttgtgattattaattatatataagttcgatattgatatggtcccctatacccctaccatgcatatatatatgatcatatatacaaattaatttattattaactaataattaataaacaaaattttatgcaactgcacattacaatatatacatataaacatcccattaataattaacattccgtactatcaaattttaaatatatatatatat

SEQ ID NO: 7027 - DNA, 558 bp, Cannabis sativa
atgcatctcattatttctaggagtattctgcaaacccattttattgggagttctagtctttgtgtggtgtcttgcaatcccttctttaagacaaacaatgtaaaactcatttgagcattactagagcccattatctatgcttagctttttaattttatttccaacttgattttcaatcagttttttccaattgacgaaggtgcgaaaagcttcatctttatttttgagtaagaatatatccaaacttttcttgagtagtcatcaataatattcatgagctctagctagagttttcactttcaaagggccctaaagatctatggaaaaaataagataatggttcacgtgagtaatgcacaccgttactaaacttgactttggagctcttgccatatgtgtacacgcttcataaaactcatgcttctagtttccctttcaaaatggcttgcatctctaactcttaaacacttttctgatgaccaaatctaagatgccgtattcttgtacacttagaagccttgttgcatctagttgttggtgttgcaatactggtaacta

SEQ ID NO: 7028 - DNA, 1055 bp, Cannabis sativa
catcaaccacatgtcattgtacaccaaagtttcaattcttagggctgttattttggtaagtccgatcatgttattgtagtatacttatactaatctttgaagagaggattactctcaatttgacaaatcaaataacacgtatatataatgactcagcactaacatgtaaataagttcactatgtagcaaaatatgagataaaataaaaaatttatcatcaattactttggaaactctagtaccaggtataagcatctatttttctaaaaaaaaaaaaaataatattatgaaaaatcaataaataaatatagttagagaaaacacaccagaaacatccaaaagagaaaaaaaaaatcaaaatttaatttattattcattatatataaagattgaaagagaggaaaaaaattagagatttaatggattaaagataaatttatcataaaacaaaaaaaccattacatgcatcattcgaaaaaaaaattaaaaattaataagctgatattgtaatatgtgtaaaagaagataaatttcatcaattattaacagggtataaagtttgtttatgagaaaaaaaattggaaaaatagagaaatttaggaattttacatttatatgtacaggtatagagaaaaaaaggtaaaagaattagggatttaaaaaaaaaaaattagaaaaatagagataaaaaaattaagaattttacatttatagatacaaatagagagaaagagagataaaggaattagtgattttaaaatcaataagaaagatatatataaaagatcatcaaaattagtaatgtaaggaagataatttagaaactaagatatattaatttgatgtatgaaatatttttatcatgtaaaaagttgtattcttctaattgattaagctatgatttgtttaaatgaaaaaatatctcaaaaaataaagaaataaatgggtgaggtcggactcgtcccactgtaaaaacctttttaggaggagacagtttacatccttaattacaattaagctctaaacacttcctactacatatattatttttttaa

SEQ ID NO: 7029 - DNA, 3287 bp, Cannabis sativa
agagcatacagagatacctcaaaagaactagataatagaactttaatatcagaaaagaaaatctcaaaacttagagttgtgacttccgacccaccaatagaacacctaaaaagtaaagaaaaaaatataatatatagcaaataattaataaaatatgaaattttatataaatattgtcacatagaattctctcatgtaaagactcgaacttatctattctcatctctattgttgaaggtgatcgagtacaatacatctgatgtgttattattattagattaaactaaccttacaaaatcaaaactagccatttattagctttacaaaactaaaaaactagccatattagtcatgcaaaactaaacatagccatactaatcttacaaaactaaaactagatatactgaccttacaaaactaaagctagccacattggtcgtataaaagaaaagaaaattatagtttagcatgcttaaatgtaaagtatggtcttttaatataccactcaactaaaaataagatacttatactttaaatatttctttctctcaaaactacccttacatttcaaaaaagcatctttctctaactctctcactctaactaagtcttattgtctccattccaaagcctcaaaatccatgagttcaaccacctcgaaacccttgaaatccctacccatcgttggagttcttaactcacttattttttgtgttttttttttctagattttgatgatgtcgcgaaacatcgctaaatgtcattatatctcgaaatatcgctaaatgtttctaattcacaatatcactaaatgtcacgaaatcacactcaagttttcatgatgattaacaatgtttagcgatgtgttgtgtaatttttagtctcatatcacaaatacatcgctaaacattgctaaatacgcaaagcatcgctaaatatcgctaatcatcactgaacttcatccctaacctcagatttagtctatcattgcaaatacatcgctaaatattacaaaatatcgtaactacaaaattagaagaagaaaaaaatgcaaaaaatgagagaggtcgtgagagaagacgacgacaagggcttgcgaccggggttctggttctatgtgttcgacgctaggggttctagatcgaggttcaatgttggagagtgagagagttagagagataagttttttgaaatgtaagggtatttttgggaggaaaataattgggtggtatattaaaacaccatgttttacatttaagcatactaaatcaaatttctcaaagaaaactagccacattggccataaaaaataaaattagtcgcattggccttacaagataaaaaaacaagtcacttacaatattagacatgttgtcttacaaaaccaaaagccacattagccataaaaattaattaattctggtaaaaaaataatctataataggcattaagttataaaatttaaaaattaatttaaattaaagcatagatttcatataatatttaatttaaaattattataatacgaacttgataacaagtgaaaagatttaactcaatatgaaaaataaaacatgtctatagtctgttaaaagtaaattcagaagggaaataaaatattacgttttcttgtaaaaataatttattttaagtaaataaatttgactaaaaataaaagtcatcaactacatacaaatactattttttttttaatatatattgggagagagtatatttaaagttagaacctcctcttttatgaggagaagtgcagaactactagactaagtctatgaccacactacatacaaatattattaaaaccaaaaaataaaagtaatcatgaataaatttcgataataaataatagcagaaaatataaaataaaaatagcataaaaaggagtaaaataaggtaataaataatactagaaaatataaattaaataacaataaatataaacttaaaaatggcaaatagaatgaataaagcaaagttgaaataaaatactatattacctattaaggaataataaatattattttacaaaataacaaaataaaattgatttcataattaaaattaaacttaaaacaaataattattaagataaacatataaataaaactaattatatactatgaaagacataataatgaaaatattacaaaatgaaattatataataataatacaaaaatatatttaataaaaaataaaataccattaaaaaaagtttttttttagaagaagatatgttattataaatcgaaagaggcatttacaacaacaaaaatatagcagaagagatttcttccaaccaattataatcatttttcaatactaaagcctgtttagccaagctatgagttgcttggttagcatcccgtctaacatgagatacacaaactgaagagagataggataattgatgtgaaatatttgttaccaggtcttgaaaacaagaatggttagatgctagaaccatgcaaagagttatcgagaatcaatgaatctgtttctacaaaatcaagttggtagccaagatatttagcccaataaagaccataaaacatggcttctacttccatttcttgtggtttgaaattgcctattattggttttgcaagggttgcccgaacttgtccatgagaatcgttttataatagcacccaatccaattttattcctcaaagaatcaacagcggcatcgacatttaattttaatttattctctagaggagggacctaagggtgatgtaaagcaggagcattgctactcattgcagcaggaattgcagcagtgttatactgttgaaaattggtgatgtatgttggagctttagaaaaaacttggaatggagactgtagcatttttccatgcgcaaagttatttctatcagaccagatatgccacataatacataatatcttctccattttagcagtcaaatagattatagaaaggtgaattagataattcccttctcgcatttgatttgccaagttatagtcaatcgaaaacccagcttctttccaaatagccttagcatgtttacaagaaaacaaggcatgtcctatagactcccaagcattggaacataagctggaaataacaaaatttaggactttacgatgaaaaagagattttgcaactgagagagatgattgaataaccctccatccaaagatttttattttaaaggcagtttaaatccccaaaactttttccaccacgaaaattgagtggtagagcttgaagaatgactttgttcatccaaagtataa

SEQ ID NO: 7030 - DNA, 1944 bp, Cannabis sativa
tgaaaaatttaccttgaatcaagcttgagtttgtgaagattttggtgcttggatttgtgagaagcttgaggtagttttctaccactttaatcttgagttttgttgctgaatttgaagttgaaaagcatgcttttatgttgttagtgttcttgtatgcatgtgtgtgggaattggttcaatcttgatgttagattcatgattgtgttgataattagtggattttgtttttggtatattttagatgtgattttagagacttaatttggtgcttaaattttattttaggttctgaatattgttgtttcaagcttaagagtatggttttgttgataaaacttttgaatggagaaattataatgattttaggttaagtttttgctctttaatgttgatttgggtttctgtgataattgttgaggtttattgcttgttttgagtttattgtggcatatacaggtgttctagaagtttttaagaagtttgaggtttaattgaggtgttgggagtgtttttggtgtttcttgcactaaaatggtcgaccggttcatggggacctgtaggaaccagaattccgattagtccctaggaaaccccacagaaccggtcttccaattggggaactggtctacctgctggggtagttttgtaaagcctagttttttctgtttgtgtgatatttagggtattgtcatgttatccatcgataggaaaattagtttttactttaagtccctaaaaagtgtgttagcatgtctctcgtcaaatttacgaatattatgatatagggccctataaggcgtcgagctgttattccactcatgttgatcagcacacctgaactcagaaacaaggtaagattagcataaagtatgtatgtgtgtgaatgaatgcatgttattattgtttacactactaacactggaatagttgtagaactaagtgtgttagtacaatgtatggtgtttaagggtaacttacagtgttaccaacacgagtacaagtgggtacggaatgcatgtggtacaacacccaatagcaccctaaagtataatttttccctaccaacactagtacgaagatggtacttcagtgcatgtggtacaatggtcgtacttctattaagaacattcttaactatttggtgagccttgcacttaggctcaggtgggcctaagtacaagtcaatattgcattgtttatatatattttatgcatatcttactgagtctgtcaactcatcagtttgctacaatgtgtaggtaagggtaaggctaaagtggaggagcattgagttggggctcagcaaggattgtacgtatcgctacagtgcaacctagagagtttcggtcttactgtattttgagtcatcttttgttgtcgtcgtgtggcttgaaacaaaaaaaaatattatataaatatatatggtatgtttttttaaaagtggtatttaacttgagatcccggcttataaaactttataagtatatttatatatgattataattagttaaatatgtttaaatctaaaattaattagatttcaagtaccaacgttcaaattttggtatcagagccactgggttgttcattgaagaccgtcaagatatgtacaatcaaggccagtgttgagctcaactcacgtttccgtaagcttttacttattagcaaactgtttaagttatattgtaataatgcgtgaaatgttaattaaatccataaaatgcggtcttggaaatgtattgaccactgtctaacctacatgccttgtgggttcgcaggctaagtcctagattatggacgcccatcgaaacgttagaggtcagggcaaaatggttgagaccgaaggtggtcggggtggtagaaacccccaaaacccccatggatgtggtggtagaggtcgcggtcgtgctcaaagaggtggtcaagaaaacccaccaggctctt

SEQ ID NO: 7031 - DNA, 1007 bp, Cannabis sativa
ataagcgttgtatacacttgactgtagtttggtgttgttgttgttgttattacaaaccaagtagttgcacaagtagatggctctgcactctttgctggtcctcagtttaaacccattgatggtaacatcattgcgcatggctccacaacaaggttcgttgtaccgagcttttttacttgtctcttgtcgcaaaaacttcaggaaaaggtttcaatatgatcattattgattttgtaatgtgccagaggattgatttcatatagatcatgaagagataaggattcaggattgacttggtagagatcatgagcagaactacttatagaaggttcactaaattttttgttgaaagaactggaaccttgggttttagaagaattcttcctttgaactagttgatagtagtttttgagggatttaaatctcaagtcattttccaaatcaacacgaaatatatcaggatcagaaaccacattagtaatagcagtttgttcttcaagcataccaaccacttctgacattgtaggccttagcgttggagatgcattggtgcataaaggagccagtttgagaactgtttcagcctcttccttgttaaaattactctccaaatttggatctattagcaccagtaagtcttccattcgttgcaaagcgaatacctgcaaatgaatgaactatattcaagaacaccccaccaaatattcataaaaatttaatatattaaagaagtaacataagatgcattctcctaacataatcaagaagacaaaacacattcattttcaggtttgtagtttgtatagctcttcccactaacaatttccaaagcaactacaccaaagctataaacatctaccttttcagtcaaataacaccccataatgcatattctggagccatgtatcctctggcacaacattcaaaatgtttcaaggttaaattatttacctttttgatcattaatgtaatattgaatttgtaaaatttacttacatagttccagc

SEQ ID NO: 7032 - DNA, 2872 bp, Cannabis sativa
  modified_base (1611)..(1613): a, c, t, g, unknown or other
  modified_base (1672)..(1677): a, c, t, g, unknown or other
ttttttttactatttatgaaataatccctataatataataacattaattacctttaatagaaatgcatcagcttcagggaatgtactttgaaacatgtcaccctcaacaaatttcaagtttgaagtactattatgtgaattggcttcaatggcataaggtaggtcaaacactgtgcatttcaagtgaggaaattcttcaatgagcatcatacacatcgatccagtattccctccaacatccaccaatgtagttatttcctcaaaagaggacttcaaatctttgagaacaaatttcaaaacccccgaatcgctttccattccttcatccaaacgatcaccgaatccatcgatatttttgccccaatactcgtacaagctcaacccttcatcattagctaaatgaaacggtgtgcgtggactttctttctttaaccaacttccaattaaatggaatgcggttacagtaactggctcaagaacagcaagaacataaccacccacactcgggacaccattattattaccaccggtgagaagtattttggaagaagaagtgagaccgtacacttcttcttcctctgtcttgtcatcgtcgtgttggtttttattagtgaaaatacccgagtgtaccaatacacgcatcacacgtcgaaggcacgaaattcgcgatgggggaatttgaagggcggacgccaactcgggaagagtaatggtttggtctttgcctttggtgaatattatgtccggtatgtgtaattgaatagcacattttagagccattgaacttgcatagcttaacatatgcttgtacacattgacataaccttgggataactcaagagtagtagtattttcactaatggaacccataataataataataataattatcaaaacaaaaactcaaagatctatattcttatgacatacaatacaactaagttgttaacatatttatactaatttaaagcatatgtggaattgtacaaacgtgtgtgtttgtggatgtatttttttaatttaattttttaagtgttaactgcataatgggttgtggaattttcactaacttggaacaaaattaattcatactatttactcaaaacttttaattggaacttaattaaaatactataacttaattaaatagactaaattaaattattgagaagtatttctatcaacttccttcaatcttttttgtatttacctccactacacttccaaaaaacagatgtcgaaatattttttttttctaatttttccattgcattaatgttcattgtaactataatatatattcaaaaatataaattttttttaaaacaaatatgaatagtttacattactaacaatatagttcttgatattctagtttactacgtgtgttcaaaaaaatttaaatttatttttgacactgtaaaatatttcaaattttctaaaaatatatataatatttcctataactattactactattaaaaaaaaactacctttagtgacaatcttttagtcacaacaaaaaaaatgtgactaaatgtgacttttagtcacaataaaaaaattacttgtgattaaacatagtctatagatacaagttgtcactaattnnnttttagtcacaataaatattgtaactaaaaatacaattagtcacaataaattgtgattnnnnnnactaatacttttaatcacgaactttttagtcacaacgtacttaagaatgataatttataattagtcacaatttttttacttttaattacaaattttattgtgattaaaagtaacaaattatgtagtgtacttatacactcatataaaaaatatactaataaagataaaggttatactctatatacatattatatatataaattagtgagtaattattagtgacatgctcaatataacaataatataacttaagagaaatttacagtaaaagtctttaagaagtttagtttgatgcaaatatgtcttcaactagagatgtaaacggggcggggcgggtgcggggattgttctcccaccccccgtcccaatacgcgtttaaattaaagtaggggtggggcgggaattacccaacgggtgaaaaattctcatcgggtacccattatatatatttttgaaaaaaaataatgtctcaaagagaatttttttaaaaaaaaacaatcataaaaactcagtaaaacaataagcataagtggaatattgtgcatagtaaatggagttcgtaaatacaaaattggtaatcgaaaataaattgttagttttatttttttatgacagttaattaagtgtgattattaatatggatcaccgtaggtatcttcataaaaactaaaatgtctcattattataattaataaaaagcctaaagtacgaaaatattttaattgtagtagttatgattttaaaacttaaatatatacatatatcatatcgggacgggtatctattccccggctcttgccttattttcgactcgggtatgaacatttaaacacatactcgccctgcctccaaaatttgacctctgcccctgtcccattaagggtgggtacccgcgggatctcgaacccgcgggtataattgccatccctatctccaacctcaaaaaatagcgataataatccctaaggtaacatttttcgtaagtccgttagtccttttttttaactgaaccgttacttattttaaaaatacacgtgttaaaattttattaatctgaattatattttaattaaaataattgtaaaaaacaaaatatattatttaaaaatcataaaaaaaaattatttcttttatctttttttttttcttttcttttctattttccttttctcttttttcttcttcatcttcttca

SEQ ID NO: 7033 - DNA, 1115 bp, Cannabis sativa
tgactcttgactttggaattaaagctcctggaaattttgtcctggtacattttttgctagacttaggactcttcaattaaatccaaagattcctgaagtagagcatgatttcgggtagggtcataagtttctattctatgagatagaatagtgatgactgctttgcatccttaaaccatcaagtaaagagtgtgccccattgaaattctctcggtggtcctgtatgcccaaagaactctaggaagttcttttggccaatgatctttacaagcttacaatttcttcttcaacgtgttctttaggattttattgatagcttccacttgttcatttgcctatggtctgacaatagctgagaaacttttgatgatcccgtacttgacacaaaagtcaatgaagtgatcgctatcaaattttttcccattgtctgctataactttgtgtggaaggctgaaacgacatactatatttttgatgacaaagtttaaggcctttttggcggtgaacgtgttcatgggttctacctccacccacttggtgaagcaatccacagtaactatggcatatttaactcctcctttttcaattggaagagagcctactaagtcaattccacaaacaacaaaaggccatttattgttcataaggtgatttcagttggtggagcttgcaaaaccttagcgtagcgctgacattgttcaaatttccagacatacttgatgaaaccccttttcatggtaggctaaaaatacccttacctaagaattttctttgacaagctcaatttggatgtatagtcttcgcagaaacctttgtgaacttcatgaatgataactcttatctctattccagctatccatctcaagtacaaccccctgcaataaagtcttccatccaggatgacgtatctgggagcttaatattgaatcgtttgagcagcaaccctatcggctagaagctctccaaaacttaaaattggaagattgggcctatctaggagttcgaatgatcaatgatctttaccctttacgttccactgcttggggcttctagatggtcaatgggcactattctatattgcacagtttctagatctatttccaactttgcaaaca

SEQ ID NO: 7034 - DNA, 1038 bp, Cannabis sativa
tttttttttcttctcttttcaaagggatttctttttccccctttagatggagggtttcaaatcacgtaatactatttggttgttgttctttgtgatagggttcgcccttctatgctttgctcggaacgtacctagtacaggtaatttatatctatacatgcattttttttttaaaaaaaaatcatataaaaaaaatttacaaacatgatttttttttttgttatttatttttatgttttgagcatttttatttacaaaatacttctttagtacaaatactaaataattattatcatgcactaattgatttgcaaatatatataaatctagaacaaagtaatgcgatgagctaatctaactaatctagtctagttttttcataatatatatgaaactgcattaaatatttgattataacatttataatatatggtagggaatactgaaacttattataagttggtgatcaacgattatgaaccgcccggtcctaatcgaccgatgccaccttatgagacacatgcagaagacaataaagaatacaattataacaatggtcaaaggacgaaccttcaacacgagaccactttaccatccagttaataattctttcactacttataaattattcatgtatataaaattttattttatttccctttaattatatattttatcataacttaattattctactttgttaattaagttatatatatctatatttttataggtacgttatagggtgatgatatatattaatattattagtttaacatgatgcattacaaaaatgtaataatgtgcagaaatattattgttttcagttattatatgaaactgattaattaattattgttttgtttatatacagggaataatactaagtatatcaacgactatgaagaaccccatcctaatcgaccgacggcagctaatctgcatgcgtgattagctagaatgatttagatatattattagagctaataataagacaactatgtatgtttcatatgttcaaatatgcatgaaataatg

SEQ ID NO: 7035 - DNA, 1793 bp, Cannabis sativa
aatcaaacgtgatgcactgcactccacatgctttcagaccgtccaatagcaacacctggataaattccattaaagacacctctcaaggaccccctttaaaatatttttaccatactacgatttgctactttttattttgtggttttgacgtatttattggttaattaaactattattactgttgccattgctcggtacttaaatgaagattgccactttaaaacaatgtcaagatgtatgctgctcattaattacgacatgctacttcaccagtcgagcaccacttccaaaccaccaaaaaaaggtaacactgtacacaaaaacaaaattgaaattcctccaaaagtaattccacacaaaataaaacaaaatgccctattgtattagatacacttcctgaatttttttgttcagtctaagcataagaagaaaattcaaactaaattgcaattcacctttcttcagattcttttatagttggctcctgaaacataaattcaaaagaatagttaggaaatttcggtaagcatcaagccaaaataagtagctaaagtaaccaattccatagaagacatcacaaaatgtactgcacatattaataagaaatttaatatgctggaagtaccaaaatgaagggtatttttttcagaaagggaccaaaaagaagggtgttaatatgacatttcgctagcatttgactaatgcttcagaaacaacaaactgaaccaccaattgtaatttggcaaaatctagcatttgagatttaagaagcttcattttaaatttcatttacaagtatgagtaagacaatgccaatcaaaagatttaatacatatacataagagcatccatactcctaccacttttatattttatggtcaaacttcacattcacataaaagattaaagtgagaagccatattatagtcatctcgttgcctatcaaatcagcaagtcaacataacatctaataacacataagaataatcctatgctattttccacttacatatctagccatagtacaagcaacattaagtagaaaaaaattgtgattcaatagtctgtagagaacttcaacaaaaatatgacaattttttaaaaatgggatatttattctctaaaaggaatcttttgtcatactataaatagcaaccaaaaagaaataaatgctatcattgttcaataatttcagaacaaaatacaaaataaataattaaaggtatgtgaaggagttgatatcaccagacacctcatcacgagctccagcaactggctgaggagagtcagatttgtttttgttcctgtgatgccaactagatggagatgtagaaattccatcttttgattttaaagacttgtgatcattatcatctctcctagatcttctctctgttctcatgctctctatatctatatcttgtcgtctttcccctgtagctctattacttcttctaccatttttcctctcttggcttccctcatttactttctccctctcctgatttttgttttcgccagatggttgaggtgagtaagatctatgtctactcctttggttacgtttcaaaggagaagtagcattaccatgccttgatcttaaaggtttactatcgaggtcatctctttctgaccatctctccttcctctctctcccaatttctttttcttgacccctgtccttatgtgcacccctttcactttctctaccatgatttatttcatgtcctctctcatcacttccagcttgtgctctcctcaaccttttcgttcgtggagaaggggaccgtgat

SEQ ID NO: 7036 - DNA, 501 bp, Cannabis sativa
taaactatttcataaataaagtttttttataatgattatttttatatatgtacagattaaatttattaatgaattatattcttattattatatgtttttaattgtttaaaagttaaaaataatctttttgaaacgaaattgttttaaaattattttttcctaaatttttgttcattcaagagttatatatatatttatttgtaaaagatggcctgatgatataaatgaacgaaaaaaaacttataataaaacatgaattaaattataaatactatcattatattatagttaagaaataaattttgcaccttaaagatataaaaaaaaaacttaaaaaaaaatcataaatcaaacaaaaaaaaaacaaattgtcaattattataatgaagataatatatataagctttaataaaattcaaaaattataccaatttctttgtaaaactattataattattgggtgaggagctagcgattatgttgcttagtatatctattcta

SEQ ID NO: 7037 - DNA, 676 bp, Cannabis sativa
aaaaaaaattgttactatttttgcattgtttttgtaacatttcttacagggagagatctctctagagagtgcagtttgatgatgttgattctagtcaagcaaatgtgggagataatgatagtcatagcaatgatgatatattgatgatgacacaactgatttgtagtagtatttacttattttagttgaaaaaattatacttatgttagtattttaatcatatgtttatttactaatttttagacagttataactatattatgcatgtataattagaataatttaaaattatgttttattgtgtaattatttataattaagctttcttgttttatttttttaattagaataatttaaaattatgttttataattgataaaaattttaaattaaataaaaaaaattaaactacaaagttttactggtgtattattgcgctgacaaaagtcaaacattcatctgttaaaagtgacttttgcaggcgagttaatacgcttgcaaaagtaagacttttcccagtgtatatttgccctggtaaaagtaagacttttcctagtgcacatttgcgctagcaaaagttagacttttcccagcgcacaattgcgcttgcaaaagttattagacttttcccagcacacattttctctaagcagaagttagacttttgccaccgcat

SEQ ID NO: 7038 - DNA, 690 bp, Cannabis sativa
tttaaattctgcacaatttattttgtttttgacttgatactgtaagtccgtattttgcagtagcaagttttcaacctattactacaagtcgctactgttacgatttatttattattattgtagaagtatattatattttgcaaaacatcgaatttcagagcacaattataaataataggccaaatatagcacaaactcactttttgtgttaaatttaacacaaattttagatcttctaataaaattaaaaaaagataacgacgatcaattatcttgattggaggaagttttggttctttagctgagttttgattcacgaaagagataagtcattttgaaaaatgttttttttaaaaaaaaaaaaatatcaaaatatatgtatattaatattttattaatattgttaattattttactaatttatttgttaacattattaattttgtaggtattttatttttagaaaatatgtagaagtttagtaggtttatgtaaattttcgagagtaggttattatttgaataagcatgtcctttagttaaacaaatggtgattctttgtcattggttaatatttacattgaaaattcttaaaataattcatatcacttatacaataaataaataaataaataataaaatatctaaatactacaaaaaaaatggctttttaagttaaaaaaaaaaaaaa

SEQ ID NO: 7039 - DNA, 1809 bp, Cannabis sativa
tttgatcgccatttgttctatcgtgaataggtggatatgaagaagaaataacaaacttttacatttattttatcgtcattttttattcctaaaaagaggagggggttactaggtgcgactcttctttttgggtgtaactataagagttccaatgttcaccaagaccctatgtggtgggtctcccccatttacgtgcgacatatgagccccaactgaatactaggtgcatgtatgagtacccctgagatagatgttaagagtgactaaactagtaaatattgtcctctattaagactcccaaaactaaaggagccaccaaaattcgaaatcaagacttttagcttagaaaactacctgtgagtaagcactttgtcactaaaccatttaaatgaacgaagtttaagatctcagcggctcagtccaaaaatttattttcccctataatctaaacactaaaggatattatcaatagaaacaactctataaaatttagttttttggtaaatttctaaccaagtgttttgtggataaaaagtagtgtctttagataagatacctatttataggttttagttaaattctttgaatttcatttttcaccaatctcatgattgattaccacacttaggtaggatgtttatgaggttaaacaaaaatattttgcagttacaaatttttcgtttcgagacactttttagtagctcctaactgaagttgaaaaattataatatgagatatatcagtaacatatacttgtgatatatcgcctagaactattgtattatttttctacttttggtttctagaagctgaattgttttaatattggtcccaataaatttcttaactagcttccgaacacattttagcaatccattaattctccataacaccttgtaacttttcttttttgtaattgtaaaaattaggtaaatttgaggaagttacaaaatggtaaccaaatttttatacacctcacatttatgttacatgatttgagaaaattatttattttgttacattttatatttaatctatattatataattgaataaataatataacatttaagacttaaataaatgcttcccacattgataagacacaatttttatactaaggttacaatttgtatataggacccaaaatcgtatcatttggacttattgttatattttataataattaaattagtataaaatatatagtaaataagaagattgtaaccgcagctgaagtaatttgattatgaaaaagaaaatgtaattaattaaacaaagggtccatagttgtaattaaagaaaagaaaagggaaagcatggaaataatggaagtgtaaacgttgaagtttaacagaagatgtctgtctgtaaatgtaatatagtgtggattttattttattttaattaattttttgaaaattataaataaaaacataataataaaacttggaaggaagtcaccatctttcatcgtctcctttgtaactttcttacacgagaggatagccaagcttctctctcttttcatctcacaccaaatatataatataaagcccattttagatgcaaattcttttcctcattcatatcctctcttctctgttttgatacatagctttcatttctacatacatataaatatataatctaattgaacaaacagaaacagtaattactaattggaaaagcaataaaaaagaaaagaaaaaagagggcctctcgccctctaatcttattatgcctcttctcagatcttagattctcatcatttcccatctgggttctcttcatttggtaaattttcatt

SEQ ID NO: 7040 - DNA, 1291 bp, Cannabis sativa
ttaagtttttttaacacacactaggtcaaaaggtatgagcacaattaaaaatttaaaaaaatatgagtttagatacaacacgatacgatgttataaattattatgacatagcacagaaaatatataataaaacatgatattacacgagaagtacaaaagacactatacgtaaccacaaataaattagtctgaaaaacacgacacgtaacaaacttgaaaaacacgccacgaaacattagaaaaatcctataattaataataatatatatatatatatatatgtatttgtcaatataaataaattaaaatgataataaaattttaatataacactgaatatagtaattttataattaaaactattaaaatatgtaaaactgtaatattatattaatttatttatagagtgtgtgatataaaaatattagtatttataaataaatattcaaattttaataatttttattaacttttatacgactttttgtaaaatattgatgaaaatttatataaatataattacaactataaaattaatatacatataatgtagtaattaactcattaactgtaaaaaaaatatgaaaaaataaagtactaatttgagcctagatataaaaacaggttggcatgtttaagaaaagtaggttgccatgagcaaagtacgatacgaatttgagcacgatacaaaaatataaagtcgcttgggcctaccctttgaaaatattagtacaacatgacacgacccatatttttttagggcacgactctacacgacccatattttgaaaagcacgaaaaaaaaatatgggtcggaccagcatgacacacacattagagcactctcattaacatctctacttcatcctttcaaatatatcaccaaaacttcactttctttattttacctcaaacttttatattagatcatacaccaacttctttaaaataaattgtcaaaacttcatttttttttcaaattttaatatattttattcatttaaaatttacattattaatatttacacatatctccatacaaaaagtaaaattaaaactcgaacaaataatatataaaatatgtttagagcaatgaataatatatattctataaatgtgaagcatgaataataaatattaaaaaaaagtttaaatgacaaacgagtttggagcatcaatctactctagtgtgattttattacggttctttaaatattttaaatttttctctattttagagaaattgttgtgatcattgctctagaaataataaaaaactctaagttttgag

SEQ ID NO: 7041 - DNA, 800 bp, Cannabis sativa
atttctctttatttatttatttatcgattttctttttagaaaaataggacaatcaattaataaaaacagtttagattttaaatcaatctagtattttgacaaattaagagaatttgtgatagtcaaagtttagtgattcgtaaagagaaagactaggtaagttgtgcaatcccacatcgtttgaaaaatgtcaagtgatgattctaagactatataaatataggactacataatcaaagaggacttaaatggattgatgaatactacttcccttaataagatgtttcttttttttttcgatacctcatcgcttcagaacttcaaaataaagtgtgcttttgagagacacatttaataattgtgttatatttgaattttcgacacctttaataatcatttcatgtcacaatgtcataaattttttccttaattatcgtatttgttttgtaccatgacattaatcgagttattgtgtctatatttgagttattaatatgtttcacaattgtgttacatttgtatttatcttaatggtatcataatcgtgttgacatgaaaacaaaactataacacgaattactaaccttattgaatgtcaatggcatgaattagtaaaattctagcatttctctccaatttagtttaagtattattgatattattatacatgtagatagaagctaggagaacaaacaaatctacttaatttattgagtgtgatttttcactttgaggaggacccatttcagagagaatcataaatatgaagagagaaagtgaaaacgaaagcttatgatgtt

SEQ ID NO: 7042 - DNA, 598 bp, Cannabis sativa
aatgaccacatttaaaacagagaagtggtaatttatcaaacttaaattgaacccactttttaccaccatcaactgggatgtatctgccaacaaaaatctcatccataactggaaaaccaatcttcacacggacatatccattcaggaaaatctgttgcggattattccaaatgatatcttccacatccccagccatactacctaggcgcttgacattattaactgtcagagcctttagaggaaaacccctcatcttaatccatacagaaaccttgtccaaccgcgcatctcgccaatatccactctgtggccattcttcaaggattaacactcccccattaaataaccacggttgcttctcaagtatccttttcgcatcacttctactatggaaggacactccaaaataactatggtctgtatcatcatccatagccttcactttccaatccccaactgacttccacatcctggtaaatatggttcggaacagccccaaactcatgctttgtttcgatacaattcttccaatcaaggacttctcaccaaactcagtaacttgttcttcattcacttcccaatcctcttcttgatccat

SEQ ID NO: 7043 - DNA, 662 bp, Cannabis sativa
ctacttttctataataaaatactcaactccctttcacgtctgtataattaatctttttttcctttataaaatacttaatttaatacaattaattggtataatttaattcaatttaatttataaagtgatgatatttatacttatatagaaaatttctgcacttatacaaattagatgttgattgatatttaaaagtaactatctaattcaatttataaatatttatatatatttaaaaaaattatatatataattaatattttaatataaaaaatattaatttaaaaatctaatatatatgatacaaatatatttcaaaatatagtagattaaatgtatatttcattcttatttatcaaaaaaaaaatatatgttaaaataaattcccacatgccctgtacactgctaagatcaacatatacacaaagattacgtacagttaaaggactaagcttcgacctctaaatacttaggacagatcagcaagttagttacaaagtttgttaaactttgtaactaactcttttgttctctgtattccactacaacacataaaaagccgaaaaatctcataagagaagaatgaagaccagatcaaaactcagaaaaccagagcagtacacacatgaaaaaatcagatcagccttgaaagtttgaagaga

SEQ ID NO: 7044 - DNA, 548 bp, Cannabis sativa
ctatgagaccaactacccaccccagcaaagacacacacacactttaagacacagagcaaaaagaacaaacccacctaaaagacaaggaccccacccacagacaaaacacacggttgaaggagaaggagcaaaaggaaaaaaagaaccaaaaaccaaaaggccaaacaaaacacacgaagggaaaacacaggacaagaaaaccaaaaatctaggaacagggataccaacgggagaccacacgaggaacaaacaaacagtgagggtgagtgaacgaaacaagcaaaagattagtagaagactaatctcagagaatggaacatagaagaaactccatctcactctctctctctctctctctctctctctcacccaacaatattattatgtactacatccaaattaaactatgtaaaacttgctaattaaggaacacataggattctatctatgccattggcacctgaaaacttaaggtttccaaactctccctctttattattgagttacctattattgctataatctttggctccttgatgagtctagtc

SEQ ID NO: 7045 - DNA, 1036 bp, Cannabis sativa
ctaaaaaaataaatttaattataacaactttgtttaataacacattttctaaaagaagtgtggtgattggtgacacgttggctcgggataaaattctggccacctaactcggtatgaatagcatttctcatttttataatagttattaaattaaaatataaaatttattaactttttacattattaaatatagacacatttaatttgtacactctttatcatgtgtaattaattctaattataaatattttcaagtagaagcacgttatatttaattatgtaactgtagttaattatataaatccggcacatgcacttaatttgcacatactatattatctacacaaaatataataatgtgtaattaatctcaatcatgtaattaaaaatgatatgtaatttccatatacaattctttattatgaaaactaaatagataaaatatatataacttttgtgtgactctagctagctaacattacttatattatatagtatgtaattagagtgtgcaaaatagaggtgtatgaattttttactaatttttatattataagcttaataataatattgttgtaaacataagcatccattcaaaaaggaaatgtattcaataaatcaaatgaagttagttctttctctctcaccttggattttttcatatactatacaattaatttttaatgaaatcggagatgaggggaccatatagttccaccgacacatatagtatctaatatctatagatggcaaattccactatattatatatatagttattttaattaaaactcaaaatatttttataacaacaatctaattaaggctaaatttatatgttacattcataccctcaaatcaattaacacaatgattatacatgatctatgaaaactttatatatacgtcatgcaaaaaaaatgaaatatatgtaagataatttcaatcaaaaaaggaaaaagaaattctgacaaggatggggaagaaggaagggaaatatataacgatatttctaaagtgaatcaaaatgattaat

SEQ ID NO: 7046 - DNA, 1754 bp, Cannabis sativa
tttttaatttttttattttaaaacgattataccggcggaccccctaagttcgccggtaataacaccattattaggggcggacttttcccgccggtaataggtccgcccctatttctaatttttgttgtagtgtgtggaagtagcagcaacaacaagaatgagaatgatgcgatggccaatggttctttgacgttcttggtggacagtcatagagaaaactttgttaaggggtgggcaaggatcaaggagaaggatttgatcacgaacagcatggtaactttcgttgagacctttaagttcgaagatccttcacccattcccttgattaaaacgattgtgtaaaacgatccacatctcagcagctttgtcttaataccttatgatgctcttgatctcaggggagaccgaatgcaaaatccaagacataactatttggttacatctaatccaagaactaaaagagaatcatttggaggaggttgaggaagggtataccttcaagaaatggggttttattttgggctccaattaaaatcttgaagtctcatcaccatggttggaagtttcgatctgtgagaattggagtggcaagaactaagactggatgatcagcattacttagatagtacggactacgaatgtcctcgtatgcagagtgattgatctgaggttgcttgattggtggagctagcgatggagctcaattgtctttgtcaatagaagtttgagatgggagaggatcgatcagagcagtggcatcgaccacgggattgatggtagtagcagagttagttgctcgtgtcctcaccattgttaaaagcttagattgcttggagatttagctttttttttgtcttccgataccatattagaagaaaaaaaaatatttgttttattatttgtaaagacttatttgagtacaagagaataaaggtgccttatataggcacggtatgaaccaaaactaaagaaaagaataaaccaactaatcctaactaatttatcttaacaaacttaactaacttaacagaatttaatagaagaagagaactttaatatcttaggaaatgatgaagaagcttaggttgtgtttggtatcacttttttaattagttttttagttttaaaattagaaaaagagaaaatattttctgaaatcatgtttgataaaactgttttcacttttcaatttattaattgaaaatcaacatttaaaaaaaattaaaaatcactttctaaatttttttaaacaatttctttcataatctgtattttagactctcactccaacctagaccttggaacctagacggaccttggccccaacctcggacccagacccaacccacaatcccagtttcgaactcgaactcatcttaaataaaattaacaaataaaaattacagaatacacttttgttttctattttaaaattaaaaaacaaaaatagttatagaacgaatttttatttttcaaaattaatttttttttacaaaagaattacatttatttttttgtttaaaaaaatttagaaacaaaaatattaccaaacaataccttaattatgaaaaatttatactatagcttgcagcacaagatgcaggggtgtacaaaagacaattatattttttacaatatgttgatctcttactaataaccttaatctttagacgtaactcataaactaaattctctttctcggaagctgttctttatgataagtgttaactacaacttggctcattacaatattt

SEQ ID NO: 7047 - DNA, 663 bp, Cannabis sativa
cagcctttgcttcggtaagatacaagctctgctttattagttttgcgagacatcatgaaccactcattttagaggttattgataaattgtgctaatttactaaaattgacagatgataactctcccctttttgggaaaagaaacaaaacctttactaaacaatgcaaaaaaattagtatgttaccgaagacattcccagtctctatgcaactcaaagattgggaatgtgctaaagctctgttacccaaagccaccttttatattaagagcatttaaaattttaatatgtgattcctttgtaacttcatagacatgctttctgatttcaactggtctcggttaatgttctgtgcgcttatgcacaaatcagaaagttgactgatcagagaatgctattgctgcttacaatacgcattctgaaatgtggatgcacatttctaatgattcaccatcatgtagaataaatgttgttgttgttgctgttgttaaaagaattggtctaatagataagagaacgtaccagtgtgatgactgcatcagtgttagcaaatgtataacataaatggtagtacagttaggtctatgataaacacaagtggtctgttgttggaccattattttattctcatgtttttttcactttaattcttctttctctgatga

SEQ ID NO: 7048 - DNA, 508 bp, Cannabis sativa
ccactcattgtgccaagtactcaaagttctttctcgttttgtcatacttgatggcaaaatcaacgagtttcttaatagatcaagaatgtgcttgttttcacatttgtaaacctcttcacaaatgtctactcctctacagaaaatgccgtcaaaacaatttgtgactaatgtaattaaagacaactctacatctggagtcgtggtcttttcaaacaaacagtgaagcactagccaaggtatttgattttccaacaaaatcaaatcatcatatagtgttgaggacatgcatttcacaccaaagatggggtcattttttcctacaagtttcttatacactgttttgcggaaatattcaatgagaaaacaaccatctattaccataacttttacaaattcatccatactcatatcgattgatccatcgtagcactctcgagcttcttcttgaattcccctaatagctgttgtgagttcactcaatttggacttagggtttgtgtttggaaaa

SEQ ID NO: 7049 - DNA, 591 bp, Cannabis sativa
aacctaatcgccgccggccttctgatacacataggtcaaaccacacttgccgcagtaatgtcggtcgaagtggttagccatgaaagttccggcaccgcactcagcgttgggacactccttcctcagtcgctgcaccttaccagaatcatcaaccttgtagaactggagaagagcgagcttaaccttcttcttcttatgtttgatcttctttggcttggtataggtcttcttcttcctctttttggctcctcctctaagtctgagcaccaagtgaagagtcgactccttttggatgttgtaatcggctagggttcggccatcctctagctgctttccggcgaagatgagacgttgctggtctggtgggatgccttccttgtcctggatcttagccttgacattgtcgatggtgtcagaagactcaacctctagggttatagtcttccctgttagggttttcacgaagatctgcattgttagggttctgactctgatgaaattggaatttgaagaaagtgagatttttatagtgacgaaaattagggcatatattatcgggctgggcctttttttaaattgggctcaaaagtt

SEQ ID NO: 7050 - DNA, 1037 bp, Cannabis sativa
ggcaggaaacatgattatttaaaaagttattttactaataaactttttcataaaaattatttttacaaaacattcgtatgtggacatatgcatgtaataagcataaacatatactggagactaacctggtcaattggcatcaaacactactagggaccccatgcatttgatgagcaccataaacatgaaaaatatagaggcaccaaattttctcagcaagatcacctgggaatcagttgattttcagtaacaaatttgctactacaattttttacacttaatacatgtgaaactcacaatcattgtgttccttcttatcttcaatacaactgcagcatctacaattaaaatttctcaaggatcaaatatctagaaaaaaaaaacaatggagccaaaagactttgaaaaaatacctcattgttgaaaaatctcctctgaattgaatttccaattcatttatataaaatctaaacaggagtgacctgcagtttccacaaaaacattaaacacttgtttaagatcttattttggatggaagaaacgaagattatcgattcaaacttttgaggttaatgtcttaaatggaagatcatagttatgccattaaaggccaatagtagaaataccaggagggaattgcggctgctgcaaggacaggggatacattccacagtggatgcagttgaccactcaatatgttcatcaaatactcgagaatattgctttcctagttacaaaaatttagtatgagcttaacccaacaacaaattcttagcaaaatattaaactttaaacaatataacatatgagcagcagtgttgactaccatgaaacagcactcagcttcagctttcactagcaaattaatgtcattgtaagtggattaatgagatcaaggttatgagttatggtttcaacttcaattatgtaaccatagtccaagcaaagtttcttcttagtatttgtgtttggtaggaaaacaccatatattaacaaaagtattgatggatgaatacttttaaaattttctaagtgga

SEQ ID NO: 7051 - DNA, 741 bp, Cannabis sativa
caatttactccattgctgcttcgcagcaaagtccaaagcaaggatagccatagcttcaacgaacaaagaggaagaagcataaaaaaccttagaaatcacttgaaaaccatgtaagacagcatctctaatcataatttatattaatttaaattgtaaattctaccatcataaggacattttagtaatatttttgtttttataatttcttaaatcacaataatcaaactagaatttttgtttttaaaaataaaaatatgctctatagctattttttatataatttaaaaacaaaaaaaatgtgtgttttaaattttattttaattcttttaacttgagtaaggagtgaaaactgaagtgagagaaagtgggtggcgggtcgaggtctagggtttgggttcaagtcttaataaggtttggattcatgtccaagcaaagtctgaggttcgggcgcttagggcaaggtctgggtccgagttcaaatttgacacaactatgtgtgaaatttacataagttttaagcacgccatttacgtaagtcactgggaatggttatctcaaaatcagagtgtaattgtgaaaggcttacttattcatgataataccattattggctatgaagggctctattgtatgagaaagaaccaattctgtaatggtaagaagttggtgttaaaattgaatgtggctaaagcatatgatagggtggagtggtgcttcatccaagggatgatgttgaagatg

SEQ ID NO: 7052 - DNA, 1044 bp, Cannabis sativa
tatgaatggaagccaattatgtgtggacactgccatgttatgggacacaacatggatgattgtaggaaaaaaaaactgaaggaaaataggtgtgggttgtgaaaaaaccagaacagaagtccgaactagaaaggaaaaagactgtaacagtagatgaagatggtttcaaaccagtttcaaaaggttgaaagcctgaggagattgaaggaagcaagcctgctcaaatcagcaaccattttaaagctctagaggatgctgctgaaaccaattctcttagagaagggaatgagatgagtatgcagaaaaaggatcaagaagttaacacaagagagggggaggttcctctcttgctaatggatagaattatgtcatagaacgtctgaagaatcagtagccaacaaaagcaacttttagtcaagcaattgattggaaataaaaaagtagggctagttggtctccttgagacaagagttaaggctcggaatctaggatccttatacgtaagaatgttttccagatggtgttttacctctaataatgcatggcataatgggggaaagaatattgttttctatatttcaattagctttatgttactattgtcaagtgtacaaaccaactcatccacctttttgttgaaaatatagatagaaaaacaagtttctttgtctcttttgtctatggtttcaatgatgaggttggaaggaggattttgtggagagatcttatggatcttgatggtttggaaacatggatagtacttggtgattttaatgagattctcaacaaagatgagaggattggcaggcatgctagatttaataactcgagtgacttcaaggattgtttagaagcttgtcaacttgaagatgtaaagtttacggggaacttctttacatggagtaacaagcaaatgggagatgatagaatttattctaaaatagatagaatccttgcaaaccagaaatggcttgatcttcactcagctactgaaatagtttttctcaatgaaggattattcgagcattcaccaacaatcttaac

SEQ ID NO: 7053 - DNA, 590 bp, Cannabis sativa
ggttctggtctctagatggtttttttaatgccaagagagacttacggcagggtgatcccatgtcccctctattgtttgtgttaggaatggaatacttgtctcggattatggtacagtggggaacctagatgggttcaagtatcatgatagatgctcagtgctgaaattaaaccatatgtgtttcgatgatgatctacttttattctgtaatggagactacatctctatcctgcttatgctcagaggtcttaagctcttctcctcatcatcgggtctccaaccgaatgaagtgaagacagcagtctattgtgccaatatgccagatgcaatagtatagagagtacttgaagtttcaggtttttctcgaagctatttgccttttaaatatcttggcattcccatatgttctaaaaagatatccatagctgaatgagatagtatgcttgagaaaatgacaagcaggatcaaaacatggagtttaagaaacttgtcctatatggaaagagtgacattaattaattcagtgttaattataattcattcatactggacacaaatcatgatctttccaaagaggctactaaaaggtg

SEQ ID NO: 7054 - DNA, 2485 bp, Cannabis sativa
aatgtaaccactttgtaacaccctaaaaacattcagttgatctttgacagcaaaagaaaaggtgttcgacagtttcctagttgctgcagtttaaacaatatggatcttcaatgatattcaacctatacaaccttgcttttgtctttaatctctcatggataggaagccacaatataaagttgtgttttggggtgtttaatctacaacttgctccattgtttcctctctcgaattggacacattatttgataccctactgatatgtgataaggagctcctctgaattgctgcatatccaatgaagagcaaactaaatcctttaacaacaccagttgcctctaataccagctcccattggttgggctagtgtagctccaccaatctttattcttgagatagacactatgaaaccattgtacccataaattctcctctttctttgtaatggcccaaacatacttaatcatagctgctttgttccattcctttactcttttgaaacctaagcctccctctgtttttggtttgcacacttgatcccaagcaattgcaccagctccttgaaacacatgttgtccttccataagaatgccctacagatagtttcaatctcactaatgactttcttgggcaaaaccattacttggctccaatatgcatgattggagagtaggactgagtttatgagcactatccgagcagcaaaagacaggtgtctagaactccaaactctgattcgtgttgtcatcttttctgccaggatagagcactccttgcttgatatcttccttgcagatataggaaccccaagataagtaaaaggaatcttttggagagagaaaccagaggcagtcaaaatcaaatcaatttcattatgtggcacattgctgcaataaattgctgatttgaatgggttgggatgaagtcctgatgtagctgaaaacagcttcagcccctgcagcatatacatgacacttgtataatcttccttggagaataacagtacatcatctacaaagcagagatgattgagtttcaaacctctgtacctctcatggaattgaaaatcaaattttcctcctactttcttcattattctagagagatattccatccctagaacaaaaatcagaggggacatgggatgcccttgcctcaatcccctcacgaggcaaaaaagccatgcattttcccattgaacattaaggagaacttgggagttttgatgcatatcataaccagatcaacaaattttcttggaaaattcaaagccaccaaaacctcttcaatgaagttccactctattgtatcataggctttctgtaaatcaagtttgatcatacagttagccctcttggatttcctcccataatgtctaatcaagtcctggcatatcatgatattgtgactaatctatattcccattacaaagcctccctggttttgagcaacaatagaaggaagaatgtgttttaatctagaacaaatgagtttagttgctaccttgtagatcacattgcaacatgcaatgggtcaaaaatctttgacagtgttgggataattggttttggggatcaaggttatgacagttgagtttatttcctttaacagcttgcctgtgtccaggaaagaaactatagcttcataaactttattcccaacaacatcccaattgtcttgaaagaagtagctagaaaacccatcagctctaggagctttaagaccaggtatttcaaacattgcagccttaatctcctcaatagtgtaaggcagtagcaaagaatttgcttgtagaggagtaacagtagggcccatctgcatcaccttgatttgcacatgccttcaatcttgcattttagatcccaacaggtcattatagtatcccagaaaagcttcagctattttgattggatcattcactcttgtacgtggacagaatactgttttgcctccttcttcctttgatacttgcatggaaaatttcagaattttcatcacccttctctatccatgtaagtttagctttctgttggagcattgagtggtaatcttgctgtttctgtatcagtaatttcctaacttcagcttctttctggtgcaaagttgagttgagggggtctgctgtatactattatggagttcttctagctcagcctttactctaattgtctctgcttgtaagtcattgtacccctccttattaatttctttaaacactctttttaaatctttgagctttaaaaccaactgaaacattttagtgccagtatatgatgcatcccatacttctctaagtttgctaccatactccttatgagacctccacatccgaaagtacttgaaaggtttcttccccgattgagaaacagcgtgcaaagtcagtaaaccaggtgagtgatcaaatgtgccctcatttgagtaaagaacctcagctgtaggataagtgtccaaccatgcctgatttgccatcatcctatcaatttta

SEQ ID NO: 7055 - DNA, 662 bp, Cannabis sativa
attagactcgtacctaggccttggcttagacctaaccccggcctcggctctggacccgaccccagccttggacctcaaacccggacttggacccggagcccgacctagacccggatccagggcccgacccaaacttggctgctccagctctagacccagccccaaccccagactcgagccttgacccagaccctgtaaacttggccccagaccctagatctcgaaccttagaccctaatctcgacctgattcgtggacccggactcagaccttgacccagacccagccctaggccctggacttcgaactccgacccaaacctagactcactcccgaacccgaaagagaatcagagttggagtcaagcttatagtaaagataatatgattttatacaagctattaaagtcaataccaaacatagtattgtcttatataatattaatacaatataatacaatctaacacaatacaatacaccatgacgtacccaacaagctattacagttttatattgatcaacatcgatttcaactaatttattcccttaaatgatgagtaattccaaaaactaaagtggcaaatgattaaacaagcttataacatatacaataatatatataatcaccaatagaattatagcgtttctacattgatgtttac

SEQ ID NO: 7056 - DNA, 1068 bp, Cannabis sativa
aaatatccttaaataaaagcccatcttgaggggggtaagaagttctaatatgctttgttattgttttgttattttagttacagtctgtttgttcattggttagttgggttatcatgaccattgggcttgggttagtttggcctaactaatgagagttagtttattgttatgatttggttagttaatatatgcttctcattgagctatatatataggctcatctctataatcctaattcattcagttttaatataatttcattttcattttcctctctccaatcttctcgttccgcaatagaatgtaatttttatctttcatttctactatatttgagatcactcgattcttatacattataattttatgtggtttacaattattatttgttattatttctcatgtttagatcaataggtatagagttcactgacattattttcaccaaccatacatatagttctatttataatgtgtaacccctagatttcattagttaaatttaccaacaaatctagcttgaagagatccgacataaaactgttccccgtgctggctaaattcactaatagaggtggaataatagcggtcgagagatatgttacgcaagatgacaccatttccattaatctctatggctttagggatagttccatcaactagattcgttgttgtcactgccacccaaaaagagtctcctctagggctcttcctaatgttatcaggcctgccatcgaagttgataataacttctgatttaaaagccatgggaccctttagccaatatttttgaattctcttaggtatgtactcacttacaagaacatacgagctgtcattacttattgccactccggctgctccacctagcccccttaaaagcactgttacattttttgatacggggttgtattttagtaatcttcctgttgagtcattcaataaaactgctactggcaattcgctgcaagaacatgtaaaaccttaattttagtaaactacgtactcacacaagtacttactacaaatatatacataataatttcccaagttatattcttctctacc

SEQ ID NO: 7057 - DNA, 1194 bp, Cannabis sativa
ttcactttttataggtgaagattattaatgaggtataataactcaatcacctacaccatataaaaaaccattaaaaaataaaaaataaaaggagatctaatctaaagcgtataatgtgtatattactgatatgacacaaactggaaaatgcatgttctttgatttaatcacactaaatatactttgcccaaaaacaaaaatcacgccaaatccacttattaaaactttttatgggattaatacttgaaagctactaacacaaacatattccttaaaaaaaaaaaaaaacaaaaaacttatttttttgataatttaatcacaccaaacataagaccatctctaatacatgggataaaaataagaaattactaaatttaataacaaaaaattaataaatgttatatttagcacacattttataattatacttcaatgcataataatacaaattaacataaaagtgattgtcattaatgaggatcaacatactaaatatacttttttaaaaaaataataccaatattataattaaaaaaaatagtgtattaaaataagtcattaatgtttttttaatgaaaaaataagtcattaatcttaaatgataataatataaataaaaaaatgtatattaattatgtgtcaaatttagcacaatgttatatcttgtgtcgaatttgatccaacttttaacatgtatcaaaatcagcacaagtttttttttttttctttgattaagaaggcctaaaaacagccgaaacaaacaaccaacacacgaacagagcacctaagaagatgcaaacaaacagcaaacaggaaaactaaagaaacaaggctgcataaacaggcagcagacagagaaaaggaaaactaaaggaaagtaaaaaactaaaatagcagaataactaactcagccatccaccgttgaacttggtgggaaaccgaaaaaactgggcgcctcaaaactccctagcggctgagagtgcagagccctttgagccgcattatgggccacactgttgtggatcctggggatccagctgacctcccaaaggtcaaactttgtagataattcaatgaacttagaggcaatgtctgatgttgtagtgaagcttatccaaatccttgctttcttttgaaattgcagtgactgctccagccgaatcacaccggaaaataatgttcttgtggcctaag

SEQ ID NO: 7058 - DNA, 642 bp, Cannabis sativa
tcacatcttaatagaattgaagtgaaagtgtaatgtcgttttcaacaaaagaaagaaagaaaaaagaaaaagtatattgtcgtatgttgaaattgattgtcgttttgggatagaagtatgaatatgaaaatatatgaaatgaagcaaaagattagatttttgattaatggagaagaatcagaaccagaagaagatggagatggagattcagattgaggagaagctatgcaagagatgcaaatcaacattcaatccacactcaaactcaacttcatcttgccgatttcatccttctttcttcgtttgtcgccgtcacgatgatcagaaaaggtaactcaaaaccctaatttcaattcccaaattcattgcttacattcttctttaggactttacaatttcatttccgtacaaatacaatcacaaaggtttaaactttactgtaattcattcaattcaatacatcatattacagcatttcagatgatttgattgatcataagagagccaattttatgatttgactgattagtaaattgttagtattgattagcttgtataattatgttatttcaatcaatgagatgaaagaaaattaggaacgatcggagtttgatactgactcgaagagtgcgacccgaaatc

SEQ ID NO: 7059 - DNA, 2255 bp, Cannabis sativa
aactcaagaaatagaataacaggctaagtttaatagccccccttaagatggagtgtatatatttagtacacccatcttggatacaatattggagaacggggttggaagtaaagctttagtgaatatgtatgctaaattatgttaagaagaaacatggagaagctgagggatccttgctgaactttttttcgtatgaagtggcaatcgatttccacgtacttggtgcattcatggtaaactgagttttcactgatgtgtattgcagcattgttgtcacagtaaagattgactggtatgttgtgggagacaccaaagtctttgagaagagcaaggatccaagttagttcagaagttgcattggccattgcgcgatattcaggcttcaattgaggagcgagagactacttgttgtttttttatttccatgaggtaagagacttgccaagaaaaatacagtagcctaaaactgaacgacgtgtgtcttggcaactgccccagttcacatcattaaaagaggatacctgaacatttgttgaagataggttggtttctgcgtaagcagtgagagtaggagttgcatcagatggaaaaaaaggcattggctaagattccttttgatatattgcaagattctgttggtagtttgcaagtgagggactcgaggatgggataagtatataagcttgccaatgaggttgcgacaaactataggatcagggagtggagtccatttgtctttactgagtttgaggttagtttctataggggtggaggcaagttttgcacctatctaacatgtgtcattgagtagctggagagtaaaaggtcgttaggaaaatgaaattccctgttttgttctaccaatctcaagaccgagaaaaaattgtaattctccaaggtctttaagtttgaatttaatgcccaggtactgttggaagtgagaattatgtcatcgaattatactaggacagccaagaaaattgatgtggtacgttttatgaacaatgaattatttgaaatggattatccttgagtaaggtgtgactaagtttggcgtaccattatcgtgaggcctgtttaaggccataaatacttttgtttaatttgcaaattgtattcgagggagccttgtatctaggaggtatcttcatgtagacttcctcatgaaggtccccgtgaagaaatgcattatttatgtctaattggtgaatgttctaattgtttatagcagctaaagcaagaaaaaattttacggtgttgaattttgcaacaggtgcttaagtttgggagaaatcgattccttccctttggttgtaacctttggctaccagtcgagccttgaattggtcaacttctccagcttggttatacttcactttgtatacccatttgcagccaatgactttgtggctttgggagtaatttgattattataatccaagttttattttgttctaaagcttgagtttcattgtctacggtttgaagccaatgttttggactgtgaggcttcaacatagtttagtagttcagtgtgagtataagctgccagatagcagctctaaactgaggatgcagtttgatataggataaaaaaggctatattattgggtgtgcagtggaagccacacgacacacataatcttggttgtgtgcttcggttttgaaagttatcttgttgccatatgtgagataattttattataaatgctaaaatattcttgtttccaagtaagtagtctttgcatctgttttgtaaatccacaaagtttccacacctgcctaactgaatcgcaactttacagggcatgaaaaacattttcaaatcataatatctcaacataatatctcaaactattgtttcaaactattgttttttttttttttaaaaaaaatatcaaactaaaattttaaatgaaactaatcaaagtatcttttacaccaaaaaagaaaaaaaaataataattaaatatcaaaagtaaaaaaataaataaattcttttactggaaaaagttaattaaatcacatacaactaaaatatttattttaggcccaaattttacatttttagcttggtaagaattaaacaaaaataagaaatctaaaagtttttttttaaaaaaaaatacggacaacttaactcctcaagcacatgaatatcttttcaaagatgatatattatataaataagacactactttttaatggtagactaaactgtgtctatatacatatctaacactatgtgggcacgt

SEQ ID NO: 7060 - DNA, 930 bp, Cannabis sativa
gaaaagatggtgttaatgcctttgtgttggaccttcgagataataggtgataggtcatcatccacagttattttcgactttgccatttttgtaagctatctgaaagcctaattttggtgcagcggcggtctttttcctgaaggaattgagattgcaaagatttggtaagctccgccaaagcctcaatgtcaacgagtttcctttattgaatttgtatatctaatatctcaaaatttcacacatcttatttacgaccatttagattgttgtattaacactttccgccattaaagtggtttttctcttattgtattatgcttaacaagttctaataatcaacattttctattcaggttggataaaggtgtaatagtttacatatgtgataaccgtggtgttcgagatatatatgatacggatggaagcaatgcaattgcagcttctgaacccctagttgtgctggtaaaatcttctttttacttgcatgttgtgttctaatttataattatttacagaatctgatgtacttgagttgagctgtgttcgttatccaccatcaacttgtgctaaaagatcagtaacttgaataactgacccaactgagctttctgtaggttaacaagggaaccgctagtgcgagtgagatcttagccggagcattgaaagacaataaacgtgctgtattgttaggagaacctacatttggaaaagggtaatctatttaattatttatgatccaatccaaacagtgcattattgcacaaatcacatattcctgacacactgcattctatccaacttcccagcaagattcaatctgtttttaagctctctgatggctccggattagctgttacagttgctcgatatgaaactcctgctcacacagatattgacaaggttttacacaaacaccaaaaacatctctta

SEQ ID NO: 7061 - DNA, 629 bp, Cannabis sativa
cttcacttatctcaaatttcatattacacagacataaattaatgtgatttggttgattaaaaaaacaaaattaatgtgattttgttagttaaacaaaacgttactaacttggtaacttccactaagtgcatcaaattctaacaataatgtatgtggtttgtaaaatgataaagagtacggttataagacatcagcagtgtctaacactacctaaaggtgatgctttgtaattaattagcaatatttcataaaagttattatatatatcaaatacttaattgtatcacaaggatatgacatattagagagtgtcaggcatcaatggtgtctagcaccctctaacatgtcatatggttattgaaataattaagtatcaagtctcatataatttaatacaataaaaactcagtgatgctatgctaagcactactcgtaccttatagcaatgctcttttacaaacacaatctaaaatagaagtcccaattatcttcactatttaccaattaccatgaaagttcattaaaacaaccattcatatcccacaaacatatgagtgaagaggaaacaaaataaaaaataaataagattttctcataagcatccaaacgagtttttaaaccatcaagat

SEQ ID NO: 7062 - DNA, 817 bp, Cannabis sativa
caggactcattgagtgaagagcattcgttacttcagtggcagtgaaagggcgtagcagtgaacaattcattgcatctgtaacagtagtcggaattgcatttaaaacctgctgcaatgcttcttcatttgtgcccgatgcagagaataaatcaccaaaaaaagagcaaataatgtcagtcaagccttgtttcgaagttactgcaacaccagcagtatcatgcaacagtttaatcgtgttattggactttcttgaagacgcataagcatgaaagaattttgtgttctcgtctccactttgaagccaatcaattctagatctttgttgccaataaacctcctcttgggacagcaattcatccaaagtgtcctccatttttttcagattacacattgatgcattggttcgggtctgctggttattcagtgtttcaacttccttatgagctgctgcaattttctttttaaagttgccatatttgttgttgtgccattgttgtaaagagctggaacatgcttctaaattgttgcagaaattgtcgattaaagtgccttccaaatttgttttccaattctgatgtatgatgtcagttgctgcagtatcattaagccaaatcttttcgaacctgaaccttgaaagtcgtttaacttcaggagtttgggctgccaagggaagaacgtcaacagaaattgccctatgatctgatttgtaatagtccaaatgctttgttataatcggctgaaaagagttgtgccattgatcattgataaaacaccaatcaagcctttctttggttgcattgacattgtgtcgcccttt

SEQ ID NO: 7063 - DNA, 1308 bp, Cannabis sativa
aaaaaatctcaaagtttcttcttctccattcaactaccctacctgtcttacccctcagcagtctcctaccaactctgttcaccagcgagtagtgacacatccggtgatcctgggacccacacatccaggatctccaccaccaaaactccaaatgatcaaatagattctgccgcagttggacatctagataccagtttcttaaactgaaaaattgatttcataataaacaagtcttatatgagttttagtattcgtaactggttttttcattaacaaattaattttgattacatgaaagtaaatggtttcttaattcattatcttaacaaaattatttttaactattttttcattaagaaacttatttttctcatcaagatagtttttttattataaaactggttttaattatataaaaataaagtttataggaaaattaatctacaatgtactcgtataaaagaggtacactgatgcacccctattgtttcgacatccgagataactttttagtttttaatcaaaaaaatttcatggttgcatacattgtagttatttaagacattctgcaaaattttgagaaattaaaaaaaaaatttaacacgtcaaagataaggttcaaatagtctattgcacttgtaacttttttattttatgagtaaattgcaataaaacccctaataatttcagtctactagcaattaaccgcgaaagctaatttttggcgacaaaacccctgaaatcacaatactgttagcaatttacaattttcatctaaatttgactgttaactgtgtcatgttggattgtccatgtacacaatgtacacgtggtataattttattggtccacataaataataattattattactatttaaaatagaattaaaataaaaaaatcgtaatttttttctcctaatatatcatatttttcatacatatttttagcattattcatcatctaccgtcaccacaaccaacatccatagctaatgtacccaccactaaccaccaccacgacttatttttcaaatccaaatcacatacacaaaaaaagaaaataaaataaacaaaattcaaactaaatttaaacaaatccaaatctaacaaacaaacacatgtattttcacaaaaatctcagctccaaaactcaaatctaaaaatcctaaatttatttttccactaaatccaaagagcacaaaactatccaaataaagatatttatacacagaaatataaacaaaaaagattgtaagaaaattctagaccctagatcggagagagaggagatcaagacagataaaag

SEQ ID NO: 7064 - DNA, 1015 bp, Cannabis sativa
tggatcttggtttggttccaagtacaggtgcgggtctagggtttagggtcacgttcgagtctattatgggtcttggtccgagtacggggcatgagatttaggtctaggtttgaaatcgagttatagggtaggatcgggagtggggtcctaggccgggtctaggtttgggtttgaagtcggggtttgagtctgaagctagggtctatggtaggggttgggactggggtttgaggccgagtctgggtctgggttcgggtgctggtctgggtccaagtttgaggttgagggtcgaggttgttgcagttttataccctaaataaaatctaattctaatgtaatcttatttacttatcaataaaatatcaaagatcattttttgctattgtacattgcgtggttcacatgttactttcatgattatttaattaatgtataaattctgctaaattctaaacatatagctattcacaattgttgtgttgtcaccacaacgaaaaataatcatgattatatgcttcaattagtcctatttttaattaaggttttaaagtatttttaattgattttagctgtgttttgtgcaattttacgcttttgattattaatattttcaagtttagcattaaagaagataaagcgaattcgagaaaaaaatttgtaaaaagaatcaattaaatgaacttttattgctagagcaccgagaaaatattccaagaaagaaatccaaaagatctggtgcgattggagcttctaatgttagaaaattggaatgtgtggagtagcccctcaaaattggatttaagtgttaggatgctaaaacgtaaaaatctggcaacaaggtcatggaacccgtaattcttttctgccaaaaatcgggctttgagtgcaagtagtgccacgacccgctatggaaaatttaaaaaatggatctcgtgctttaaagacatgggtcgcaacactacaagtgagtgtcgcagcccgcctgttattctgaagacaattagggttttgcccc

SEQ ID NO: 7065 - DNA, 832 bp, Cannabis sativa
tgggagaggtatggaggattccccttgtaacagaatacggggctgtggcttggtaagtttgttcaatcgggggattgtcgaagtgagcgatgagcgtgcgaggcgggttaagagtggccacgcattccctttagcgaaatcagtacgatatttatcatatcccgttgttggaagtttggctcctttcatccatggaccaaaagggagatcatcatcattacctaaatccattctttccataaatgcaatgcatttttcaaagggatgtccaaggaggccacactcaaagcaaaactccggaagacgctcgtatcgaaagtcaatccaaaactcatcctttactttgggtaggctaatcattcttccacgtgggagaggtttggtaacattgatattgactcggatgcgtagaaaggggccccatccttcatcaagagaatcttcatgaacatctttgaactcaccaatgagattacccagagcattggctaacggtttggacttgcttaagaaaggcaagcggtagacttgaacccaaaaaggcacagagataaaatccttcttagagacattttgcagagcagttggagtgtacactactattaagtggttttggaaatgccatggctccttatttagcactctaattttatcacctgcacattggaaagtaactttaaagatatcatccccataatctgaaatgtccacatggaaacgccccttccagtggccactcatctgttcaatgaaggttggcttatgaacataattttcagagacgacaatggcgaacataatatggcttggaggttgaagttgaggtggctca

SEQ ID NO: 7066 - DNA, 550 bp, Cannabis sativa
cttcttctttcttgagttcgcttttttgtggaaaaatttggtattacggtccccttcctttagccataaagcacaactcctttatttccaaaatttctcctctttgtccaaatacacattgtatgatcgctctacctcttttaaatgattccagcttttgtgatctgtttgagtggataaagtggcaattttatcttcatattccttgattctcttgttcatttccttctttcgggccttattccatttattaagaacaacaccacatttatctatttggtctttgagctgcctagccgtggtgctggtagtgcccaccccccatgttttcttgaccaactcatggcacatttcttcctcagcccatgcgtgttcaaaatggaagtgagagtgccatcgaatccccttaatggcatccagttgttgtgtatcacaagtgagtaataacgaccagtggtctgaatttagtcgctcaaggtgcaccactttcgcagcaggaaaaaaatcaaaccattcggaattaccgcaagctctatctagtctttcaaag

SEQ ID NO: 7067 - DNA, 1101 bp, Cannabis sativa
tggagcgcttctgaagcaagcactgaacattctgcaatccacctcccaagaaggaacgccgattgaaaaggactaaccaacttatctaaaatcggctttaatctgtccataagctagcgagcaataatcttatacccaaagttacacaggctaatcggccgaaactgatcaaaggaagatggagtttcactctttgggataagacacaagaaagtatgatttagtttttccaccaacttaccatactgaaaaaactcctgcaccattcgacaaatctcgtccccaaccgaagtccagcaattcctataaaaaatccctgaaaaaccatccggccccggggcctttaaagggttcagcttccagactaccgtcttgatttcatctttagaaggcacacgacagagctctgtgttgtcctcttcacttacatgcctttcaaacagcatctcgaactcctcttcctctatccggggttgttggctagtaaatagggaactaaatttctttaagaagaaattccccattccttccctgtcgaagagccatttattatcatcatctagaagggcacgaatagtattcctccgtcgtcggatcatggttgaagtatgaaaaaacttggagttgcagtcaccaagcgctacccagagttcgcgagatttttgcttccaaatcctttcaagtttatgctctaaatcaatgatctccaattgcacctctgtctcctcttcactagccgcctcactttgctgtgtctgtaaaatacttaaacgagcatagagcctcttaagttgttgatcacagaacccgaaaacatttctattccactccttgagagcaactttggtctccctaagcttcttgcacacacggatgcctgcttgtccagagtatggtttattccacgcctcctttataatagctccacatctcgggtcagtcgtccacacttccaggaaccgaaaaaggtaatggagcttgtgagtattcggttgtgtatccagagccacaggagcatgatcagacgccaagatcagatggtgaaacactgctgcttcaggaaattgcaaacaccaatcagtgctgactatggccctgtca

SEQ ID NO: 7068 - DNA, 1176 bp, Cannabis sativa
agaatcttctttgagagcaacattatttggacctagttgcaatgaattaatggacattagaacttaattaataagagtgattcttccaacaaaagatatattccttgagctccacactctaatgcgagccaccatttctcaaagatacatgagcattgtgcagtcaaaagtctattcgcacaaataagaatacccaaatacttaaaaaaggcatattactccttgtaaaacccaaggcatatagaagtctttgaatttcaacttattccattccgcaacaataaatttttgacctaactcactaggctgcaagccgaagttgaagagaacagttttaatccttgaagcatgaaatagatagatttgaacaatatttcggcatccgttctactatagcctagcccgttccagaacaagcataagtaaaagtttatccattagaagatttagcgaataacgatcgggatctagagttcgcgggcataaatctttttatttatagattttataataatatttaaataaaaagatataaataaatatatatccaactttacaagctaccctttctcttgatttgagcattcaatccctagttgcacattcattgtatataatagtatgtcacactgtccgttcctattgatgatgagtgaaagatgattcctataatctgagtatacattggctctcttagccaagcattttcaaatctaaatcttttcttagtagcaacaaaattaccaatacaggtatcaaggagaatgggacaatgatctgaactagacccttccaaattaaagagtcttgctgagttaaagatgtctagccatttttaatttgcaagggctctgtctaaccgaacctcaatccagttgttagtgcctttgcctttctcccacttaaaaggatacccagtcaactcaatatcacacaatatacagtcggtcaaggtgcgattaaagccttcgattagccactcggggtatgagttaccaccttttttatcatcatgactagccacattgttgagatcacctataatataccagggaagatcatattgctccgccaaatttctaagtaaagtccatgttttaatacggttactaccattaggctcaccataacacccagtcaaacgccaaacaccattctcatcattaagaatactca

SEQ ID NO: 7069 - DNA, 997 bp, Cannabis sativa
attagcacttctcatttattattatgcagggccgcccttgaatttggcctgcgcctagagtccatccaatctaagggctccaaaaatataaaatctctttcaaaaatacacatttttttagtaattttttaaaatatttcatactttctaataatagtatgacattgtattgtccgtttatgaatttatttttgaacaccttttcataaagtatagtccatccttatatatttataattttttctatttttagtcactttggttgcacattcaacatttatgcttatgattattattatcaaacaaatgtgatgttgtagctgaaatgatcaaagattcataagcaattctctatgtatgttcttgtattaacttttttttgagggtgttttaatcaacaaatcagggtggtagtaatatcagaagacaaatcatcatcaccacaacaagatgatctgacaaagatgaactcggtgattcggcgaatcgatctgagttgcaagctatttgcacctgtaattactggcttcataataagttttgtgtcactaaaagcttcagcaatgagtttggctatttggaatacaatatcagtttggttagaatattggcttttcatatctgtctacaaaggcattccagctttacaagaaagtaaccataaaagagccttaaatcaaaacagaattaataccaaattggtttcaagtggttcttatttgaaagcatggagagtttatttgaaacaggacactgttctacctggaatagctctggctttgttgttcttcactgtcctaaggtgaaattaaatcaatataatgcaatttttctttcagaaatgctaaaaggcattagtagtatctagcactttcctatgtgttaatatcgctattggtctaattaagtatcaagtcccatataatttaaaataataacttttagagatatatatctaaaggtgcatagaattagtcttttttttcttttcatttta

SEQ ID NO: 7070 - DNA, 673 bp, Cannabis sativa
atcaattattgtttcaagaaatataatagtattatgtatatgtatatactatttctatatcacgattatcattatattgttataaataaagaaaaagaaaaggatgaatagaatgtcattaataattattatcatatacataataacacactatatttgaaggtacaaaaaaagtatttttcaagtctaaaaatggcattattaattaattataatgcaatatagctagctagataatgattcaatcaaaacattttgattatatatatcttgttattgttaatgatcaattaaacatattcatatgcatatgcctatataaatctaaaattatatgaaagaaatcagacatatgggttccaccaaaagatctaattaataataataaaaaaaaattaatacaagaaattattaattatggaatggattgggtcacaacttcactcacaacttcacaagacacgtactaaggccaaaagaaaaaagaaaaaaaaaacttcacaagaaatatatatatatattttatattacacacactcatagattcctatcaattccctccacttgattatgatgattaggatcctaatgggtcaacctcaatcatcttgtcaaattatgtaccaaaaatcatgcaaataaacagatgattagtattcaaatatatatatat

SEQ ID NO: 7071 - DNA, 1294 bp, Cannabis sativa
ataatgggttctaatcatataccacagctcaaaaaccacaattatactaaaaagtcgaaaatcactattgttttttttgaacaactaaaattactattgttgagcaagttttgaattctaaaactcaaactcacgcaattcaacagtttctataatcttctaagccacccgtaaataatcataaatcaatctccaaaacaatctagcttactcagactcacacagaatcaaaatcataaaacatacaccaaagaccaagtttttcatcccaaaattagcaaaatagaaagattctaggtttcaccttgcgatagttgtccatcactcttcagttacacttgaagacttgaagaaaagataagattttgtttaaaacttggttggattccttggtgtgtctatggttgagaaagagagatcttaaagagagagagagagagagattttatttgatttatcttgattgttctaagcttttctaacttaaaaatgaaaacgtatattcataaattaaccctagtaatcaattaacggataattaattaaaataatcttataaggcaaaagataaaaaatgctcttgcttagcttttaagttatctcaagaactaagggtaaaatggtcatagtcaaataccccgcataatctcgatattctaactatctataaattttgcccgctaaatctcaaatacttaattgtatcaaagtgacattattggccaaatcgttaaattttcactcttaccatacataaaacataaaaatatcaaaattcatatataacataacacacatagaatttaataaaatctttaaaattaagaaattatattactaatatttatttaatatttatttgtgaaaatatgatttatttttatactaattcacacatgatcataaatattactttttttttttttatactaatcttcatgtctgattacgcgactattacataatttgatcctagtaaccattttctcaaccaaattagtttacctctagagttaataggaatgccaatgtatttaaatgggagcttgctctccacaaatcgagatgcatctagaatctcttgtatgtcttgttcttccattccaccacaataaattattattttttcttgattcgcttctaaccctgataaaatataaaatagagaacctcttaaaacttttcagcaacagaaagatagaaagagagataataacaatttcttttttaatatattaatttgtttgaatcaattttttaatttaatatatattttattcctgatcaaattcga

SEQ ID NO: 7072 - DNA, 515 bp, Cannabis sativa
tgaactaaaagaaagtgatcaaattaatcatgagtcaaaatataatacacataatacatatagctaactaagttcaagctacaaaattaataggtccaaaattttgactagaatgatgattcatttcccacttgctaactagtaataattgtgatacttcttcttagatatttaaaaataaatctaatttatttgttttattccaaacaagttgcaaagttattgtttccttcctaaattcctatatattcatattcaaatatttaaaagattttttcataattatcatgaccacaaactcaaattattatttcccatcacttctaatatatttttttttacaagagaaaaaaataaaacaggataaataccattttttttgcatgagtataaaacattttttccaaactaaaaaaacattaattaccactacaaaattatagaaataataatattaaacaataataaatatattatatgaataatttcatacaagacagtttggccgagtggtc

SEQ ID NO: 7073 - DNA, 553 bp, Cannabis sativa
cgactcagttaatcaagatggtagaacagctgtggggcattctgaggacatttggtggactatcgatggcgattagacaccaaatatgaaaaatacaaaagtgagaaagcaaggccacatggatgtgaccttaggaaccatctaagcgacaagatgagagggcgcgacctccctaaaagtgatatgaaaaggttggaagaacaaattgcttctttgaccaagttggtcaagaaaccaagtggagcattatcgaattcagaaggtgaggatccggaaccctacgtaagaaggattttgaaaactccacatctagaaaacttcaagatgcctcacatagaattttatgaagggaaaactgatccgcgagcgcatcttgaaaaatacaacaagatgatgcaagttgctcgcgtcagtgctgacgccaattgtttgtgtttctccctgaccttgattaagtccgtagaggattggtgaaagcgattaacttccaaatcgattaacagcgtgaaagatctgcaattagcctttggcaagcaattcattgccacacggg

SEQ ID NO: 7074 - DNA, 1675 bp, Cannabis sativa
cttttaccatcataataaatacatatgtatcaatattcttacaaattatattcatattatcatatttatttttatatacaagtttgtaaatggtggtagacacacgatactaaatagcaaaattctttttttttttaattattgatttatttatagccgggaacctaagtattttgtattatttatgttgaaaatttacatggatgagaattactgaaaatagcaattcaataactggatcctcttcctttatgatcctttctctaatgtcttatagtttctccaaaatgatctttgaagattacataatggatttggtacatcacctctttatcgaactctcctgaccgcttaaagtatctctaatggtagcattctttaaagatattaatattttttttttcacattatttttagtaatcttacttttaaaaatactataatgtatatcactatttaaaaatattataattctgatctcatatgattatttaatatatattttaatttttagctacaataattttttattaaaaaaaagaaatagcattaatgttacaacataacattcatacaaatttttagaatgacatctttttctctccattaatataacattttaatattttgctatataatatgtccacctcattaagtatcttttaaaggtttaccattggagatgctcttaaattccaattaaggacacatgtgatgatgcattactctatcgattcgaggttgtattttgcggagtttcgagctcccaagcattttaatatttattgatcaaaacattattaagcgcttatgcttaaggggaattaccacatatactgtttttttttaaaaaaaaaaatttacagtttgaatttctaaagtagtttctatgtgggttgctatacgattttttgttgcgatttaagttgcaacgctagttgcaataagagtttttatgtagaattctgtaaaaatgcaagaaaaaaaaactgttttgaagtaaaaatgaaaaagcccctatgtttaattatatttaattttattaatatgacgattatttatgtattaaatcatgtttcatgtacttctttttattcatgtcatgcttacttatattaataaaatttcttaaattctataatctcactagtttataagaattttaataactttaaaagtttagggtaaaaattttaattaaaaaatataatttcaaaatttttgaaattgcttagataatgattataactacagtatacaatactagaatatctctaatatatctccaatagagattcaaataactaatgcaaatgaaaaatatagttcattttgtccaaattttactttgatggtatgtcaaattgtgatacaaattatctcactaacaaaaatgattcaaatttagatcacaatatagcatgatgcaaaatttacatcacaataaatgttatatttaatattttatattatgctatttttaatagttcattattaaagtttagttagtatgttaatttacattaaataactttcttaattattattatattttaaatttttaataaattattaaatgagcatgacatattaaatttttcatcaaaatttactaccattcaagcataatagtaaaattgatgcgaaaatgttacaaaatcatattttatgccaa

SEQ ID NO: 7075 - DNA, 775 bp, Cannabis sativa
aacctcaaagtttgtcgtttgaaacatgatgaaggtcatggttgccttaactccagagaacgatggagaggcctgtgacttctatttttgacggcgagacttcttcagcatcgaaaatcatcccaaccggcagcgaaaatcatcctagagagagagagagagagagagagagagagagagagatttaaggcttatgggttggacaagtcgaggttaaacccagtacaaatgttcaactctatttattagtatatttaattataacattaaattatggatgatttatattttttttgttgtttacataataacataataaaaaaattaatgataaagttaaggaaattctacggtgaaagggtgcagcgatgcatcctctttgtatgtatgatatttagatagttttaatcttaattttttatatgacaatatgcatcgtagttatttaaaacttcttgcaaagttttaaaaaattataataatttaacgcgttaaaaatatggttcaagtagtctgttacacatgtaaaatttgtaccaaatataacacaattgttacatatctacatattgaccaaagtttgtagaagagtgtgactaggtcggtagtgctttaggcagataataatcctggtttgctgagcttttaaaactgtttttgggtttctacagctctaaaagcacttttattattggttggataataagtgaatttcagcttttggctctaaaaaagctcttttaacacttagtagctacaaagtcataaacatcat

SEQ ID NO: 7076 - DNA, 2559 bp, Cannabis sativa
tctctctctctctctcaaattcgacccaaatccacattggaacccaaccagaggtcatcgccaccacgacccgtcgaaaccaccacgaaccgtcaccaccatcacgacccgtgttcatttaactccgccgcatagaccacgaaaccaaacagaggtcgtcgccaccacgaccatgaaccatcgccaccaccaccaagctcagtcaaaggtaaggtctttctatgaaaaaaaaaataaatttttcttagatttgaatgccaatttttgcatgttgttgatattagtggaatttttatagcattttgtgctctttctggtgataggttgtaaatgttggatatgttttcatggtgtctatttttttttacagtgttatcgatagaatatcaactgaaaatcaaaatagggcatttgattgtttgaacataatttttttttgttgtcttactgtatatttataggttatcgacatatttgagtaggatatatttttaaactatttatcgataggatgtcgacaggatatcggctgaaaatcaaaatggggtatttgattgtttgaacataaatttttttttatttttcttactgtatatcgataggttattgacatattatctatgatttgttgacatatttgagtaagatatttttttaaactgtttatcgataggatgtcgacaggatatctatagtttatcaacaatttaggtgaagatatactgtgctagaatatacatagtttatcgatatgatgtcgacatgttgttgactggttgtcgacattttatcaacaatttgattttattgtattctgtcattttttaagtgtgatattattgacaaaatatcgacatcatgtcgacatgtcgacattttgtcaacattttttatgagggcatctgtaatattttttgttatatatttttcaaatggctccacgactcataatttcagcatccgagcattttactttccgcgtgacatatagaggcaccagtgcttttgcaaaaattaagtcttgatttcaggagtacaatttgaataaaacagcaatagaaagcagtttttgcaacttttggaatgccgtgcctctgacattttcctcggtgttatttcaccaagtcatgttgcacaagatgaaggttgatgttgaggaggatttacacatgtgtttttacattggtcggaaggagcttagatttggagtggttgagtttgcactcattacaggcctgaacttctcctcggggccaacagaaggggagaaggctgcacaggttgcctgctcagggtcagaccgattgatcaataaatatttcaaccggtctgatagtatgaagacagaagcactccaagatgggttcacaaactgtcaaaacccggaagacttgtacaagcttggcttgtgcttgtttgttgaggtagtgctactgggttgcgaggctaacgcgttgattacgactggcgtacttacatatgtcgaagatctcgagttcttcttctagattccttgggggaagcactcatttgctagacttatgcactcacttcaaaaggacatattgaaacagaaggccaaccacgagaagaagctaagtttggaagttcagcatgagtgcaaatacacagcttatggctttgcacctacagtataatattaggcgtatgaggccattttagaggttgggaagaggtatggcacgaatcatgggatttggtttctgaggatgcttaactgaaccagtaagggtgagatagggaagaaggacctcgatgtattattttctagacgggtatgagtttctcttatgtttagagtaattatttaagataaatgcttgtaataaatgctaaattatttttctcttatatttaaacagcatcttgaagtgatgaagcggctacttccacggacagaagaggagggatatgtgaggaccatcttttacgatggtgtggaaaacatggttcggggtggtgtggatgccacacaggcttgggaggacacgcaagacccatctgtttttagaagacaagcagaaaaagcagcagaatatgtggacaatgctcctttgcccgaggcagagactcatgtaccattttttgaggttatgtgtaatattttttgtcgacatgttgtcgacattatgtcgatacttatggaactaatttgttatattattgtatgcttaccgtattcttttgggatatattttaccaggccactgcttcagaccctcaacccactgtattatcttcaagccttggtggtgccgagtataatgaattagtggggaggttggacaggattgaggctgaccataagggtttttatgcttgtcatgccgagctgaagatgatgtatgagaatagccatatagagctgaagggtggtcagaatctcattttggagcagctcataactatattgagcatgctgcatcatacaccaacgatagatccagcaccggagccctcagcagctgcatcacccccactagcagctgcattagccccaccatctggtatgggtggagatgaggaggtctttcctga

SEQ ID NO: 7077 - DNA, 1401 bp, Cannabis sativa
taacttattttgggtcaattttttgcactcaataatttgtggggttcatctagttgcaatatgatggttcagaatgtaataaacatataaatagagtgagtacactaagtttgactaataagaccatgaatgttgatttgtttggaaaaataaagaccatttttgttttcctgttttcttttcagattttcaaacaaagaattcaataaggtcatcaggcgtagacttaataagcaaaactccaatccaaagtactttatatgaaaattttatatacctgacgatttggggttgataagacagagttgggtgtggctttaaataacaacaaaggacggtttcaatcactcatttctttcttgttgttgatttttttggttaattatttgcattaatgttagaggatctgatacaaaattatcattttacaaattcatacaattaatttattaaagggaaatatcaatttaaccaatgagttttgctccaacatgattagtttttgtgttttatcaacaaaaatattttatgaaataaatcaaaatagatttgaacttggttttggttgaatagttttgagaagaaagattccatatatattaaagataaaaagccaaaatgattcaaaatatttcattaagtattaggccgaagacatagtggtaaacttccttcagctatgataacacccgaagtcccgaacgattagtttgagaattatttagtttattacagtgagaaataaaaacataagagaaatgtatttatgtttttttaatattactattatcactagagagtaagagtataaatttatcatgaagcaatatttgacaaaatttaagataatatttgtcaatgacgcagtacttctatcttgtgtatggcttggataattttttaatatgaataaaatgcctcaagttttttaattgtattaaattatacaaaatacaaggaatactactaaatatcagtttgacaatttttacaggagaaatggacaccagaggtgtctaacacccttctatatgtcaatatccttattggtccaattaaatatcgagtcccatatagtttaatattttagggaatatcgccaaccaatcgcaacgcgacatgtcgagaaaatattaggcacaactggtgcctaatagcaatgctctttttacatcatcaatatatattatttggaccttataaaaaaattggagtttttacaccacttattgaaatttttattttttttttattttttaaatgtggggtggaaaatttttcaaaaataatgtgttagttttatactgtgtactgtgttaagttttcactgctgttccacagttgttgttttaattgttttgttttgttgttttatttctaaaaatagcttttttttttttt

SEQ ID NO: 7078 - DNA, 656 bp, Cannabis sativa
cttgttattcaaaatgaatcatggtcccaggagctaaatgtttattttcattcctgtaccatctcaagctacatcaactcctactccaccagcagtgccttcaccacatctagttattgaatcaaattcaccttgttccagttttaatacccttgatcatggagttatttttcctaaagttgaatttgaagcaccctgcactattgagcaaaatgtttcccatgaatctttaaggcaggacactgctgatcactaacaatggcataggtccaagtgtaatagaccaaacatcacttgctcttccttctcatcttatgtcctctgatcccatgattaccagagcaagaattggagttttcaaaccaaaaacctatctcagtcaagctagacgagtaccagtttgtacataactaattgtgttacagaggcactcaaacataaatggtggaatagagctacggatgatgaaataatagctctcagtcaacaaaacttggaccttagtcctttggtcgaaagattacaacttggtttgttgtaaatagctctataaagagaaaaaaaaatgttgatggatccatcaaaaggtgaaaagctcgactagttgctaagaatattcatcaaaaggcatgtcttgactatggtgaaacatttag

SEQ ID NO: 7079 - DNA, 1154 bp, Cannabis sativa
cgccactttttgagacaatcgttagttttttcgcacttgaacttaaaattttgttgttcgggtgagaacatttcttgtttaaattgtacttgcaccacgctgaaaagatcttctatctttcagatgagcgatctatcaaacagccgaagatacgatctggagatggggcttttattgatgaatctcaaaagagcgatagcttcatccccacatcactgtcgaaagatgaggttttttctttcttttttgtttgttgtaagaaatacaacaatagactttttttctctctttacacaatttgtttcgtacgtacgtttttttttttttttttggtatagtttcttatgtttttttaattaaattgcagaaaataaaaattgaactaaagataagcttgtaaaagctttgagaatttcatgtaatctcttatattattatgaatttgatttatatttgtatttgataactttgtaacaaaattttgtcaaaaagctcaagaccatctccaatggatagtgtatatttgagttagatttggcctaaaatatactataaaactatatttggtctaatttttatgtttgtgctccaatgtgcaaattagttataaaagtcaatattatcattaatattcattaacatttttattaatgaatagtattaatgagtgtcaaatagataattaaaaatatgtcatttattgtgggttaaaatttggcacatgttattttttgtgccaaatttggcacaattttagcttagaccaaatttggcacacattttagatcatccttgaagttaactttttgcaaaatattttaaaaaatagcaatgcaccatatttatagctcttcattagagatgctctaataagaaaagaaaaaaaaaacaaaacatatttttccatatttttccatccaatatttatttagtattttcaatttctctcttccttagaatagagtcattcccttttcttattggtccaagtgaatttggcgtgtgaagagtaaaactcattgccaactccaatgaatcatatctatgaccaattatatttttttttcaatgaacttttatattaaagctgttatttttcttcactaactagtaactataagaacaaaaccaattttcttactataaaattattc

SEQ ID NO: 7080 - DNA, 775 bp, Cannabis sativa
ttaattagccttagttcacgagtctcttttattcagtgaagtgtttacttgtaaatattctcgaagggatacaagatgtatcttattatgtttgcttgagcaaaagaacacgagatcttcaacccttaatttatgagattagtttggtatttatagtagttggagaattacattaggtttacccattttctatatactggagagtttacaactgattaatgtctttggacttactcatgaagtccagctcatgaagaatacaatttgttgactaggcgaatcaggcttgagttaatcaggtcaaaattgtatatgattttaatgggagaatattctgaaataactatcctacgcttgttatgggaagtttcttttttaattgcgatatgatcttccgggagaatctaacagctggagtttcgttatttataggagaaaacaaataaggaaatcagaagggtctcctgagaacgcacctccttttccctccaagctcatgataccggagcttaacatatcaagggcgaaaggtatcgtgagcataaaaccaaaataacactcaaaaggtcctatccaagtgggtttggaagccatgtgtattgtaccagaaatgcggttaacactaaccatgcaggaatatttattaaactaatagtcatttgatattagttgttttcttactggactttataagctcaccctttacatttcccttccaggaactcaattggatacttgtggatgtaggaaagtcgttgatggagaaccataagat

SEQ ID NO: 7081 - DNA, 626 bp, Cannabis sativa
atctttttattttatttttttcaactttacagtttgaattcctaaagtggttacagctagttgcaataggggtttctatacgattgttgcagcgctagttgcaataaagatttttttgtaaaattcagtaaaaatacaaaaaaaaaaactaatttaaaatgtaaaagggaaaagtattagaataaaagaatcaatgaaataaataccacaaaaccatttttcattcctttatttttcattaaataagtatttttttcaataatttaaaaacctctttggaagaatattttgtaaatggttcaaaaattttgaccaaattaaaatttgacaaagatttacgtattcggtccttggggactatggtatcataattaacttttttatagattcagatcaaccttttatagtatcataattaatcttttgtagattcaaattaaccttttatggtatcataattaactttttatagattcagatttaatgagaatatttgatttaatctaatttaatataaagatttacttttttattgagtttagtgagaatgttagaacttttggtagtgttgtgatttcttactttcctatgacactttaaaagattttatttaacaaatcaacttt

SEQ ID NO: 7082 - DNA, 560 bp, Cannabis sativa
acattggtagcttattgatattatctagatgaatgtatattagggttttcattcttatttttataaacgtcatgtttgcatattttattgattctactctttaaatggtatattattatgtaataggctatttctcatttgcctattaattaaaggaatttctatttttcacaaaaaaaaaaaaaaacaaaacacataataaaatgcataacgtgtgatgtattatatctacatgtgtaaaaaaaagaagtaagcaatagacaaatattgtgtaatttaagtatataattgactaggaagtggccgctatactatctctcccttgatttcttgaatatgtcaaagtaacaaagtcatatatttctttttttttttgaggggagacaaagttatagatatatgtatatgagacaattgtcccaaaataatcatataaattaaaagatttattagtgttcccattttatagaccaaagggattatatttgtatatactcacttatagaatctaacggctacaattcaactgcttggattgtgaggacatcatcttagttata

SEQ ID NO: 7083 - DNA, 861 bp, Cannabis sativa
atcttcctagctacctctacttgttttatttcatttataatattccacttattaaaaaagcctttgtaacaagctttatataaaataattatatttcaagccatatccatgatcatggaggtcattaattacttatttacatatatataaagcaactaatgcttatagggtttcaaacatagttcactcaaccattacacagttgtgaaacatgagcggaattacttcttcaacctcaacacctccctttttcaaaaggtataattttttctgtacaattaaacatcatctctagactacttaaatttataatattatatatgtctttgtgtaatatgtaagcagattagaaggtaaagtggcgatagtgacaggtggggctagcggcataggggaaagcacagccagactattcgtccaccacggagcaaaagttgttattgccgacatccaagatgagcttggcaactctctctgccaagaaatactcatctccattggtaataacgaaggtttagtatcggccatggccaacattattacctacttccactgcgatgtcaccaacgatacagacatgaaaaatctcgttgatttcacagtgtccaaacacggcaaacttgatatcatgttcaacaatgcgggtataaccggtgacgtggaccctaccatcctcgtcaccgacaatgataacttcaagcgtgtacttgaggttaatctgtttggctctttcttgggagccaaacatgcctccagggtgatgatccctgcgaggaaaggagtgatactgttcacttccagcgtggcagccgagtgtagtggggagtcgcctcatgcgtacgcggcctccaagcacgcggt

SEQ ID NO: 7084 - DNA, 1956 bp, Cannabis sativa
ggtatgatagtgttgacatcagatatatttttaagcaaataaacccaagtaaatctacatactctatgagctaatattatttctggatttcttttgagaaattactttgagtacagaggaataaatatgaatattcactcaatctaactagatctctccttctaaaaaatgatcgatcattttccttttagcttctgtccctatttatagggtatctaggattaactgttattcttctttgatcttatctaggtaaccgttcatgaaagtaaataatcctcacattttatatttacaataagtggataaaataaaataactactagtaacctcattttttcttttctggaagcagttttgcttttaccaaaataatgcattctagttatggcttgcattactcggtgatgcttagagataactggttgtattctacgagatgttagtttaagtatttgtcctcgctatagacttccaaggcagctctttagacttggtctctcgaaataagttttatcatgcttatttctcttagtctttcaacatactcacaagtatgtgggtcaatgagttgcaagctctggaagaactcgttatctaccctttctagccatgtcacaaggatttaacttgtgatcttctcatcctcgtaaatcattatgttgatagtactttgcgagttcatcccatcccttactccgtagcttattttcgaggtagaatattcattcatttctcgcatttattatttcattctttcttttaaaattgtttgacacatgccatgtccatatttagtgctcaaaatatgggcataacacatagtatcttagctcgtctagcattaccgttccattacatgagatgtttaattacttaccacgaattttgagttacctaattcttttagtttgtctaagatacattacctcagaaatgtagttttgtcctttgttagcttgtaatggaggcccacttttggtttggactttttttccttttaatctcttgggtcatttactccttttaggacttggttttacctcccaacatatatataaatacatatatatattaatatatactcctacaaaaagtaaatttctcgactgttttaaacagtcaaggtaatgtattgtcgttggtttatatgatcatcccctatttgaccatcgtataattggatagaataagcatcgattaaaaataatcggcgaaaattattaccgattgtttaaaacaatcgacaataatgctcactataactaacagttttaacagtcggatataatattattggccattattttaaactgtttgtaataatttagccgacagtttaaaatcaaaaatttgtggtccaaaatttgtaaccaaaagttgcgaagctcttctttgttttccctcgaccttccattgttttcttcaatattcctactgcaaactcctttgaatccacaattccttgaattcatacagacaagatattaatattaattatatatacaggaatataattttctgagtaaccaaagagattttttttattaactaatacttaatttaatttcattatctacctatgcattcatgtatatatattcaaagatatgtaataaaataaaaaaaaatattcccaataataaactcatacacatgtcaattcaaagaataacacaataaataaatacaaatgaaagacaatagagattatctgagaatgatattgacgaacggtggttgcgctagtggtgtgactggtggtgatatctgagaatgatattgacgaacggtgctactggtgtgactggtggtgtggtgctgactacgaggtggaccagttggtgcgaatgatggtggctgttgctgtgcatcgtcggtggagagggacgagagaaattggagggagaacgagagagagctgatgagtgagaggggtgttcattggatcacatc

SEQ ID NO: 7085 - DNA, 823 bp, Cannabis sativa
ttgataaacctgattcccttctttgtcgcatactttatcgccgttattttagacgaacaggattcttacaggccaagttgggtaacaacccctcctatacatggcgaagtatccattggggtaaagagcttcttcttgacgatcttatttggaaaattggcacaggctcctctgtttgtatcaatgactcctggctcccggggcataccaattttaaaccgattcatatcatgaatcctgataacaatttgcatgtatctgatcttttcactttgaatcgtacttggaatgtcactgcccttaagaggcgctttcttagcattgacatagatcgtattatgcaactacctttatgccaacatgcacctgaagacaaactcatttggcatcactcagcttcaggtatatactcagtaaagagtgggtatcatttggcatcctcactaagagaagctagatctccctttcactctcaatctcaagctggctggtggaatcggttttggaaactaaaactaccccgcaagatcaagattttcgcttggcgtgctctccacaatgctcttccccttgctgccaaccttcatcaccgacatatagtagatgatcccaaatgctcaagatgctctcacaccaatgaaaagttcaaccatgccttcttcctctgtcgggttgtgaaaaatctctggtataaactaccctttgccattgatttttttggtttatccaacactaacagcagtgattttctccatctgcttttctcccgcaatgatgatgatcaattggagactgtcctcaatctaatgtggtttattttgta

SEQ ID NO: 7086 - DNA, 932 bp, Cannabis sativa
tatccgaagacccaatgcttcgaatgtgatcctataacatttggagagtctgacacaacttatgtgtggtactctcgtaacgatcccttggtcattgaggtacaaatcacaagcatgatgatggtgagggtgatggttaatgatggagtggaatctaacatcatgttcaagaaaaacttgaaaagaatgggttatcattgaaagacatggagccgtgcgagcagttaatgtatggttttaacgaagcatgaatttctgttttgtgggttgaatccctactttcgtgggttgctggggggacttgtagttgaaaccgagttgtgacccatccaagaggatggttgttgaccccaccattcaatcgggcttccttttaatgccctttttctgtgctagccgccacatagtcatccttggccagctatggtgtggtccggctagaccctcctagttggccattttcttgtatcttgacctttctcgagtgtttggatcctttgccaattgatgtgttgtgcatagtgattttgctcacctattgacacgttgtattccacgtggtctcggtcttgcctacgaggacatacacatcacttggacaaaaatttggataacaataacgtacaacagaataaatctactttgacaaatcaatattttcagatttagaattccaagacattaaataaagaaaatactaagagagaaaaatggagtatgaagaaggagttagcgatgaccaccgacctgcaaaggatgattgaaggggatgagcaacgatcgtcgacataaccgaggaacgataactctatgaacatcaaagagattaaatactaagagaagaaaaaataagagaactaaaataattgtacttgataactaccgacctgcaaggacaacagataagcaccaacctcgtcgacaattaccat

SEQ ID NO: 7087 - DNA, 1003 bp, Cannabis sativa
aaaaaaaaacaaatgtagtatttttttaaatatttttatgaattatattttttttacaaaaatacgcactgttatttttacatttttttaacaaaaatatttatactatattgtttgcacattacttttaatttatggaattttgtaaaatatattatttacaaaaagctacaaaaagaaaattaaaaggtttttataaaaatattagattttgagtaaaaatttacaattttactgtcacacgaatttttttacaaaaataatattttctttataaattaactgtaaaataacaaaacaaaacaattaattaaaacaatagtggaacaactaaaaaataaccgtggaacaaccgtgaaaatttaacacagtatacagtataaaacttacacagtatttttgaaaaaaattccactccacaataaaaaagtaaaaaaattaaaaattttagcatatggtgtaaaaatcatgggaccgtagcgatggagaaacttacattgccttgaggtgaggcaacttccacagtgatgaaggaagcttaccatcaagatcttgtcctgtaaaattactataaaacaatcatgtcaaaacaaaaattttgatattactcatcatgatatgaggcggaaccaccaagttaatataataaaaatgttaattttgttggataaaaataaaatataaattttataagaataaaattacgaaaaaataattttattgaaataaattttttatataaaaatataatttatcaaaacttaacatgaccccttctgtctccgccactgatcataattatcaccgtgattaattcaaataattaataaatatttatatatgattttacttacaagctttgaagatggcaatattcattagaagagaatatagagcagttgcagacgattacattagtgtacttgtctgaacgcggtttatcagtaatagtagttacgttattacaagggtcattcaagtcccaatctttcttcttcagttg

SEQ ID NO: 7088 - DNA, 757 bp, Cannabis sativa
ttcaattcgattagatattggatgttgtctacctctaaatataacgatacattatgcatcatgcatattgatttgatgcattttactataacctcaatacaaaattaaagcatccgtttgatacactattatttaattcaatattatatttagtggtgatttatattaatagattatgtaaaatctactatctttgataaaatactatatttgctatgtttatccaaacctcagatcagctgactaaggccttttggaccactcgaacccagttcttggcctcagactatttctaaaaatattataacacggataatttcttatattaatacgattcgttaaaatttatgacgataataaataatacaataaaaaattttattcaaatattataatacgatttatttaatacataccacatttaaatatgatctaccaaaaaatgctaaataataatttaaaaaataccaatagtatcctatataatttaattgaataactattataaattattatcaatcaattacaaaacttcaccgctaaataacatcagcctatattttattatgaccttattaaactaaataatagtagtgtaataataatagagattatttaggcttgcttattccgttctataaatagagaccaaaatcatgcaattataaacacaccagcataccacaaccacttgtcatcatcatgagtacttcttcagtaatctctccttttacatctatggagttttccatctctc

SEQ ID NO: 7089 - DNA, 986 bp, Cannabis sativa
aatagcaaatatttaatcataggttaaatagtaactatttagtatttacaagaactatcaattatcaagtacataaccgtaatcaaagattcctccgaaaattattaacgaatataattagaaaagaaaaacaaaatttattattaacaaccagccaaaaaaaagatatatagagaacaccaaatgacatatgaccaagtctcaaatttacttattattattatttttttcttaaaaaaaagtctcatatttacttcacaagtcatttcccaacaatgtttattttctcaaaaagatgcgatcaatcatttgaaattgaaacaaaggaaaagaagaaaatacatgataatcagacacacaagtaggttcgaaaagacgcacaaagccatcaaattttcaaattttcttaattaagctatgacattttgcatctacttctttctacaaactacaattatttatatcgataaattatacgtgtacttctatatgaaacaagttaattatatggtttacccaaatgactttgtctttctaactaagtcatttcacctttggattggttggggatgcttcccttgtgttggtcttgctgtttcttttttcttttttccttaaaaagaaaatcctaaaaagggaaagataaataaattttaacacataaatgtaaaaatgtcaaaacaaaaaataaaataataataaatataaaattagaaagaaagaatgaaagagttgcaagttgcaagccgcgtatactaacggaattggaaacaaacaaactgaaacagcagtctatgtggaattatagttatactaataatcacacaagataaagagtattgatattaggtaccagtatctgttgcaaatggttagcaatatatataaaaaactatatgtactagatacttagttggaccaataatgatatttacacatgaaaaaagaactaagtaccacccgtgccctttagcatttttttttta

SEQ ID NO: 7090 - DNA, 683 bp, Cannabis sativa
agagactcaactcaggtaattcatttggatccccatcattagcagtaattgttagggttagaagaaatagattttttttttctttttctaagttaatggtttcgttaactcgacgttaacttctgcgtaggaaaaacaaaacgttaaaaaaattgttaaatcaagaattaccgttagatagccacttttaatatataaagatattgtatgatattcattaaattcaaatttagtcatattcagagtttttaatttagaaaagaaaaaaaaaatcagattaagaaactcattgtatatttttgacctaagaaaataaaatcccactaattcttttatcaaagttacacaaaaattaaataaaataatattaaaataattaataacatgttccacaacttattataatcctatacatcttcactatccaaccaatcaaatctaaaaaaatatgctctcatgagtgagagaaaaagtaatgctcccacctaaatttttttctatatttatgtgtatagtggcaaatatcaagatgttacaaaactcaaaggttgtgagtgatataagttataactccacaccacatattaaaagaaaaatataaatagtattatatcgattatgtatcacttataaatagtattaactgcacaatatgtaaaccttaattattttaatatattaat

SEQ ID NO: 7091 - DNA, 620 bp, Cannabis sativa
catccttagttttcaagacatgaactcactattggcttagcagacttgcaatggaagagtataaagtatttagatttaataaaaaaaaattatttaatacgatatgaaccataaaccatgaatctcaacacagttatacataatgcaaaccaaactatttattcaaatatttttacttcttgttacctatcagggttttctcgctatcttttcgtactatacaatcaaacatccaaaccaaaagaacttgttggacgaatataatttagtgatcacagtgtgtactcaactcatgagatattgtgattgagatatggaagaacacaacacactgagcaaactagagagagtggtgtgtaggtgaactagagagagaataggtgtgtgagcttagagagagagagtagaaaattcaattatatttttcatctctaattgttctctgtaaagtatggtatattttccttgtttgttattctaatatatatagggtattccttaagtgagagcaccacttttgctcttatgaataatggcatttttataactcttaatttttaatctaatggctttaatttatttgtttatcatagggatgttgtattagatttttctaatta

SEQ ID NO: 7092 - DNA, 669 bp, Cannabis sativa
agtcaccattgaaagctggtggtgcaagtgaaaaacatgcagattttgttgatgttcttctcaagtttcatacaaaggatgagtatgaccttggcttttccttaactagtgacaatgttaaagcgatgatttgggtaagttatccacttttctatcaagttgtgtatgttagaattcttatttagacttacattaattttattggttataataaaatataagttgattggataattctttattatgttagtgttagcaaatattgttagtgatcaatagttaatggacgtagtatgtgtgtgtaaagtttacttgaagcagaagtgttagctaactgaaacctttgatgagtatgtccaatccaactagggttatatagctaagttccacccgtaacttaataaatacatattgtttcattacaattttatattttgtgataatcagttaaaataaaactgcttctaatttagagatctagagaagaagacttagttgatagtattgtacaatcaaattaaagtaattttcattgatcaatcaagtatgtatacttaattatttaataattattattattatgttctaaattatttacaaatttgtatcttgagattattttctagcatgtagtatcaaattacctatatatgatttaggacctataat

SEQ ID NO: 7093 - DNA, 1832 bp, Cannabis sativa
atgatgaagagagaaagagaaaatggatgagaatttttcagttgtttattctaatggggtgaacctctatttatacaaaaatattactaaaagaatggaaaactaaatcaatgtaataaacgaaaatacaaccaaacattaatggtgataatcaatttgttgatttggacatccgtaaataatatttcataacatttattatatttttgtaactaactatttattatataaataaatagttatttttttgttataatactaaaaaaaattaaattaactgtgtaaagagcagttatattacctaatttatatatatttagatcgaaacatgtcatttatgtaactaagaaaaaaaaaaagaattaataacttacaaacttaaaacaaacatatcaatgatagtaaaagaagaggattaacactactaaaatgacttgaataatagatggacggttgtttaggaactcgaaatagaggtctatgatagattggggctggcgacgacaaaggtaaacgacaacgacaacaatctgatcggaggaggctggcaacagcgatagcaacagaggagctggcgtcaacactatgtgaggaggtgaagatctatgaaagagaaaagttgaaggagatgagagaaagagaggtgttaaaaaatgcagataatatttttgtaatattttaaagtttgaatagtataaaaaaattaagaaagtaaaaatgtaaaaatttaattgtagcaatataaatgaaatatttgatcaaatttaggtatttatgtaaaaaaaaaatcaatatataattgagacattccattaaactttctctcacatttattgttagaataatttggtaattaataaaaaaattaaaataactaattaaatagtgatcattaatattgtcacaattattactctacaataggtaatagaaactatcatgtaatttgttcccttttgtgaaagtcatttaattacttttgtgctaaagtcaaagttgattccagaacgaaaatggtaaaactacactatcatgtaagtcattttgatatatattttcatctccaggaaaattggatacctactactactactcactctagtctacttaaattatttagatctaaattgtttgaatttttgattagtctcaattttagatttgatttatttttatttgagatctccagtacaaattttgaaacgaatatggtgacacatcatttttagttaattttattttaataaagtttgcaccccagaactagggtgccgtttgtgagagttaacacgttaacaacaatatgtcaatattagtatattacctgtctttttttttttttttggtaaacatttgagtattcacacagcaaaagctatataatagctcaatatgtaatatatagcttaaaaaagtatgaaaaataggctttcatcagctactacaaaatgaagaataacatgatgctttaaacattattttatgaatagtgtgcaaatctaataaaataaaattaataacatgtcatatttatattggctagacacaatatgtaatacaaaaagtttggaaaggatctacattcggtagaatgaatcttcttgaatcgtgaccatatatatagtttagtgatagaataatctcaagaagccatattagagctactccataaagaacatcattccaagtagtggctttgctgggtttagatttgtcgttagaaaagccaatttcgtagctctcatttaggcaagtatgctctaaaatttagagttagtgctttggggaatacgagtatgccctttgttgtaaatatttagacatttatttat

SEQ ID NO: 7094 - DNA, 2014 bp, Cannabis sativa
agggcacaaaacccaacagttgataccatccctgttggccgtccaagttgttgtgcctttggcattcccattgtcacttctgctgtaactgttgtgcaacataccaaccaaccaccgtctagagataggatgatggcccacacaaaacaaactatgcagaagattgttgcgactgatccacacatagcttggcatgccacaatgacgagcgctgaacaagcccgacctgctgccgaggaggagggggatgagggggatgttgaagtccaagaaattgaggatcagagcgaagttcatcctgatagtccattgcgcttcggaggttacaatgaggcaggggaactggtgttcgaggctggtgatgtcctggaagaaggtgaggattacgtcactgaggagtatgccgaggtggttcttcgaaggaggcaaggtgcctttagagctcgttgggtgtctcctccgtccatagtaacccagacctagttgaggagtttggagaaggatggatatttgggcggtgtggactgcttcttcccttctccaaatcaccgagcaactaatccaagagagggatattgtgcctggtcgggtgcgcataccaagcagggttcaatgattcccttgcatccgtacttcagaaggattgtggactactatcatctttgctcgacttagttcacactaaagggcatcaagtacttatccgcctattcatcctttatgcctctcaaggatggggtgagccatccccacacgacaccaattggctcttcgatctaaagtcaacccccaagcagagcaggtcggggtacttcaacctctcccaactggatgataaatggctgaaggttaccgtagaccctgacgttagcaaaatatggcattttgtacacgagtactacttcgtgatgagcatggagaccgtccatactcggttccaacatattccgtcgtactgctgccctcttttaacattgggactcagggaaaaggaacaaaaattctccaactgtcagaggatgctcggaatatcactttgttgaccactgaggcaaactttgtgaagtacaagctttacctggaggattttctgccaaagcccgtgaaggagaagaagaagaagaagtccaagccgaatcgagctgaggatgccgagcaagagaaagacctcattcaactcaagcgtgaggctaagttgaagggaagtgctagggccaaacagtatgctcaagaatattcagagcatgagcagtatgctcaagaatattcagagcaggagtagtatgctcaagaatattcagagcaggagaggccgagcaagaagatgaagaaggctcccccgatcgagcaaacaccaatagaacatgctatcaggattagggaacctactgtggctgtcacttatctaccctggtagaggaaaaaggaaaagccatcttggtggagcaagaagattcttcagatgacgatgccccatctgtaattgtttgggaaaatgcccctgcccgcatgcagggtacattaacttgcattttcctttcttattttatgtttttctcacattttatgtttgcttctaactgcattgttttatctgtgcagacatgtctcaaaagatgattcaggccttgaagaagagagtaggagatagctcgggcttgtctcctctggccaagaagtcttagggtggtgagactctgtccaaggagaaggttccaattgatgaggtcattgacctttctgaggagcgatccgtggtggaccttccagttcagaatgtctcaaaatccaagagttctagagggggaagctcggaccgatctgaacaagttagtaccccttcaacaaacgtggcgctgtgcacggaggcctagagagtcaaagacatggtccaacattgcctgaaccggtcacttcctgaagtgaatgatcagctatccggagcagacagtgacttattcttggaactggtcttaggaggggttttgaaggaaattactcgggtaaatctctt

SEQ ID NO: 7095 - DNA, 521 bp, Cannabis sativa
ttctttgtcctaaattaagtgatgggtatttgctcctttcctttgttcaacaatgattggttatctgatcgtgattttcccatttgttgtgtgtcaatataatggaacctgtgttagtttagctttgaaaaattagccctttatcagctgagattaatcaagggattcggttcttcactattttggcgaggagaggtgtatatttgtgttatttgggcaatttaaatctccaatccaacacaatacagaatatcttgttggtttataaaacttaggttgatcattattatgcatataccttgcctttcattagccctcccattgtttttagactctggtttatatactcttgataagtctttgtgtgtaagtggatatgaggatctattttcgttaaaactttcactcgtttggatgtgaaaccatattagccttgtggtgtacaatatgttgagttccttgcttgtgtagagtttcatgggataactaatattcacagaaaataaaaataaaataataat

SEQ ID NO: 7096 - DNA, 1400 bp, Cannabis sativa
tgttgcctgcaacacactaaaagtgttgctcattctttgttcaaattttgggtatgtatccttcaagtgcccagttttggatttaatcatagctttgctaggtgttttccagtcatcaactacacaattctctttagacaaaataacgggggattttgagttcacctttgaattctccactgtttgggattggagggtttgacttctggtttcttgggtttagtccctgcttctcctttcctgcaatccgccataatgtgcccatatcctgagcatttttttcacttcacaggtaaccattcgtagtctatcctttgttccattaactgacatttcttattgagatattgaattgtacgtagaggattgtctatgatgtccatttcgaccaacacccgagaaaattgagcccttgtgcattctttagtatgttggtccaccataataggcttcccaacaatattaactagtgcacttaggcaattgtttccctagtattgcagtcctaattcgtgtagtctgatccaaagaagaacataacaaattagtttcagagcactgatatcagctgaccatggtcttacaatcactagtttgcgatcgaattggataacttcattctccagaacagaatccctagtagcttcatcattgaacctaaccatcatgagccacacagtcatccgagcaatctgtgcaatacctagatgtccccaaacaagctttaagaatccttcaaagattgccataggtgggttcgcaccatgaaccataacaaccattgctattttctagtactcagtctgagttttcacttcctcaagatcaattttagcaattttgatgccatctttgacaataggttccatatgtaggttagttgagaatcacgagcaaatttcacttccttcgcaaattatttccaaagtttctctgcagattcctggaaattatcacgagtatctctgttcctcatcgtcttcaacctcttctattgtttctctctcttcaatggctagaaagaaacgggtagtgagaaagccagctcttcgaatggctgatcttggatcgaatagcaccaagaacgacgacaaggagatcgatgaaggtgcatacattgttgatggtctatccctgattacagatgctgcaaaattgagtggacaacaacagattggtacttaccctgcttcagtttctagccctgtttctcgtcagaaaacaagtaaattataaatttatttatataaaattaatagttttattctaaattgtaattaacacatgtataaatataatatttactcaaaaataattttattttgatatagtattaaggattgtttattattactgttgtttcattgatatttttggtgttttttttttctagtgtaatt

SEQ ID NO: 7097 - DNA, 977 bp, Cannabis sativa
tgaggatgaaaggaataatgttgacaacaattactaagaagaatgttactcgattagcagagatggcagaagttttaaatgacttgatatggaataatgaacaaagaatgttcctcaatggttacgtaagggcgcaaatcggttttccattgtaccaaagcatttatgttggctgcgagggaaataacactaggttcaattcaagcttgagagacttccactgctttactttaagtgtggcatttggggccttgaaaaacaagaatgtagtagtgctactattacggtaagagatgaagatggccaaattattccaaaatatgtcgtgtggttaaaggaagaagacgccatgccaaatttctttatgaaaatcaaacatgataagatacagagacatgaggaggtagagcttcaagatgacggtgctaaagtggtggtgaggaatggttgttaacctcgaaaatcgacagagtggattttcgagattagtcaacaattagtcccagcggttgagagacatctagtaagaagaatcagttgaggaataaatgaatcaacgcatatggcctaaggctcgttaatctcgagaattcatgcttgcaagtctcggggtaaatctgtgcaactcagaggacaacctcgtaactactcatgagtagagttagtaagatcaacttactaagttacgattggaggatttttatagtgatgcgttaagaattagatcttgtcataaacataagattcataggtctctttccaatcattctaacgcatcttgaatttttcaattccgatatatatcgagagagttatgactaaaatactaagactgttgaattgtgacaacttgacatgcgagcctatggctattgtacgagcccatgggctgttacgagcccacgagatgttgtgcgagtccatgagttgatgggtgagccgggaggcatttgggtgagtcacggagcatttgtgtg

SEQ ID NO: 7098 - DNA, 1584 bp, Cannabis sativa
  modified_base (344)..(348): a, c, t, g, unknown or other
accttgaaagtgtcaaaacatcatctcagaagctctaaaagaaacccctagcacctagattgacatatggccttgtgcgttgagttctgcttatccaattgtgattctgtcttgaccatttatttagtttttcatagtgactgagagctatgatatgaaaccaaaagagtcaaattcacaacttcatattttcacttttatggcaaagtgacttattcgaaaatcagggagttacgagtctcccgtttctacaaaacatctccgagaactagtaactaacttcaccaaaatatggaaattggccaaaagatgtccaaatataacttaggcatcaaaaaatacannnnnaacacgttttcctactcacccagcgtccaggttgatgtcacatgccaaccttggcgctggatgcaaacttgggcattgggcctagaacaactttcaagtagccataactcactcaatatttattcgattgacacgattcaacttgcattttgaagctattttaatgatctatcaagtaatgtctcacactctaatcataattctaaagttatcgactctaaattttattcttaatggagttacgaatttaagctacaacttacccaaatcgggtcccacggacgcgactcgagctccaaaaattaacgaccgatatttggagtcaatttcactgttagatcatcattatggtccttaaatgtttttttcttcacattttttagaatattttattattattgtaatataacctcattccatataaaatgagagttcccttagctcattttttacatttagaaaagtacccttaaggtcagagtatctctgtcaagtttttctctctaaaaattagagctttcagacttagctatttttttttttaattctcatgagaaataaaaactcgaagtagacgtagttccattaccactacgacatagggagtgaactactataaattttatgtatttgtctaaattatttacttaaacttattatttatttcgctaatctaatgagttggtgttgaccattttttagcgtcactactaagtagtctggatcttgatatttcttatgagattgagaggaatgaaaacattggaataagaatgagaatatggtaataagaataggaatgaaatgaaattaactttaaaattattttaaaataagttttaaattatttcttaccttgtattgaaattattttcctttccatttcaaaatagaataaccattctactaaaatggtaaaaaaattatttcattaaaataatattctaatactttaaaatacaataaaaataaataaataaataaatgacaaaaaaaattattttctaaccactctatttcatttattacctctaataactaaacaccactttaatttattaaagataacaaagatttaattacaattatcctcaaaacaatttttctttttgtgtgcattttttttcttctacaaaagaacaatttcatacataacatgttttatttatttatttatttatttatttgtgtatggttattaacttattactcatgtgaaagttggtattaatttat

SEQ ID NO: 7099 - DNA, 684 bp, Cannabis sativa
ttaatagaggacatttcctaatgacttgaactataattagacatcttaaaccattatctagtttttcatgaacagctagacaaaccaaatattataatgcactagaaagaatgtctcttcatactcaatatctaataattgaacaaatccttgtgcagagacattctcactgaaattgcaacaatccaagcagatcgatatcaaagtgaaccacaagatcgtatccaatttgccttctttgtgtctgagccctgctaaaacattgaattttgatgaaaatttagatttaaattgattgatgtttagagtaattggtaatgtgcaagatttgaggtgagtgaatccactttcatttggatacaaaagaattaaagatagtaagtaataaaacggaacaaggcattggcaaattgaaaaaactgccagacgcatttcccattgccaataaaacgaccgactgtacagtttataaacatgtttgtattaactcaaaactctcaattatctcatattccttccacctttgctacccaattcctcccataaacctttctttatagcagagtaactatacatataatcttgtctcactactttgaaaacacttggttattagccaaatccaaacccttcatttgcctcgtgaatcgcaagaagcaacctctcctccagatgttgtttcga

SEQ ID NO: 7100 - DNA, 1074 bp, Cannabis sativa
tgggagttataacaaatgaaaggtgatcaccattgataatgaatgataattaattaaaaaaatattaatacaaatattaaatttaagaattaaattataattaattaataatctttcattagtaataacataaaaaataaaaaaaataaaaaattaaataaattcaaaataatgaaaaaaaaacatagaaataatgcatggagaatgccacatgacctatgttgtatttttttcgttctctacactctttttaccttgacattttctttccacaccaaaatttcaacttccaaacatggccttcaaaaaaagaatttaaaaaataattcatatcttctcacactaattataatatatactaacttactcaaagttagatcatacaaacaaaatgagaaccacatattacaatatttttttttttttgaaaaaaaaaatgtaacttcaaaatctataagtagcttccaagagtctcaaagcctacgacagttaaaaaaaataatattagtactaaacaatgcaatatgattaaatatagagagagaattaagagtgtaattacttttttttttttaaataccttcggtagtgcagaagacaatatgatcacaaaaattaattaaacaaaatattttttataagaaattaaaaacaattaacacatatacacatatatacacactgtacacaatctcaaaatttttgactaaaaaaagatataataatattagagacaatgataatagcataagtatacaaaccatatcatgattcttacaaaaccatctttgtctcatctatcatcccaacccactcaaggagatccatgtgaacctacaaaacaataacccataatgttgaatcatagggtcaagttcatttaattttaattatgagattgaaaacatatattgatcgtaaccagaaaatcctaatgaaaacaaattaatgatagatcaagatcatatagaacacaatataacttaggaaaaaaatgaaactaacagaagaaaagaaaggacttacatggagatgttggtgggagatgacgatgatgaagaaaaagaaagagct

SEQ ID NO: 7101 - DNA, 718 bp, Cannabis sativa
aaattttctataattaaataataagtattattatgttatgacttaaatatacttaattatattttactaaccaaatataatagcacacatattattttaataaaacaaatcattcgcatgatcatacatttagatacaatctaaataaaaaaacacaaaattaaattttaaataaaattaatatttacgtgtctcggcacgtaacttttaactagtatatttaaataagcatatatagaggtagttaaataagtatattttaatgatatgtccattattccaaaaaaaaaaaaaatgatatgtatagaaagtatatctaaacagaagcttttgtgcatttatttttcatatacacacatgcatatatgatgggcaaaataaaaataagtttgagaataacctgattatagatttcacaggattgttttcctatggcagacccacaataataaatttttgttttaaagttttataatcactcactctaccataatcaaaattaacacaaactaacaaaggtatatgatattataacgacgttaaaaggctcgcaacactggacgatgattgccacagtaatttgagtagtagataaaataataataataactagtatattatgaatcgaatttgaaactttggttttacacaaacataattatttatcaaagagtataatgtgtgaattaaagtgaaaaagaaaagatcctactgtagg

SEQ ID NO: 7102 - DNA, 863 bp, Cannabis sativa
cttttgttagtatgattaactgttattgtaactattttttttttctattcagttgtatatatacactgacttatttatcagtgaagtgtaatctctttcattcaatcaataaaaaaaactttattattcacctatgttcttcgttctcttcaactcaacatggtaacagagcttttttcattctaatggcgtgtgcaactttgtccgattccacgcttcgtcctaatggatccaatcagttaccaagatcttcttctcttttgttcaatcacactctttctatcaaactcgatgaaaataattttcttccatggagacactaggttcatgctattatcaaaaggtcatcgtctactcaaattccttaattcaacagcagctccacccaagtatacgacatcaaaagatgcagtagaggatcgaatttctgaagagtttcttgaatgggatgttcaagacaaacttcttgtatcatggcttctctcgtccatgacagaaaagattctcactcgcatggttggatgcaatagtgctgctcagatttggtatacttttgaagagtactactcagctcaaaatcttgctaaagtcagttagtttggcactcaacttcgttgcactaagctcactgaaaatctaaatgattacttactcaagatcaagcacattgtcgattctcttacttccattgggcatgttctttcaactgaagatcatatcgaaaccattttcaatggccttacacatgattactctatttttgtaacatctttgtctactcgaaaagatgattactctgtagctgaagttgaatcgttactcatggctcaagaagtttgaaatgagacaactgaatctgatct

SEQ ID NO: 7103 - DNA, 640 bp, Cannabis sativa
tataggtcactaatcctatttagtattatcaccaagtattatattattattattataattaattatcaaattttatatattttaatttaataattatcgtttattatttacaagatattacattttaatagcacaaattatttttattttttttttctgaattaaactaattatttacattaaaccactagtacttgtaacaatcctcaatactactcttttgtggagaagtttgtttttactctgagggtcaattgggatggtctcaaattattaaatttaaaattttcaaatggtcttatagttgttttgaaaatatagtttgttttagagtttttttatttttatttttcaaaaatatatatatttttcatttttacagaaatttatgttgtaacaactaacagaacaatttaaatcacagtcaacataacaactcataaagaaatcatcagaacaacctaaactataaaattaaaatagtatataaaataattttcatttttaaacaactaatatattatgactatcatgtatatacattttaattagacagttagcttccttcaggaaatagttcagttctccacttattttttccacaatgcagatcaattatataaatatatttatatgtata

SEQ ID NO: 7104 - DNA, 671 bp, Cannabis sativa
tgaactgctacaggtgcccatcacaagaattattatatagtttgtttgtttaatgtctaagtttgttttgttaaatgttcccataacaaagctactcattatcatgttgttcttgtttttggttagatattattttatctagtatagtaatgtttctaattatccttccatttaaaaaataaatattattataagtaaaatgataatattttaattattattatctaattatacagcatacactgtcgataaaagttattaatatttgtagaaaataaattatatatattaacaatatatttatgacatgcagtcaaaaaaacttatacttttttttttcgataagttataaaatgatatataaaaatatctaacaaagtatatgatacactaacatttattgtattgtcttagatattagtcatgcatacccacttaatgcaccatcaaaggctcaaaaaagcttcctcacccataagaaaatatatttttaaaatattactattaaacatggtaaggtgcttaatattacaaaagatgatactattaaagcagattttcactaactaaatttgaacctaatagtaacaatctcacacagaaaaataaatgttgtaaatttgaatctaatactgcatagtccacgagtcaatcttattagatttctgata

SEQ ID NO: 7105 - DNA, 542 bp, Cannabis sativa
aacttattaagattgtttttttttttaagtaaagtttatggtatatttgtaaatttctgttatcatgaattattaggcttttatgtcttaagttagtattttttcttatcagagattatgtaaactggtaatgctaaaaatgaaaatagaaatgcatattaccagggctaaaatggatatcattttagtttatatcataggattcttttggcaattacttaaatgatttattagtatgcataagtagataaattggatatgtgtatatatataaagtgattctcaatctacgtacttagctactttaaaaatattggcaaatagtcattacagcacgtgatcatgccatataaaataagttgttggagccaataaacaatagaaaattgtagcatttcactacgatatgtgaataaagtaaacatttctgttttccttaaattgctattatttatggtaaaaatttattttatataaatttgtacatattgtacacccacccaaatcacaggccacactcacatgggaaacttgccaaaaaa

SEQ ID NO: 7106 - DNA, 917 bp, Cannabis sativa
atgcttctccttagttttcttaagaaatcacattgaccaacttttgtatattttatatatttttgtatatttaaatattgaaagacatttcacttgaaataaaataaaaatattctttttaaaaaagacaatttatttagctttaaacacttttaaagaaaacaatttattttttagtcgagtaagaaaactatttataaactatgataataatgttttaataaaaataaggaatacaaggaaaatacatatcttttaacaaagctgagaatgttttgttggagaatgtttctcttccatctcaagtaggcatatcaaaaatatctatttcgccttgcctaacttttttcgaatcggatttgatctgatccgatttcaatatattgaaagaaaaaaaaaacttaattcaagactcaaacctgaacccagacttgaacttgaactagatccactcgggacccaaacccagacccgagaccggacccggactttaactcgggactggactagggacctacacctgggaccaaaaccagactcggattctgagacctagatctgagctcaggactggacttggactcatgttccgagaccggacccaaactcgaacctgagacctggacccggacccctaactcagacccaagactcgagaccggacctaaacccaagatttgggacccgagaccgggacccggactcagactcgagaccctagacctggacccagacccaagacccaaacccgaacccggaccggacctagacccgaattcgaacctggacctaagactcaaatccaaactcgggagccggacttggactcgggtttcgggacccagacccaaactcagagctatacccgtactcaaacccggacacgagacccagacttggacccgggcccaaagcca

SEQ ID NO: 7107 - DNA, 643 bp, Cannabis sativa
atattgataaatagtaactcgttgtaaatagaaaatgagaaaatttaccttatcaaatgcaattgatgtcaatagtaaaccttagaacaagctacttcaaataatttaataacttgaataactcaataactttacaactctaataaccggtaattacaatttttctgataaacttttatgtcgtcaaaaaacatctccaaacaaaacttataatcatgttcggtactctcttttgagagagaaaacgaaggtgggagagagcaacaatgcatcaacattaaaataatgtaatgtagaaccatacatatatccttacatattaactatcattcaaaatgcgaagtttcttacactgagaacaaccaccataaaaccatctgtctccaatccaaccatttcgtaactcaccggcatcaaccccacattatcccagaaccaaaaacaaaaagatgaacaaactccatatccctcgtaaatgcgcagatgaaagttttctccttgacataaggcttatatattttaatttaccaagctttaactatattgttttttcaatactagtatataaaattaatttaatcagtggtgaggaatggtgaagatcattcgctaaagaccaaaggttatactgtaacgttagaaa

SEQ ID NO: 7108 - DNA, 565 bp, Cannabis sativa
atttggatatatcgttgtttacaatcatgcttaattaattactaccatacattttggccatccagtcttgatcttgaagactctttctgtttaagattgtcacaataatatatgtaatgttttgttattatatttagtaaattttctctcttgatgatcgatttaaaattttattgaaagataaaaccaaaactttcttacgataaacatccaaactttaactttatttacattcaagagactcgggatccctagaggtccaggcatgctatgcccatgtttaggacctaattttttttttatgtagtataaatacttatttgcattgaaaataatggtatattttttgtaaaattttgtaaaaaaaagtccaataatactcacacttcactacacacaaaaaaaattcttaggcccatcattactcaaaatcggccttgaatccagaaaaagttaacaaaatatatttacaatcaatttaacaagttgtatttcacttatgaacacctgaaaacaaatggagctttgccaattgagtttctcaagtattcatcactttcgatta

SEQ ID NO: 7109 - DNA, 1184 bp, Cannabis sativa
cgaaaataattttgttattatttaaattatatttataatattaattggggtgttgtttttttttttaaaaaaaaactgggtgattaattatatatgttcctccatcttgagatagattgtgtaaaattaatctaattggtgtttaaaaatatcgatattttcttattggcatgtggtataacctaattatgatataatttacaaagacttataattattattttaggcaaaaaagaaatataataattttttattttatttttattattataaatatattatttaaaagatatatagaaaaatataaaagtaatagttgatatataatgtaatataaatgtatatgaggtaaaattaggtgtgtttattattatacaacatctaatatttttaagcttaatcagatatgttccaattatatattagatgttagattatatcaggattggattagttttatctattagacacatttcatatatatatatatatatatatatattgctttggttcaaatttatccactattttagatatactattttttggattggatctcatccttcttataatattttagatctatgatccaatccaaaaaaagaaggctaattaagatttttgtccttaaattttgacatgtaccaaattatacccctgatcttttaaggtcgttaaaaatctgtaatgaattattgagattgttaaatttaaggtattttgtccaatttcagtacgataagtttaatatggatgaaagtttttagggggcatgatttggtacatgttaaagtttgagtgacataatttggttaatatctaagtatcagaagcatgatttaatatataaataatcactgaattagtaaaatttaatgaaattggacaaaagtccttcaattcaacaatctcaatagttcagggaaatttttaacgactaaaaaagttcaggaaatatgatttggtatatgtcaaaatttaagaggcaaaaattctaattagtaaaaaaaaagtaaaattttaatcttaatttttatttatacgagtataataatataaaatttaattattcgtccaaaactgaataaaaatatgaattagttggaattcgatattagatgtattagtttttttggacacttcatccaacatttgatctactctaattggatatttgtaaaagt

SEQ ID NO: 7110 - DNA, 890 bp, Cannabis sativa
ggctgtcactaccgttgctgctgattctccactggccacagagaatcgaatgtcttctctattcaccaaacgacagctaactacttcagggggaatgtgcgaaatgtgttgaagagatgtcgtaccagaggctctccacttgctaatactaccaatctcaaccagcatcaacgattggattcatcttttgaatgtcctcacaactcacagatgaatgaagactgtggtgcttccttggcgaaggctgcttcccagtctcgccaatcgccatgaatatcgtctcttggattgctcgggacttgagcaacccaagagcattccgtcagcttaaattgctcacttcttagtgtaatcctgatgttatttttattatggaatctaaacttaaattagggtctattactaaatttagaaatgctttaaagtttcctaatggtattgaagttcctagagtaggacttagtggtggtattttatttctttcgaagtctaatgtaaatgtatctattctcaattatggtaaaaactttgttgactgttacttgggttttgttgatggtccctcttgtcatttttctggtttttatggggctccttgtgcttctcaaagacatttcacttgggaattgctgaacaaattaaaagatactgctccactctttccttggcttgtcatgggagattttaacgaaattttatctaatcatgacaaacttggtggtcctttgcgtgatgaacatcaaattgatgcttttcgaactaccattgatcgttgtgggttaaatgaattatatttctcgagggatcgatttacttggcacaataagcatgctcaaagctcaaatgtcaaagaaaggcttgactttggtttcattaatcacccctgggct

SEQ ID NO: 7111 - DNA, 768 bp, Cannabis sativa
actcaaagtttttacgtggttggattgttaattagccttaatccacgaatcagtattattaattgataggctagaaaagccgaagggattacagtgagtataattgctctattctcttctcaagcttgtgagataagaatatccaaccctttgcatgaaggattaagtgtatatttatagagatagagatcatatttagttactctttccctctaatgggtgtttacaaatattacagtactttgggcttatcgagtgaattagcctagcccatgaagcagtgactatatgctaacttggcatgtttatcacggtcatagctgtagttaccatgtctcttgattgtggataattgattgtgtagtaatcatttgattttcaattatgtagcttcctatttaaacttgatattactccctctccaagatctaagaaaagtaactccttattttgtgtggatttataaatggaaaactattactggcttccggttacatgctgatagacccttccggctacgcagaactaagggtcctttagatatgggctacacttggtggagactcgcctgggttagtaacgcgagtatcttcccagaaggctaggttgatattaggctaggcccaatccttgtcatttagggcccactgatgggctttaagtaattgtcttgtgtccatgtgtcccttcccgaaacatggataatatttaccctctaagcttttgaaatattgtagattgtgaaagcttgcttcaatctacataagt

SEQ ID NO: 7112 - DNA, 1473 bp, Cannabis sativa
aaaagcgcggacaaaaatgatttttcctaacacgtaaatatgctagttaaagttaaacttttaccactataaatgttcaccgataaaattttaattttttttaccagcacaatttgcgagatgtattgataaaaattactcgtgacatttataataatttatatgtatattctttcctattcatggttagttaatatgcatgataaggaatctctacaaaaaatatatatatacgtatatatttgtcttatgaactggtgaaaggtcagtgattttatgaatatgcatgtggctggttaaatgtcattttcttacgtatattaatattattttttcatgtaaatgaaggataaatacaatgtcaattgtgttgtagagataattattcatcactatatatacatatttatatcataagtaatataatttttaattaattactgaagaaaagtctatacatatagagagctaagtagctaagtaggtaacttaattaagataaaaacggcatagaaggttccatttacaagtattggaccgtccttaatctacataattatatttctactaatcctttttcttttactaattaattaatagtataaacttgtttcaaaatctatagttattgaaggttgtcttttttcttctgtagggcccacagtgactttctcagtgtttaggattatacgacttggttggtgttgtgttttgctattgcaatttgtgtttaggagtattttgttttgttctgttgttggttcttcaatggttcgtcattacataactattagtggttgggaataataagttttttacaactgaagaggttgttactagtacagttatgtaccttacataatatagttgagtgctcaggctacgagatcatatctgctgcaataatttttactattgtgtcttctgagcggtagatgaaacataatataagtgtccttaaggttaactataatattgcaatcttctttatctgatattattttttctttcatcaaacaatctagtaattacgcaattgattattttgtttgtttttctaattttaattctagtcatatctccaaaagagatgtcctaatttgatcgtagactattctttagctaattactattaataaaaaattttatgatttattaaaaaaaataattaatattatatatatgttaatatatataatcaagagacacgtgtccatgatattccacatgaaacaatataatatattaattgtagagatttcttttgatttgatgacactaacaaaagtaatattaagatatatatggtttttttaattaaaaattataatataatggttaaaattagatatgaaataatttgaagttatcatcatgatatatgattgtttgatgaacttagagttagtggagcaataataaaggcataaaccttttcattactattccttaaagtactacataccaatgtta

SEQ ID NO: 7113 - DNA, 809 bp, Cannabis sativa
cgggtataattgccatccctgtatattattataagtagttggctaagttgtatttggtcttatagaatatcccaccaacatcaattaattggtattaaacattatatattatgacacaaccagttttgtcataatacttctatattatattattatcaagttttattttgacaaaaaaaattagtttagagttctgtttatactattttaaaaaatgcataattcattttattatattttctttttctcactaattctttcttcttctatttttagtacacagttaggcacatttactcattcaatggaggcacgcactgaggtaatattattaaaatattgtaccttatattttttattattcttaaccgcatagttaatcgctcttatatttctggttcttaatcgcatatatagttaatcactcatatattttattatgaatcagataatagaccgtatagttacggactggcgaagaacaccaggagtattaactccagtccgaaatcaacaaaaattaagtaagtatcaatatatatatgtacatacatttttatttgtatttattaatagtgttttgttactgagtattcggttcaagtgttaaatcacacaaatttgaattgaccttagaaggttttgtgagaaagataaaataaaatacatttaaatggtatatagttgtaattgtaacacaagttggtggggaaaatataagaaactttattatacagtatacaaacaaaaagaggaaaaaaaaaagtgtcattattagaatagcctaatataagaaaaacaaaagacaa

SEQ ID NO: 7114 - DNA, 726 bp, Cannabis sativa
acgcgcacgatcaagttcaaggtcgataagttttggattggtcaggctttcaactatgcttttaagtttatctatttaggattgcactgctggatcaacttggcttgcttgttgcccggtctgtatcacctattatcctctttgaactctaactggggcgtaattatctacattaataggctacctatagggaggaaatactgtacctctctattctctcctctggttcagtgtgttcttgagatcgactggttgagttccaattctctcaaagactgactcgcctagaggtcttcttgtagcatcaacattggttagtggaatttctttatgagcatgttgatctcatcgtctctaagcacaagttgcactatctaccccaacctcattattacttgagaattattgactacgagcagttgtagtctgacctgttgtgcggcagtgtacaggacatattggaagtattgaatctactcgtcctagtcataaatggttatagggtcttgaaatgctacatcaggctggttgggcatttcgatgtggagacaaaagttctgactacgtactttgcccaaggtgttgccctagaaatacctgaccgtctactgtggggcctacattagtttatggcctaggatttgacagtccgagttgtaaagagtcctagacgtaagtcattggaggaacttctgacccaggctggtgttggaaatattttaccag

SEQ ID NO: 7115 - DNA, 550 bp, Cannabis sativa
tgctcatggctcacaggtttaacagtgaagaacacaacatcctattttacttattgttttcaaaacaaatccatttgtcaatgtgaaaaaattaataattggagatcaaattcaagtttgactaacaataaaactcttaagtccatggcccaagccaagaatgtcctggggacagtccgggatgacgtcgtagttgatcttgtggctcactgacatggccaatcggcttaacatccaatgcataagaatgtcagacaatgaaatttgatgtttaattcatagaaatattgaatatggagatttttttttcaagtatgttttacataaattagtgaagaacatgacatcctattttacttattgttttcaaaacaaattcatttgtcaatgtgaaaaaattaatagttggagatcaaattcaagttcaactgatcaactataatgacttcatcacatctgttttgaaaatctataaatgtttgaatggattaatatgataataatagtaacttgaacattttttttcgattattactttttcatcttttgg

SEQ ID NO: 7116 - DNA, 558 bp, Cannabis sativa
ttggttgccacctattttaaggaaaatggttttttcctcttaagggctttgttttacttcatagaaaacaggtatgagttgctattttggacattaacattttgtctcaaaatgcttaatatcattactctttgtcacatttcaggctctttctttgatgcattagatcggtcttactttgtctgcctgtgccgccacctcctaacttagaacaagtttcttaggaaaagaaaacagaacaatttctttttgacatatagaaaggatcagagttttttttttttttttgagaaaaaggatcagaatttaatgagagagatgtatacatgtatgaaaattcagcatcttatatatccaaagtggcatctatgttaataaaacaagggttatataaatagtataattttaaaatgataaatttaccctttattaaaaattggataaaatagtattttgaattcaatttttttatatttttttaatactactaacttgaatataatttctagtacgaataaatgcataatttgtaacatttatactatttgataatataat

SEQ ID NO: 7117 - DNA, 531 bp, Cannabis sativa
ctacttaccatattttgagaaatcagcagaaatcatgcccaaaggtattgcgacgatattaaattctccaacaaaggactagaaattattcaacttcttctttggacagaatatccataacccgaacaggagttcatagaagctaggcaccatctccaaactatcaaaatccctcaaaccccatcttacaaagttgcggactattgatttacattattatattttttatatgttgttttttttattgtttataaaagattctgaaaaattataatcaaaaaatattttcaacatataaagattacaattgtgtcaaaaatgacagtttatgtacaaatctatttttcttcatataaatgttagatattattgaatccaataattagtgcatctagcattattattttgctatttttttttttttggagcattattactttgctattgatttgatcgtaggaaatgagggcaatgataaccactcgtgtaatttttatttttattataaacaatgattactagtaatcacaa

SEQ ID NO: 7118 - DNA, 2468 bp, Cannabis sativa
ttttttggaaagttcattattgggttcattcttatcacttatcctatcaaagaaggtatataatatgactcaattcaagcatttgaccttcaactctttaagactattttttctttgttcaaaattccaacatcaacattttctctttccaattttcctagaaaatactaaaaaacattcaaaattacacaatttttgaaacaaactaatctcaaaatcaaaacatagaaaatataaatgagttggcactagaagcataacatgttctatattttattattatttatttatttgcatagtacacttttttaggttagaattttactaagacttaaacccttttgattccataactttttgcaatggaccaagtaaagtcttgctattgtttgtttgtttaattaataattcttttaaaaattaaataaataaaagaaaaatataactttattctattcttcttctagtctttgcaggtacctataacattaatttagatattgaactgaaattctattgatcaattttttgtatatcaattagtttggtcgggttataatatatttatgtcgtaaattactgtaaaattaattataaatatttaagtttaaacttttcacgataataatacttaagttatatttctgaaactatcgtaggtatctagtcagtaagtgtaagtcaatagtcacgtaacagtcattgattggtctaagtcattaaatttttattttttacttaaaatacttaaaaactaaattaaaaatatactaatatactaataaaactaataaaaaaataacacgtggataatgacttgacacagttagattcgtacgaaattttcaaaaatataacttaaatattattacctttaaaaattaaatttaaatatttatttgaaagtaaaaattaaatttaaatttttattagatttattttttttttcttcttatttttcaagtgtattggctgtcattgtgtagtgagtactgagtatgatcttctaataataataataataataataataatatttatatatatagaaacaaattaataaacaaacatatcaagacttgtctttatttacttagtgaatatggttgttctcaatagggacataaaataaaaaagagtggatctacagtcatatttttgtctattattctcccacacttttttaaaaaaaaaaaaataataataataaataaaatatattaattatttatggattagcctttaattataatttaattttcttaatttatctccctacacctacctacgaactcactcccaaatctcacgtgtcttcctcgtgatataatgtgataatgtttttttaaaaaaaaaaaaaaagttaaataactatgacaaaaatactaattttgaaagaaaaaaacaataattttttttttcttcttatccttgaccaaacaatatattttttttttatcttttattaaaaaggaaattataataaatattgagagaatgagaataataattaaatgttcaaattttccacaattgcaactcattataactagatacatttatgctatgagtaataaaaagaaaagaaaagtaaacactaccattcacatatatattggcaatgaaattttgtgcttcacttttattttatatacttagataattaagatttaattaatgtagtactcttaatggaattttagttaattttatttagatttgtaataataaacaatggtataccatcatatcaattctatatcattgattatacaccaatgagtacaaaatattattatacatatattttgaaaaaaaatcggcaaaaatccttattataatgtaaatttatttatttcgttgcattaaatttctttttttcttcatttaaaaaaaaaaaaaacttttttgactgtaaaaatttcaatcattataaatttgatgcaacattaatcgttgaattgataataataataataaagaaattaatattattgtaacaacataatcatatatgatatactgatttttgttgctaaaaattacgtaaaaaaaattgttgataaaaatttacataagtatttaaatgcgaccaaataaacaatataaaagtttttgctactaaaaaatttactccaacaaaataaagtgaaggaagtttatacaagaatatgctttgttcgtatgatttttttagtggtaaaaaatgataatatttttaaaggaaaaaaaaagtgatgaaaaatgaaagagagggagagaacgtggcaagacttagcccatccatccatatataaaatcttttctaggcaaaataaataaatcaaaaaaaaaataaataaaaaaaaatatgaaaaagaatgattgtggaggcacacaaaccccacttcacattcactttttcctattatttaatattttgtcacctctacacactcactaataaatctcttcttcttcttcttctt

SEQ ID NO: 7119 - DNA, 1325 bp, Cannabis sativa
attagtaatagattttgactatgaaaacgacaatttcttctttgtcgttcctttctagctttcattccaactagtgttgttgtaaacacgtgtcgtgacataaatatgagttgtttcatacaaaattacgggtcgtgtgtgatgtagtgttgaaatatgactcgtgtcgtgtcatgttaagatttatatcgtgctttacttaagcaaatccactctcttacataagtttaaatttttattttttcacatcctattttacaattaatgaaataataagtatttttttaaaacttcaattatttttatataaattttacataaaaaatcattacaattgtttttttacactaacccaaccagtttactcaacaaataatatcaaaaggaatgttatgaatgcactcactacaaacaactaaactaaatgaaatcaatttatgataaaacacttcacactatatcaaaatacaacttgatttttgattttgtgtgataaagtagctttctctttctaaaactaggttcaaggtaattacagttggatttttaataatacatatcatatgcatcatcaactcaaatttctttacattttgatgtgggatccttacattaatatatatatatattattgctttccaaagtgaaatctcacacaatcaggttacttggaaagaaagaaaggtaataattaaatataaagattagggctcttaagatggaatgataattataagagacagacttatagttaatttctctctaattaagcaagagactcaaaaaaacatggtatcttgcttcttaacaagccctcactttctcactctcacttaatcctatactttgttttacacacacacaaatataaataacaaagtgtaataacccatcaatatgatattgaatgaaaacaaccactaaagaacaacacaagaataatccaccatttcatgatgccatgaactcaattgcccccacaaccaaatcatctattgctcctgaaaagaaaaagaaagaaaatgatatgaaatgaagggtaagtctatagtactaactcctaaaaagttatttagaaccacttgcaagttttataaaattttgaatattataagatgtaaaaaatgaagttcaaatattttgttttttcatgtacatgtggtaaagcaaccatttaaactttattttcagtacaataatataacgtccctacttcaagcttttattgggttttcccccacgactttatagttcttatgtacgggtacgtcactctagctgtttcctagactgacagctggtcctacagaccaatacgagtgttt

SEQ ID NO: 7120 - DNA, 540 bp, Cannabis sativa
tcgacccaaccacccaatcgcatcaacatttattctggccaacccgccagatctccgccccgtatggccattgatgcgaaactcacaggtattcaattttcttgctcaaactctctacccagcgtcaactcgtttctcataaatagagttgaaatttgtttttttagattcaaatttggtttccccatcaaattacccctgacccaattaaattcagaagggatatgtgtaacgggaactctgtcaaatcccagtccgatcgagtctacagtatgtttgccaaagagaatatgaaggtttcgattaatattatttatactgaatgtgctctgcctattatcatctgtcaatccattctgcagcagctttgcatcctcttaattgctacggttgtaatttatttttgccattataagatttttctactcaagttcagcaatgcacttccctcatgcactttaggtgatactattgaaggttattttaccataaaaagctctctgctatatatcctttctcctttgaattttctttttttag

SEQ ID NO: 7121 - DNA, 525 bp, Cannabis sativa
atggtgttatgacatattagcaatatgaatttcaggtgaagcagaaaacacttgtcatatgcggcgaacaagatcaaataattagctacaaggaaacattggttagtcttttaagccaaaatctaattctcatagtggagttagttaatacattgtattcgaattagtcacacattgctaatgtgtgaaaataaaataccatatataagatgaatcttatatatgagttacttttcttatagccaactaattttgagattaaactgcattcattttaacctcacactcctaaattttaacatagtatcatagcaaaaaaaacaaaaaagtttctgctatctccgctcttggcctccatttggattaaatttctcgtacacttacaaatttcaatatttgactcatacatgcacataagaaattacgattatcaaggctagtgaaatcaatagtttcatattttgatcttaattatttttgtaaacatgctgcagaggttacggctagtgaaatcaatagtttcat

SEQ ID NO: 7122 - DNA, 1627 bp, Cannabis sativa
agttgggatcagtcaatattaacgcttaagccgtagtactaaattagtttatgcatagagaagtgtgcccatataatattgttgaataaaatgctagcaaaataaaagaagaaccatattactgaatgaaaaattctgggatgaatcgcagactaagtcgctctctttaagacgttcgcggcattgcccaagagtgtacaagcagtcgaaatttgctggtcgtccctaggataaaacagtttagtcgtcgcactgtatcggaactccactgcactgtagagcatcgccgaatacacccagagaatttttatatcgcagatggaattttagtactatgaaaactgtattttttctaatacgagagagatgtgttcttcccatcagttcaatcgcattatatatgcaaatagattgaataatcatagaaaaataacgttttctgaatcgtggggtgagttgatttgaacgtgtcccattaactgatacgattgagtaatcagttccaattaaacacgtttcttaattaaattaaaaaaataaaaaataatatattgtcacaccacaccaaccaacccaacccggtccggatcggacggtgcgcacgtgtgtgtggtgggtcaagtgtgtgtcctcacccattcgcacaaaacagggtaccccttggggcccaaacccaaatgccaaggttgcactctttatacccttataaataaggattcacatcccatgtgagactctttccaattcacaaacactaagacactaatatattttgttaaaagattcacaaaatttccaacaaattataaatagagtttttctatcggacagtgccctaatacttaattgtaccaataataacataaaatctaataagaatgctatagataaataatatcttttagtattttttgtagaataatatactgttaaactctctaaacttttaagtttagtacaatctaactgtcacactggaaaattataactagaatctccaacctctacaattgttttggtccgtatttcttaaagaaaggctaaaaaaaaaaaaaactaaccaaaacaatttatcttaatttttggcatttcccgtattaatatactaaatcatacaatttcaccagctgtaaaaaaatcaccaaattataggaagataaattatttattatatatgtatgtgttttaggtgtgtgcatacaaagttatccaatctaattacaacagtcgattgatctaatttcaaccgatccaatagaatatctaatcataattagattggatcggatataaattttaaaatccaattggatcgaatcggttgttgataatacatccgatccaataaattaccgaccaaactgatccaattatcatccaatgatcattcaattatatttatatatttttaaaatacatttataattttatatatgtaatatattttatttaaaaatatatatatattgattgaattaatataaatttaacacatgagattaaagcaaaaaaaaaaaaaaagtcttaaatctaaaatattaattctcatcttcctaaacgctaataaaatcatgagaattaaattggactaaactaagattttttatgtatgttggattataaagtt

SEQ ID NO: 7123 - DNA, 1816 bp, Cannabis sativa
aaaagaaaccccgctagagctccattgctcatgaactcataaaccaatagtctttgctctccctcttcacagaatccaaccaatctaacaagattcttatgatgtgtatgaccgatcacattcacttcagctttgaactccttttcgctgtcttgaaaagctcgatcgagcttcttaactgcaacttgctcattagtgtctttcaaagttcctctatagacaatgccaaaagagcctcttcctagctcttccttgaactcatctgttgcgtcgatgagatctttgtaagtgaaacaccttaagttgagacgagaaacttctttgtcatcttgagacctaataacccttttcttgtaaatgaaaaagaatcccatactaattcccccaaccaacaaaaagttaacaaacaaagaagtacctaagaggaccgagcctacaattatcaaaacatttcggttccttgtcattgaagaagaagaaggattctcaagaggaaaatcagatttcctaactttaatgaaagcccttgcctcaatattgtcatccactctcccatttgtcaaaggtagcttctttttccaacaagtattgttcctaaaaatagcaaccgcgcacatacaatcattcaaacatgtctctttacatttctctgtatcataaggttgaagcacctcataatcaccagttggccaatcaatatctttaatctcttgaaatgtgtaaacactctcaactaaactctttgaatcctcttcacaactttgaagaaaattcggtttacaacctctatactcatcattaacatcaagtaaagaaaaccctcttggacattcacaaactggtctcttatcaacattcaatctacaaattctgttataaccacaagccccactacttccaaacacaaaactctgtacacaaatattatctggtatagaccaaacaacagaccaactatttcccttagtgggattctttggataactataaacaccaaaaacaccatcaaaattaagagtagccctataaaaataatctgaactagaaccattctctccactactcaacataaaaatctcattgttctcactcaacacatacaaactacctaattcattaaacactaactgcttacctgtattattagtactccttgtgtagtaattatcattagtaaattcagatggtaagtttatactattaagaacaaagttaccatctttccccaaagaaagttgaaaccttcctttagaaaagttagtacttaatgatgcccttgaagaaaccacatctcctttttccaatacttgagttggtaacaaagtatcagttgggtgactaaaactttcccaaatcttctcagagtttttattgacaagaacaaagttaccactatcattaaaaagagccatatttacctgacttataatggggttagaattccaaagctcttgattttgagggtcagttagtaataggcctctgtctgtagtgagctctagtttggacccttttggggttggattgttgggagtgtcagcataccatacaactgttttttcgggtaatttgttgaaccatatggctagcaagaacagatctttgttgttgttgggaagttgttgaaatccaaaggcaaagtcacctgaagaagaaagccatgatgagaagagtttgtcaccagatttgagagttgcaccaatattgatagtgccattaatattgttttgagccatagctaaagaacatgaaggaattgaaaaggttattatgatgaggtagtgaagaaaggaaaacatttttgaagattttagtt

SEQ ID NO: 7124 - DNA, 780 bp, Cannabis sativa
gctagccctccttgggcatagatatggcttggttggagtttgtagttttgctacttcgattagttagttttgcctctatgacatggttttgagtattatttaggttattgcaattaatcttatttccgtggcatggttaattttattttgtttgtttcgttattggtttgccttttttttttcttcagtacctcgccataaaatgtcttttagttgttaacaagttctctgcagctaaagagattgttagtgacagttacgtatcttgcacaataattgaatactcaaactaaggggttgaatgaacaaccatgccgcaacaagtctaatgttgtgtcctcttaaggatactgtgatgctgcaatccttttaatctaacttttttttatgtttcttttgtgtaaaacgatttggaaattaggcggccggttagttgactcatttttcttattctaatcttgattgtattttcaacatgaaatatatctctattagattgtagattattattttttaaaatttcattatttctttaaaaaaaaataaaaaatattcttaaatgttctacatagcaatttagggatgttttaataaaataaatgtgcattgtttgtgaaattaagctaaatttgcatttgtatttattatttcaatcaaaaaatttatacacaaaatgatcttggttatttgtcactaaaaagataagtaggaatttaccaacaacaacttacacactaccagcaaaccaaagaatcctcacattagttttttttttttttt

SEQ ID NO: 7125 - DNA, 1153 bp, Cannabis sativa
actaaagcggtcattacatattataatatatattattctagttaataacatatatttatcatattttaatttatattagattattaaataatatatcattaataccattaatatctcacttgagagaaaattaggagatgtactcatacatgggtcacataagttaggaaaaggtttcagcaaaaaaaaagttaggaaaaggtcaaaaacaataagtcaatattaacaatacccattctccatttaagggaaaaaaaacattttccacgttagtgcctttaaaaattactgactgctgcgacaatgacaccattacgcatattgaacgaaagtttttatttaatctcaaatgtgagaagagtacacagtataataatagtcaaatgtgacaagagtgacaccattacgcatattgaacgttaacattttgtttctgattcatcgtgacaacctccactcatcttctttcacacgcgttaaccatccccaacaaacaacaactgctagctgatcagattattatatttattatatttatactttaaaatattttaggttgtcgtttggtatttttatttttaaaattttttaattatttttaaaattttatttttgaaaaataaaaaatgtgttctataattatttttattttttatttttaaaaacaaaaaacaaagtataatctgtaaattttatttttatttttatttattgattttatttaagtcaggttcgggaccgggaccgatttcagggcaaggttgatcagggtctaggtcaagatctggggtccgggttagggacgggatcggggtcggggtttagggtttgggttcgagaccagggtacaatcgattttgggtctggggtcctgggtacgggtcggggtctagggccggggtgcggggtgcaagttcaggtccagggttgaggtccgagctccgagctccgaggtccaaggtccaaggtccaggtctggttcgaggtctgggtctgggtcggagtttgggatctaggtcgtgtttgaggttcgggttcggttcgaagtccgagttcatgtccagtctgaggttcggggtcaggttggggtctgggcccaaatcagagttcaggtctagggttcaggtcggggtctgggattcaggtccagggt

SEQ ID NO: 7126 - DNA, 650 bp, Cannabis sativa
tatatatatatatattgatgttctacatgtatcatgtttataatatttttaaagaacttgctaaagaattgtgttacattattatgagtagttaaaaaaaattatatgctaaaagtgatgtgttattagaagaatactcatcattatatactatattgaatgaaaaacacaccaaaataaacttacaaaatttatacaaaatggtcaaattaatacaaatatatatgtgaattaatgtcttatttgaatagtttgatcaaaaacttaaatgataatagtatatatatatatatatattatattatattacttaaattaaaaatctgaattgtgaacttaaatggtaatactttatggagtaaaaaatatatgtttgaatcatctctcaaaattgaatgaaaatgcatttacatatgtatatgatgatatgaacgaaaactttaaacactactatataatcataaccttacactacaataattttcttaattagcagcggaattattagcggcagacaaaatctgtcgctaataatggtagtattagcggcggacttcaatttctgccgctaaatagggtttttttaatattattagcagcgggttgtcagtcgctattgccagccgctaatagtattagcggcggggtcc

SEQ ID NO: 7127 - DNA, 1124 bp, Cannabis sativa
ctcccacaccctaatcacactcccggtgcacattagcgcgaacccacgattcatgcacccgaccaaccctctctccctgcgccattgccccacgccctcacactaaagttgcacaattcctctaacgtgctcgcccgacgcacactagcattcccctgtctgtctactataatatacgtagagttactcacgtccatcgatgtcaccatcaaaccaccctcgtactcctcctcaccaaggaccaacccatgattcctcaaatctaacaccgtggccctcgtatctgtgcatgccaccgctgattgttgactcgtcactctgactcgacccaacacatcgttactcgcctcaatcagcatttgccaacccctgactgagtctgggttcgtcaacgccccaccaactgaaacaagttcctctgtgttgctgtcccagatgtggaaggctcggtctggtacgcccgcgtataggcccacccaccagcgaccgcagccactgaaatcaaccaaaacaccatcgtcaaccgcattgccctcgaaaactcgacgagtatgtgtggggtcgttgatgagcgccacgtggatgtctccaacaagagtcccaaagactaggcgatggttgtttgtgataatgatacctgtgatagcgtgtgagaatggtcccaggatagctctggtgcggggacggaatgtgctgacatggttgcgcgtggggaggtggaagagacgaacggatccatcagagaaaccgcaagcgaggtgggtgtctgagagagtgaggcatcggcagttgaggctgttggctgggccatcttcttcgttagggtcgaacgggaggatggtgtgggagtactgagccaaccgaaagttctctgccgtccgatgccaatagatgtactcgtcacgccatgtgttctggagaaggtaggaacgaccccaaatgcggcgagttagacgatgccacagatggtccgacccggaggcttcacgccacctggggcacacctggtacagcaaaagaaaaaacaagttgccaagttttcatttctatcccatgcaaaattgaataatgaaagaaaagaaaataaacaaaataatttatttttacagaagtgataaagaaga

SEQ ID NO: 7128 - DNA, 1477 bp, Cannabis sativa
taccttgaaacaacgatttcagtattcttacataaagtatatatatacttgaacatatatatttagtgccttctcatatatagtgattaatgattatatgtaatatattctacagatgaaattaaacacaattggaaaaggctaattaagttcattaattctttctttcattcactgcgtgtgtatatatatatacagagagagagagagagaaattaagaggatcctagctctgagatcgttaatcatctgaaaaaaatgaaatatacatataaaacccataattttaattatattaaatttaaattaagttatagggttggggaatattgtataaaattatactcctaaatttgcaagtatatatatgcgctacactacacatatatataaagtcagaatcaccatgcacgtatatatatgtgtgtgtgttcatgtatagagtaactgggtttacagaaatgaaatgtgtgtatatattatatatatataaagagagagagatccgatgtgtagatatatcatatcatcgtgtagtatatgcacattatcattattgttattcagtgtaaccccattgcgaattaataaaagggaacaggatattaattatataatcaggaccagggatcgaattaagcctctcttagattaaatttccgtatatcagcacgtacaactggtactatacttaattgtatatttagacatggatcaaaaagctgataatacttaatgcctcttaactacgtactggcttatttgacaagtgtagaaaccctaacaacttcaatatgagaaatttcaaaatgtagaatataaggaaaagaaaatacattcatatataagtaatatggatatcatatacaaaacccaataatgtataaataatattggccatgaaaatccaatagttaaaattactcctacatatttataagtgtatacaaaagaataaacataacaacaaaaccccaaatacaagggagaaaaaaaaaagtactaagaaaaacccctccaacaatatcaaaaggcaaaaaaaaaaaaaaggcccactactactcattatacatatatatatatatataatacactactactaatgaaatgggtaatgatcgatcaatcgatcatgattaaattataattaaagtaactaaaacaaaaaaagaaaaaaaaacgtagtgggttctttcttataataacaaaagaccaacaacaaaaaacccataatagatatcatgagatcagagttagcaaaataaatatatatgtccgtaccaattatgatgatcatgatctctgatgatgatgatggtcttcattatttctcatctgggtaggcacaatatcttgaagaagccccccatttgtcatactcgaagccaatgaagatgttgttgttgtagtagtagtagaagaacaagaattcataacacccaaaacgacgtcgtttttagtattgttacttctacta

SEQ ID NO: 7129 - DNA, 1131 bp, Cannabis sativa
gaaactctctattttattatctcaaggtggaatttaaaataacttgcaaaattttgatagtttttcaacggattagtgtactaagtagtcttgaatggcagtataattttagattgatctttgataatgatcaaaggttccacctctatgttatagaggaactagtttttttagatcaaataaatgtgaaggaataagtgaggcccccaacatttttaccaatcttttagattttagattattaaactcacaagacaaataaggtcaatatgaaatgcccactgaaagaaaacaggcaacaattgtattctttctcttacatattcaaacctcaatagcttgttcaactaagtaataaatgctcaatttccacacaagttcaaagtttcaacttgccaattcaaaataaattggccaaccttctttcttgagaaccaaaaattaacttttttcattaaatcaattaagaatcatatcagatagaaattatagaaggaaacacaggatacctaaaatttcaataaactaaagaaatggcaacaatttggtaactctttcctaaggcaatacaaattttaagatcaaaattcaaaacaatagagctaaggagttttttggtttaataacttcaaaactattttcagtgagtgtttggccaaataaattaaaaacagttttttgaaaacacattgaaacagctcttaattttcaaagccaaagttatgacagagaagaatggtaatgttgtccaaagaaaattgaatcagaacatctgccctaaaaagttgtcaatctaaaaatcaaaatcaaaatgagttagtgtagatgtgagggtattacaggcagcaaaaatatgatcaagttaagctgcaaagcgaatcccaacattgttattgcactttaaaaagattaggcaaaccgataatgaagaacacggagcctatgtactagtgcaccaccatatcaaaaaaagaagacacacaacacaacacaaaaagctttgttgagtaatgttattgataatttagttagaaaaagtaaatctttgatgattttacagaatacctgcttcttcgtagtgtttgtatgagttttttacaaaccctaattctagctgccattgatgagctt

SEQ ID NO: 7130 - DNA, 668 bp, Cannabis sativa
attaaatagggtcatgatagtattacgagtcagtaatgacactaagtgtttgtgcttccctctgactttaggagaatatgctaaagaaaggttcaaaaagttagaaccaagctccatatataggttgctggaacaagttgcagatgaacatctagagacattttgtcgcgtcaggatggtcaacctcgaacttagtgccctaacctacattgagaaattacctgcagagaccttaaaaaccttcattaaaacatctaaagaagaggcttcaaaaacaaaacaaaaaaagtagacgacaggcagcagttggccttgttacaagtaggaatcaaaacgtgtagcttttttttttgaatgaactccaacaagaaagcatggatagtttacaaaactttcaaaaatgggctaagaagtacattaacattgaagagacctatattactactttcagaggggtattaccaagtgggaggtccaaactatgcttacaaaaagcaatatccgggagtaagtcacctgacatcgtcgcagttaacaggaggggtgccccctcccagtgtacaattccaagccccagtggcatattcccaatgttcctctgtggtgccaacctactccaagtatggcacgcctacaacttgcaatgctactccctgtatattcgttta

SEQ ID NO: 7131 - DNA, 869 bp, Cannabis sativa
taatttcttttgagcgagatagaaatagtagttaaaaataccttttgaagaaagacttacaaaataatatataaataaactaataatgattatattatatgcctatttattgtttactatatataactattattattatatgattatatggctatgtcaaacttttgccccattaatagaggactgactaaaaaaaatcagaattattataactgcatggggtcctcttagaattgctatggggataatttatcatttaacttattatatgcataccttactttttattcaatataagatcattattaattttttttttttgaaagcaatatatataagaatattagtaattaatttcacagtttgatttttcttaataaaggtaggtttgggttcggagtctggggttcaggattgggtgtaaattatttgggttcgaggtttgggtcgggatatgagtataaattagggttaggattagggtttgaatctcgttttgggtctgggtctgtgttccaagataaaatattgataaaaaaaaattgtaagaaaattttgaaagtaatttttttgtttttatctcaattaaaaaatttaaaagtaaaaaaaaaaattatagaacatgattttttttaaatatttgtttttttatttttacacttcacaatagtttttttgtaattttacggagattcacatagcaaccaatataataacttaaattgcaatcaaaattcaagtcatattaaaactatccaaataactcataccataaattaaaaaataatatataaaataattccctaaaatattttcaatggattccttttaaaaataatataaaatcacgtgcatataaatgaaccaca

SEQ ID NO: 7132 - DNA, 1668 bp, Cannabis sativa
accgaccgttgctcacccttatgttgttctatgttattttatttttaggggttcataaaattataattaaaaaatagaaaaccataaaaattaaaataaaaattgtaaatatctataaaaaaaatataaatatataatattattttgaccgtataaacattaaagaggttagaaaattgatagatttttaatttttttttgtgtaaaagctttctcttcaaaattattattttatggaaaattgaaaaaaaaaaaaaaaaaaggttgaaaaatataaagaaatcaggtataacgataatcaaatacccttataataaccaaataagtaacaaattaccaaataatagtacattaataagagaatattcaaatagaaaaaacaaatgttaagtattgctaaaaggtatcgttggtgcttagcaccctcctcggtctcataacgctattattgtaattaagtatcgagtcttatataacttaaagaatagcttttaaaaaatattactaactaattgtagggcgccacctataaaaagtattgggtactaatggtacttaataacaatactttttttttataaaagatgttacattcagttgctcgggtttcgcttaaaatagaataatggaaaaaagattgacgaagccaatcgagtgcgtgtgagagattttaggattaaattattttatactattttttcaaactttttgaaataattttcacctatacatatatttatattaaaagaggttatatttttaaatacattctataataactcgtgtaatttctacaaaatatataacatattattgataatgatatgcgataatcttgttgttcatgtcatatcatatttaatcaaaagaataaaatatatttttaaatatttttatgagttttagtttattgtttgttatgatatttttttgttgttttattttattttatttattattattttcattttaattttatgttgttatcttgttgtcttcttattttttatggggatccgtaaaattataattaaaaaataaaaaactataaaattaaaaaaaattgtaaaaatataaaactaaaaatataggtatataatattattttgatcgtataaacattaaaaaagaaattagaaatttgataagtttttatacattttgtttaaaaatataactttctcttcaaaaatatattttcatgagaaaattgaaaaaaaaaaaattgaaaaatatgaagaaattttgtaagggtaaacagatacccttatggtaatcaaatgagcaactaattaccataaaagggtaactaggtactttatactattttttttttcatattttttaatgtttttttttacaattttttcataaaataattttttgagtaaaaatattatttttttgcaaacttaattcaaaaaccgtaaaattttcccatcaattaaattagcccaaaatgatacattatgtaaaaataagtgaaactatagcaaatggccccaaatcataagatcgtgctagtaaatttcttattttaaaacttgtagagaaatgacctattaacggttaaaactcgtcaacgatataataaggatttagaactatctcctaaaaaaaattaatagaagaatgtttgaagtagaaatctcatgaagttaccgttac

SEQ ID NO: 7133 - DNA, 918 bp, Cannabis sativa
gcagatagtcagcccatcaatgatgatgatttaatattgtacattcttggtggactaggagcagagtatgaagctgtggtcatcaacttaacatcaagaactgaacctctcacgctccaagaagttcagatcatgttgcagagtcaagaaatgagatttcagaaacacacaactgaatctcttcataatgtgcaagccaatttggcaaatactagaggatctccctcaaatcgtgatttagaggctcaaatagaggagacagatcttacaacagcaatagaggtggatgtggcaacaggccggtatgtcaactttgtggccgtgctggtcgcacagctgtcaagtgttatcacaggcttgacatcacttataccagtgcctcaaatggatcgactccctcctcctcaaatggtgataatcctcaagcccttgtgtctgaatccactcctacctcagattcttctgctgcctggtaacttgattctggagcaactcatcacatgacagatgatgctgatcatctcaattttgtctttgactacaaagacaaagccaaagtggttgtaggtaatggttcttctcttcctatacatcaggttggatcaagttctgttagtaaaaatttccctaataattcattggttttgtaagatattcttcatgtacctagtgtcaccaaaaacctacttagtatctatcaatttaccaaacataatcatgtcattattgaatttgatgaattgtcttgtctcataaaggacaagacaaccaagcaagttcttctgcaaggccatctcagtgaaggtctttataagcttcaagtcacatcatcgaattctcaaggtgttgttcctgcctctgtcagtttcaaacccaaggctcttaatcatacaaccacaagtaatcctgttcatgaca

SEQ ID NO: 7134 - DNA, 1182 bp, Cannabis sativa
ataaaagctttatgagatgcagaaagtttgtcataggatataaaattttgaagaatgtgaggagtagatgttttgtcttgaatgactgaatgacattcataatcacgtaagtaggcaggaggcttaataatcctgcttgtgcgtctgagattaatttgagtggcatctgtagattcagcagtgccattatccatagcagtatcggccatagaggttgtattgttgctgtttgtgggaggactttcttgagccgtgtgttctacctctacagtagtaccctggtgagtattatcaacttgagaagagttgttagtgcatttatctttatgaataacagtgggaaaatcttggacatgtgtgtgaggtatgctttgagaggccagaacaatattaaaaaaatgatcgataaggtccttagtggtgttaagtttatgaaaaggatatattttttcatggaagacaacattcctagaaatgaaaaattcttgattattgatgtcatacaacttgtaacctttgatcccttttggatatcccataaatacacaagttctagcccgaggtgtgaatttgttcctgtgagcagtaagagtgttagcaaaagccaagcaaccaaaatttctgagatgttcatattttgggagttcatcaaacaacaattcataagggcatttattgtgtagattgggagtaggtgtgcgattgataagatatgcaacagtcatcacacactcactccaaaaccgaatagggagtttggcctaaaagtaaagagctcttgccacatttaaaaggtgttggtgcttcctttcagcaattgcattctgttcaggggtttccacacaagtaaattcatgcattatcccaaattttgcaaatagatctttgaagattaattcaggagcattgtctgatctaaagcatttaaaagtgcaatgaaattgtgtttgaacataagataaaaaatcaggaattatgtgaatagcatcagatttttgcttcattaaaaaaatccatgtaaatctagttttatcatcaaccaaagtgagaaagtatttgtgattggaatgagaaggaatgtggtaaggaccccaagtatcacaatgaatcatgtcaaatttatttttagcaaaactagaatgtttgggaaaaggaagtcttttctgttttgccaaaggacaa

SEQ ID NO: 7135 - DNA, 693 bp, Cannabis sativa
cttatgccaaaagggatatttgccccaaaatgaaaccatgtgcatagatgtgaaggacaattccagaaatcgaattgttgactacattatagtgagtaagtattcaaacatttgatctactaccctctatgaaaatattttaatatgtaattacgttctatattatttatcagagttagatcaaaattaagcaaaacacatatattttagactcttacaatgagttcgagagacacaattcacaagaaaatagattatagaatatctgatttcatatgtaactgtgtaatagaaaatagaataactaccagtatgtagaacattccactgaatttaagtatggatattaatagttataaacagctagatcacactatataattatccaaatgtattgcagggtatgtatcctccaaatgcttccatatatcttctctaattcttgtgccatagaacctcaaaaagctcaaacacatcactgcggtttaaccttacctctaattattaatagaataaaacagagaaaaatttattaataaagtgactcacataaacaaccatcaattaaaaaccacatctttcagaagggagggagtattaatcaacagtcatcctctttatgtaatttttatcctaagttgtaaaccaataatatctatactaaatatacatgtgtttatatgatgcaggtgt

SEQ ID NO: 7136 - DNA, 802 bp, Cannabis sativa
aagaagaagaaaggtgagaaataaataccttctacaacctcctcccagagtgacactgttccatccacacaaacacatgccactgcatcaccatattccggaggaacccaaacaactttgacaactccattttcatgcacctaacaaagatgataagatcaaacataataaacaaactcagagaacactataaaaacacaattcaacaatcatactcaaaaccaacttgcatattcatccactttcttgtatatctaatacaaaaccattacaccaccaatgacacagttttattcaagtgaattccaaccaaaattcacatctcgaccaacatctccaaaagctatcattacatttacaaattcatcaatttgatcaaaaagcacattactttgaaagaaatgaagggaatagaatgcagtatattgaggaaatagaaatataggaacgaaccctagatttagatgagcgggtaaaggaggaggaagcagggtccggagagtcgaagatagaaaggaagccatcgttggaagcagcagctagcctgaaaccggaatagttccaggaggagcaggttgtgccaatgtccaactccaccaaagatttctccatgtccgtacaattgcttcactcactgtaactctgtaactccgatgagtgaggaaggagaaagaagcaatctttaaacccctttcccctttctttctagggttttattagattttcttttttctttttttcttttagttaattaggatttttagtactaatttgtgcttttgaattcttcacacagttaaaa

SEQ ID NO: 7137 - DNA, 683 bp, Cannabis sativa
gacaataatgtctgctaattgccaaattcaaatttcaataagattttcccctttgatagtattgacgagtaaacgggccataataccaaaaatacctatctataatcactaatacaagatatgattattttaagaagggtttgataaatcatacgaattgaggaattgcaattagactttctaccagaatacgtcctgttgctacttgttattaattgttactaattttctgttcattggactaacttattcatatcgtgaatacgaatgactacttctagcaatattacatagatagagatcattattgtacaagtgtatactatatatgcttttgattttataattatatcataatcataattctcttgatcaactaactgctttcagttgtcttcattaatttatatcttgtttgtcatattttcagttctacgaaaataaataaacaacctcgcaataaaaaaaatttcccatcgttttatgcaaataatataagaagtgaatttctaccgcatcccataaattttcaaaattcattttcacaaaagataagattaaaatgacttcgagatcatattccctctttatcaaccgattattttggaggctttgagaatcacttaccccaagtcccaacgtataattatatagctatgtatatttagagagagagagagaga

SEQ ID NO: 7138 - DNA, 1165 bp, Cannabis sativa
ttgcacatgtttcggttgtgactaaaggatggcagtgatgattggaagtaaaggcctttaaattctcaaacaagaatataaagtgggtaacaattgcaatatgctcctcctttcgactccataacctgcatcaattcaagaatctatcatcttattttatattaattttttgtataataactcattattacaaaatagatgtatatatatatatattttcaattcataattttgaatgattcactattaattagtggaatctttgtaaaattgtgttatcaaattataactataagagtcaaatgatgtattaatttatatcattgttattgagtattagtgaggcttaacatcttcaataggtgacactttacgattggttattgatattctcttaaaattattttcttaacaaatgctaaaaggcacacatggtgtctagcatccttattaggtgtaatatcgctattggtgtaactcaatatcgggtgagcattgcgattgggcactgatggtgctcaacaccttctataggtggcgttccgtgattgattagcgatattgcctaaaaattattttcttaagttatatgggacccgatacataattacaccaatagcggtatgacaccaatgagagggtgcttggcactagtggtgccttttagcaattatcatatcggatgccacttattttacttcaattcatattatagaaaatcgctaactaattataagacaacacttttatcgtggtgttaggcacccatagtagtgctctattttcttaagttatatgagactcattacttaattacaccaataacagtatgatatcaaagaggttattaggcaccaataataatttttagcaattctcattagttaaaccctaaaataagctcccattcaaaaaaaaaaacctaaaataagctaaattcctaagtaaaaaaaaaaatgtaaaactcgtgattagcatataattattgtgtattcgcttgatctattggcttgaaaattgttaaaatttggaagctaataaatgtaatataaattctataaattagttacacatgaacaatgtaatgtatgacaataaatatacacatttcttttcttttttaaattaatcatactaaacatatcttttaatatttttaagggta

SEQ ID NO: 7139 - DNA, 672 bp, Cannabis sativa
atatgaaagaatatcatggggccattatgataattagttaatattaatattgtttgtcttacaatgaaactaactaattattttttatagagttggtattaggtacaagtatagtccaatacgaccattagagtagttggcatagcaataatttagtttattcaaatgtaaaactattagtcaaaacaacttctttgaatgccaccaactatcatacttaattggagtatcttctattaaaaagaataatgaaaacaaaacataacaactcacaaaaaccaatttgtttctattataaaaacagaggtttagtattatcattacatgtgttaattgagacaaagaagctgaaaaccttgcaatcgaaaagagctttagtacatatgtttgttcaaacaaattatcagctaattaattaattaatatattagtggtgggctatagttggtaaacctactcccttaattattatactaaagataagaacaaagactttgatataatcataattaagagaatgcaatattttagttaatatttattagtgttatattgttgcttttagtgtatgaaaccaaacatgctcaaacaagttgtgataatcaatattagctagtattcatccacacaccacacattcaaacaattcttctttcaactttctttaactat

SEQ ID NO: 7140 - DNA, 1589 bp, Cannabis sativa
ttgaataaatccaataatcactcatgttgactcaccaagtgtccagctggttgatattaaccttcctagctagcttagctagccattttgactatctcttcattatttaatatacatgcatgcataattctcaaaatatcctctttttaatcactcacaaataacttgctcttcatacaaaataacattctaaaaagaagtgtactagtttctcgacaaaaacaaagtgtactatatatttatatttatataaatataaatacatgaagtgtactaatatttgggcttttttcataaaatatatatttgtaattatgttattataattaatgtttataattttaaaagactattaatagtttataataatgtatataattataaatatttattaataaactattagatattattaaaattataaatattaatgtatataaattaattattttttaaacactatttatagtatcgtgtttataaaataaaataaataattttattaaatttattaaaagttagaataaatttttacaaaaatatactaaaattatgataccataaaagttaaatgtgataaaattataacttctattagtaataatgacaacaaaattgaattaatataataatattaattatatacaaatttattactatacatatatattttatatataaagatgagaatatgttttaatatataattaacaaagtatgaccaattataaatacatttttttacatatattataattaattaataaaatgtatataaatttgtaaatttcgcatgctatttttttcagaaaaaaaaaaaaagtatatatatatataaaatatgaaaaatcatcaaaagggatctgcattgccaaacatctttatgatatatctatatttatatagagaaagaattaagtgtatgatagatccattaattattggataatttatgatttttgccatgaacttaaacgtgtactacattgtatttttttttattttttaggttgttaaaaggttttttaaattattgagaatgttagatttaattactcttttttaatattattaacagatgcttaatgtggatgaaaagtaaggaataagatttagtacatgttaaaaatcaaaaaagataatttggtatatatatattaaaattagggaacacaatttaatacatggataattacattaaataaaattgacacatgtatcaaatcgtacgttgtccaaaattctcttaaattcaaggacttccgttaaattttactgagaggtgcctaatatagatgaaagttaaaaagcacgacttggtatattattatgtcaaaattgggaagaacgatttgatacatattaaagtttgggagcacgattacacgtccaatcaccatattagtaaaattaaacggaatttgatagaagtcttaaagtccaaccatctcaatgatttgagaagaatttttataacaacctaaaaagctcgaagtataatttaatagatatcaaaattatgggccaaaaatcctaataaatatccatagttattatttaaataagacggtacaatggagatgatgaat

SEQ ID NO: 7141 - DNA, 761 bp, Cannabis sativa
tttgttctctctcaagaaaaaaaagaacaataattttgccttttcttttctgtaatataggtaagcgcgtgagacatgagagcgtggtagagtttaaatactttataaaggaagcgaaatattttcagacaatggtagtaagtaatagtatgttgagtattaaatgtttgaacagtgcaacgtttcatacatagcccagcaaatgatcttgtccggctgtcagaatcaaacgcacccttaaaacgccgtcgtttcacccatattttcgttcacatccacttctttagccctgactgaagtgaaaaagaaaagaagaagaagagctcagctaatcaaagtcaaagaaagcaaagtaataagctttttccctcccagactgaaagagagagagagagagagagaaagcactttccttttcatctccagtcttcaaaagtacttattctaggtatgtattcctgttttatttgatatctgttttctttttcttccatgggtttgtttctgattgttttttttagtatctaaaggcttttctctttgaaggtttagtgtgctagtgtattgattttcatgggatttgaagttcgtttacaggtgggagaagttagggttgggatcttcttgttcttattttgatctgtctctttggaaatgtgtaattctctacataaagttgtagtctttagatctgtttcatttgattattacttgctttcagagtgagaaaatcactcgcttattgtttgaaaatttcatag

SEQ ID NO: 7142 - DNA, 1169 bp, Cannabis sativa
atgagattttgagctttcagtaggtgcaagaaacaaaatcgtcttcctcaaaggtactctgccataaccctcagttgatgatcctttacataatcattagctctgctataatcaaatggtgatttcatcgatcctccactctatgacacttgaaatcaaaagcaacatcatgttcttagatacggctgctgaaatgtggaaagaactcaattcaagataagatcaagggaatgatcctcacatctttgaactcagagaagcttttatcactctacatcaaggctatgattttgtaagtgcttacttcactaaactcaaatgtatgtgggatggaattcaaaaacttcaactttgcatcccctatacttgtgatgcttctcttgataatctcactttcttgaatcaagaataagtattgcaattcctaatgggattaaatgaatcattctttcctgttagatacaaaatattattaattgacccttttccatccctgtccaaagtattttctatggtcatctacgaagaaatacaaagaaaacttaaaagtcctcagatcccttcccttcttccctctgtccgagattcatcccaactctcacctctttctcaaactccatcagcatcatcggccaccaatgcgaaccaatgacacaacaagaagatgaggccttattgttctaatttccacaaacctggccatctcaaagaaaagttcttctttctgattagatttccaccaaggtatggagataaaaggaaaactaaaaatcagccttctacaaatcaaacatctacttccactgatcatctttcccttttggctaacttgactaaccacaagggcattcagactctgatttcactcctaagtcagaaaatatagccaacaacatccactttagatgcatctcaaccctttgcattaaacatctttggtaaactcaaaccttctccacaatttttatggatagtagacagtggtgctactcaccaattatgctgtgatatttttcatttctctcattacatgatatttttattgctacttcattaattccccaatgttatgaacattaaaattaataagtcaggtgacataaagttatcacataatctacacttaatgtcctatatgttattgatattaaattcaatttattcagtgt

SEQ ID NO: 7143 - DNA, 647 bp, Cannabis sativa
accgtttgttacgttggaatattattacgatttgattgcatatatatactgattcgatactgtatatattttagaaaaaaaaaaactctatactgtatatttggaataggattagattaaattgaggtttagcgaaaaaaaatatatatatttttaaaaaattataccctaataaaactatatattaagaaaagattaaattgagtatcctaatatagttttaaaaaggattaaattgattttcctaaaaaatatatatttttgaaaaataaaaaattataattttttaagattttaattaattaaaaataatgtttaatattattcaaaaaaataatgtttaattaaacaaaaatttaaattaaaataattattctataagtgaaataatatcttttttctgaaaaagtcatgatataaataattcatttttttttttgaatataataattcattatttttaaaatttaagaactcgttactttttaattaaaatacatattaaaaaataaaaagtttcctttggaagtattttaagaggagaaataaaaaaatcgatttagagtttgggataatttttgttcaatcactccaagtccaaatccaatataatatacaataattaaattgtccaataatatcccacc

SEQ ID NO: 7144 - DNA, 1512 bp, Cannabis sativa
agaacaaataaaatcaggaacagaaacatgaacatacagaacaatggaatggaaggtactcttaatcatgcaaaaagtcacctactaccccaccaaaaaaaaccgagtcaaagagagaaatcaatctttcggaagtgttactgtgtcaatgatacataccaatatctagcatataaagatcattgtacagattttgagcatccgtaaatcccccgaaaacaaataatttcttgcctaaagcaacagtacaatggccagctcgaggggtcaataattgacctgtagtgttcagctccctccacaccagagtatctaatgaaatacaacacaaaaaataaataaatacataaaaagtagatgattaatagctgtatactcaggccacaacaatgacatcttctaatgaagtaacaacttaaaagtattttacggcaatcacataggtaagttacaataaccacgtacctgtatcgaggatatgaacatcggacaaataataatcatgcccatcttcaccaccaatcacaataacattgttcttccaagaagagcaagtatggctatcgcgtggggatggtggagtgcctgatgttgtagcgcgtttccatacaaatgtctctacaaaattagaaaaacgtgttaattcagttaattaccccctgctttgctgtccacattgatagccactataacaagcatacaagagttaaaaaaaaaaaaagccctctcaaaaaactacactagctaccgggtaactaactatgccaaccaacccttcctaaaagctcaccttcacttagcagaggagaaagaaagccagctattaggccaccctatcccattaaccacccataaccttattaaaattggcttcaagctggaccaaccctaaaagatttcattcaggctaagcaaatacgttactcctaagctagagaacctccatgtgtaattttaaataacaatcatgcattatgagatatataatgccaatcaactagacttgtactatcgtatgaatagtatcatgtgaatgcacatatgagatcaaatagtataatcaaccaaacttatagtcaaaacatttaattacttgtgaataaagttaaatagaaacttaccggtatttaatatgtaaagatcattgtaatacacctcatcattagtactaaaagatttgccacaaccaccaaatataaacaatcttttaccaacaagggctgcattatggccttctcgtgcctctggtccttctcctctaaaacatggggatatccatgtatgtgaggctacaatgtttcaaacaagaaatgtgaaaacttccactcatgggacaaataaaagagatcagagcacatttctttaagcaaaatcttacaatcatggacaagaattttactttttttcatttaagaaaatcaatgctagagtaatgatgaaaaatccagttgcagtaaatataatttaggcattagtagagctactggctgcagacatgttaatcaacagaaa

SEQ ID NO: 7145 - DNA, 564 bp, Cannabis sativa
gtggataaacttagaaaattatgaccaaagaatctggagaatattaagacggtatgattaatttctgaaacaagattgagaaagcgagacatcaaacaacgtgaataaacaatctacatagagcagagctggaggcgaagaatcaggattacaggaaggcggggaaatggacacaatattgaaagtatatagcaggagataccataaaaatcacagtgatgtgaaatttcaatggtcaaaatagaagaaaaatattagtcaatttacacaaaaataggagaaaaattcaatggatgaaagtgctttgttttcaagctaagtcattctcatcaatgtaatagttaaagaagtacaaatatttgggtactgaaagtagttacttagtatcaatttttctctagttttatagtttatttgtccaatggtagagtacaacttatcaaaaagaggagaatgcagccaacaaccatggagttttaataatgttgttgattcaaaacatggagaaggtgtaaaaaatttagttgaggtaacgaaacactctaataagagaatggtaagaac

SEQ ID NO: 7146 - DNA, 1182 bp, Cannabis sativa
atccaggcacgcaattgatacttttcgagattacaagtatctgggaacacggattcgggttgatggaacagttggagagtgagttacttatataattttggttctgaagttttatttgtatatttgtaattcttttcattcacttttcatcattcaaggtacaaatggatgacatatggagaagtaggcactgctcggtctgcaattggttctggcctagtatatcatgggatttcaaaggtaaattttttaagtatatattattgacaatttgcacatagtcatgaaactttaccattgtaagtatctaataatctgggttctcttttctattttggctttgtcaatttactgttttttatttccctctattaacatttacatttgataggaaagttggttttaatatcaattctctcgaatgtctccatgttgtttgattattgttaatattatatacatattattttttgtcttacgttttttaaatacaggggtcaagcatcgggttgtattttatcaatagaccagagtggcttattgttgatcatgcatgctccgcatattcttacatatcagttcctttatatgatactcttggtttgtctcttgctatttgcttagtgaattcttattgcttggtctagtcaatatatttacaagttcattttattaattttcagggcctgatgctgtcaagtatatagtaaatcatgctgctgttcaagctatattttgtgtgcctcaaacattgaatagtgtgagtcatactactttttatcggggctgcaatgtggcaccatcctgctactaattttattgggtctgttgatatatttgcttcaatctattttctattcatacaaatctttgtgatgtcacgtttatagccattagtaccttatattgagttcaattgccatagtttaaaaaacttaaatgagaatattgcatattgacccaggtgtgcattaggaacagactagcagaaggtttagattgttactataatattatcacatggttttgggagaaacgcataattaacttttatcatgaactggctagcttgaaaaacaaaaaccagtttaaatttaggatttgacctttcttcttatcactatttaataattgctctcaagctccactgacatggcctattcgtggtatttacagatattg

SEQ ID NO: 7147 - DNA, 2472 bp, Cannabis sativa
tattaccttaaaagccaaagaaatgactctcctccagaaggatgaagcctttttacattttacatttcagaatccattcctgccaaataataataatagtaatgcatagtactatgacataaatctcaagctatagctactattaaataaagctcaaactatagctactatgaaataaagctcaagctagagcaacctggccttaaaagcattccatttccaaattatacaatgtaatatataaaggcgtaaattaaaaaaaataaaaaaaaaaaagctcaaagcagctataactactatgaaataaaggtcaagctataactactttgaaataaagcacaagctatatagctactatgaaataaagctcaagctataactactatgaaatagagctctagctataactactatgaaataaagctcaagctataactactatgaaataaagctctagctataactactatgatcataaagctctagggcgtgtatctatgagactgcagtagtataactatatatagctagctacagtaccatgatataatattgtaaagccgccacatcctacatgattatataatataatgtgattttgtaacacaatttttagtttaacaattctttttaatatatttttttaataaaaactaatagggagttaacgttttgcattaacatctaaaaataaaatatccccaaaattattttgcatatttaaatcgttcctattaatcaagaggaggcttaaaaaatttatattgaaatttttattcaccattgagagttggcgaaaagagcttttccatgattgagggtggaagcttaaaattttttgattgaaactttcaatcactgctcctttgcgattgaggattggtttcggagttcgccaaggccgatgatgatgatgatgatgaagacgacgatctggctcagcagtcgattagggagcttgacttccttgagtgagatcaaatatagggagcttgacttccttgagtaagatcagatataggaggcttgataggtttaattcttcaatttcatacgatttgagtgcatattccttgagtaaaatcaggtataggggcttaataggtatgattctgcaattttatacgatttgagtgcatccataaaaaaattctcccatcccgtataggaaagcggcaaatcaacttgtttgaataaggttactttttcttctttgttgtcatttttgttgcatattttcttctcccccttgaaggtgtaaaatgattcccatggaacaacactacaaggaggaggcttatgttggctgctgtacattatggaaaactttagatgttaggcaatagtcgtataaatttaggattcaatttagtgcattacaaacaagctttttagttatgctctgcttttcccattgtatgcaaaagaagctaaaataatattagtttccaggtttatattctctatatcgtatatatatgattggaatggaatgcatgtgccaaatcagttcttaataattgttaataattttagattccatccggtgaattaaatttgataatgtattttccgttgtggtaaacatattattcaaatttacagcttcttgatcttagtgtgtatgtttccaattttttgtgcatttgtattttttttttttaactcatgcaatagttgcaaactcaaatgagtatgttatacaatgacatttttttgttcctttaatgttttctaacgcaatgttttgtgttctatttgaattcaggtctggtattagtgataatgtgattagaattctgtaatgtgtttctaaacactcttataagactccttattgcttttattacttcaagtaattacttttttttttttggctctatgataatgaacatattcattgttttgatctttgacttttcaaacattagttttattaatgtttcttaatataaccagttccaattcttaaactcatggactggcatggccatatatatgtgatcccaattctctagagcctaccttacaagaaagtggtgattgtgaagtacagaaaacatggcagtgccatagtctcacatatttagttaccagaatctgatcatcaaacataacggtttaaaaaaattaagcttgtggggtggttgcttgaataggagtttctaaaacttactagaaaattatttgtacttgtacacatatctttagatcttatattttgttattgtaagctgattaacattaatttatcctgtctatcaaatatttttgctataaaacatgatggagactgtttctattatcgttgtttcgttatttattattattttttcagggggctatgtatcccaacagaaagtagtaaaaaaagaaagtcttatttttatatattaaaagaaagaaaaagaaaattatcattggattggtgattggcttgtagaatatcattaagctccaaaccatatttaa

SEQ ID NO: 7148 - DNA, 737 bp, Cannabis sativa
gaactttcgggttccgtgagttctctggtgagaggggagggacattgacggtgctccctcctggtacatcgccgatgctacaagcagagggaaagggagagagtatcaagagaaagagagaaagagaaagagataggtaggggtggcaaaacaggtttcgacactgcacacgaacatgaacacgatacgaattttacggattatggtcaagaaaattagacgcgtgttgaaaacggattgacacgacttgacataaaataaaaatgggtcatacacaacacgactcgtttaacacgaatttgacaagtttgacaattttttttaaatataataaaataaaaaataattaataataatataatatataaaaatatagatttagtgattcaatgttaagttaaagaattttaaatttaattttctttaacatgaaattaaaaatattttaaaatttttattatatgtataacaaactatatatacatatatataagttttttaattgaatataaatctattatttttctttacaatcaagctttaataataacaaaacaggtcacaatgggtcgatacgaacacaacacgatttcttttacgggttgggttaaaattgagaaaattaaacatgagccaaaaaataggtcaacacctctcacaagaaatttactaaccattcacataaaatatgacacgtaaacacattttaccatctctagagataagtgtttaggatt

SEQ ID NO: 7149 - DNA, 594 bp, Cannabis sativa
tttcttttgcaaaaatatcactttcttttttctaattttgaattatgccaatataaatctaaaagttaacatttttttaaaaaaatatatattagctttaccaattattgtgttacaattttttttttcatgaatgaagaaaaacttaagccattaatgggggtttactgtatatgaaatcagaataataaatgaagaaatgaattagttgaaaataaataagaaagataattgtatgttttaatttgacaaaattgtcattattagaggatgtaattatttttagtttatagatttttaaagggcatatttatcttttttatttttaattaataaaattaaattaaattaagaaaagaattccaacattttcttcttctttttaatttgtgtgaacccactattttttctctttataaaatctaataaacagaatcaatatcattccatcccattaagtaaatatatcataaattatggaggaattttttaaaaaaaatacacgagataataaaaatataaattttatttttgtaagcaatgttatagatttttaaatatatgttgcatgtccaaaaaattctcaaaaatcgt

SEQ ID NO: 7150 - DNA, 1302 bp, Cannabis sativa
ttcaattctgattgttcttgcttttatgttttttgtaggcactttctctcttggatatatttgaagatcaagagtcttgaacagaaatacattatatacaagaactatagatacaaatactagttaaaagaagaaaaagatgaagaagaagaagaagaagaagagttgaggaaatggaaatctactactgcagcaatatttatatatagttatgtttaaaaatcagtatatggggaaagtatagagagtttgagaaggaaaaagtttgtgtttttatgggtggtgaaaccaaaactaagtgcaccctatagtgatgatgaagtttgtataatcttcaaaggcttgaccttttttctttttccttttctttctttgtttttggttctttttacagtgtgtataaataagtatttaagtgataaaaactaagatataagtttatgaacaataataataataataatactcacaataataatagtgtgagtatgtgctgttttatcttttatgtatgagaaaaagggtttgatctgaaatcaaaaacagacaagtttttcttataattatcaaatttgttctgatattattagatgatcatgattcatgacagcttttttaatctagaaatttttagtgtaaagatgattggagaagtacccttgaactttgacaagtttggtggtacaatttggtatatgttacaagtataggattaaagttttggtagtatagtttggtacataattaattattaaattaaataaaattgtaccgagtgaggttatgtgtgtggcgattttagctagagatcatttgaaatagttttgtgggttactaataggctcaattgttattttatttttagaccttgtaattttatggccaaaaatatgaataattaaacttttgctcaaaatttaaatagtatgattgaggtattaacaatgctagcaaataattatttgttatgaccgtttgataattttaaaaaaatggaataaaattgtacataagtataaatttaacaattttgaaagtttgaaggaaaataattaatagtctaaaaaatttaagagtaacaatttaatatatgtcaaattttaaggagaatatgggaattagcttaagactaatttgatgaatgtagatgtagttggttgagttcatctactattatgactttactcataaaatagtgaatttggggttacattgtcgttttcaacatattattattttatgtgttgatattgcttgtattagtgtatttgaatgattcaaaaggattggtattttgttatt

SEQ ID NO: 7151 - DNA, 1303 bp, Cannabis sativa
gtgtattttttaaagtaaatattaaggtaggaattaaagaggctcttagttgagttaaaagtcaaaactggcagtgtaattaagagagaggagagcagaaaacttgaacccataagaaccctagaacctaacccgtaaagaagaaaggaagaagaagatatgtgtgaaacccttaatttgtgcggctgtaattaagagagaggataaaagttttaacagtttaatattttcagagagctgccacacaaagggtatttgaaaaatttgagattcgcggctgtaataataaaataataaaataaattaatattttgagagggtgccgtgtatttgttgtttaggtttagaataatatattttattattactagttagaagttacgtgccgagacacgtaaatattagttttatttaaaatttagttttttatttttatttagatttctgtaactaaaagtatgattatgcgaatgatttgtttcattaaagtaatatttgtgctattatatttagttagtaaaatataattagatatatataaatcataacaaaataatttttattatttacttatagaaaatttagagtaataatcttgacattgtctactacttaaactctcttactttctatttgttctgctataaaaggccaataaacaaaatgagttctcactcattaatatagggaattatttcataattcaaatcacataaattttagtacataacgattttttaaaataaataatatttagaatagaatgataataatagataacataactgcatttgaaataataataataatataattgtatttgaaataataataatatattgtatagaagtttaagaaatgaaaattaaacttaaaatattaataaaatataataaaaaacaataatagtaaatttataaaactgaaacaaaaccaaaacaaatatcaacagctatacaactggtggctatcatgaaaaaacttccatttatatagtgttctttctactaatcatatatttttatatcatttttccataaacaaagtaataatacactttcaagttccaacaacttggttgagcatagcagagcagtaaaaaggcaacatttaaaggacggagccaggtttagatttgaggggggccaagcttactactactaattatatatatatatatatatatatactagctatatacattttaaataataatatcattaaatatataattttaaaaaaattaaaatatttatctagtgtgccaaacacgtatataccaagcacgtatacttagttttat

SEQ ID NO: 7152 - DNA, 799 bp, Cannabis sativa
ggtaatattttctaaaatggcttgttcatttttagtccactaaatcaaatcaacacaagtgaacaatgcaaatatgttatcagaaactcttatttgatatagttgaatgagtttgcagtgtattttgatatgattatatgagatgaggatgtgtcaaattggttggaatttctttaatgattattagctaaggatgtaatgtaatgacacaaaatgctttcttcattatcttctacaatcttcaatcatcactcatatattaaaggaaagagactaaaaatgctacaaactttttttggtggaaaagttaaattaggaattcaaaatatttatcatctaataatccaaaaaaaaattgtagagatgtgaaaaattgcttttcaatgggaaacaaactacactattacattgtcaaacatacataaacatatttgggtaaatatgtccaaaaatgtgtaagattcaatgatttagtagttgagctttgagaggcagtagtggcttggatgaatgaatgaagctttgacttagaacaagatgatgtttggattcttccatttcggtcttctactcccttttcttctgttgttgttgtttaatagcttcttctggttttttgtataagattatttgactcagaagggtaccattggttgccataccaattacagaccccaacacaacttgcaacagttaaggaaggatcacaacaaatgtttcaattcttccacatataacattaacattaggagtatgtctatagtacaccccctaaaagtttgtttccgtagacccttta

SEQ ID NO: 7153 - DNA, 2515 bp, Cannabis sativa
  modified_base (1263)..(1265): a, c, t, g, unknown or other
tctgtgtggagaagaaatagaaagatcttctttccagccgcactggcatgaacaaggaacccttacttttcctttgtcaaagacccctcgatgtatcagctgttgctgcaagatcttcagtgttttcaagagtaaaacctgaagagatgcttggcacatgatagtccttgtccaattttgatatgcaaataaggcttccatggaatgctgttggaacgtattccttttacttgtagaagaatgaattacatgggccttctcaaggccccaatggatatgcccaattgttgaaatagataggattagagtattatgcacttgagttggagaataaatggtgacatgggtcttaccaggatcccaaagggccggcccataaacttgattaattaattttggacttttgtttatgtgggcctggtttaggaagtgactcaatggcttgagcctctcctggtaaggttgcaagggcaaatgagataataacgtaatattgtagcttctctaatcagccgtcttcttcccatacacgacttgttgttcgtccagtgaaggcaccgattgctctctctccacgatcggcaacacctgctccctcgacgtcttctcacgctgatggtcattcgtcatcagcatcgttttccttgtgccggtcttttgtcgatcaaccccaggtgcgatttcccttgtaagtggtaagatcgactcctccctgtcccgcgttagcaccgtctcaagcatcggtagatcgatctttatctctgatgtagcatggttaaatatattctccacttctttttcagagagcaactttgattgaaaatcgtgctttgatcctttgatttccaccatttttgttggagacttgagaagatcaacaaattattccctgttattttgcaactcttcctcctgtgtgctagttttatgaaagaacctcagttgtccttcaacgaagaatgctttggcgatgacttcgaagagtgttctcagcttacattcacgaaccttcttctacacctcggcaggaagattcctagtaaacatgtcacaaagcaaggtttcgggaatatccgacaatcttgctgcaattggaatgaaccgaacccagaactctagcactgaattctcatatcggagagccatcaattcgtcaaacgaatcgttatcaatttttgagcagcaattgaataacgtgatgcgaaattccaaccaatttttgattggatcttgctcctccactgcttgaaaccatctccaagnnncaccctccaaacacgcttgagccagggcaaccttcttactttctggggtttgataagcttggaaatattctctatgcaaagaacccagccatacgggtcatctccattaaagagcggtaatcctggcgccatgacggaggtcaccagatcatgctctgataccatttgataggaatttcttatcattttgggtacaaccagtagcaagatagaagaaaatagagccaaaaagtgtcaagaatggaaaatagctagtatattgatattagagtgacaaaagaacaagttgctgatattcgagagacccaactctctcccaaagagctaatgctcactttaacaaaataattctctccaacttaccctcactactcactcatatatatggcatcaattctttccattacaattaccctctttatttattatcctaaggcctaacactttcacacttcatataagctcacttagtcccattacaaacaactcagtagattttataaacatattttcatgaaaaacgtaaacagagataataactggtaaaaaaatacaatagatacccaactcaaccaaacattgatatctctgaattacagaagtagagaatgagaggatcgatcacttctagtcttaaaaattgcatttaatgaagtagttctagtagtgcaactgtatagcccaagcaaaagctctaataatcataaatacaaacgagaaatggccgaaatcaaatttgtttcccaagcaaacgaaatgtaatataccattatatatacactaattatattcaacaaaataataaataaattataaacaccatgaaacaacgaaaagtgcatgatatttattaattaaaagtaagacaattagaatcatatatgatatttatacatataattggtccacacccaccgatttaaagtagccacagaattagtttttgcatacaaagagtaaaaaaacagagtttataaaatttcaaacaaaggtttttacgcacattaacacttatccaattccaaagccaataataatatagattgaggaagccatagatgcatcaaacaattaaaacacaaaaatcaaacaaatattatatgtttacgggagttcatactagtactaatttctttctcactgaaaagcaaatttcctctaaattctacttaaacaaatttctagtcaacccaacccaagatagcagccacagagataatgcccccaagccaactctctctctctctctc

SEQ ID NO: 7154 - DNA, 564 bp, Cannabis sativa
aagaacaaatatacattgggctttgagaggtccacccatataagaaaagataaaataatgtctaaacacaatggctcaacttgtgtttatgatttggaaaagtgttggaaagacaacttttggttttaaattatatgaatgtataaagtcaatggtacatcacctcttacaaattgcattttggagatataattggcacttttattagctgaattgtaaacaaccgatgtcgctttgtatagaagagaaaaaagtgatcgtttacttggaaataaggaaagggaattgagggaaaaccactttgctcaacatttgttttatataggtatttgaatgttccaattagcaactccaactacaaatggtttctttcttgcactaaaagataagataacatatttcattgaaaaaaaaaatgataacatgtatcttaacaaatctatgtaatgatatgaacacacaaatgtggcacaaacttatattacatttgtatataatttatgtttgtacatatcattactcatattttcttaatggcacgatctctcgattaattttaagagc

SEQ ID NO: 7155 - DNA, 540 bp, Cannabis sativa
tcccccttataatggagtaccgactctgttacttttcttttaagcacagcaaagtcttcccaaaattgaatgattgccttcctgaacttctctcggcctttaggactaatagatcgaagcctactatgaaggaactcttgtattatttgttctggatccatcttcttcgccaccatactcagctcccttctaggccccatagaatcactcatcaccaatccctttggccttttaataaaagaatcttggatactaaattggtccaaggtaatcttaaaaaggcccctacggtaataccaaaaatcttttaattggatgtgtttgaccggcccaaaactaggaaaagcctcccagcccgatgctcctctaacgggcccaacaaagtccaggcccaccttttctggggccctagcaatttggcccgactcacccaagcccacctttaatctacacttatcccctatttgacagctattatcataattgaggaaaatatttaacctgggatttctgcaaacacgtggcaccctcaaacttctc

SEQ ID NO: 7156 - DNA, 527 bp, Cannabis sativa
tttgtaatttgaataatatttaaacctctaactagtaactgtcagagccaaagtaagttagaaagttagagcactgttaagagtttgttagactgttagagtcttttacagttgtactacttactctataaatagcttgtagtctgagtattttcataataagaaaagagctccattcaatccatatattctctctactttttatgttttctaacttggtatcagattccaatcatccatggcgaccaatgcttcctcttcctctgcctctgctccagtctctgcttcgtcttcctcctctgccggaggttcacgcgtctccatgtctccgtttgcctctactctcaactcagtagtctctgtcaagctggatcgtgttaactacacatctcctggcgcgctcaactcgtttcagatatccgtggttatgatcttgaaggctatgtggttggcacaactcctcaaccacctcgcagtgttgagaaaaatgacgaaaatggagccaaggttctcactcctcaacctcc

SEQ ID NO: 7157 - DNA, 550 bp, Cannabis sativa
aatattaggtctctatagtctataaccatgtgcttaattattgtttattgttagactaaagtctcaaaaagaatatatcggactaaaaaaagagtctcaaaagaatatgcacatatatttaggatctcctttagagatatttgacttgataactctggaggcttggatactttttttatataattatttaattgttcatggtacaatattgttgattatctttttgtttaccaaaactctgttatgtttattaatagtttgtattaaatgagtattggctattaatttatacattaattgcttaactttttttttaaaaaaaaataaataaataatctcattaaaattttatgagtaaacttagtagaagaaaccttaagccgaaaaagagtgtcaagacaatatcacactagttagcccaccaagcaaaataatcatccaaaaaaaaaaaagatctagttttgccaatgagtgagctacattaattattattaggataataagcaaaagtaaaatcactaggaagttacaaaaagccaaaatatctctc

SEQ ID NO: 7158 - DNA, 1007 bp, Cannabis sativa
gcaaaaatgacttcagcagaagagaaaatatctaaccacctttgattggctagaacccgatcaatcttggaacaaattctctcattaccttgcctcttgttgttccaagtatagtagcatccactatacttaacatcttcaagcttacaagtttccacacaatcaataaaatccattgctgcagtatatttcacccttttccaatcctttcctctttaaccaaaatatcattaaaatctcccataaccatccatggctcatgagacattaagcattttaaatcagcccatagcaatttcctaccctctaattcattaaatgcatacacaaaagtaacaaagaaagacttaccctccacagaagagacatgtagatgaataagttgacttgtacatttgagtatgttaactgagtaactagagggattccatgctacaattattcgaccaccttcatgccaagcaatattagatgtaaaacactaccctttgaacatatttaagtataaggccccaagctttaaggcctttaccctcgtctcgagaagaacaacaagaccaaccttcctagcatgcaacatgcctttgacttgattttgtttccatggtcttgatccctcggacgttccaacatactattctatcaatttcctagaggaggatctcccactactcttgtctttcccaacgttgcaactttgttcaagccaatcgtgatttctccttcttcaaacacactagaaccgtgcctttctacctctttttgaacatcctcaaagttatcagctagtacttgataggaattagctatttgggttgtccctacctccccattatccttcactttaaatcccttaccaaccggcctaaagccttctttatctgccttgtctttcctgtcatcttcctcaccaactgctttgttgctattcttaactacccactattgttgtttaccttctttcttcttgcaattttctgtggagtgtcccaagcctttgcaatggt

SEQ ID NO: 7159 - DNA, 765 bp, Cannabis sativa
ataaaacgacacgcgttttgttttattctgcagctgtttctcgacgacaatgttcgaaatatcgccgctggcaaagccgtgggtcttcgaacagctttggtaaatttctgtgtttactttttattttccctaacaaaatgtctattcaatttgtctttggacacccgacccgacctaatacagttggttgatgttttatttaatcatatgtgtatatttttttctggtctatatcattccacgtaatatatcattagaataaattaattaataatttggtgggtaggacccacattatttgtttttattcgttgggccaaatattaaccggaattttttttaaaataataataataataatgagttttttttttaatttttttattcaatttttatttattcgtctgtatttttataaaaaaaaaaaaaattaaaattcttaataaaatattctaaaaaattatagaccaatatttttataaattttgtgttattttcgggtacttgtaaaatatgccaaaacattttcactaaataaataaaaatatctcaatacataattaccttccgatttaattttattttctcaaattttgtatgtatgtataatcaaattattcaatagagaaatgctaaaagcactcataatcatggtattattctattattattgatgttatttaattcatattataatatagtaatactctattcactatcaataaaaaagtgtgagaaaagatgtattttttagtacacattgaa

SEQ ID NO: 7160 - DNA, 587 bp, Cannabis sativa
taaaatttaactccaattgaaaagtaactacaacaacaaacaaggatgatcagaaagtaatcttacaaaagaacacagcaaatagtaaatagaaatagacaaaagcaacatagcacaactatattatatataatttccaacatccacaatatgaaatgcttgaacagaacatttctttttcaccatctatagcccataaagtaacattttgatatatcatctatgtgatttttagttaacagatatctccaaaactgtaaaattgaaaaactaacctactaaacatcagatcataacaaattattacactttctggaattcattggcgtgctgctgctgctgtgggtgcgggtgctgctgatgttgtccatagtcagaattggtcattccaacgccttcgttttgatgcttttgccatccaccagtatcagctttagagtgtgcccagtagtaaaaaacagaccccagaagtgacaacaatgtaagagcagctccagcagcaaaaacaccctttcttaaggttgcacacgatacatgatcgactctaaaaactcctctgtacttggtatggtatgcattttttgccg

SEQ ID NO: 7161 - DNA, 962 bp, Cannabis sativa
atgttggtattgactttagagaaggaaaaaaaagtggaatattgctttaatggccaagtttgtttgagccatttcattgaaggaagatagtctctgattaaagtgggtgaattccatctattttaaaagggattgatttctagtgtttctctccttcttcggatgctagcatgtattttaagaagcttaccaaactcaggaatgtcatagacaaaacgggatttatttgagacatgtttgactagaagatttaaggtgagagtttttcatctctctctgattgctgttgagaaaattgagtatcatagattgttgaggcattggctgtgtgtctcaaaccataaatttgtgttttggcaaactctcaatgaacatctctcttgaccaaagatgttttaagtcactttctttcaattgattctaattactaccctgtttgtgagttgtctatcgagtctcataactacctcttttttgattgtgtcttctctcaaaaagtaataaatgatgtttctatttggtttggtcattgggagtggccaattaaccttgctgattggaagaaaagttgctcttcgacccccaattattatcttgttacacccttgttttcggctattattgctgctgccatttacttgttgtggtataataggaacagatgtatctttgaaggagtttgttgtaggccgagatacattagtagtcaaattaaagttgctcttaaggttagaattcaactttgtaatttttttaagcttaaaaaaagagagaaaattgttatcactatgataaacaatttctaactttgtaaggtgtttggtagctgctcttgtagtgtgtattgttttggtgatcattggtataaaatattttcctcttctccaataataataataataataataaaataaacattggataattgttgacttggtagtgaagctaagtaccaatgttat

SEQ ID NO: 7162 - DNA, 1197 bp, Cannabis sativa
tctctctctctctctcttatagaacactcttagaacagataggtgatcggtgttgaaatggaagtttttgcttccttgcacaaaggggttgaattggattataaaaaagctactcatattgagtttccttgcctatttaggcaataaatgtttttttgtgtcccccatcctatgcccctcagcttcgtctatgaaaatttgactcggagttgtaatttatcattattgacttatgatttgtactttgtcaagtggcaagaaacttgtgtccttattttacagttacattcaagtttgcaaagtatgctatttttttggggtgtttatccaattcaatctttattttttttgtttacagtacattctatttgcagtaagtatagattttatattttagatccaatttaacatgtacgatagctcaaattcaatctaattcataaaagtgtggattcgataagttatatgtaaaaatatatgttaattaattttactttaaattatattctctttacataaaatgaaatatgaaatgtacatttaatttattatattttgaaatatatttgtatgatatatatatatattagatttttaaattattatttttttatattaaaatattaattgtacatataatttttttaaaaaatatataaatataggtggactgaattggatcggatcaattacttttatatgtcaattaatatttaattctcaaacatgcaaattttggatttttcaatttaattcattctgaatgtggatatctatattttatatattgaatgatgcggattggattgaattgaatgaagattgaattggatggaatattttatctaacttatatttcttagtaaggatgcttattgcctaaacagatgcacgtcacacgtgtctgtaaacgatgttttacaacgtacgaccatacaattgttgtcacaatagttagccaagtatgatatctataagttaaagctatacctcaaaattacaaaatattttaaacaaataaaaattatgaaaaaaaaactcaactaaccaacgtcttctacttcgactcatatatatctcagtatctcatcacttgttattgtgtagtgtgatggtagagtggtagagatgcctttattgaaattctatataatgttattataattgacacgtaatttcgagattgtcaagatgacc

SEQ ID NO: 7163 - DNA, 864 bp, Cannabis sativa
tgaggtaactcttactaaccttgacttctcttgttccgatcacactccaattattctggactttaacaatggcagccatggtaactttgttcatcacttccgatttgaaaatttatggtgtcgtgaacctatgtgcaaacaaatagttaaagcttgctgggaagagaatggtcaattgtctcttgttgaaaaaataaaaatgtgtggtctggctcttgataactggggaaaaagtctcaaaggcaattttaaaaagagattggcaaagagcaaaagtgttatggcagctataaaacatgatggtaattcattttcttaccaagattatgttgtagagaagagtaattattttgagatacttgcccaataggaaatatattggaagcaacgatcaaaacaacattagctcaatgcaggcgacaaaaacagcaaatactttcatgcctctgcaagtgctaggaaaagaaacaaccaaattcaccaacttcaagactcaaatggcaattgggttcgatgggataccggtttggacaaggtaatttcagattacttttcaaatatttattctgctagtggtgctcatcctagtttggtggtaaatggaattagaggcattgttaatagttctcaaaatgaggacttgctccagcaggtgactagtgaagaagttaaaaatgccttattccaaatgcatcttgataaagcccccgggcctgacggaatgggactaggttttttccaaaagcactgggatattattggagcagatattgttggcttggtcaccaattttttcaacacaggggaactcccaagagatctcaatacaaccaatcttgtcttaattccgaagaagaagaactt

SEQ ID NO: 7164 - DNA, 717 bp, Cannabis sativa
tgggaagatcatctttgagttccggatctaatgacgaaaatgctggtgcagggcatgaaatgagaggtggacgcctagtgtacattataggatgcttaggaagtggtggaggtgtaggtattgtgggagctatgatcgaggcatgtgaaggaacaagagactcgtcagaacatgtatcaggcgcagaggatgtaagagaatataccaacaaatcatcatcctcccttgatgagtaggagtaggtgaagatgaaaaataaggtgtatttttcacgaaaacatcaatagaaataaaatatttgttgagattaggttaataacacttgtaccctttttgaaaacgagaataaccaagaaagacacgctttaattccttagggtctaatttggtgatatgtggacggacatcgcgagtaaaagaaaacattgccaaatacccaaggagcaattggaaataacgacttactaggaaaaagaattttaaatgtgatttcaccattaagtatagagaatgacatgcgattaataggttttggcccaaaaaagtttaggaactttcatttgaaacaagagggcacgtgcagcttcaagaattttttacgttctgctacatcattttaaggtgcagtatcaacacaagaagtttcatgaagcatgccattagaggtcatgtaagattgaatttgagcagatctatactctttggcattatcacttc

SEQ ID NO: 7165 - DNA, 930 bp, Cannabis sativa
atggcctggttgtgatgaacaatgttacgaaaacccaaacccccaaaaaactttgatttgcacaaattgtcccagcttttccaatgaaccttatgtttgtggccaagagagccccaccagaaattagacattaacccactgaaatgtttacaaatggagacaggaattcagaaacaagacatagcgtaagaaggcatagcctgaataactgatttgaggaggatctccttaccagctctggagaaaaggttttggttccaataagacaatttggagctagctttttgcagaagaaaaaggaaagaagactttttggatctagaaaaacactgtggaactcttagatacttgtcaatgaaatgcttgttatccatattcagggaatcccgaaatagatctcagtcatgtgaattggaattaggggaaaaaagaatggaggatttatgaagattgaccgattgacctgtagccttctgatagatgagcaaaatgtctttgattgcagaagaagacgaagcaaaaactttggtaaaaagtaaactgtcatcggcgaacaggagatgggttatgggaggggcagagcggcagataaatataccatggaaagagttcgaccgagatttatagttaataatccctgaaaggccttaagtgacaaggaggaaaagatatggcgaaagtgggtcaccctgacaaataccacgggtaggaaagatttgggatgaaaggcacttattgatacggagacgaaaagaaacagaagagatacaccgaaagatgagagaaatgaaatggggaggaaaaccaaagtggtgaaggatgtgttggataaaggtccattcgaatttatcaaaagccttttccatatcaagctttaaagccgcccaaccatcttttccaagtttacgattattgatcgcgtgaataact

SEQ ID NO: 7166 - DNA, 557 bp, Cannabis sativa
cggtcattgtgaccccgccaacaatggttgcaccggcctaagctctgatatcagtgcttgccaaggccaaggaatcaaagtcctcatttccttaggcggttactcaggtagcgtcttaatttttttttacctttttttctttctacgaagtatttttcaaatatatataaaaatgcatgtaatgaaaaaaagctagggtgattctatccagaagagaaaaaaaaagtgtattaactattgggaaaatactgtgtaagttatacaatctcacatcttcgggaaaggtcaagtgggatgattctgagactgtgtatgtatgggactacacagttcaagagggcttaaatagattgattggtattacctatatcaataaggtacatcttgtttttcagtagcccatcacgaaagaactccacagttaatcgtgattgacctaggataatttcaggatggatgacctgcatcttgttttttggtagttcatcacgaaagaactccacagagttaagcgtacttgacctaggctacttgactcatcgccaattaattttaag

SEQ ID NO: 7167 - DNA, 639 bp, Cannabis sativa
gatgttgtcataagtttgacaatagcatttggaaatagcaatctccaatccaccgtggctaaagctctatcaagccgtgcacgttttagggtacaccctctgccagtgatggtagatttttggaaccaggtgaatttgcctccttgacacccaatgcctatcaaccctgtatgagccaccatgcgacgaaggtcaaaggagtatttagcagagttatttggctgggtgtagttgatgattttgtgatcttctaaggttccatttaagtcaccaaggagcatagatgggattgtctctccttcaatgaactcccctactcttctccaaaaggcctccttttgggttagacttggagggccgtaaatcccccggaggttccatttgatccccgacgggtcagactcaataaccccaacaattacattcttgtcttggtctttgacactacacttcacccttgttttccaacacataccaaacccccccgagaatccaatagagggaatgtaaatgaaatccagaaagtgaaacttatgagcaattttttgaaatttgctctgatcaagccttgtttctgagattatgagcacttcgggatttgcttgacgaaccaaagccgtcaattgtcgaactgtcgcg

SEQ ID NO: 7168 - DNA, 506 bp, Cannabis sativa
caaataacaatcaacaaaacccccctaaaaaagaattggcaagaaaaatacacattcaaaattagatacacctttaaactctagaatcacatacataattaatattttatttgtaatttttcaaaaataaaaaaaaaatagtatacttttcttgcatttccccatagttcaaacataacaataaaaatgtcacataaacctaaaaatctctctttttttttcttttttcaactgcattaccaaaaatatttacaaccaaaagaataagaatgaggagaatcgagaagtaagctagatcatcactagagacccaatcgagagctacaaaaccatcatccttagtcggagacactcgtggtggagtctaatgtcaggaacatatcaaaataagatggtgaagatggtttccacgtggcagttcctctcatcctccatcttgggtgctcagttgctccgttgatctcttaaagtcctccaactcatcccctactttatcatcttcatct

SEQ ID NO: 7169 - DNA, 518 bp, Cannabis sativa
taaaatagtatatcaattaaaatttcagagtatataagtgaaggcacattcttcaattaaaaataatttcattcactcttaaagtaaatttaaccaactcatgacataacatataaataaattgtaggcttatattagggaaaattaataaaagactaaaaatatctacaattaagtcattaaaagaagaaataatagagaatggggctctcaaaacatttgaaactatcatggcatctatctcgacttgtgctatcgacaattacaattgaagggcctaattcaaactgtgaaaaactacttcgacctccatttcatgagatgcaaaattacattaatcaactttgaaagaatagtaaaaacctgaccataagtgtctcgtataaaaactccgactccaattagtttcttgttagcatccaatgttgcatccacattcaactcacttagagctggtggttcccacaacacatttagaattgtaggaggagaaccttagagtggcattaacttcaaaa

SEQ ID NO: 7170 - DNA, 771 bp, Cannabis sativa
gtaacaggctcagtttcggtcgatcaaaatttatggacaactggttttcatgctgaggctgcaaacattatagccgggaattggctcaaaatatggatagaaattggagcagtgttgtcagcaattgggctcttccaagcccaattaagtagtagctcataccaaatacttggtatggcggaaattggagttttacccaagattttcgagtaccgttcgaagaaattcaacactcctctatttggaatattggtctcagttgggatagttttgggaatggcatatatggactttgaggtaataattgctgcagcaaatttcttgtatagtttgggaatgttgcttgaatttgcttcttttgtttggctaaggagaaagtttcctcaattaggtagaccatttaaggttccaatggggttgtttggattgattgtgatgtgtttggttccttcagcatttttgatattggttatggccatagctacaaaaattgtttatttaattagtggtgttatgacaattggtggaattggttggtattttctcatcaagttttgtagaacaaagaagcttctaagattcaacactaatcattttgaagatgaagaatgaagagaataagaaagatactagaaaacacaaatatgtattttatcagttttatatatttttttaattattattttagatttgtttttagtacagctttgacattatattgatgatacaatcttaagtgtttgtagttattattatttttatgaaatggta

SEQ ID NO: 7171 - DNA, 2197 bp, Cannabis sativa
attaatagacagttgaaaattttctataacaaagagtaaactagctgaatagttaatataattgcggagaaattttaaaggtagtggtaattcaatattggatctcaacttatcttattttaataataattataaaaaattgctaataatttatagtacatcacttcatgttggtgcttgtggacctaatagcaatattcatatttgttttaatggagcagaatgttctgtgtgcatcgcttctgtggacctgtggtccagagaaggaactttctacgttaatttctttggaacagagtaaacaccgaaagacctttttacttttaataaaaatatgataactttaggtggctggtggaagacctgaagtaaagaccaaatccattttggatgatctgattcatttatcaaaagttaaaactagcctattaattgccaagaaatatgaaaaatcttatggtaagccattagtacatactctccctccggtaaaaaaagaaaagaaaagaaataagaggagaagaatttcagtaagaaattcacgaaaaatcaacacaaaacttattgtgaaattaagaatatgttgttgtatttccgaaacgctttcaaagctgtaaccttacttctggcctactgtttcctcaggggacagtttgtgcttgttaatgctgcatatcttcctgtccgcatctgcaacacaaataatacacttaacaataatagtcacttcccaactcaaaacagtctctacaatctattccattccttagcctcaactgcttctgtttctaaattttacaatacctcctcctctggagtcgactccgataaagtctacggcctctatatgtgccttggctatgcgacaaatgaagattgcaagaattgcattagcttgacctcaaaagaaatcatgggccattgtcccaactcaccagaagcagtaatatgggaagaaaaatgcatgttacgttattccaatacgaacttcttaggctctgttgatgtttcagaaaatttagaaatgcataatctcataaatgcttcagaaccaaaacagctcggatctgcgttggaagagatgttaaatgagttgattgagaaggcagcttataatcattcgcggatcaaatactatgcagctgacaaaagaagttatggaaacgatattgtatatgctgttgttcagtgtactgaggatttatctccaaccggctgtaagacttgccttaaggccactattgaaaatgcttcaacttgctgcagtttctctaagggagtacgaattttgagcaagagttgctttttaagatacgagttatacgatttttacgaagatgattctgaaataccaccgagtggattcgtattggagccagggaagagtaagtgtcttccaatgatttttctttaagaaatttgagaatttttatgtgacctttttttttttcaataaatttgaaatagcttatactgcaggaagcaaatggcacattaggacgacaattatctttgtagtttcagcttttttagctgttttggccttcggtttctctgtctactgtcttatattgaaattccgatctcaaaatggtaacataacaacctaaattattattcttgattccgttttacctctttcttttttctttttgtataatgaaatcgttcaatttgcagataagaatgatccagaagaaccgttaaacgacaatggtggaccaaatggactgaaaaatatactgcaacagcattttcaagcatgggacgaggagaatgcaggagagtttccatatattgatctgcccacaattcatgcagccactgataacttttctgagtcaaatttgcttggacaaggtggttttggccctgtttataaggtaatatattaaatttcttcataaaattctacttccgagggtttagtagtccataaagtaaatagtttttttaaccctaaaatctaatttttttcagggtaaactaagtgatggaagagaagttgcggtgaagaggctgtcaagttgttcagaacaaggttcagaggagtttaccaatgaagttctactgataatgaaacttcaacacaaaaatcttgtgaggcttttgggtttctgcgtaaatggagaagaaaagatacttttgtatgaatacatgcctaatggaagtcttgatgttctcctctttggtaagt

SEQ ID NO: 7172 - DNA, 914 bp, Cannabis sativa
caccattttttgaatctcaattttgagaataccgtgaccaattcaatttataattgatactgtttatagttatatttgtcaccttagtttctgcaacaaaattaattatcaaaaatatattttaaataatatttttaagatattaaaaatactataatgtaactttaaaataacttattgataacttagatgtcaacaaatttaactaaaatattatgtgatttcttttactttattgtaactcatgagtggttaaatgtatattatatagttttatttgaatattattgtgaagtatactaaacagaactatttaataaatatatattatatgatagctaattagattttacaataaatttaaagtaattaaaaatgtaattttaaaataagtaattagcaatttttttttatagaactaattagcaatttaggtgtatacatattttgctaataagtcatgtgagttttttttactttattaaaacttattagtttattaaatagacttggaggtaacataaatattgttacaaaagaaaaaaaaaagtaacataaaagtatctaaaacaacaaaacaatgtaatataatctaaaaaataaacacatagctttcaaagtaaataaaatgtatataaaatggtagcttgttatattacatgtcaactcattagttttgaaataaacattaacgtaactcaaatgaattttaaataataagataccataatataacttaaaaataattaattgattattaaaatgtatacaaataaattttgatggtaatcaaaatgtatcttaaattatatgatatataaataaaaaaatttatgtaaaggtcactaatcagtttcttattagcatcataagtaactaaaagatttttaaaaacgtaggaagaaaaatgaaaa

SEQ ID NO: 7173 - DNA, 927 bp, Cannabis sativa
gttacttttgttgttgtttgggtcatcaaagaaagggatgtaagttaacttctccggtaatggttaccaatcaagagggaatacaatctccgatgtacagcccttggctttctatctcctcttcgtatctggatgttttctcggggcctaactcgattggtactcgtggtttgatctgggaggccctggggaagaatgatgattgttgtcctttgctaccggcgccagcggctgaggaagtggaagatctgaagggtaaagaaatttctctcaggcgtcgtccgaggcgaccggcgatggggacaactcgggctggtggcaaccccgagaagcctgtgcgcatggagtggcatcccaagatcagtacgaatggctctgtgagagttgtttctacttcgggcgtgggaggtgtctcagaacgtctgggcaaggaaaaggcatctggttgtttgcctattttgatgaatgaagagagagaccggtcaattaaaaggtcaaaggcggttaataataataattcaaatgttgttaacgttggagaaaaggaattggatgttgggcctatttctgttgggccggctgtggaattaaaaaatgggccttttgaaattgctgacgtggcggttactttagttactgatatggatcaaggaagtgggccgctagctaagagtgggccgggtttaattggtcatgactctcccaagattgggctgtcttctcttagaaaagatttatctgggccggctcacctttttatttctgggcctgaggaagtaatgggcatggctagactaactcaaggaggtgaccgtgggaacccaagaggaaataattcctctctttgtgggcaggaccttaatggcaggcaagggggcggggtacttggggagcccaccaacttgcttccttctactcccccccagg

SEQ ID NO: 7174 - DNA, 534 bp, Cannabis sativa
aattattaaaagataatgaggaatataacaaattaatggttgcatataattgagctattgatagtagaaattaattttattattattagttgttagttttggttgagagttttcttttccagagactttcttttcgtcgtcgtcggtcggtactattcctcttctcaacatgtgaacacacacaaaataagtggccaatatttatcatatatctatttttggattacatttatattatatatataccacatatttataattcgatatattatattatttatattcatgaattcattctaataattattaatttctaagcaaaattatgctatttttataatgaagaagtgatacatattcatgtgaatgaaatattttgtatttttaaaataatgtatatttgtttattatgaatttagtatatatatatatataactaataaaacgaattataaaatattatctataattttttagtcaattttacatgctccaaattatatgtcgattttttaatagcggtgttcatataat

SEQ ID NO: 7175 - DNA, 1003 bp, Cannabis sativa
tatagactgttaaaatagttttttctgcatttcccttttcaaatttctctactgtctagtcatcttcttttagttatttgttcttttcatatagcatcttccaatgaaatatcatttttgggttcttccaaagataggctttagtagaagaaattggataaaaccatatttagcagaataatatgatatcttcctttaagatccttgagttggattgagttttctggacggaagtttgtctgtttatgttaatatttatgatgaacaacatataatctcatctatcttttatgatttccttcttgtattcatccatttctccctgacatttgctccaggttaacatattggctgtcaaattctgttgtgttgagagcaatagtaagccaagctgctgggagcgtggagcatccactttctactggatcttcaaataataggaatggcactcaaaaggtaaaaggcaaagtaacatctcctttaaaatggaaggcattctctcccagcaaaagggatggcatggatcttttgtccagcagcttaagtgattgggaggagccacgtacatttacatgtgcactagaaaagattgaaacttggattttttctagaattgttgaatctatttggtggcaggtcagatttatctcttgtttctgaatttccaatttctgtagcaagagcattcttttaagaatttttattttatatattatttttaatgtgtatatttttcttttctaattcctttaattatttccagactttgaccccgcatatgcagtctgtcccgaaaaaagatgttgataaagacagtagttctggattaagaaaaagctacagcaggacatctagtttaggtgaccaggaagaacaagcgaatttttcattagacctatggaagaaggcctttagagattccttcgaaaggctttgtcctgtacgtgccggtggacatgaatgtggctgcttgcctatgttggctagattggtaagcttacat

SEQ ID NO: 7176 - DNA, 764 bp, Cannabis sativa
tttttttttttttttttgtagttacccacttttggcctccaaaacatgtatataaggctaatgattaaatccaaaccactattactattttattttagtttttaggataaatttttattttaggaattttattgtattttattattaataactaattgatagatatttatacaaaaaataatatttattaaattaccaaacacttatcatagcattaaaatttagtaattctataaaacccacaaattattcttgtataaataatgcaaaacataacatgtacaaatttttttctctcatttcaaaccaagctacacctcatagtgaaactactaccttagcaaacaaagtgattagattgagctctatttaatgatatgagtattgctattgggcactgtggtgcctagcacttttcataggtagagccatacgattggttagtgatatttcctaaaaatattttttttaagttttagaggacccgctacttaattataccaataacggtatggcacgaaggaaaatgctagacactagtggtacctttagcaattctctaatattatacattattaattaatgatagtttgcagtggtaaattaaagagaaatctataacaaaaagcagtgaacaaatattaaaaatctagatattaaatatttttattggaaatatttatagtacaacaccttcaaaggttgtttcggtagattccctatctatttcaaaaaaaaattataggatcacttgtaaattttta

SEQ ID NO: 7177 - DNA, 1076 bp, Cannabis sativa
aaacttgttcctccttcaagcctttgaacattagcttagtcctccatttctccttccttctttcttctttgttggcttcctcttcaagctctgtaagagctctcaaacaccgaacctactactggtttttattcctccttcaacccttatattctgatcttcttgaagctctacaagagttttctatggctgaacctacacacagaaataaacaaaccagaattaactagtgacaacaaagatctaaaatgatctttgttggttgtgatagaagtgcaacctgaaagacaactagcagaaaaattaaaaacaagaagacaaagagattgatttttgagttccctctaaaatcagaggtacttctctgtcaagcttccctcaaagatgcttgatcctttactatcctatgtcaaaaccgatttcaaggggtcggagattcctagccgcacagttcagcaggtaatctcaagttttctctcttttcttcactctatttttctggtttggattacaataaaactctaactctttctagtttttctctcttatttctgaggttatatcttcatgaaaatagactgctgctattctccttggctgagccgaaaaacacacaccttgaaaggacaggttgaacccctttatatatattgttgtttgtatgtgatgttgtgtttgagctaagaaaaatagttaggaaacagttacaaaaactgttaattgtttgcttgagctgttgatagtttgttggagcattgaatgttgttatttacttcttgtattgtaaagagcttatcagaaataagcctatgaaatatgatcgactactccaagagttataatggtctgttgaggcttgtaaaaaatcttactttattttccatgtaacttgtttaagatattttcccatgtgatagttagtatggagatttgtccaacaaaatccatctcacttttataattttaaacattttcttaattgcaattggaagtgcagaatataatgaggagccttctaccaaagtgtaattttcataaaacttcgaatttgttaggttgctcaagttctttgtcat

SEQ ID NO: 7178 - DNA, 1195 bp, Cannabis sativa
aataccttaagaaatatagaagtgatatttgaatatattattttacaaaccctctcaaagaaacttcttaaaattgttaaaataaagaaattgattagtcggtggtttcgtgagcaaattgaaatattggcatcaagtgttgctgaagctttaatgaggatgaatctacttctgaggtaacattttcttgtgttttccaaggcattagatgtttactttagattgattatgagttgtgatagtgacattggaatcacatatacaatgaaccaaatatgatacgaccacctcaccaaaattaatggttctcatggtatgttatcattcttaatttttatagatttgcattgatcttgtaatgataaagctggttgatttatatatgtttttagggtttgttgtcagttatgtaatagtatttgatgaaactggttttagttatcaattatgctttgatactttttttgtttgcgtattaatttttaatttgttcattttacgtaattggtttttgtattttgctgtaataggactactttatttttcgtagtgttttgtttattttttattttaagtttggcttattattttttatatggtcgaaactgattttataggttttgttatgattttgtatgagttcacatattttgttatgattttttatacggctaaaaccaatttaacaaggttcgaaactagttttcacggttatattttgttttaaaatttttgttgtgcaatgggtgttattttgattatatttgtgagtattttttttttgtgtgtgtatgcttttttttttactaataaatctggtttcagttatctttgttttttatcatttatgttttgttatgattttttataaggtcgaaacaggttttatagggttcaccagtttgaaaatagtttcacagagtttacaggttttgaggcttttgtaatgtagttgctccaatttatgatgttattctatattttttatttaaggttttttattactttatttctaggttcgaaactgattttcatacttatattttatttttagatttttgttgtgcattgtgtgttgttttaattatatttgtgagttttttaatttgtttgactgtgtgtatgtttttttttttcatttggttgttcgatgaactagtttcaattatcttcattatttattattttaggtttt

SEQ ID NO: 7179 - DNA, 880 bp, Cannabis sativa
tcatgatagaaaatccaacccaattgcaatctcaatcaattttatcaacaatagaattcgagaactctctccacctcatgactcccgtgactcccttcaatcggagtggaagcctcctcctgaaggatgggtggcctgcaattccgatgttgctataggacatgctcagtctacgggggcggccgagttccgagacgacactggagccatcttgagaatcctctcgtttcggctgagccactgcgataccttgcctggagaggtgtctgctgtgtgtgaaggtgcagcagcggcagtggaactcggatacaagaatattgtatttcagtgtgattcctcaaacgttgttacagcattgaaaagcaactctacagagatacataatttgcatttcaatatccaggacaaggttcagaagttctctacaattgctggtaagttcaatctttgggagatcatgtggaccccaagaacctgtaatggtgtggcccattctgtggctcaatgggcaaatcgaaacaacaagtttgggtatattgatttggccaattttgatgactccctgtagctggttaatgcggatggtcatgttttagtctagttttcttttactgtctactgttagtctgttttttttagtttgtttggccgtgcttggcctgtagtttcttttctgccttgtcttgttgtttgctctgcttcttgttttcggggtgtggttcccagtttaaccactaatcaaaaaaaaataaaaaacaaaacaaaaaaaaacaaaatgatgatttcagttctcagagaaaaaaaatactgattaagtaaattcatgtactgatatgaatacatactgttcctagaaggcaaatttaaataaaataagact

SEQ ID NO: 7180 - DNA, 982 bp, Cannabis sativa
ttctagtatgttttgtaattttaagacttttagtcttttctttaaaagaaaaaaaaggttccaattggtgggtggtaattgccaagaaaatatatgatagtgaaaaatgtgaaatcaagtttataagactgaaatctcttactttgtatgtgttatgttgtcatcgtaataaagagaaaattataaatttgatgtatttttatatttttcttgtgtaaaattatgatttttttttaaaaaaaagattgttttatggaaaaattaaaaaatatgaaaaaattagttaaaggtaaccagttactataaggggtttcatattttttaatttttttttctaaaaattcatgtttttacaaatttatactttaaaaaccataaaaaataaaattttccgtatcataaatgaaatcccatgtttgtggctaaatgttatttttttaattcaattttcaaatatatatatattttttctttagtcccaattaaaaatttcttttagctatgaagaattatttaatcacaagttgtcatgtagtttaacttactcacaatttttttgattaatatttaaaaaaaattacatatatattagaaaaaaaaaagttaacctaatttattatgctttaaattatgtaaattgacagactgtgtgaaacttcatatatattttatgagtaatgatatgttaaaacttcaaaatatgtaaaaataacattatataaccaatcacattgatctaaattacatcaagttactctataattgtacatatcgatatcactaactcatattttattttatattttttatgtggataatatttgatataacaactaaaaaacttatttatatataaaagactataattcgagcttaacaaaaaaataaaaaaaaataagttgagtcccgatgaagttttgatcttgatgatcacttattgtttttaagatcatgcaataaaaccttattattattattatta

SEQ ID NO: 7181 - DNA, 617 bp, Cannabis sativa
tttttttattgaagatgagaaaaaagccttgtaattgtaccgtatataaatgtcgtattttgccaaaaaagaaaattaaaagagggtcctaaagggaagaggccccgtcatcatggatggaagttgaaacaagtaaaaacgaatcttattattactattattaaatcaaataggaaatgaaatgaaatgaaagaaaaataaaggagaaaatagacaaagagtagaagagtggtgctagaactagacacgtactatggctattatacaaattcttcaataagcattaaagttgagaagttaaagctcatgtggctcaatgggtccgaatttaaggagttgaatcctcaaaataaagccccgtacgccgccgtttcatgttatttattaatatttgctttgggagtaacgaaagaaagagtgtgagtcagcataggagaagtgcaagagcaaagagcagtgaagatttggtaatcaatgagatgggactgcttttaatttataaatcttcagatcttggattttctttgggggacttacttttcaagtgaaggttttgatgagggattgattggcaaactttaacaagtaattcaacatgcaatgataataataacaca

SEQ ID NO: 7182 - DNA, 990 bp, Cannabis sativa
attaatcaattcaatacctatctatacttatctaccattaataaaattcatgtttagcttcttctcacttcataataaattaataatactataatagtttgcctagtttgccttcaagttcaattccatatttatctacaagagtcagtcacattatgattaaaaccaaaatccttgccgacacatagttgtaaatacgtgcgttcagccgtgttacctcgacttatttttcgtattttttaaaatataaatcgtattgtgctagttaataaaaaaaaaaatatgtgtcgtacagtgtcataaaaaatgtgagtcgtggcgtgccataaaaaatataggccgagtcgtgccataaatatagatggcgttgtgctgtgtaataattttataggataggcccaatacggcccgtaagtctggtaatttagtaccgcaagtcttttctcatcaccatggttcaaacacgaagctctgatcttgaagctcaaccctcacgagatgccaatggtgaaaattgctcttctccatcagattcgaatgcccgaagctaaaatccttatgcaagaccgaattcccagcatcaacaaggtttactccactctcattcaagaggaaaggcatctgtgtccatggaaattacatctagttcaccaagtcactttgctggaagtaagttctcaaagtgtcataagtttcatggaaggggaagacctttttcaaccactcagaagtttgttgctcgccatgttagagtctctaaagacaagtctgaaaccatcaagatcccaccttcagatatgactacatgtccattcaagagaattctattgcaccagaacaacctgatcgacccctggtatgaattctcttgatctttctaagtagtggagaattgatcctggagccacacacaccatgtgtgccatgatatttctatgttttctcaaacctttcctaatcaatttctatcttttgttacccttcttaatg

SEQ ID NO: 7183 - DNA, 582 bp, Cannabis sativa
tttccaaaaaaatacaatctttaccgacattcccaaatggcttattctcctccacaaaacaagtcagctgctctataatcagtgaaacttctccaaataatcctagatctgaaatcaacaacaccatcaacgatgtagaatctttttcaatctccttgaacgtcgatcaccatagttgttgatcaccatgaatgccaacaagaatctttttcaatctccatgaacgctagtgagaagctttactttaatattcagccatggcaacaacggcccacgaagataaatctctatgaaagccgacaaaagaagattaactattaaggagagatctaaccttcaactcttacttgcctaaaaaatttggtatatgtataaaatgtgatgttgtttagtgtgtttgatttaattatgttcttaagagttgttgttatttgattgcttcacatatactgttggtttttgttcatgtatttttagtgttttatggaattttttgaaaatcacgaatgaaaatcagtaaattaatttttttggatagtataatgggaacagtaactgcatgtaatatagttgtcatgtttc

SEQ ID NO: 7184 - DNA, 520 bp, Cannabis sativa
aagatagttagggtgttacaaggcaagcctgaaccgatcgaccaattctgtgcaagaaccctacaaaccctcacacaaaactcaactctaccccaaatcgcctcaaaccttccaaaatatctatacaaaccataataaacttaattcaagctataaaaacaactttaaaccatagaaaccaaaatcacggaagagcaaagtttgagcttaaactttgtccaaataccacaacaagcatcaaatcaagcataaaccagctccaacaacttcaattcaacctaaaaaaaatagaaacaaactcattcaaacctacaaaaacctatcttcaaaaattgcgtgaacacataactcaaaactacaaaattcaaaggagaaggaggaaacttgcttaccaagagctggtgccttcaatccctaagagtttccccacaattaaccttctgaattgatgagaaaaagcaagaaaaactaaggcctccaaagctctgtgtgtggccgaccagagagagagagagagaga

SEQ ID NO: 7185 - DNA, 1993 bp, Cannabis sativa
ttttaataatttattaattaaaatatttcaattttaatttaatttaattattatttaaaatactaataaattaggtagattattttatataatttgaatttaaatttaaaataaattaaaatatattccattaatattttttatcattatttgaattaataattaagtaaatgtatcaagttcaagcaaacgagatgatgatgctattacttattattttcaagtgtataaattggtgtccatatcaatagcaagaagaacacttttttgaagaatgatataaaaagtatatatacatacatgcacacatatatatatatttatgatcattttaatttgacccctatataggtagctacgctcctacttagtagatagctcatcatgatgatcatattgattcatatatatatatccaaacaaacaagcaatgcctatgtagttggattccaaaaaggcttaatggtgtcactcatatgaaccatattgatggaattatatcattgtgtcacattgggatatcacatcccccaactttggtttctatttttttagacagcatgtgcataatgtgtgttgtacacacttttcattttttactttctttgttcaattattcaatttataagtgcttttcactccaataaaagaaattgtgttctttagttatatttgtttagcccatgttcaatggaattctaaaatatttaatttatgaagatttaatactattctactccaactctaaaacctatcttacatataatattgtctacagtactgggacattataaatgtcactaaaacttattttttatttattaattacttttttctttctatataatattatagctttcaaatatatatatatattgccatttttaataatctaataatacaaaaatattatatttaattaaaaagttatttttatgtaacttttaatattgatggttagagtaaaaaaaaaataatataatgctacatcattttatggtaaattaacacaattataatgtttatggtccaagttgcttttaaagcactccaatcgtgctaaaaacttatattagcccttcaatcaactactttataacttaggtggcgtttggttggaggtaatgaaatagaatagaaaaaaaaggaaacaattttcattccattcttttatttggttacatattaaagtgttagaatgtcattccaatagaatggcatttccaccattttggtggaaagataattccattgtgaaatggaaggaaagaccattccaatgcttaatgagaaaaaatttaataatttttttatatattttaaattttattccatttaattcatattcctattcccattcctataattttattacttccaaccagacgccacctaaattattatacatttgcacaaagtccaataaaatacatctttacatgttattatggagagagctaaatttttttattagtttcattactactttatttgattttactcactttttataattatatttaatgcataatataatattttattaaattatatattattaatatattaaaaatatattatttttatgatgtagataaaagtatttaaaaaaaaatagtgtaaaagtatgagttaaaatgaaaaaaaaaataaatgaagtatttaaaaagattatagggattacaaataaagtctcatatcggttagaaataagaagaataataggtatataaggatgaacatatttctattggtataagactttttggaaaggtacccaataataaaatcgtgagggcttaggcctaaaacggacaatatcatacctgagtagagatggttggtatctgataatttttgacaatttagtatcagagttagatcccaacattagctatgcgaatgaattctctgaatcatcttaaggtgatgtgccttggtgtactcttatgatgtctgtggatgtgctcagttaggcggtgtactctgattc

SEQ ID NO: 7186 - DNA, 720 bp, Cannabis sativa
ttttatgggtctattagcagtttgctctccggctacttactgttgtagtttcagttatacttgtgttttttcggagactgtattagctatttcgagtcatagagagtcatttaaagaaagtagctttggaaatttaaaggtttgcacaaatgtgtacatgagaagtaggtcggcattgaggaaacaacaaataggtttatgtgggtgtgttatgaaaacccgaaaggaaggggaggaactagccaaggagaagaataaagttgtgacattttcagaagatgttatgagggttcttaagtctacaacggatccaaactatgctttttcatattttatggttgttgccgggttaccttatgttgttcacaccaccgaaacgtgcaattacatgtttgaagtcttgttaactcataagaggctggaggatatgactgctgtttttgatttcatgcaaaagaaaaccatttaccgaaatttgaacacttatcttactatattcaaaagtcttgacatcaacggtggaattcgacaagcaccaactgcgattgagaagatgaaaaaggcggggtttgttttgaatgtttgttcgtataatgagttgatctatttgcttctccagtctaagttttgtaaggaggctttggaggtttctaacagaatggtcatggaagggatgaagccaagcttgaaaacttattcaacacttatggtggcattcgg

SEQ ID NO: 7187 - DNA, 653 bp, Cannabis sativa
tttagcccatcaatttatcatttcacttttcatgtagaaactataaagatgataaatacttacattaaattatactactgatctttaagattgtatggattagtccgtagtgtaaagtggtaatgaataagtcaaaagattaagttatataactaacaaaaatattatcattcaaaattaaaattgacttaaccaatagtcaacgttatgatactgattaaatttgatctatctatcaattctaatttgatgcgatgaaatacatccaatctacttagttaatgccttggataaggcatcactccttgtgtactccttatgtgtaattcattattgtgacctaatagttgtaattgtgattatccatatatttagaatcataatagactagtaaacatgtattaaacacgtaagtaatgtatttgataaaactaaaatgatttatacttttcataacaaatatgatttttttttagaaaaattacttacatactatttttttaatatttttcttttaaatttacgagttaaattttgattgtgatttaaattacccgttagttgcaatataatttttgtaaaactactcttttgaaatgtaagaataaaaaaatctcattttttttagacatgaaacccaacatggtcatact

SEQ ID NO: 7188 - DNA, 741 bp, Cannabis sativa
aatacacaaaagggtatcactaatatcttgatggcttttctgggtcttcttcatttaattttggtcgtatgcaataaaaaccataccttggtagaagagggttctgtctatcaagagagtaagccatgaacccagaagagccaaggttgatggtgaccgcagaaggatgaaccgatgtgaagtgacgagcgaggaagccatctttgagagccgaaaccgattcagagtgagggctctgaagagcatcggggctctgtgccaccgatttgtcgaaaactgccaacattttcaggatccttgatcggaagacgaagaaaaaatgaatgagggaaacgaaaaatggatgatgatgatgatgatgatgatgatgatgatgaatgaagatgtgtagattttgctcagttgaatggagattatataaggtaggagagttggacaagattttttttatttttatttttatttttatttttaatggaccaatacgagtctaatttattgttccaatattacccctgctttgacaaaaaacgttcctggttgagctggcatcttatccgcaatgtcttacttctttctattcttttccttttccaaatctaaaaaggaaaatcaaaaagacagaaaataggttctatattattccagcatatttaataattagtcccacccaaaaatatttagcccaccaccactcattaccctattaaatatgttattattatttagtattacatagtt

SEQ ID NO: 7189 - DNA, 769 bp, Cannabis sativa
tttttttttttttttatattgaataaatataatccaattaaataaatattggaactaaaaatttgaatgaatttgatataaaaagattaagtttaaaatattaaataaatttaaattatttaaattaatagatatatatatgaaatatatttaataaatattgaattgatccaatccaatatttaataaatattgtgaatgattgaatggctgaaattatattttttcatatcaaatctaacctttaatatataattagaggagatttgaataatgatccaagataaatttatacaatgagttttaagtgaaatctaataatattctatttatttactagtgagattgagtagttcgagggtgcactcccttgcaccataaatttccccaaattatatacaaaacaataataataaataaaaaatatttacgataaaaatgataaaagaatattagtaaagtaatatttaaaaatgataaaataaacaaaataaatgagatcagaaggatcagtctccaaaaaataaaataaaccaaacaacatccacagctaggcccacctattcagccgagaaaagaaagacatgcacagcacgtgattaatatgaaatgaaaaagagtaatttcaataattttaattttgaattgactgttaatggtcggtcgtttaacttcattatacaagtaaagtaaggccaatcttattggccgagacccaacctccaactctttccgtgtaccgcagcgcactggataattgccctccttt

SEQ ID NO: 7190 - DNA, 664 bp, Cannabis sativa
ggctcttgagaggcggggaacactcttctcaaaacaagattgccaattttgaattttttgctctttcactttagagttgaaattcttggaaatttagttttgatacatctagagttggacttgtgactgttctcaaagctcctcaattaaatctagggattcttgaagtagagcatggttttgagttgggttgtaggtatccctcctatgtgtaggcactgtggattcgactgggattacagcctcgcatccataggtcatgaatatggagtgtggtctgtagaagttcttttagtggttctgtaggcctaaagaactcttggaagttcttttggccagtgggttatacaagcttgtagcttctattttagagtagtctttaggattttattgacgatttacacttattcttttgtatgaggcctggccacagcaaaaaagctctttattatcccatgcttggcacaaaaatcagtgaattgatcactaacaaattgtttttcattgtcagacactattttgtgtgaaagtatgtatctgcacactttgcttttaattacgaagtccaggaccttcttgggagttactatattcatgggttcaacttccacctacttagtaaagtagttaacaacaacaatgacaaatttgactcctcctttgc

SEQ ID NO: 7191 - DNA, 687 bp, Cannabis sativa
atcctccttttcctacacaaaatgccacaccggacgtttttttcttttacctaaaactaaaaaagacaaaaaaacaataattatttgaccacgatcactttctctctctatatatatatctttatcatgtacatatatatacttcaaaatacaataattaatctttatgcatataacttaaaaactgatcaatcactacctggtagttgtggggtttatatatccaatagtaataataatagtaatatatatatatatttatatgctaggtttgcaagttagataaagtgcgtgtatgtgcatgattatgaatattacaattggcagacataattaagaagatgcaaacaagtttatgttatccgcattttcggtggaatattttcttagaggcccaagatgaaaagatctctcaatccaattggatagagcttacaaagtcaggaacaactctcgatcggttcatttgaccggatccacattcaaggttcccaaaagtaaatttttacttaacaggtaggtagtccaagagctgaagaaggatacgtagtcatccgagaatggaagatgaaaagaaattcgagaatatatatactatcttgcatgtttgcttaagtggcatgacacttaacaaaaaaaatttacttttagtaacaactaaacttgttactacgaataaaaaatgtt

SEQ ID NO: 7192 - DNA, 891 bp, Cannabis sativa
gcgagggtcgagtaagttctactggcaacataacctcatatccaagggataaggcaaatggggtgtgacccgtgactgtttactcagtggtgcaatatgaccacatcccttataataattcttcaggccaattttcctttgcctactccagacgattttataaggtatctttgagagtttggttggcagcctcgacctggacattggcctgagggtacgtaaccgctgaaaaactccttatgatcccatgtctagaacagatttcagtgaacaagtcattgtcgaactgtgttccattgtctgacactattttctgaggtagtccgaagtggaaaatgatgctcttaacaacaaagtctagaactttctttcgaagtgatggtagttaatagttccgcttctgcccacttagtgaaataatccattgctaccaccgcatactggagacctccttttcccatacgcataaagactatgagatcaatgccccatatcgcaaatggacatgggatttgcatgtttttgagcttgtttggggcaactctagggatttttaaagatctctggcacttttcacacttcctcacatagtccattgaatctttgatcacagccgcccagtaatatccctgtctcagaattttcttagaaaggctttgcccccagcgtggttgccacaaaagccctcatgtacttcaatcatgagaaacttagcttcctcaggtatgacataccttagaagaggtatttctcatgtacattacttcatctatgatgataaagtaggttacttttctcatcaatttttcggctacaatcctatctgttggaaaagtaccttgttctagatattctactattagagtcatccatgatggtgtatcgtctacc

SEQ ID NO: 7193 - DNA, 843 bp, Cannabis sativa
agaacaagcgataatcatctgcaataacccagtggaaataaaaagatataaaaaaaaggatcaagacaaactcatgaaaagtgatagcaaatagacagctaaggagtaaggtgcacctcgttcaaaaacatcaacaaaaatccaaatggttttcctttaacaaatgacatttcaacaaatctattgaattagaaaaactaaaaaatatttaacaagtcttgtgctgccaaatccactactcctggcatattcagtgcaaaagacttggtcagcacaaaactttctacccccaggaattcttaaggatcagttaacctcagacctactgtaagcttgtggggataacagcaattatggtcccattagtatgacaatgtcgatgaaccaaaatagaagtatttgtattgtatcaactaaggattgaatatttcgcgtgtagcagctttaattctagcttaagtgaagtcaaattctttcactattatcaatctaaaaactctaataaactaatagtgcaagaagcaaacagacgcaaaaaaagaaaaaaaaattactttctggccattcagcaagcgttggatcctcccaactcagcccagcagctttacggggaacagctttcttcttagcttctgctttgtgctcgatttcgctgttcgcaagagcagctttcacgctttcaagagcttcaggcgtaattgtctgagcatccctctgaaataattgctgggcctatacaccattatcacaaacccaagtatatatgaccacgacaattccagcacatatccgatcaatacgagtcaataaagtagtgatgttaacttcaaatccaacccagca

SEQ ID NO: 7194 - DNA, 501 bp, Cannabis sativa
gatgtgcatatatttgaatacttcttccatctgattggttctaagaactgatcactacattcgtaatcatcagagcctcgccaccggcatggcttgcttttgctgctgttaaccaatgcaatgttcattgtatttggaaggcttgagagatgctgtacatgaagtgctaactgattgcattttttcccttccaggtacaaacgcaagccgacaactggtttcttatcagtcgaaacctaaaatgacaaagtaagaatttatgagtttgccatagtgagaactgaattttccatgctatctgaagtagttacaaaactacagcaacaattacagaagaaaacaaggcattttaacttttaaaagcatcaacaagcaagaaaaactaataagtagtctctcaagagataaaggcagggtgcagagtccagggagtcagagacctcctctggggtacaacaatctgagtacaagtagtgatctcaaagaactcaggatcttgga

SEQ ID NO: 7195 - DNA, 932 bp, Cannabis sativa
tggaaacctttctcttatacttgccaactaacttttataataaacgtgtttcttgacattttaaagtgttaaacatgttttctaatggtaatttttactaatttatgagctgcaatattaaaattgtggctgccacacaataaataattgtgatttcattaacttcaattcattcagggtcggctctgagagtaggcgagctaggcgtgcgccttgaaccctcaaccgctcagggtctcgaaattgtgaaaaaaaatttattaatatataaataaaatattaaataagaaaaaaatataacaaatattaagaggtcaaaggttctatccctaatctctacttttttatttttttaaaaaaaatatttattatgtgaaggattcaacagctcttatttttttttttaaagctttagtatattaaaattattattttgataataattaaactataaataaagacctcaaaatttaatttgactttaaaccgtatataccttagaactggccctgggtacactgtatggctctcaaagacaaagactaaagagaacaattctaagaaaatctccatgatagatagtcccacatccaacgctctttttaatcccaccgaaaaggttaatgcttctacatggagtttgtcaataaaccatataagatacctctaaataccaatataagagcatctctaatgaagtcaggagcggacccacattaaggctaggtggggcagtgccccctaaaaaaatcgaaaaaaaaatgtttaattattttagttagtcaaaacatataattctaatgaaaagtgataattttagacatgatgcaaactttggcataatggttaaactttatgtcgtaaatatgggaggtatgggatcaaatctcaacaagagcatatttctcttttagtatttttatttttttttt

SEQ ID NO: 7196 - DNA, 696 bp, Cannabis sativa
aacaaacttgaacaaaatgagctatattaatttagcaatagatcactattttgcttcttaggtacatagtaatttctaagcacatccaaagtttgatttacaaaattaattattggaaaaacatcaaattactaaaagcttttaccttacacgttcttcacttttccaatcctcaaaaacacaggatacttgacaacctttttaccatatgatccaccttcatcactttcccatgctcctttaaaatcctcaaccacacgatccaccaaaagctccacgcccttgtccttagctgtttgatatgctgaccatgacttcagatatgtcaaaaactcctccaagttcatcaacttctcactgacaaattgaaacggccccgtttcgttggtcccatccacgggctcaaagggaaaatcaatgtccctgtattcgttctccactaattttcgagctgagtcccagtaaggatgagattcagcgtagaaccgatccaagacttgatccactgaatcgttgacacgtggcagggtatagcaccaagccgcgacgacgccgtttggtttcttgagtacaaaccttacttgctcatagaagtttgggaggtcgagccaatgaagcgcttgggctactgtaaccaaatcgacgcttgattccggtgctactttttcattgacttcagttgtggacatgactggt

SEQ ID NO: 7197 - DNA, 974 bp, Cannabis sativa
aattagagggtatgggccaagataataatttatttgtaactaatcatactttcttttctaattattataaattaaatatatattccatttgccttcaacgaaattctgtcatcaccaagaaaagtgaattttcaagtactattgacttctaatgcagctagctcaaagtgcatgacttgacttgatagttgttaccatttagaatgatagctctcaaagtatcattatgtggtttcacaagtttgtaaacatttagaaagatggttcataaaagtagtgagaactagtcaaaggaaagaaaattagttaatcaaggacatggatcgaaactgaatacctcaagaaccaccacccaatcactttccaattaatcaaaagatcccactgaagctgattaaggatggatgctattgccggtggccattcttgttattagagccaagactagcttagaaccacgtttcatacattggtattaccaaaatatccattttctatttatcaaaattataaattataagttccatcaaatcattttctgttatgttattgcaaagcctccgagtgataggacaagatcaaaagaaggaattcaagaaattatctacgagaggaaataaatattacatgacaattatattgcactctttctttcatcgtgcctctggtcattctgttccgttatttttgtggatttgggttatttttataaagatcaacgttgccattgtagtagtagtaagcaccacattataatcttgaattttttatttatttcatttaccaatattacaagaggaaattacaaaacataatatgagaaaaagctcaaagtgaccacacctgctattgctatatctactgaaaacaaaaacaaaagcacaggatctaaaacagagtgattacaagaaaaagacccaggagaacactaacaattgtgaagagaccaaaaaatcaaccagatatttcaatgg

SEQ ID NO: 7198 - DNA, 817 bp, Cannabis sativa
tctctctctctctctctttgatgaccacccccactcaattcttaccctctctcaccacctccacctccctttctctcgctcctcctctcagcgaacccaccaccaagcttcctcaacctccgtcaatgtgcgtacctaccattaagcctccacctcttccttatttaggtactaattttatttatttattttagatattaaattcaatttactcttatgggttttccatattccataccaacgagtaaataaattcttgtttgatttcgatttgagagtgtgtttgtatgggcgatgttattgttagttcaactttgatttgatttgattgattatttgtgtcaatgttaacgtggatatgtaattgtatttacttgtatgaacttacattaatctaattttcttgttttacagttaggtatctaatttgtgaaaatggaatgagacttttaggttttatattcaagtttcattacatgagggttttttttttagatttaagtttatatatgtatgactatttttatttgaatagaaatcataatttgtagtctctcaaaaatttgagatcatgttgaggctatgctgagatttggttatgtgtttacctggtctaacaaccaagatggggctagcagaatatactcaaagattgaccatgtctttgctaatgaggagttgtttgattcgtttcctaatactaaaaccctatttaggtgggaaataattttagatcactgttcttgtttaatttctacagtagtctctgaaatgatagggttcaaacccttttgatattataatttttgggccaatc

SEQ ID NO: 7199 - DNA, 732 bp, Cannabis sativa
ctaccgtgtcctgtcaattttaaagtaagatattgtactactccgaaaaaaatattttgcagattatgcaccatgccactattcatctagaaaactggacaaaaaaccaaagccatttgaggctgcaaactacaaagttcaccatccttctcttgtagtttatagagtggcatttggagaccccaaaagccaactttggactttgggatccaattttactaatatattattcttctaacgtgtattatatgaaaagtttataaataaatatgaaaacaataataccatctcgagtttttaataattttaataaaattaagggtcaagacttgaatttcaattagttgaaaagcctttcattgtacttggaaatagttaaagctgttgaagattcactgaatcgtagtatcatgaataatgagtcagattcctaccacaacagaaaggaaaaatcaaaaagttctctaaatcatgcccaaactcaatcaaaatcacagtaatcggatatgaattccaaacactaaacttgaatttcacttaccaaataattatgagtattcaattagagaaaaacatatatttaagggattttaagtattttcttcacctgtgaaggcaggcatcaggggatccagcggtgaggttcatccgattaagagcgtgacctcgatcatcagacaactgcttgagttcatcggcaacagcaaggtgaaacagctgcggatgattctg

SEQ ID NO: 7200 - DNA, 644 bp, Cannabis sativa
ggatattttaggggaaaatggaacctttagggttggaggaagagtgattactcctagctgtaactttaaatatgaatttcatggaaatcaatctaatccattttcggaatctcgaatgcaatccacaccaccatctcctctgtcaatgaatcgaaaaggtacgacaagaactcagaaatctacattttatcaccatagaagtaatttcatgatgttttgtagaaatagtcattatgaatttttttttaattattctaaaaaaattattagcaaaataaccatgtttgatcgcactatgcgatcataaaaagaccattatgatcattttgcaaccatttgtgcgactgttaaattcattttagttaatttcgctaattcaaactgatcttttctttggtgtatatgttggaagatagagtttgatgagaggagactcgtttgtttttgcaggaaagaagagtaacaagtctagaactatcatcattgcagttgttccaagtgttgtttttgtgatcttacttgtctccctcggtgtgtactcaagtgtgaaaaagtcaattcgtagaagggatgaaagtaagcctttttgcaagttttcttaggtggtacacaacaccaataatgcagttaatttagaaaccatg

SEQ ID NO: 7201 - DNA, 1470 bp, Cannabis sativa
tgtgatcaggaggatgatgtgtacccagaagattgggaacacaatgatggtgagcattcgtctcttccaacgaataccattatcacagccattggtgatacacagtcacatgacgatgtcttactcattacttttgtcgctacataagtcactctatgttgacaatgctttcttaaaagtttcatttcatgtttccgtagggtcattgaaaaatgttgttaacattgttaacaacattgtcgatccatattgccaattgtataactctatgttgacaatgacccaaatgctttaaaacgaatatattttaaatgaattgaaccagacatcgcagtatgtcagttaagtcagtgctaaagattgtggtttattgttagatatcactaaatctcaaaaaattctaaaaacaattacgaacctagaaaatatcgcttaagtaattcacaacgtagatacacgtttccattgtagcatgttgataacgtcatcgttaaagctcatggtatattgctagatatcactaaagctcaaaatattttgaaagccaattaagaacctagaaaatgtgacaaattcgtaaaacataaaactaatatagacaacaaaaaatccagttcttaaaacatacaacaaatacatacaatgaaaatactagtaaagagaaaatgttcaaaatcgggctttgcatgaagttctgtttgtggctcgaaccgccacgggtttgaacaatggcaaggttccacaactttgtcatcattatatggataaccattagtatgttttcttcctgcattcctcttccttgattgacctacgagttctgagagcacccaatcattacattgtaggtattcttccatgtctcttttgtgtaatcgggggagcttagggtgtgcatgctcacattctgactaatcattgtggcatatgcatggggacaagaaattttcaacaattagaacattctgcatgtgcatgttttctatattgagttgacatcaccacctctctgaccattatgacctctaccaacgccaaataattgcccagcattatgctagacgctcctgaacctaccacctttgtgttgcgctaccaaatcatcctcaaaagtagttgccaaagaggtagtgttttacttgcctttgcgatacacttaatgaaccaactttgtagtgtgaactttatgaattcaaccaatgtaattatcagatattccttaaattcttctatcaagttgttgaggctttttgacaacgttgcttgtcattatgctgtactgatcacctggataataaggaaaagcccacttttcaaattctatactctcaacgtatgcaacaatgacaggatccatctatttatgcaccttaaaatgtctatcacattccctcttcgaccattgagttagattcaagttattaaagtttgaacttccattccggggctgaaattacacgaacttgcacc

SEQ ID NO: 7202 - DNA, 603 bp, Cannabis sativa
tgaaaatattactttcaagatcctttgcctttgaataaaacacttcaagaaagttatttttgtttgtagggatgaatttcagactaatttaactcaccttgaaatgaagaattttagtgaccatatgatgaactaattcgtcttcgatttcatcattcaaataagatattgtcttcatcctttccttcttactcttctgattatcaaatagttttgtcatttttcattttaattttgaaaaactgtagtaaagaatcaaaacaatgtattacctatttcacatttaagcaatttaaagctataacctcattaagaattgatgaaatcattttatgattacttgcattagaagcaatgatcatcaaacctaagttatccataaacaagttggagatttgagtaccaatttttccaaagcaaattcaaaaagatatttgaaaaagtacaatattattctgagatttttgtcatcatcatttccatcaaattgttaaaattaacgttatttttttcttggattcaataaaagtttatctcaaaatgaaaaatttcaatcatcatgcgatgaactaaatctttatcgatttcatcattcatgattac

SEQ ID NO: 7203 - DNA, 724 bp, Cannabis sativa
ttctctaataaaatggatgccttgtccgatacttctacttttgatttcttcaaaaattgtaatgagtcaaagagagagagacccttcccttcctattccactcaagtcaagtcaagtatagtgagagagtagtctcttcacttcactcactcttaaattaaaatcaattaaagaaaatgcagaggaagaaggccaactcttctcattcttcttcttcttcaaacccactttcagagatggaaatggaaatggagaatcttcatttcaaaccaggttcaacagtagaggtctgtactgaagaagatggctttctcaacgcatggttcccggccaccgttctccgacaacccacctctcctttctctaactctcacatcaagaagaagaccaagcgttattccaaaactacccaaaactcaaaactcgtcgttaaatatctctacatgcttgaagatgacaacgataaccttcttgttgaaaaagttgactcctttttagtcagaccaaatcctcctcctgatacagaccctgataagccctttgatctatacgaagccgttgatgctttccacgacgaaatctggtggactggagtcgtcgttaatgtcagaggtgatgattatacagttcgattcatctacccacctgatattctcttgtgtaaaaggtctcagctccgacctcattgggattgggttgatcagaaatgggttcgaggcaaaaa

SEQ ID NO: 7204 - DNA, 1087 bp, Cannabis sativa
atttttattcttatctcttcacctttgcaaatcaattatatatgtatatgtatgttagataactagcgtgttgtttttttctccaccacttattaatatattcttattctatggtaaggtgatcacgaagtaaataatcatatataatatgtatgagtattttctaattctacctcgattatatcttccaaatttcttagagtactctaataatttattttattttattttttaaaatattttactatttttttttattttaccttataaatttatattaaattatacatgaatttgtttataattttttctaaactatttaaataatatatttataatacacacaaataataaatattatatattacataatatttatttatttttttttacacttacaattaaacaaaatatattataaaaataataaaaaattataactaagcactaaaatcaagagaacttttagccacatttaactaagcactattcataagaaaaaattttgatctattttagttcatctattaaatgtgtttttgattttttttttttttaactcttagctatttttttaacttttatagccattttacattagctattgtgagtgctaagattaattaatcaaaggattggtcattaaactattaaaaagtttaattttgataactaaaaaattaattcattaaagttttaataatccctcaacgcttctttagttaattttcctaattttaaggtatcatctctcaattatgtgatgacataaaaaaaaaagtgcttcaacaatttttttgctgacattttttttttaaattaaactcccatatatatatttatatattatttatttttttttaaaaaaaaaaagataaatactattttttgatcttgtttcttgtaaaagctaatgaacaatttttctattttaataaataataatttactctatattttgataaaaaaaaataacaataataccccaaatcttattggtcaaactctatcaatgttaggattattatatttgtaatccaaccataatagaattaagaaatacttaggtagagaaagtttcaaggtt

SEQ ID NO: 7205 - DNA, 586 bp, Cannabis sativa
ttttgtcttatgtttttgttttttacaagaaagaaaaactcaagtctcattctctctctctcatgatatggataaccgaattaactaacttttaaatttacgtttcactctcaaccattggctttaattagacttaaggctttaattaggttgtttgaccaggccatcatctctttcaattaattgattttttttttcattttcatttttcttatgaaagaatgattaaaaaaaaatagttaaatatgataatataataaatttataattttttttttttgtgaattttttatgtaggtatatatttttttttggacatttaatggaaatgttttaataaaattatttgacctcatttataagtgacaaacaaattagtataaatgcataacacgagtaataagtataaatttggttagcaaaataataataataattttttttatcaatgagcaaaaattaaaagatttgaaaataataatgctgtctaataagagtgttactgtaccgtcaacattttattacaattttttagtcaacttttgtattttttttttttaaggggaaataccatgttattataaat

SEQ ID NO: 7206 - DNA, 732 bp, Cannabis sativa
tccttagtgaactcttccagtagcatggcattatcattgaaagataaccggtttggaacacaccgatggagagtttccatcatatttggtctacgatttggtgctgaaaaaaggtttgaaaaataacgtacaactatgtcctccatctcaatgtcctccttacaccatctcatttgttcatcaaataggccacttattgtgttcttcttttttcgctgggaagccttgtgatggaaatatttggtgttacgatccccatgagaaagccaaagtgcccgacttctttgtttccataaaatctcttgtttctcctccgccacattaaggtctctttcaatccttcttcggagtttccaatctatctctccatcggatgaagagataatctttaattcctccttaagtttttttgttttagccccaagttccgccttcttatccttattccaatccttaagaatctcaccacaacgattgattctctccctaagcccttgaggagatccccaattggaaccatcaaaccaaatagcctctatgatttttccacattcctcttcttcggcccatgcttgttcatagtggaaccgagacctccactttggcgtagtcttagagagatttttgttactgctgaaagtaaggattaaagggcgatgatccgagttccaccaaggtaggagggagactttcgacacattaaaccttttgttccaattcgggttagccaaa

SEQ ID NO: 7207 - DNA, 707 bp, Cannabis sativa
ctagttatattttctatatatgtcggtcagaaattaactttcaattagttatgttaaaataataataaaaattgacttcaaagtaagagttcaatccctaaaacaaactatataagttaaattattttaaaaaaatataaattaatttataatttaacataattgagagtaattaataattttagcaaaacactaaatccaaaggcctttaagaaaaaaatgtagtgaaatgtgtaacgttgtattatggagtaactatattatttaaatcactgaaaatcatagtcaaacttgtggaagtaactgcaatattctaccaataccaaagtggagacattactaaccttttatgacaaagacttcttcttagagtaatgtcaaacaaaatgcgttttacattggtgttattcacttttttttttcttctttttcttttggtgtgtgaaacaaatccacatgtaattaacctactttttaattggtcaacattatcctttttgtggttgttttcatagaaatagactcctcgtcaaaaacttgcagccacacaagtctttcgacctatcatgagatgatatacaaaaataactaatcaaactaacacgtttaaggggttatactaccacaaaacaattttatgatagtagtattattaattgttaggtatgtggtgaatgaacaccctcaaaccacacctgttacaacag

SEQ ID NO: 7208 - DNA, 991 bp, Cannabis sativa
aaaaccaagtgcttaaaaaaacaatattacgtacatcattgtgggtatcattttagtgtatatataatttctcaaaatatcaaaaataaattctcatttacccaaataaaaataataccttattatatattttttttaatatattcattaaaacataatttaaaaaattttcaataatttataataccgaaaataaaattttaacagttatttacacgcatatgaaatagaagatagtcattcaataaatatttaaaccttattttttcagcattctataaggtattcaaaattttttgaaaatttaaagataatcctaagtaactacaatatatataatatgaaataaaattttggacaaaaaagttctcctacataccgaaacaaataataacgggtgtaccgaaaacactttttttagtgggtgtacaataattactaattaaattgaattagattagaagaaaaatattagattaaatcagatacgcacctctatgtcaaagcacaacacggataatttgagcttatggccgagtggaccttaaatttaaaatatgagcacgacataacacgaaccatataattatacggatcgggctgaccttaatctatatttgaaatagactttttaaaatatgggtcggatcgggctacccgtatgtacaactcaatatctatctaattacaattcaatttagacattgatatgttgatttgtcaatttcacaaagaccacaaaaaccagaagtgaaggcaatggggccaatatcttaagcattgattgactcctccaaatggctcaattccaacataatataattctgtttaaagtagtagtagagaagaagaaaaatcctcatcctaattatgattctatttctgtcatacacctttaataattcatctccatatcattctattttatgttcaatttctcattgatcgattccattcctacgtcgacatggtatgtggctcatataaaaac

SEQ ID NO: 7209 - DNA, 828 bp, Cannabis sativa
ttttatttgttgaactttaaaagttctttaaattttatctaaaattgttttaaaaaatttatattgttgctaaacaagtattttgaaagagccaactttttagaaagttatgtgtctcgagggaggtacagggtataaaagtattcgtgatgttaaaggccacagttactcttgataatattttctacatatggctagattggtagaagtggtaaaatcattcttctctccgggttggacttcccttcaagtcacaaagaaagttaatctcatgaggagttaggacaagccaatttctcagtcagtaaaagataaagaaggtggcaagaattctatagctatttggatttatctggtaagggtagactcaaaagaaattagctatggaaatgaaccatggatgcaagggcaaataagcacccgcattcatatggaatctcgaccaagcactatagtaagtgttctgggagccagtggaaccatcatatcgtggccttcaaaccacagttttagaaagacattaatcatctcgtattaattgagcttgatgttcagtaggactgctaaacacaagaggtcttagcttgaaagctcgatctttcagatcatcactctaattggcggctttaagaagctcagttgccataactttccaccatgtgccttgtctaagtacttagagttaggaacaattagcttagctctaatgaactaagccacatgggagtcatattcattaggaaaccttctacttctcttaatcctagccataaaagctcaacaatacaagttatttacagcccaagaaatgtctaattaggttgtgaa

SEQ ID NO: 7210 - DNA, 621 bp, Cannabis sativa
  modified_base (274)..(277): a, c, t, g, unknown or other
cattcaaaatacacctaatactatgtactatcccctaaaaagattgtgtgcatgtatttgatttggttaagaaagagaaattttatgtgacatgtctatcaaaattgtgtctagttagtatataatttgtctttatagaaaagggttataccataactttttttttttcaaaattcaaacaaaattttagtacactatgatattaagagggagtgccaaatttgttgttggaaaaattaataagaattctttaaaatatatacatatatatatnnnnaaatatatatatataaaaaaaacgtgagagcttgattgtttgtttagcctttttcttatgagagattaaattacaaaacaaactttgaataaaaatcctaataaaaatagtattgttattaagtatttaaggtgctcaatactatattaatatgatgtgttatgaatgattagcggtttcctatattatttattaaattaaaatatgagaaaaataaaaaaaattgggtaaaaattcaatcttgagaaataaaaatatatttataataataataattttggtttatttaagagaatttaatatattgcaaggaaaagttacaacttaagctaaccaaagcacta

SEQ ID NO: 7211 - DNA, 1148 bp, Cannabis sativa
attgtgggcatagatcaagatctcaatttattaggatctatactacactatcaaatggccaacagattgcaaaaccatgtcgttgacatcttggtaccaaaaagtttaaatgcactagtcatagatgttggtacaaatcacgtacaaaaatactcaaggccaattaataaagtagctgtattttttaataccagagcatcatatataattatgaaccctcgatatcttgctacaaaaattgtggacaagaagaaataatatttccaagatgcaaataaccaagtattatgcaccatcagtaagtcgataaagctataattcttcctataggatgtttcattctccacagtgtcatttgatcaaagcttcctggaaatgacttcatagttggatttgacatttacacaaaaaaaaaagggcttagaatactcccacaagggttggcctataagcagttcttcacccattaggagaaaatcatcaattactttcacatgacgcaagacgtattttcattagtaaaaaaaaattgctaatacaaaggtcatgtgtaaattctcactcaaaattctcaacgaagtgcgatcatccattatggaagaatgaagaattcaacatctctctactatttgattgtaatagtataattattaaatatctaaaaattccttagttatatggagaaggtataatcttgtaagaatgtacaaaagaattaagattatatgatatgaatcggatcagatactcggatcggatcagatctgacccattggggattgggatatttcaaatatggagtgcatttttgataatgatagtgtccaagatattcttaaaggtggtatgccaaatggtgagaatggtgatgattggtcccggtgtaaagagaagaatggtaggttctctaccaaatctgcttgtctttacaaaccttgaatagaactccaaactgtgttgtggctccttctctttgggttgtggaactctaagatcctcgaagacgtagtgttgtggtggtgtatcctttcgaatgctcttcctgtaagggtgattatggctagatgggtccaattagaggatgatttatgccctcttgtggcatgaggagcgaaatcttggaacgccttctcttaacctgtgacttg

SEQ ID NO: 7212 - DNA, 601 bp, Cannabis sativa
ataccatacaattgattctcatttttaatatatcttttaaagagtaacaagttactttatactatatttttttcatatttttaaatgttctcataatttttttttttttaaaaaaaaagccatattgttacaaatttgtaccttaaaacccataaaataaaaattgcactcaatgtaattgcccaaggttcagaattagagggcttctacctgctagactgggtccatttgaacttaaaatcattaataatatatattttataattaaatatttaatactttcaacacaagtgagattattttctaattaattaaatagaactttaatatatatatatacaaatttatattatccatatatttgatggtacatgttttacatgcagaatattccattgctgaaatatatataggttgctatatatttttagcaaagtatatatccacaacttgatacaaaagtaggtaataattaaaaaagggtcatcactaataaaaaaaacagtgtgttctttaatttacttcacatcatcaccattattttataccaatcttcattcataaaaagtataatattcatcacaacaatcatatatatata

SEQ ID NO: 7213 - DNA, 556 bp, Cannabis sativa
gactttactagtatggaattgatccgcaatgttaagattttaaccgtaagctgatacaaccacttgggtagaactcactcccaaaagctagcttgaaagaggagtgtgcccgagtagttatattcctctaaccaatttcatacttggtcaatgtgggatcctaataatacaccctctttggagccaacgtcctcagtggctcactcttcgatggtctattctgagcctaatctataggttaccccttctgtgatgttggtctcgcttgagggagcatgactctgatactacttgatacaactatttgggtaaaactcactcacgaaagctaaccgaagagaaaaagctacccaagtaattatatactattaatcgatctcatgcatgcgagatcctaacataaacatgtttacttttattcattattcataataggatataggaacaacctgaggtattctggattttacataaaactgaatgaaattagatgctcgttttacagtgaaacaagattattcttacgacatctgtttttaggtattgattcatcatt

SEQ ID NO: 7214 - DNA, 663 bp, Cannabis sativa
atccacataagaccttaacgacctaattgatctctcccataagacccaatcgaacatcgatcgaagatcataactttaaagtttagctaacaacatcgatttcaaaatatcaaattttataggtaagtgaaacaattattctaatagtgtaatatatattcatagaaataaaatggacaatcaaccctatccacaagtcctattatcacaggtgagccctatatatgtgccttccatatatatggctcacctataacagttacctagggacttggagtaacttagtgagttacagttaatctaattaatcacttcacaatgccaactcattgtgttggtacattttctgctcttctaatttagtaaagccttttatgatctattacctagtgtggtcccattcgacctttcccacaagacatcttagacatgttatggcaactagtaaccagacaatccacataagatcttaacgacctaattgatctcccccataagagccaatagaacatcaattgaagattctaactttaaactttagctaacaacatcgatgatttcaaagtatcgtattttatgagaaagtaaaatagatattccaacagtgtaatatatattcataggaacaaaatgggcaaccaacctaatgaagagattgtggta

SEQ ID NO: 7215 - DNA, 783 bp, Cannabis sativa
tggtaaaccccttaaataaaaatagattattttatgtttgtggtgtgttggaaataatctaatttttttatatgtatataaatgtttattatagctatttatgatattctgtaaattttttcttaaaaaagttatagtataaataataaaattcaaatgttttacaacgtgtatgttttctatatgcacgtagttaaacaaattatttaaattatatttttaacatgataaattatcaaaaaaatttgcaaagtgtcttaaacatttacaataaatacttttgtatgaataaaataaaattataattatttggaatcgaaaacacaagaaaatagcaattacacttattttagaaagtccactatatcagaaaatccataatatatataaattaagacaggttagacttgtgtctggagcctaccccattttattcttataataaaggcctaatttttttttcttaaaatctatttcaacttaggatcggacttatatattattcaaaactcatcatctccttcatagcaaaatatagaataataataaaaatagaaaattaaaagattagcaagtaacttactaatgttacggacagaagttttgacagtgtaaccgcgttgtaataagagtttgattagatatgatgctatgtaacctgatcctcctgttacacacaccactttatcattctttgctctactcatctttctttatgaattttattattggtccaaaaatatttacttgcaattaatatctatgtaagaatgtatatatata

SEQ ID NO: 7216 - DNA, 1684 bp, Cannabis sativa
gtgttgggaaccgggaacattaacttagcccgggaaggtgcctgctatttactagcttctacccgaagagccctctcggcagcgacttgagccttaatataagccaactcttgttccctcctaaagaggtacttcttgtaccgatctttcgcggaggcgataatgtccgtctgaagtgccttctcagagtctggactacgaattttgggaaaagaaccttggacaagttgaaatcatccactgattggctttttgtgattagctgagccctcctgcagtttgcagttgtgactaagtcccccacattcagcccgtccttggcatgcatcggaggaaccctaacccactccgtgagtagttctgggcattctacggcttggaaatcggaagaaaagaaaaaccggtgacgatactcctttacattattttgaaaattaaaaggaactggacctgcattagcagaatgggtccggagtgtgaaaaaaccatctttaagtctatcccccttcttggggacagacacgagttcataaaagtataaaatttcggtcaggctaggtgaagcccagcctctggctacatagaaaataaacaagcctgaaagcaggcggtatgcttggggaataagttgataaggtgtaaggccaacaaaaactaaaaagtttataaagtaatcctaaagtggtagcattgctccaaacataaggtgagtctggctccaagctccaaaaccaccgtagtctcctcatctctgggcaagcagtggaagaccccagaggtaaaaggcttgatcctggccacagtcacgatcttctccaacagatgggcacaggtcaaggttgagtgaagctcatccgcctcccaacagttggatcaacacgtgtacttctcctggatgacgggtcctttcatcacttcttccagggtggccagggtaactgctcttttgttggaggatttggctccggatgtagagacaaagatttcttgaaggataatgagattctgaaaaaggaaaatatagcagttagcccccaaaccaaatcctaatatgaagagagggaatgggtgtccctaaccgcaggaaagaggccccctctggattttcgccaaaaattgaaattccagggattcccctaggcaaacatcgggtgcaaatatctcaaaagcagcgaaagcagatgaaaagtaaaggaaaaataaaagaaatagaacatgggtatgaaaaccctctcatatcctggacggtccctcagcagatgggttaattgcaaaacggaagagaaagaaagtggcagaattcaaatagaagaaaagagaaatatatacaccatacgaaagtctttgccaaaatcatttcccagaaatcaagaacttaaccaaaagctctaccctaatatgcaagtgaataacgaaagtataaggtacttagaaaatttacacaaaggttgtgaactggaagttgatgacgatcgtcagtagaacgcagattggcaacgatgaagaaatagcagtaaaaaatctatggtttctgtaattttcctcgaaggagttcttgggggaaaatggcgaagtggtgaaagtaacccagtgaagggaaaaggctgtcttttatagaccaaaaagggtgcgaggcagctgtgatcagacgacatcgtatggtaggaatcgtaatcgattcgta

SEQ ID NO: 7217 - DNA, 504 bp, Cannabis sativa
tccaaactctatatgatattgtctttaagattattttgtccttaaaaattcttttgaactatttataatgtttaatgctgatgtggttgatgtatcataaaattaaagcaccacatgtatatataattcaaataataaaaactaatttcaaatttaaaaaattaattttcttattaacaattaataatatcttaaaattagtttattttttttattcatagttaataagaaaataaatttttaaaatttaaattttactttatagaaatgacacattagctacatcaacattttgttagacacatagaataaaactcaacaaaagtcctatatatctttcggcattatgaatagtttaggaaaaaattttaaccaataaaataattggaaagcgcaaagccggatgaaagcttgaacctactacccaacctaaaacttggtaaatctagtgctataatgagtgagttcgatataaaaaattgatggtagaattttattttattt

SEQ ID NO: 7218 - DNA, 500 bp, Cannabis sativa
aattaggcgaggaagatacatgggtatagtttcggaagctcacaacgtcaaggttttaggtaatattgccaatggtcaacaaatcatagtcctcggccatggattcggtacggaccaatcagtatggaagcacctcgttcctcacctcgtcgatgagaacaaagtggtcttgtacgacaacatgggagctggaacgacaaaccccgattatttcgatttcgaaagatacgctactctcgagggttatgcttatgaccttatttctatattagaagagatccaaatccagtcttgcatcttcgtcggccactccgtctcaggaatgatcgcccttatcgcctccattactcgcccagaccttttctccaaaatcctcatgatcgcctcctctccaaggtactgttcaataataataattaacaaaaattcttttttcatttttaattaatttttttaaatagaaattctattatattattataggtatttgaatgatgtgg

SEQ ID NO: 7219 - DNA, 1486 bp, Cannabis sativa
aggaaaacgacgccgagcaattgaaacgcaacttcgatacaaaaacggcgtcgtgtaacatgaaaggcaagatggaaaaaaaggtttgtggcatgcggattagctactcgtatatatcagagccaggtttcgatcctgggacctgtgggttatgggcccaccacgcttccgctgcgccactctgatttggtgatactaatagttaccataatatatatatttaataaacgtgaagtgtgagacactaaatgtacttttatatgttcgctctttattttttttcttttttctaatgtttattttattaaattcaacttaataatattaataattattaaaattacttaaaatacgtaattttattctctttaatatcttttttttaaaaaaaaaattattagttaataaattaatatccaaccatataccttcaatatttcatctttcttagcaaaaaaaaaaatatattgggttgatgggatacataatattcccaacacattacagaatagatataatgaggtaaaccgaaaagaaaagaaagggatcagtgtacagaatttcattttgtcttgagctgtttttcaagttacattagctttgcaattggaagacaacaaagtattctgattgataatttggtgaacattttcaactagagtgagaaaacaagtcttatctaaacgaaaagctccacaactatggagatgaacactaccagagaagcaaaacataacagttagcttcagttcataatttatttacagtctatcatacactgttctacaagtgcttgctgaggatggattcgacaacaccttgtgcaataggatgataacaatcgcgagcctctgcaaacacccttttcgcgaaaatcttctcttcttccttcccgttcccttgaacgagcgcagtgtagagtggacgaaggtatttcatcctcccaacttctttgagagttttctccacctcgccgtagtagtctctgcacttggcggtaatggctagctgcagaaaccccaccttcacctcgtaatcttttgattctgagagcctgtagcgctggtccaaagctatgatctgcaaatccaaaccaattataatgataagctaaccgaaaaggataatcaggtcagtaaaaggcaaagaagaaatgatacagtacctgtgaagcttcaacagattttggcaagttttccaagtatagctcccactcttgtcctctccaatcagcaacttcatcctccctcggcatcctaccaaggttgaattcgttcgcaagagtgacaatctgtgtgtataagctggataccggttcatatgcatctggtgggataccggtaccctctgtccacaaaactaagtcaacatctttctctatgccagggatgttagctttcagaaagtcaaggaaggtatcggtatcaatcgactggaacttgaacgttgcaatatatttcttcagaaactcgtcgaatgcaggcct

SEQ ID NO: 7220 - DNA, 1080 bp, Cannabis sativa
tataaatctttctcagaattccaatagctactacagaaaaatgtaccaacagacactccttggcaccacatccctctcttgcaaggcatcgtgctccaaatttgaaatgcatccttggaaaactttgaatccatggcaaataccgcatcacttgttcgacaagtctcagtaagatcttctctcacacacctaacttcatcaacttcaggctcctcggggttattagtgacaacaaaacccaccgctctgtaacccattggcggatttggcaaccaaaaaaaaccacaaccatcattatgggaatctgcattccagattaaggaatagttaacaggcttttccagggccggtaagcttgattccgagtgttgtggcttaggagtagcagcagcttctcgagccacaagaacgtagcctctcaatggcttgttgctgggctggcagtagtgaccaagacagaaaaatccttcaggaatgttcacaggcttgtaaaatgaaaccccatttgctttcccatttagactagtaacgctctcaaacttggtgacttttgcaacttcaatttctccaagagatactcttccggttccaaagccttggcctaagcacaaatcagtatagacattcttagaaaactgattaccagtgcaaacttattgacacctgaataattttctactatgttttatttatctattttttttttttgttgtggactataacacttttacttaaatatcctattatccaaatcaataaagaaacacaaataacttgatgatatcttcttttattttaagaaaaaaaaaagttggaaatatcagatcataaaagtcttttctttttcatttgctgaaatctttcaaaatccgtgcaaaatttcgaaatccaatgattaccatgtgcataaaattcgattaaagtgtatgccttcagtccaactttgagtctttgactagtagtacaaagatgacaactaaataatcattattattttctaaaagtatataatacaaagttttgtgcttaaaacttggaatacctcaaaaatctcttatcacattcttaatcaacgatgcc

SEQ ID NO: 7221 - DNA, 1592 bp, Cannabis sativa
acaggaacctgaagataagtaggctcgcatataaaaggaaataatgtgtcatttaatgcatcttaaaaaatacccatatatgatccagaatttaagtcttgtcttaggccttaagggtaagacaaaaatattgatcataagaatggtaagtaagcaaggcctaagacctacacaataacctgctcgtgaaaaactgaatgtgagacatgagttccaataactcatggtaaatgagatccaatgagaagaggaagaccaagctgattctgaggtggaatgatttcatctcaagaagtacaagaaatacaattaaaaatgcttacttacgaggagaggactctatcagttgaacctcacttcttcagcaaccagcaagaaggaccaattcatccatgttatttgcgagaagcttaagtactgaacagaaagatggctcagacaataatcgtttaaagataagatcaaaagtagcagttattaaatgtattattcaattttagacagttactcattgttaatcccacgtgttaaaataacatgaaacgtggggaatgtccactttcatgaattgtcattaagataagatcagaaagaataactaccatggttgatccctataaatagtgaaagaaatcattgtaaagggatggtcaattccttccttacaaaaaaaaaatatacggtaagttgtatcttgtaaacagaaaactcaaaaataagagtgacttatggagtatgtagattttaactgcaaaatcatgtaaaaattcattttctttatatatacacaattaatttccttactttattttattatagattcattaattgtctagagcctcatatatgttaacaaaattctgagttaacacatatattactacaatcataggtcaaacctataatggtatatataaccttttatttaacctaataaaataaagataaataatcatttatttaaatttaaattcaaaatataactgttcctaactgaattagctatatctttattgcgagcagctaggtcgcttggtttctcagtcactgttctggtatttacccagtttgtagatgacaaaaatggtagaaacattctttaactctcaatgaaagtaccgaaatatttaccgagtttttcaaaaactaatttagtaaatgaataagttgaagaaaataagatcaaaaatagaaagataagaatttttacgagattgagttgttaattaaccttagtctgagagtcaatattgttattcctaaagctagagtatttttctgacaagccttgccaaaatttctaaccctttgcatgaagggaaaatatcatatttataggctcctagtctaatggatcgagctactctagacccattagggtttgtaaatggaaataatcccacttgtggggtaaaaaacattgatatattaacattgggtcgatttagggaggcccacgtttggggacaaccgtcatccatacacgggtttggttgatagtgataggtggggcgtgagccatcagtttgttggagaatatcagagtagtgggtgttggacaaaaaaggttatctgttttttttttttttttt

SEQ ID NO: 7222 - DNA, 1253 bp, Cannabis sativa
ttttaatatcaaatcttcttaactataaattaaaaataaagtaaaaccttaatggtctaattatttttcaccatctcataaaggtatatacccaatgaccgtttgtgtgtgcagtagaagtgcagattattatacataccaccagcttatatgaattttgaaaacaaattattctcactttatccaatttctatctttatatggccccaaaagttgaagtttttaattaatgcattattcaaactaaatgaacaaataattaaaataaagtgtaataattggactaagagaaattctttccctagatgttatagcttcgtatgtaaatatatataatttggttatttttttttttaaagttattttgaaaaatgactttatataattatatatatagggatatgattttgtcccgttattttactttcacggattgtaatccgtgatgtacggcagccgttagatgagtgagttatttgatctgacggttgagattgaataaggggtaattagagttaaaaagtagaaacgtaccttgatactcatttaatgtaccctaagacccatttaatataccatggaatacattccgcgaaagtaatcagataacaaaatcataatatataattaacaaattagtatccaattcgtgtaacaatgtgtggagtatgttgataaaatattaactatgttcaccactttgaaaagcattcttgagaaaaaactatttcacatagtaactttttaaaaataaatgttatcactctcattttaaaacttggccatcatgtctttaaattttgtaaatatttgtaattaaatctctactatatatgtacttttttttatcttcacgaaattcttagtttttgacttaaaacattttttgagatatgttttataaaatatgagtgtaaaaggatttagagttgtttaaaacttagagtttttgttaagaaattggttgatagaaaaaaaattctcatggaaaaaatagtcaactagggacatttatgagctaaaaatcatctaaaaatactatgaaaaataattgggacatatttaaattacacattttttacgcacaatgataagtaattaatctcaactatacaactaaaagtattataatcccactcaaaaatataaagggctaatatttattacatttaataagaatgtatagctagatgcagatatatatatatatatgtataatggtgagaatggctccatttatttcattgttgtaa

SEQ ID NO: 7223 - DNA, 567 bp, Cannabis sativa
ttttcacagctttgcttggtatgcctattcagccatgtcatgaacaatacttgggattaccttcttttgctggtagagataaaaagaaactatttggaggaataacagataaaatttggaagctcttgagttcatggaaagaacatttgttttctgctggtggtaaggaagttttgcttaaagcagtggtacaagcaatacccacttatgctatgagttgctttagattacctgtcactttgtgtcaccaaattgaaagtatgatggcaaatttctggtggggatcctctgcttctgggaagtccattcattggaaaaattggaattttctatgcaaggctaaggttcaaggaggtttgggctttcgtaacttcattcactttaatcaagcactcttggcaaagcaagcatggcgcatcattgagtttcctaatttgcttttaagcaagcttctaagacacagatacttctccaatggtaactttatctcctctggtttgggatccaatccatctttaacatggagaagcctgttttggggtaaagaattgttgttaaagggtcttc

SEQ ID NO: 7224 - DNA, 722 bp, Cannabis sativa
ccttcttacgtctcccttttgtcggaccatcacttctgcctgggttgaacggctgaatctccacatcacgcccattactatcctttagcttgtcgatttcaggggcagtagtcacattagtctctacaggggatcgactttcatcttcaaacagtgaatcaaggaattttttagggatgggctgataccaagtatgggctttccttttcttggaccccaaaaggtgtatgatcatcttagatacatttggtgggtttgagattaaagaaggttgggctttgtacatgtttgtatagtccggccctaataactcacagtaaagcttttggagattagggtcatttgagggccatttgaaattagtgggctctgggaaatgatgagccacttgagatttacaagcccaaatgttagggatgtccagacactgaattaaagaaggcccaacatcaggtaattcccccatttcctcccttggccccacgtgagcaaaatcaggggtaggtagctcagatagaattttttgggggggaatattcaaatattcaccacgtgcagtactaacttccacccctgggaccacttgcattcccacattctgggccacgtcatccaatttcgtactccacggacgtccaccaccatgcacagtaccatgcatagtaccatgcaacgtgccaaccgatgtaccttctccagctatcgccggtcgttcagccaca

SEQ ID NO: 7225 - DNA, 1580 bp, Cannabis sativa
  modified_base (784)..(800): a, c, t, g, unknown or other
cacccctgtttgccatggattttgttgtgcctcgtccttggtgttttcaatctatttcaaaaaaactacaagtacagtaaaccaccggtatgtgtgtgaaactattacataatagctggtattttaataaccaacaataattccctaaacaatttaataattgctgagatgtaatttattctaagaaatatggagtaaatgttggttgttgtattgaattttaagatactatgtgattgccatatatttattttagaaacatatcaaaattgttacaaaataagctaagtgtataaacttattacttaataacttataaaattggctgatatattaaatttcgtttaagttgagagtttgattatttttgttaactagatacatagaaaagaaacttaaaaattactctttcgagtcatttgtttctgtagcggcaaaaaaatatatgcttcccatatattaaaatgatcatcataaaaaatagattacaatggtataatttttgagtcaaattaataaatagtttagtttaaaaaactttttaaaattttgaaaaagaaaaaaatacacatatataatgtgttgtcacctctacaccacaaaaaaaaaaaaaaaatgattttagctactagctaggaggaaaaaaaaaagagtaaaagaaaaagcataaaatgaggcaataaaaatatttttaatttcaatatacatttcaaaactaatacaaaaatatgttggtatttgaggtaataaaatgagtagagacaaaaatgtgctggcaaaagtnnnnnnnnnnnnnnnnncccctttctactaattgtgagctccctccttcaatatgcatctctctttcttgtttctctcggctaaacgtggttgagccaccttcggcgatggtggaccgaggtgatgtaaccattattacattcctctttatttatatataaattttatttctaacttcatgtttacgtgtcatatgtttatattggccgcttgaaatatgggcataacaatgcccaccctaaatttaaatcttggatccgctatcaattcaatctaattcaattcaatcttaataatctaatccgattcaattcaaccctcaaactctataattaatagatttttatttatttatttatttattttgtgtgttttggcttttccaatttatatccattgatgatgatgataaatgcaatggacctctataactaggacagcattgccagctactatatacatgagaaacacattcatgtgcatgatctgttgagttaaagttaaccaagtttggaaggttagtaaattatgttaactaagatgtttggttaattaggtggagaattttgattggttgaaaactactataaatatataggagttgtagctccataggtgtttctcataattatctttcttccaaattatatatccaagacttggcaaggcttcgattctacacatccacaaggtatatagtatatttataataaatatagaagactaattgattttcaattaagtaaatcttttgttttgtttctttttcttgctatcatatttatatgatgttattt

SEQ ID NO: 7226 - DNA, 679 bp, Cannabis sativa
atattaggatggtgattggtgaattccttttatattaattttaaaatctaaaacattttagtgatttgtaaaaataatctttataaaaataacaaataactttacacaaaaaattttattagtaaattagcaaaataatattgtatagtcgcaaaaacgactatgaattatactgtgcaatcataaaagactattatggtcacaaaacgaccatatatttacactatgtgaccattatgatcgcatagaataaattaaatgagattgttttgcaaattttagtattttacattgttagttttataaatttaacctatttgtttcagttcctaggaaaacattttagtataattttttatgatcttgtatgttatagttatttagaatcaattataaattaaaaaattctaaatagtttacaatgtcgaaaataagatttacatattgtgttgtactagtgttcaatcttatacgagtggtaagtaattgttaaatcttatttttaatattgtaaactattcaaaaaaaaaattaaatttataactgctctaaaataagtgcaatatgcgcgattataaaaaaacttaaattaaaaaagtttttttgaatgacgaaatagatagaaaatttattaaaacaacccattaagagtcttctaaaaaatttccaaaacaaatta

SEQ ID NO: 7227 - DNA, 870 bp, Cannabis sativa
taagaggctgacctgaagtgagggacagtttggtgttggcacacatgggtgtcgattgaggcttggcttctgtcatattggtcttgttgagtagatccctgatatacttttgttgagttaaatgatatttagtgccatttttgaaagcctcaaaccccaaaaaatagttcactgacccgagcttcttgagatcaaattgctggtgcaaactattaatgatgctttgaacttgcttggaatcatgacctgcaatcaatatgtcatctacataaaccaaaagcatgattaatttgccatttttgttgttgtaaaagagactgttatcagctttggagtgctgaaaaccttgctgcaatagaaagtgtttcagctgttcaaaccaggttcttggagcctgcttcagaccatatatagctttatttaatttgcacacataatcgggatgttcttcatctacaaacccttgcggttgaaccatctaaacatcttctgtgagttccccatttagaaattcattgttgatatccacttgctgaatgtcccaattgaaatgagctgcaagtgtaaataaaatccgaattgtacatggcttcacaacaggactataagtctcaaaaaagtcaattctatgagtttgttggaaacccctagcaaccaatcttgctttgtgaatgttcacggatccatctgcattatactttattctaaaaagccatctattagtgacaattgtcatatctggtgtagggggaacaagtttccaagttttcttgtttttgagggctatgtactcattgttcattgctttattccacttaggattagccaatgcttctttgactgtggtaggttctttttcagttcttaaat

SEQ ID NO: 7228 - DNA, 715 bp, Cannabis sativa
gtccctgtcaccaagcatataattatagtgagactaataaatctggtgcactgataaatagtgagactaaatatttttgaagcatataattataatttttttccactatgatgatattactataattgtgaataactatatattcggaatttaataaaacttatatattaaatatataattatgaaatatatatgtgaaaaaacatatgataaagttaagatatgatttcagatcttaccaataggaaataacattacattgaaactgaattatatttagggaataaaatctcaacacccataacacttgtggtagttcatcaacccaccttcctttcactgggtcgagtttctttttaatagaatcttttagaattttatttactgccgctacttggccattttcgtgtggatgaaccactgatgagaaactttcaataattgtttttctcttgcaaaactcagtaaataagtcactatgaaattgagtctcatcgtttgatactatcttcatgagaattctgaatcgaaaaattatatttttcactacaaagtctaagaacttctttgaagtgattgaaatgagatacttgaatttagtccattttgtaaagaaattggcagcaaccactgcatatttggctcctccttttacgatgggcaatgaaccaatgaggtcaaatccccatgttgaaaatggataaagggatgccat

SEQ ID NO: 7229 - DNA, 1229 bp, Cannabis sativa
cacatcagtgaaaattcagtgcactatgaatggacaaagcacgtgaaaattaattgccattttatctgagaaaaagttcagcaagaatccatccaacttctccgtgtttcttcacaaaagaatttagctgacatttttactaagcccttactgccaactcccttctccaatattgtatccaagatggatgtattaaacatctacactccattttaaggggattattaggcttagactattatttctgtttttactgttagttatttctgttaagttgttaagtaaggttagttaggttgttagcttgttagttagaagctcactgtttgtatcacgcctatataaagactgttctgtactaagattattttcagattaatgagagtttttctttctattctccaactctgttttatatttgatatatgtgcctcgtcccatcccaccaaattttatataataaatacagaaaaatactgagcttataaactcaatctttaagtccaattaaaaattaaaaaaactaatttattcctccattgaaaaattatgtggctgtgcttcttctgaaggccataaatactatctgatattattaatatataatcatatatgtaaaaacttttagatggagaaatatggctgaagataacccaactcacaaaattgacaaaatataagtctgactcttggaagtgagaaacaccaattgccttttttttttttttttttgcttaaatcttcttcttttcctgacagggactttccaaggctccattcaataaaactaactcactttaattttatttatgtattaataaactctctttgaaataacaaaggaaaactagtgaaggacaaatgatctatttcttcagttccatgtgatatggcaggcttcaattattacaagaaaaaaaagaggagaaaaagtacacataatattgaagtagatcaagaagaatcaggggagaaaataaataatagtgggctctgaaatgaagacaaaaattgtattaagttaaattgaaatagatcaagaagaatgtgcattttaagtgaatattgtatttggctatagagtatattctatacaagggggaagagtgtatgattaacgccatagaaggaaatatgttacaagttttcaaaattaatatgccataaaaggaaatagttctcctaataagtaataaacagcccaatgaattagggaagaaaaaccaggg

SEQ ID NO: 7230 - DNA, 867 bp, Cannabis sativa
cgatgtggcataaatttcacatacttgtgcatgctatgatttttaagttttgttaaggtgcttattgatggtcccgtgccaattagatgttctcctttggcacactaattatataacatatacaagaacatgtgtaggcataaactattcgtgaatatggttttctttttgatgtttgtctgatcaattttatcacaaagatataaattgctctgctggtacatgtgcttattgacggtcttgtgctgtttcgaattctccacttcagcacataacatattcataagctatagttttagctaccttgtctttcagtttttccttcataatacgaggaaaggctatccacgatgtggcataaatttcacatacctgtgcatatgctctggtttttaagttgttaatgtgcttattgatggtcctgtgccaattagatgttctccattggcgcactaatcataagcaacattattttggcctccttgtgttttagagatttcttttcttgtatgagaaatcattaatggggtggcagacattttgatttaccactgctgcagataatgatgatgtattatttttgtgcttattgacggtctcgtgctgattagtcattcattcatcagcacataacataatcataagctacattgttgttgccatcatgtattaaatttatttccattttctatatttggagataatatacatgcagttgcagacatgtataaacttatgtttatgtatgtacttgttctggcttactttcctgttggaagagtttgtttgtatgatcttgtattgggttcatgttgccattctaaactatcataatcactgttgacttagatttaatgggaaggactt

SEQ ID NO: 7231 - DNA, 1696 bp, Cannabis sativa
cccatcacgaaaaaactccatggcttaaattaatatttttgacggtttataacagttattacaggtcaggtataggcgacggtttcaatgtagacttcccgacagtttaaaaccgttgcctgtaccctgttataggcaatggttttaaaccatcgggaattctacattagtgacggtttttaaccgttacctattttgcctgttttactacggtcgtataagcgacggttttagaaactaacaagaatactttaaacgagtgtttaaaaacttcggaaaaaactatttttgtagtagtgtcaacttgctttggatggccatctagagaacaaagctatgttttggagcgtttagcctacatctgtaatgaccgcataatttatatatggattagtgagattataatactaattttattattatttatacttttattgagggatatatgtgaacatttataatttctgcaaaaatatcttgttcttgtaattttagctcggtggcgatggaaaatgcgacgaaggatattttagtcacatgggtaaacatagggcctttttagtgatagaaaatatgttatgcgagctcaatggttggtgttggcagggttgtggtattggactatttttttcctaagttgttccttgtgtttggtataaatgtaagggtagattagtaaatcggtttttttattaggtgtcccccctttagttgacagctgcatttaattaaagtaaggttatttaattaaccctttttatccaataattcaagaagaaaagaaagaaaataagagattagagaaatggagaaatggagaaaaaaaacctagattgcctactcttcttcttcttttttcgaaccagaggtggagatttgaatattgtggtttattttgaagattcaatttaggtttgaagcctcggattgaaggtatgacccttgaaaccctactctagatgttcttaaggttttggttaattaagagttgaattttgggagttttggttctgtttgtatgagtttcaattaagagtagttttaataagttttacttgttgaattagggttgtttgtgctactgtaattagctagtttgaggttgagcaagtttgagttcatggaactcaaacttgactcaacaatggaatgttgaattttattgtgtttttcttgctagtgttgtgtgggaattgttctagattatatgtacaggtgttctggagagtttggttgcatttgagaaagatttggccgagttatgctatttttgtggtttgctggtgcaaattggtcgaccgattttacagggtctgtaaaaccggttaaccggttgacatgccaggaccccccgaacttgtaactttttagaatatgtgttatttttcgagcgtagtttggtttcccttagtatttagggtagtagtatattgtacgtgtcattaagattacccttagttataagctggggtttcagaatggtttattcgagttatttacccaattgtgtaatgtgacttaggacctcctttcagcttaaagatttttcattcaagtcgaccagcacgcttgaatctagaatgaggtaagatagcataaagtgtatacatgtgattgaatgcttgttattatttgtatacactactaacaccgagatgtgatagttaaaagaagtgttagtacagtgtaggatttt

SEQ ID NO: 7232 - DNA, 1641 bp, Cannabis sativa
gctaataattaagttccaacaatgatcatcatttaactattatggctttaattaatagtttcaggaaaaaaccaaaaacatatatatatatatatatagtgttgcagaaactgtctaaaataacaaaaaaattatcaataatattattcttagaatatcaatatctcatataggagataataaagcaattattaatatatctgttgaaaagaatgtatttctggattttttatcccaaaattaaagaaaataaaaaacaaaaactcatttattttggatcttattagctcatattatggtgctctgtttttttttactctatgtgatataagcatatatatatagatattttgttgatatatattaattattatttgtacacacgaacatcttaattaataatattcatatatatactccattcttgaccatatatatagatttggtgtacaaattaatgataattatatattaattataaatattaaaaataattaaataaattataaaagtaatcaagagagattatgatctggcaaaataattaatgacatgcttagctaggctgtgttgagacttaatcattagattttagaaaacatgtacatgtgttttacttaatgtgttttaatttcattctagtcaattggaaattaatcatgtttagcttagatcgatccaaataaggaaaaaaaaaaattattagaactaattaaccatgttgactacttgaaccattggatagaaaaatgacatttatataaatatgtatacatataatatgaattattaaaaagaataataataaaatattcacaaaattgcactaacacatggtcttataatttgaccatatattgccaagaatcaagcataattaattaagttaattaactgctttctttatatagttccacataagtataaaaatttattatatattttttataaatttaatgacatagaaatctctattatataatcaagttaattataaggttattatatatagggtaattagaatttatatgtaacaagaaaaacttcattataatctgaataattatgtgaaaaataacattataattaatctggaaaatcttaatccaaaaagaaaaattatgtgcagataagaccatgttttattaatttgtaaaaagcatgtgcttagagatgagataatatatatttatattacccttacaaaaaaaaaaatatatatttatattaattaagaacaaagttagaaattagttaattaattaattaaacaatttaattatattgtagttatataatttgttatgtacgtgtcatgattaaactaaaaatttacataaaaattgagttgacaaaaaattaaaaattaaaaacaaattaatgttctgcaaaccctaattaagcaaaaagccaaaagcaaagtagtgcgtagtaccaaagtatatatgtatatatatatacatttatttatatatattataactagggttactttctagatgcccctttaattaattaattattacaattaaactaaacctcaaatctaagctcattttatgtataatattataatgattattatagtaatatatttacacagaccatgagcatatcctacatttctttagatctactgag

SEQ ID NO: 7233 - DNA, 915 bp, Cannabis sativa
acgaaaagagaaagaattaatatgttgtgggtttaattccttctccatgatccaaaatttagaattcagtcacaataatcatgatcctaccagttgtaaaattagggaccctcgccataaaaaccatctgtaaacccattgctaatcgcctcaagaaggaagctggcttgcaccccaagttcaggaacctcatcatcaaaattgcccaggttttttaattttctgtttttttcgaactgatggatgattatcactctttttatttgaaacaacttagacatatttgaaatgaagttgctgtactttacttcagattactgctttctttgcttgttagtagttttgtctttactagtctaatgtcactggtgcttgatctctgttggtttattcagttcatcgatatgcatttgtattttgttgtctttgttaaaaaaaaagttatttattcattttgatcagtgagaaaaattatccccttcgagcttgtgatcttattggtggcacccatttgtcgttgctttgaacattctgttctattatggcaagaataatgttaacattttctaggaaaaattttcaactttgaaaggctgctgatagtttattaatttcgtttcggacattgatttagacaaaccatcgatttacaactcaaatgcaaagaaggatttatggacgagcaactgatgttgaaatacgcccactaaatgaggagaaagctgttcaagctgctgcagatcttcttggtgaactttttgtattttcggtacttacttgctgtgaattctctgcttttataaatgttcaaaaacgaaaggtttgtttgaatgtaaaattattgcccatttttgtgtgtaatataagagctagaaagtttcaattcttcctttaatgcaatcttttcaattttca

SEQ ID NO: 7234 - DNA, 1829 bp, Cannabis sativa
cttctgtctagatctgaatagaggcaatcccatgtattttataaccccctctggacaatcgatacccagcgcttccttgatacctcttctcataccattaggggtatttttattgaaaaagattgacgttttaagcttattaactttctgtccagaccaagagcaaaacctctccaggcactcccaaaaccacttagcttcatttaaattggccctaccgaccaagataaggtcatcaacaaagaacaaatgtgatagaaccagaccacctctacttagtttaattccctgaatattccttctcccaagagccttttccaatagtcttgataagatttccgcagcacagatgaatagatatgaggataggggatcgccctggcgcaggccacacgagggcataatcttccccacctgccccccattcaggcaaatatttagagtagtggtggagatgcactatgtaacccaattgcgcaacttctgagggaacccaaaacactcaagggcatgatcaatgaatctccaactaagcctatcgtacgctttaaccaaatcaatcttaattgcaaaatatccctatttgcctttcttccgattgaaagaatgaattatctcttggactatcacattattatcttaaatattccttcctggaacgaaagcagattgagtaggacaaattacaaaagggaggataggtttgagtctatttgcaactattttagaaataaccttataaaggacattgcacatggatattggtcggaaatgattaggtctttttgggttctaggtctttgggataagaactacattcataaaatttattcctttatgcatatatccctttatgaagaaatcagagacagcttcacataaatcatcacccacagactcccattaatgtttgaagaaaagcactgacattccatccggccccggggccttatggttactcatggcaaacagagtactcttgatttcatcccgagaagggcagagaagggtcccctcctggtcctctaaagatagcctccctgggaataaatgcccacaatccaaattctggccagtgtcagacccttcaaaaatgtttttgaaaaaattagtgaattcaagacctatagattctctatagtaagccagacattattcttgctctatatactctcgatggcatttctccttcctctaatagcagcagaaaggaagaaaattttagaacatctatcaccttccttgagccaagagattctcgctcgctgcttccaatggagagcctttctggtcaaagtttcgtttagagatcgatgaatgtcacattccttcttccaatctcgggctcccgctggtagtttctgtaaactatccaatttcagttccagatatttaatgacccaatcaatcctaccatattaagttctatgccaatgaagaagagtagcccgagtcgcgccaagcttcttgaaaatacgcgcaggggcccgagagtgactaaccgagtcccaagcattggcaaccaccagtttacttctatcatccctcgtccaaccctcttcaaatttaaaaaatctcttaaactttgtagggtggccactagtatctaggaataacggtctgtgatctgaattagtagtctgagaggagctgataataactttagggaacaggtgaatccaatttccattcataatgcctttatcgagagcagacttcacatgtttactaccagacctgtggttatcccacgtcatcttttcaccttggatatgcatattaatcaaccctctagacattataaagttagatatgaacgggaagggtct

SEQ ID NO: 7235 - DNA, 939 bp, Cannabis sativa
ctgggttatcgtagcaagttcttcaacgtactagagagagaaaaaaaatcacaagagagaaaatatcgcaccagtttactgtgtgatttaatgtttttgagttttaaaaaattgaatatgtgattagttgagaatctcaaaataaaaaattaagagaataattagagagtttttggattccatgatttgaaaaaaaacataaaaatagtgttttttttagtctaaaactcaaaataatattcaaattttacttttgaaaacacttaatcaatcaaaaatcttatgtgaggcacattttaatttttaaaaacatagaagagctttcaaatcctaaaccaatcacaccctaagcaaattaggccgattgtcaaaaccttggttggtttaaactaaaacccctcagcaaaaacagtgagagctcataccaaataatagagggcgaaaatgtcaggcttctctttcggctcctccgcacctgccgccgctacacaaccgtcttcgggtttctcattctcaaacccttcttcttcttcttcctcttcctcctcattctcatcaaactctccatttgcatttggatcctccgctcccaccgcctcttcattcggatcttctcctctctcttcagcaaaccctagcgcccccgctccgtctccctttggcttcgtatcttcttctccctcttcagcacctctctttgggaccccttcctccgcgcctgcctctgctccgtccctctttgggtcctcctccactgccggctctctgtttggttccactgctgcgccaacttcgagtcctctccagtttggaacagcaacatcatctacgccttcagcttcgcccttgtttggttcagcttcgaccacggcgacttcatcttcgtcattgtttggaacaactactggtccgacctttcccgctgcgagttcaggctct

SEQ ID NO: 7236 - DNA, 802 bp, Cannabis sativa
tcaaattgtcaaataaatatattaaggaggttgaatattattctaatccgttcaaataactcaaataaattgattgacatatttttactaaaattgactatgatatatgacataaattatatttaatagttaaactatttcacatttaaagtttgtactttataatatttatttagaaatttaaacttttataattgataatttttttgacgtgttataattaataattttgattgaatttgaacattaaaattgacatatagaatacattaatagatattgttcacggtaaaaactcgtcaacgaaataaaaaggatttaaaatggagtctggagaccttgattgaaaaatgcttgaaataaaaaaaatctcacaacctttgatctttagaagtattaatctttcattcccaaaaaaaaaagaatcaccttacaatgaattcaagagttctatatatattgagcccttgacactttacaattttactaaatcctccatccataggatctggagtcactatcacacctgacagcgttgtatcctaggtggtctgatgtacctgacatctaaagttacactaaaaatgcccctttcattgtgtacctcgaatgaaatgaattttgtccacattatctatgctccttgtgtcgttgttttctcatctgatacttccttgcttagactgttggtgtctggaggctgggcgcagggagcgggcatgagggttcataggcacgagggtgcatgggcgcgcgagcgcagaggtgatgtcgtggggcgcgcgggtgcatggaggccaag

SEQ ID NO: 7237 - DNA, 2569 bp, Cannabis sativa
tttatcttgttgtttgaatttcaagcactggcttggcatgaaagaacttggtattaagatcacccgatcgcaaccattctaatctagacctttgctgccagtatttttcttctcttggtaagtgttcatcaagaatagtttaagctgattgtatactctcagtatggtcagtggaaaaatttgaagagttgttaagtcgattgacatgcttttgagctttagaaatatcagctttaagttttccatatttgccaaaatgccaattttgcaactggtttgcacaaaaatctaagtttaaggaaaggccattaataagatccctagtaggttgttgcagccagcattgagatgcaatctcagtacactcagtatcattcaaccacatcttttgaaaatggaagcgagatctatgagcttgtacaggttcaggtggcattgagaaataaactttatcctaaagtgcacggtgatccgaacaataataatctagatgcattagagtagggagtaataagctatcctaccaaatcttgttagtgaagtactagtttagtgtttcttttaatacagcatgatttcttttatttttggcccaagtgaactcatcactagaaggagtgatatcagtcaaagagcatatgtcaatagttgtttgaaaagcattagtttggttactatgtctgaatggtccaccatttttgtgagtatgagaaaatatttcattcaaagcacctaccaacaaccaaggatcaagaggacatacatcagcaagtccattaatgagagcccaagtatgctttttgttaacaaatttagggaatccataaacaccaaagaaatgccatctaggattatcatcaaaagagtcataataatcaaaatggtttgtattcgttgaaagaaaagttacatcaacattgtctttccataacaacataattccaccacttaaacccatcctggcaactttgaaattgaaagactgtatgaaatgagtgatagcgctagtagtacctttagttttcatgaggaacaatagttgggtagtttgctcacgaataagcaaacgcaatcgatagaatgcactcgggtttcccaaaccccaggcattccaacttatgacatttatggatattagtggggttgttgatcaacaacagtcgttggaaaggaaggcagcaactcagcagaatcctttgatcaagaagaaacttactatgttggggagctgtcactgataaattcactatgcttgctatttttgcatcttttaagaacataaaattatcagggtcaacttgtcgcttatacatacaatttctaattcctttgtcatgatcaacttcttccaacatgattgatttaccttttgcttttgtagccaaaataatagcatcagtgctagtagcagaagaactgaaagttaaattcctagaataagtacctaaagtttggatcataggagggtaggtggcaattggcgtagtggtaataggagattcaatggtgactgatttagtggtaatagagttggttccaatgtcagtgatggcttcagagataataatttcaatagaaaaaagaatttgtgaattgtaataagaagggaatggcgatgggggttcagctaatattttcttggagtgtggcccaataatattcttagatgaagacttagcaatcgtgagggatatcggatgaaggttagcaccaagggctaaatgtttttgtgacagtaaggggggacaggtagaacatatagtttttctggcgagtctagttaagaagagttaagcgttagctttagagaaatcattacaataatgatcataacccaattttggcaacttattcccgatcatttctggcccataggggagttcaggatcaatgccattgtcaagctgctcaaggaaccaagcacaactttctaaaggatgtcccaacagaccacatttaaagcaaaaaatggggagatttttgtagcagaattcaagccagtgttcatcaagaatcttaggaacattcacaagttttcctctcacataattctatgcttgttccctgcacaagcaatagttaacaagaaaagatcaaagtgcatttcagatacaataactgcaaatcgacatttgtttgacaaaaaaatctcccatcttcttaatgaaagttttttggttaaaagcagttgagagacaacggactacaagaaaaaaatttggtttgtagcttgtatcactaagatcagattcaataagggtgcagaccgccctttccttctcagataagactaaattggagttcatgtgttttgttaatgattccataaaaaagagaatttctgtgagtgagtaacgcaaatgcaagaatagagtaaaaatactttgttcctgaatacaaatagctagcaataaggttcgaagtggcatgagaaggtggagatcatggaggcacatagatgaaggtcgacagttatgtaagatcacgagtgaaatcaagatgatggaaaagacaaagtaggctacaagaagatggaaaataactgtaacagaacaaccctacttgggca

SEQ ID NO: 7238 - DNA, 1423 bp, Cannabis sativa
gctaagaatttaagtacaataaataaagaggaggtggaagctttaacaaaaactttggaaataattagaacaagtggatctgggaatggcaattattgcatgtgtgcgtattcagtgacgtaagcataagttattttgcatgtggggacatatatataattgaaagtgtacgtgaaaaatttatataaatatatatgtataaatgatatgtatatattcatgtgagagtaaaagcatatatggttaactttagtgttgtaaataatgcagagttttaatttttacacagacacaaaatttagtaattgtaaaaaaattataaaaaagtaaaacactaattcgagtttgaatatgaaattggttggtttttaaaaaaatacagactgacatggactaagtactacatgaatccgaacacggtacaaatatattgggcttacacgctttatttgcctacctttaaaatattaacataacacaacacaactcatattttaccgtacgaaaaaaaatcatatttaaaattcgcaaataactatgagtgaaaacgcacgaatatataagcactagtactaataatcattataaataacagtattataaattttacaaatacatttgtagtgtatacacggcaaaattttatatatgccgtgattttgttccaaagagattgtaattgtgccaccattttcaaattttgtctacagtgcacgacatatatgtcatgcacggtagatcactgcatttttttttaataatttaattaatatttatatataattataaaattaagaattattttttgaaaaaattttacaatacacatttttaaaagtgatgtacgaatctactcctatttttagtctattttttatatagtagtgtatattatagttatttaatacattttgaaaattttgaaaaaattaggaaaatttaatacgaaaaccgcacttctttaaaagtgtcgcactgatatactcctacttgtttcgacattcaagagatttatgtagtctttttttatagtcgtatgtacattatagttatttaagacatcttgcaaaattttaaaaaatttaacacgctgaaagtaaaattcaaattttctatcgtgtgactcttttaaatataacaattgcggtaatttttattaattaatatgatattaattttttttattttattaaaaattaatataataataaggaatatttttttagtgtaatttttagtattatgattggagtgaaagtattttttgacgacaaatttaataaatgatgcaatgtaaatatatccacgcgtacgataaaataaagaccacagaagtaatatcagatctagtcccacactaagtgtacaatcaatatcatataattaataatacaccccacaacacaagttatatatatatata

SEQ ID NO: 7239 - DNA, 1103 bp, Cannabis sativa
ggataggcgtagggtgatcgaaggccagccttggcattttgaccactgccttatggtttttgctaatctggagggccttgaccttctgcaatctgatcaacttagattggtccctttctggatgcaaatccattatatcccattcggttttcgaacccctactcttgctaagtttgttgctgatgatgttggagatctgattgaaatccacaaaactaacctgcttgaaatctcgggtcctttccttcaaatctgtgtcctgattgatgtctctaaacctattagaagggaaatgcaagtgtttttcagaagcttgggtagaactaagtggcttctcttcatatgaggttcttcagaactattgctatttttgtggagggtttgatcatactttttcaaagtgtggttcattccttcagcgttgcgatgagggatgtgttccacctgtccttccttactaggagaacattagagcacctctgcaatcgcattttaagagggatccctttgagctggctaattctattccttttgaggaaatgaatcttaggtctttgaggtagaatcaagatcttcaggatgctgtcgaccaatttctttcccaggttacttcacccctttctcagagtcctgccattactgagggatctattgctagccaagctgttgtctcatctcctatttcatcccagcaagtggaggtttctgcctctcaattcagtggttttcaaaggcttttgtgtgtcgtttctcaagttactatgaatgaggctccttctattgtccatactgacaaagggaagggaattcagacccctatttctaataccccgtctttggctcttatggataaagaaaaagggattcaacctcctacttcctttgttccacagcttcctcttaggcctcttactatcggtggaggttcgggtactaagaggtcttttcctaggcaggatgtggttgttggttcgtccattcgaagcatgctgaaaagagctcgggctactgggggtgttgagttgatgtcttctaatgtttctgatcaagttgtactagcgggtgttgctgagcaaccccgcctggaaaaatgaggtttattt

SEQ ID NO: 7240 - DNA, 692 bp, Cannabis sativa
gaaaaggacaggtacgaggaataactaagaaaggtcggttcaggtcttccaaaatacgagaaaataccagctttatgttaatcgaccccctatcttcccctctgccgactttgggaatcgcaattccctgcgtatcatctctcgaaattcgacttccagccttggttcttgaactctcattaattgcctcaaacctcctctgttctggcttttccacttcagccggccttccttcttccccgtcgacagccgccacctcacactccacctggacaacctcgacagagtcatctttgccgcctgcctctccgtctgaatccaccctattttctttctcacaagtcattaccacacagttctccaggtttgcctcactcccactctcctcttctattcgatcatcatctccagctttttccttttctccttcacttacatccccatctccaaataccttttcattatcaaaatcttggtaccagcaagtattgaaccatccatggaacctgtagcttaaatcattgagcttgaaaagctttaattcgtaattcctatcctcatggttaattgataatgattccggtacaaaaccgaactcatcacccatcaattggagtcttaagtgggataaaacactagcttcaaccgtatccttgtccacatccattaatccaccacacaactctccaatt

SEQ ID NO: 7241 - DNA, 651 bp, Cannabis sativa
atgcataaatatatatttaggccaaactcacaatttacgaaagagacacttgtgcaggtttagttgatcatattcatgatgttgttgtagggtcatgaaattgggagattggtggatttaactactacatgcaattaataaccatttaattattagttgtaatcaatttaattagcttaaaataaaagcaaaacacttatgcatgcatatatgcaaaagtgaccacatacttataggtggataactatacaatctacgttaaacatggatgaggtttattaattaggaagaaaagtattgtaatcattgaagagaaatagagaaagagagagattcatgttcccaatatatagattttgtaatagatagaattaattaataataagttagtggtgaaagtgaaagtgaaagtgaaagtgagtagtgagggtaaaaactataaaagatgctttttaagtaacggtcctctaggcttcacaaaaataaatgtaaatgtatttttgtttggttcaacttgttcatcgatcttctcttcacctttggttttgattctggttttggttgggaagcgtagccctctctctgccaaaagtaatgggctaactttccttacactgatgaatcacatgcatgcctctctctctctctctc

SEQ ID NO: 7242 - DNA, 997 bp, Cannabis sativa
tcatgtattaataataaatagtatacgctattttatctgtattgcttcaatttatttggagaaccgccattaaatctaatttatctatttattttactacattaataaaatcatgtattgttaataacatttttattatgatcatttgactcaatttttgtatttatatatgctcttatacatttcatttaaattagtttaaaatatatatgttacatataattaattttgttattgaaagtttatatataaatacactactaaataaattacaagttaaataatgttaaattattataagaataattgaataaatcagagtaatagtgacgaaatagtatataagaaaaagtaatatttattgtagttggtttatattagttcaaaatctataaaattattttaattttattattgaaaaaatatatataaaaaaaaatcatttaaaacataaagaaaaaattaagtaaaatattttatattaatataggggtttttcataagcatacaataatttatttatatgttttatgaataagatcattatattgttcaaccaaaactggttacaacctcccatttacaatccctttacaacaaaaaatgcaaaatctcttctaatttttacaaattgaagcaaaccagtctctattactagcctttcttggtattacaagactaattctaaattaatatcattttctactctttgtacaatatgtttgataattcaaagtttttgtgaagaacatcatttcttgctctccaaatataatagacaagatccgcaagaatcacatacatatatttctctaagcgttactaactttttctgctttattgatctaacgaagtagactagctaaatccatggcaccgcatttccaccctaacaaatgcttaatctccttaaggcaggtgctactatagctacaatggaagaaaagacgatgcgtatcttccttagcagcctcgcacaatagacaattttgatcag

SEQ ID NO: 7243 - DNA, 580 bp, Cannabis sativa
aaaaaaacaacaccaaaaattgtgaaaatcaaaatcaaaatttgggacagccaagtcaaaaccttactatttgtaatcatatgatttaagtttatgagaagcttcagcctgacgcagcctcatgattcgtcgattaaagaatgcaactggcgtcgaaataccgggatcttgtttgcttcaacagccataaccaaccccattagcttatagttcttgtcctgcaaagaaacatactctatcaatattgttttccaataattataacaaggcaattacataatttgcataagaaagttgtaagtatatgtttcaatatatttgtaatggagaacaaaagaagacaattttgatggcaccctttgaatttggaatcctataacaaggcctttatatccagaatcttatactacatgggcattggagaatctatatcttttaaccacatttcgtttatttttcgcattgttatccgaacaggaaatgaaaatgaaagcaatagcaagaataagctattgaaaacttgcctcaaaagttaaaagctgctcagtgttcaaaggatatgtaatggaccacaagctga

SEQ ID NO: 7244 - DNA, 835 bp, Cannabis sativa
atatatatataatataacttccctttgctttgtttgaagtaatatctagtgatggggagacaaaatccacttacgattcatcataaaataatgtatatatttcatatcaaacagattgtttagctaagaatcagaaccagattttgttgatttaagtaaaaatataactgaaaaattgaagagggcgttataattctgttcagacaattaaaacccaattcatcttcttcttcatttttcaatgatgaatcatatatataaatacctagctagatccagcattaaaatacaattgtataattatatatatatgaattaattaagaaaggtgcaaagaagtaagatatagagaatgagatgaaaattattaataattaatttgaagagaattgtaccgctaagatggtgttgcagaggttgcattgaacataacaaacacgttcggaggccatcatgtccagtgacattctttttttaaaaattattgcttaaatttgtggaatatatagccggatcaacaagaattattcttatatatatatatatgatgatatttatgaaaataataataaagttggatatatttaatttgtatgtaaaaagggaaaatttaaaagattatataagaaaattaaaattgcttttttatagagagaaaagttttagttcaataagggaagggagagagagagagagagagttaagggggtaaggatgggactagtctggtcggagtgaagtggggagtggcattagtggtttttgtgatgtttgtcaagaaaagatggtttatggtaaaggtgggttgtggatttatgagagagagagagagaga

SEQ ID NO: 7245 - DNA, 698 bp, Cannabis sativa
cattttaggaatttcatgggggctaaaagtttggcttcaagcaggcttaatgaagaatgtttagatcatggacacaagttgtctttacagcaacaaatctaaatcactagactcttttcgaaaaaagaagtaaaggatgccatgttcagcattaaccaacttaaaagtctgggaccagacgattttggtgctagcttttttaaggggctttggtttgaaataggagatgaaatttctgatgcaatcctttccttttttgagatagggttgattctaaaggtcatgaacagaaccaccatatctttgattcttaaattaaacaaccctgcttcagcggtgtactacaggcatattgcttgttgcaacactttataaatgtatttccacgctgttgtgttctagattgagtgaggtcttaccctctcttgtccatagaaatcaaggagcgtttatcaagaaaagattgcttgctcataatattcttatttttacggatttgctcaaaggctacactaggaaaaatttgtcgtcttgttgcttgatgaagattgattttagcaaggcttatgatacggttgattggcaattcatctcaaacttactaatggcttgtgtttcccaaccgagttcattaagtggatcctggttttcctttgtggtacctcatatactctgatgatgaatggaagattgcatgg

SEQ ID NO: 7246 - DNA, 742 bp, Cannabis sativa
cgcatgcttggaattggagaatttctaaaagtgcatggaccacccgattagggttctctaattttatccttgcacgttgtggtccaaatgattttgatgcgtattctagatgacactttgtggcaatatcatttcttattttgaatagatattaactctttcgcattaggatgtcttttttatttaataattactaaaataaagccagaaaagtttttattcatcatttggaagtgaatagagtagatatataaatatatatataatacatgcacgagggtgggacactcatcttaataaacaacatagatagttcagatacggaagtaaaggctgtggccagtgtgggtatctgcggctctgcttccgagattgctttatctcattctactttctatatcagtcatatcttcaaagggttacttaaggatgaagaattgaattttggatataaatataaaatcatatatacatatttcatatgtatagaaagaagtaattctattttaattagaagcaaacaagtatagactatatatagtgacaaaatttgcaataggtgagaattgataagaagagtttctaatctattttgcttatctgtttcaagttgagcctgcagcggggccttctgtggctccgttcttcattgctgaactagatttttataaccctttgtaaatctatatgataccaatgaatatagtttaaataaattaatttggaatggaacagagaggta

SEQ ID NO: 7247 - DNA, 567 bp, Cannabis sativa
tctttcttagtgtcctaaatccaactgatccaaagataatctctctgcatgagagtgttgggcttttccaactggggatttttctcttaacactcctttggtttcaatcctgaactccaagtttctttatactttctacactattgtttctcttttgtggtcagtggttggggagtttgtttgtctagtattggcttctcttttttcctagttcttgggggtttaggagtgagtttgttggaagtttgtgttttgtcttttggggatatattttttgtttccgtctacaattgcatggcgcaatcttcatcaaaagtggtgggtgagggccctccaccaatctaatgatattcccatgatggaagaacatgaggttagtaacagtcttaatgatagcattaatggtcacctagtttcaccacttaaagagggtcagcaagctggtggctcttgtggtgacgggcaagtcaacaaggaactagaagtggagaatctacgtaatgattttctccaatctatgtctctcgagttggaacctgattttgagattaatgaggagatttatag

SEQ ID NO: 7248 - DNA, 605 bp, Cannabis sativa
ataattattacgtacatgcctaacaatgtacagtatagttcataaaatgctcatatatcgtactttaaaagcaatgaattagtccatacattaaagtggccgcttcaaataaaatagatatatcaaaaagcaaaggaaacattatagactacctttagtagttatattactatattgattaccaatagttcaacgtctgggtgatcagaagatcaataaagaagaaaaaatagttttatctttaactaaacattcgaaatcgatcgaatatttgtgactgcatgtaatcgactacaaattaaactaagcatgagagaagtacagaaacaaggtaggttttagtgaaaatgatactcaccataaaattttaagaagtacgctataagaaagtagaccaacgagagtactgcatatataacgtaataaaataagcaagccaaatcagtcgcagggcaactctcctttggcaagtatatttgggattatatatattggttaaatcaccaacacttgccaagaaagagaagccctataactggttagcttatacatgacttgaactcaactctttttcttactgccattaattctggttcacaggcatc

SEQ ID NO: 7249 - DNA, 1867 bp, Cannabis sativa
tttgatatttgttagtgaggatgcttctagccttctgtcctttgcgacctagaattgttttttgaactccttggataattgctcccatgaagtaatagaatgatttaaaattattacttgcttgcattataatgttaaaattattaagatgcacaactaggtcagttgttctatcgtattatgtaacatgaggattcttaaatccttgtggaaattgggagttgagtatgtcggggtgaaaaggttctgtttcctcctcataatcatatcttgataatttctcatattcttcatcctgatattgcgtgaacttatcctccaactgtataactcttagttggatgggatccatgataggatgctcgacttattgctgctcatttgttgtgttctaatttaaccaatctcagagatctgaaacattacattcaactacttgcataagttgggttatcagcgattcaaatgctcacaaagagcaggatgatgttacctttcatccgtctggtcataactactaactgatcttgtcgcatagagactttcaaactaaaaactctgcgagttactcatgctctcactttctttattttccagcttccttacacgcgtcataatcatattacttgctcgaaatatgagtataacagtagacttcatttttctctagttctcttgtaaggaaatttgcttttcgataataaaagctcaaagtagagtagctccattaccatcgcgatatgagaagtgaactattctaaattgtggtgttctctctttagttattattttttctgtttatcgctatcgcttatcaaacaatacgaagttggctattttttagcgtcaacaaattaaaatttaaataaatatttatcttttaaactaattaattaattcaaaaacaaacttagtggatctcatcctataggataggtgccattgttattgtgtagaacatctaagtagagcaccaccttgtcctaataacaaacaaaaatggtgtctccattcctcttgtccaaacaatgacatttatccatattatatttaaatttaaaatttaaaataaattatttaccacaaaataaataattaacattttacaacttcaaaataaatatttttttcttctccactttattttgtatcatctatacccttgactgtgttaaacagtgacaatacggggaccatggacctataatactaagctttaaaaaattagattctttattgagtctcattgatcaaataatcatacttattaatggaaagttacaataatatacatttttttacatctaatttacaataataacgttactactattactgacgtgtcaagtcaaccaaatttgacatttttttgacattttctagtatttttttaattattttcttgcatttttaaaaataaatttttggttactaatagtgttgaaaagaaacaaattagttacctttatataaaaaactttattttatttgatatacattttagctactctctaaaaacttatttgtatacatcttaataactaattacttatttttaagttatattatggtagattataatttaaaatacatttaggtaactttaaaaaatattttcgaaactaataagttgtcatgtaatataagctgctatttttatataccgattattttatataactttttgttattctgaaagttaattagttatcgtataatataatataattctattaacaaaattctaatatgaatgatgttaactaagattttaaaaaattataaaacagtaactaattactatattagcaaccaaatgatttcttttctcgaaatagcaaataaatatcccacatcttaaaatgtt

SEQ ID NO: 7250 - DNA, 777 bp, Cannabis sativa
ttaagcaatttcacaaaaattgtccccagataagttattctgaataatctgcatactcactttaccttattttttctataccgcacatgtaaatattttcaattttctattcttctttaacatctgaatatgtggtcccagttcataggaacgatccttgctggaaccatcaatcttgcagtggcatggtggttgttgggttctgtggagaatatatgccaggataatcttctcccaccagatagtccctggacttgtcctggtgaccgagtcttctttgatgcatctgtcatatggggattagttggaccaaagcgtatatttggatctcgtggaaactatccagagatgaattggtttttccttggaggtgcgattggaccaatagttgtttggctgttccacaaggcattccccaaacaaacatggatacccctgatcaaccttccagtccttctaggagcaacagcaatgatgccaccagcaacaccactgaactacaatgcctggattatagttggaaccattttcaacttctttgtcttccgatacaggaaacaatggtggcagaggtacaattatattctttcagcagcactggatgctggggtggctttcatggcagtgttattatacttttcactgggtgtggagaatagaggcttgaaatggtggggaacagatggtgaacactgcccattagcaagttgtccaactgctaaaggcatagtagtcgatggctgtccagtgaagtaaggcttgtctattgtcattgtt

SEQ ID NO: 7251 - DNA, 733 bp, Cannabis sativa
agttactacttcagcagcagtaaatggagcaagaagtgattcattatgagcatcagaaaccaatttgggaatgcactcaattgtagtggcaagggcagtgttgtctatgttcccaacttgaaaaatttcagcaaaataatcttgaataatcagagaaatctcagcattggacctcaccttatcacccaaatcattaaggaggaatttaatgtggttgtttgatttcctggcactagcttttgcataaaaaaatttagtaaacagatcaccactagctagcccatcaacccgagaacgctgctgccagtatgtttcttcttgttccaacaactcatccaaaattgtttcagcttgttttagttcatcaaaatggctgcttgtctgtaccatagagttattaagcttttccacctcagcttggccttctttgattttttttttcatgccaccatacttgcaatcatgccaagcttggagtctttcagcacaagaagataaattatgtaccacagtagtaataggatcaagatggagtgaattggaccaatttacttcgataatttctttgcaatcaggatcagccagccataatttttcgaaacgaaactgactcttctttctaggacaacttggctcggcagtgaggagatggaaagttgcaaaaattgcacgatggtctgactgaaagtaatctaggtgactaacttgcggtgtacagaaagagctctcccaa

SEQ ID NO: 7252 - DNA, 794 bp, Cannabis sativa
tccatttattctaaacataaacctactctgagtactacataaggaaagagacaagactttgtattagtttaatcattcacttgaataaaaaaccacaaatgctctctctctatttcaaactctctctttctatcattctcaatttcggccatagtgttcttagtgattgagtaatcaacccactctagtgagggtaatactcaagtttttgtgtaagactgtgtagaatattgatcaaatcacaagtcagattaatccaggttcatcatttggcaatattatgttatataaagggaattgagggttagagtgattgggcggaagaagacataacattttgctacgcccaatgtgagaatctttaactttttgtgttttttaatcgtcttgtataaagcacattttaggttgttagattattatgttaataatcaaacatacgtgatagtaaattagatcttggtaaaataagatgcaacatggtttgggtactatgtgtgtaaaaatgttaagtgaatacgcctatttttttaccaaatttagattgggtcatagtcttagttttggctgggtttgcttggtcagattttgggtaggtttgagaccagaaagggtattggccagttcatgggctttatgtatttttttgcaaaaatatacaaaataatgctaaaaaattactcaaattacaattacattgcacaaaatcatacttaaataccaaccaaacatattaatatatattaacaccattgatgagggaggagaggagttccccgactaagacacccaaa

SEQ ID NO: 7253 - DNA, 1727 bp, Cannabis sativa
tgtcttaatagactttaccgtatactctttataatcctagcgtttcattttatctcaatagaaacaatgaaacccttccatctactctaaaaaaaaatcagcggatcgacgtctggcctccaccctttcgcccattaagaaacttaagccttcattttttaggtttctcatgtctttgtgaggaataaggagaaaaattagattcatttaaatcaatctgcaggagagcgttagaagttgcaagatatattgagattgaaagaattgaaagcatgtacttgcaccctttctttcgtgtatgatctttgtgttactggtgacctacactttcataattggtaggtacttcaatctttgcatatttttcttcttactttatgattttagttctactatattttttttttcctctacattcatgcaacatcaaatatgtcaaaattatcaataggctcaggttttataatggttgggagtttttcgatcattaactgagttagtcatgttgtactaatgtaacaaatatgatgaatagggagtattatattgcttttaccatatggaatactaaattgttcatgagttaagcatatgtatattcttcatatgtacttttccttttattttgtagtaatatttcaagttatatctaaatgaatgtagaccatcccctaaatatgaaagatgatgtgtgtaactattctttgttcttctccaaatctaattaatgtatatttatttatttcatacttccatcaaaaattcttattcattctattgatgataaaaaaaatcttaattatatatatattgttgtatattgatgtatgtttgtattttgtgtaatcacattaactacattttagaaatacaatatatatgaggatttgatgagtcatcaaagggtgtgtttgaatatattaattagtgatacttgactaatattttatttagctttatggttaaactttcttgtaggtgatgaagcagttgggttagtccatgtaaaataactttcatctttgtcatatgttatggagaagaagggcgtgttccacatttctattaatctttattgcaatcatagtttaagatgattcctgttgagagttaagtttcatagtaaaatttatttaattatgtttcttaataaatactattggataatctagaacatgttctcagagaagatgttcagacactattttttattctttctatctcattgttgggttttgtacatacagtatgttactttttaatgtctttctttcttttcttattttttttctttgtcagatatggaccttggtgccaaagtctcaacctcatatagaaactctcctttgagtaaattttttaatgtgagatgtcatactctataaaaactactgcttctctttcacctatgaaaatattttatttaactaagtttcttattgttgaccaaaattgatacaggttatcatatgtagtataaatttgtagatatcataagtaaattctcttttcaattaccataattagttgccttattaggcaaatcattctatatattcagtaatgttaaattatctctaattctccgattccaatgatgaattcaataattgaggaaattaaagaaaagttaaaaatatataattgtaaaaaaatttatatcatggattgaaactacacagaaagggtaatgaagatttgtgatgttctattgccttagaacatat

SEQ ID NO: 7254 - DNA, 881 bp, Cannabis sativa
tttttttttttgaaattcctcaaatgcattaattagaaactaaaatagtgatgatcaagagaatccaccttccaaaaactaaggcaaccagaaatagagtttgaaaagccctaagaagcgaagatagataaaatatcacttcttgtaattgtgttatacatactaatataattttagttaagatcatttggaattattcataagtttatttgatgctacattaatttgaacatgaacaacttgtactggttattatttaaattgttttgattagagatccatgagttatacttattagaggtttcagaaagtgatctgatccaattccgatctaatatcgaatattcaatcataattgaattggatcggatgtaaattttaaaaatctaattgaatatgttggaaatatccgatctaatgaataaccgaacaagtccaatcgaatataatctaatatcaatccaattatatttaatatttataattttatatatttaattattttattttaaaaaatatattaattattaataagttttacttaaataaaataaccctaatctaaattaaaatatcaaatctcaatcttgagaatggaagacctcctcccgtgcggtgaatcgaagacctccaacgcctgagacaaactgctccttagtggcgaaacaacgacggcgagacgagagtgcaccacctcactctaactcctcctaagcgcagtgtgaacccctaaaccatcttcactgtttcagtcgctccgcctcgcgcctcctctgctcgccgcttctccggtgtttctccctctcctccagtggcctgctctctctccgcagctcggcgctcctccggtcgtctgccctctctccccgagcctctcaaat

SEQ ID NO: 7255 - DNA, 1303 bp, Cannabis sativa
ccagccagccctatcaagtgttgctggccttgaccggccactcccaaataagggggttcattctgggcgaccaagctcgtgttgggccactgtccatggtcggccaaccttgtactaggcagggcttggctgcccgtgatccccagttggctgacgtagctggtgcgttgagaggaagtgaaaatgatgtaccctatgatacttcaaattgaaggtgatcttaaaacctttaagaagcaatgtcattaagggatgtcgttttttggagagaggcaataaatgataaaaaagattcaattatatctaaccacacttgggaagtagttgatctaccatttggatcaatgcctataggatgtaggtgggtatttagaattaagtacaacatcgatggaaccatctaaatctttaaggctagattggtggccgaaggatatagataaaaggaaggaatatattactttgatacttatgatatggtagcaagaatcacttctattagattgttgtttgcttcgtcatccatacacaaccaacgtgttcaccaaatagatgtgaaaataacatttcttaatggaaatctccatgaagagatttccatagaacaactggaaggttttgttcttgaaggaaaatgaacacaaggtgtgtagacttgtgaagtcactatatggacttaaacaagcactaaaaatgatatgaaaagtttaatcaagccattacttctaattgcttcaatcacaataccgctgacaagtgcttatactttaagacttgtgataatgtaatcattttggtgtgtatctatatggatgacttgttgatactaagcaattacttaagaggcataaagaaactaaaaagtttatatcttgaacttttaagatgaaagaccttggagaggttcataccatcttagggataaaagttaagaggattcaagaaagatatgcattaaatcaagcttgctatgttgaaaagataattaacaagtttaatcatattggtatcaaagaagcaaacagaccatcctattcaaacgagaaacttgaaaagaatgaaggaagagcgatggctcaagtagagtatgcaagtgcattaagaagcctaatttatatcgtccattgtacaaaagcaggcatagaatatacagtgagaaaacttagaagatgtgctagcaatccaagtggccaacattggaaagcaatgggaagagtctttggatatcttaagagaaccaaagacatatgcctccaatattctagatttcctaaagtacttgaaggatactctgacgctagct

SEQ ID NO: 7256 - DNA, 677 bp, Cannabis sativa
actgtgtcctgaagtgaaaaaggtagcttgaaaaagacaaaacagagtcattatacaaaagaaatgttaaaggattaaggttatcttataagacattacttattactagtgtaattaattatcaggtctcatatattttaaaaaaatattttttaaaaaatataactaactaattgtaaaaaatctcctattaagatactggtcacgactagtatcaaataataatgctaataaattagatgttgcatcactactattgcctaattttaataagaacaatgcctgggatgtgggctgcctagctacgtaccaatcaatcacaatcacgggttgatttagatgaacaatacaaaaaatgagagaggtcctatatgatatctttgtcgggttattaccgattaagcttaaaacgtacgccaatattatttatttgaggagacttattgtttgttatgttcacgggttgctctttaattaattcttctgttttcgcccgtgaactattctactattatatattaagcttctctctactattctacaaagatggcagcgtccgtgatctacacagaatatctttttggcataatctgggcgttaaaatctgtgtgttctaattatatattttattaaactagatgttacgtgtcaattcatgttaattttattttagtttt

SEQ ID NO: 7257 - DNA, 760 bp, Cannabis sativa
ctccttatttcttttttaggttaagagtctacttcatcaataaattttgtattttagtttttttttgtctaatggaacaattaaatgttaaactattcagaaaatttcgaaaatttataagtaatttacgatcaaaaaaactctactgaatgccaaacagataaagaatctactaaattaaacaaccaaatgtactacaaatatttccaagggattataagcttttgatggaagctataagactatgttcacatttaattttcaaaggtcatttatgtatgaaattttgatgcgaagtttattaaaaaaagtccacctcatatttaagacttaactattgtataggcatctaattgtgtttttaaattctattttatttattttctgatttttagtattagtctaataataggtaaaaaccaaaagtcatcaaacactatttgcattaataaaagaattaaagaaatacaattaatgcttccaaccatattgtaaatctattttccaattcttaattgatattgctatcatgttacaatggttaatattattgaaaaaatttattcatgaattttattaattcaataaaaatgaatttaatgggaggttttactattcaaattttattacttattatatgttgttaatataaaataaaaagtactaaatatagacatggtgcaatataggatggatgagttttctctctctaattttgattttgtcactctaacacatgttttctttctttttttttttt

SEQ ID NO: 7258 - DNA, 649 bp, Cannabis sativa
tgttggggccattttttcttgtttcggtgggtgttgtagttgggtaacttgggtttgtatatattgtttatgataacatgggctttatatatatgtttagattggttaccaaatgtgtgaggttaactatagagatggatattacaatgtggatcgctcgtgttacagttgttttgagtttgatatttaattttgttgtatagttctatgtgatcttctccctgggtggaatagagaattagaatgctaaagcgaatattttacattcaaaaataaataaaggaatatacttaaatgatttgattggatgggttcactacaacaaatttatattagtggtggaaataatatccgcagaaatatttcgcgcgaaaatatttcgccggtattaattagggtattatcggcgaaaaagtgtattagttattaaaatttaatttgtaattattttttaaataaaaaatattaatattggctaaaacaaattaatacctgaggaaattccacccctaatgatgagggtaggaattttactgcccaaaatttaaaatagcattactgacagattattagagatgaaatccaccaatattattggaaaattctaatcgttttttattaccaagagaatttcaattaataccggcgg

SEQ ID NO: 7259 - DNA, 882 bp, Cannabis sativa
tccaacatggtagtagaagccacgggcataggaaccttcagtcccctcaaacgaatacaatccaaaccaaatgaagttctccattatggccaatatagatatgttgtgtgccctgctcgacagctgaagaatgacttgtgccctttactttaacccgaaagttaaagggggacagtagtatatcttcgctagctggaagggtaagtggtcgactgccatctattatacaatatattattctttggtgtacccacctattttggggacctccttatccgtcatgctggtcaactagggatgttctagctgaaaagtaaaagtaacacgagcagttacgccctaggctggacttcagcttgaaaatcgaattggtgtcatggggtgatggaatacctcatcacctctttgcgtacaaaacaaatagcgtagatagatatttgatgaccttaagtgtaaattgtgtcgggtagatcttatagtagtggactatctttctaaagtatagatgaaggggtaggattgcaccctactgatcatgtggtacggataatgcacagttcctttccccttgatcggcggcaagttatccatgatagggaagaaaggtctccacattcccaagaaggcccttggcctaaagattcttgagtcttttccacaagatgatggacaaaaagagaaacccactgagccttaggtttatcctgatactttgttggaaggacctctttatactctgtagtgacatagtcctagatctcaattagtatatcaccaagttttgagatgggctccctgaccttgttatacaattcgtacagcagagttgcaagggccacctctttttactcttcagcgccagctggacgaacattaccctgg

SEQ ID NO: 7260 - DNA, 795 bp, Cannabis sativa
cataagcgtaacaatatatcacataagttatctctttggactacataccgttgctacaatggtacatgaaaatttagatgcttctgttatatgttctttctttccacgaatcttctaaaaacttgttcatcatagaaaatagcttaaagaattccaccttgatattggcgaaattagtatgttatattgcatgtcatgattttgctctggcatgtactgtagagggctcataatagtaacaagtactgcaaactgcaagttctttgtttagttgttacctgggtaattaagttgcaatcacttatttatttattcatgctgtctctcacatgtcagatgtcacgacacatttttcttttgttttgtagagtgacgctgagaagatgtacaaaaagcttgccaatctaaaactcactcaacctgagcacaggttaaagcgtgatggctttatggggatatttggaagaaaagttgaccagttggataaatatgaaaagaagttggaagatttggaagataacgtaagaatggagcagtcttcattggcaggaaaggtgggacattttaatctctccttccatcactctctctccattcccccatctctcccttctaccaaacatagtgttagtggttttgtttttcaattaatttgttttttttttctaagagtgtgatatataagaatgctattagcggttttgttttcttcaaattaaagttatgctagaaatggtactcaatctaaacataaagaaactaatataaatgtaatgatcagaaaaatatgcgaac

SEQ ID NO: 7261 - DNA, 1761 bp, Cannabis sativa
tgttgttgacacgtaaacacgtgcggggaatatggctttgtttgaatttgaggtcttgttcatgcatgttagtttgtgctagctagctatagttaagatttgaaataaataaataaacattatacatgtatataaatatacatatattaatgtatttggaaggggacaaaatgcatggttgaatcttattttaataccgtaaattatttataatttataacagataagtgcaacaaaactatttaaattttattttaacattattataaattatttataattttttaaaagtgatagaatgtcaattaattaactataatatatacacggtcatataaaaaaattaaattatacctttatataccgtaaacaaaaagaaataccctactaagacaaaaataatactcctataccttaaatttttccaaaatattaattatctaacactaatataaaaatatagatgtataattgtattctagatgatcttagctatatgaataaatttatcaatataatatgaatctaactctatatgtacaattcaaaatctagaaaaattatacctatagaatattaaaattaggatatggctgtctttctttttatataattttttaacatcttaatatatagctgagttgctcatattttttttaataatttttttttaatatttttgctctatatttgaaatggtaagactttgatttttaactacatatctcacttgtttcttacaaaaattaggtaatatcatatactaaattttaactggtcaatcattttgaagtatatgtgatatttatgttatatagttacatgattgttttttgtttttgttggacatcgtatgcaagtaattatttgtccagcaaaatttatatttatttaatttttggcaactataatgaagctcaaattatatatttgaaatctatgaatttgaaaaaggtcagtctatactaatatgtctgttctgattatatatgtgtctatctaataaattacatcaaaggcatgtttaacaaacacaataatatttctaagagaactgttaaatggtattagtggtgcctaacaccttattatgtgtcagtatcgttattggtccaactaagtatcgggtccacataatttaatataatagtttttgaggagtattcaatcgcaacataacatgttcaaaaagtactagacactactggtgcttaatagcaatttccttctaataactatatatatatatatatatatatcttaatcttaaagattattaattggtttagaaacaaccacacaatgaacaaaattaatatacattactcttgatttttttgtcatggttataacaaaacaaaattccattaattaattaataaggatggcgaaataattgtctaatattgatttaatacgatttcatgtgagtgacgtccaattgtaattgccagagttggatacatatattggaatttggaagcattattaggttttcttaccgtgtggagttctattaatattagtatacctaatctgttgatacagtaatttgacttaatagtgcgaggtctctttttgatactgccagacttcttttgatgaataaagagtactggaaatttgtcccattgacagaatctatattttacccttaaaaattaaaactattttagttataatattagaagttgaaaagaaaaatgcatttggggacataatatcgttattaggcatgtataattgttttaatttaataat

SEQ ID NO: 7262 - DNA, 680 bp, Cannabis sativa
taagacttggggagtaaatgttgcctggaatttctcctaaaatacgtggtagttcatgagtaagccatgtggcaatgagacccgcactatagggcatgccatattaaatcaatttcagagttagataattggtagaattgcgaattattagtcatgttaggaagggtccactagaaggataacaattttgtttctccctctcaacgagtgaactcgacccggagaagacataggaggacaagtggagcatggcgcgccacttgaggtcaaatcattgtacacacatttaatgtggcatggggaagaacaccccacaccttactttgaaaaaacatgatcaagggtataaacccatactttcttgattcataatactccatacatcatttgacgactacattataagctatcaaatcattagcaagagacaagtctagtctcaccaaatgccgataacaagcctaaacacactatagagatcaggcaatcatgtcctatgttttaatttggaaaaatgtgcacgttcatacaaatacgacaatagcgtcatttttaccaccaatatgagcctataaatactctaatgatgtatgaaagaatgagactttcagaattctatgtaagaaaatacttattaataatagtgattcatgaattaagactcattaatgttctaatca

SEQ ID NO: 7263 - DNA, 781 bp, Cannabis sativa
ccctagctaggctaaatttagctagataatgatttttgcctaagtgatatatataggctatatatataacgatatattgcctaagtgatattaaatatttgagaatcatgtgcttttcttaggcattttagctataatgatttatcgtagctattagtgaatatttacttggttatagcttacatataaatgacttatctttgctaaaatacacacatgtataactttagctagttggcatcccacttcacttaaaaggggtcgatttgaaccgattaataactacaaaacaaattaaacaaaaaaacaagaagtaatacaaggtactatttgtaacacaataatgacaatacaaaaagtcacagtccctaattgcattccatgcacaattattaatattctatactcaagatgatgataatcatgaagtttattagatatgaatatgacttgcatttataactcattgtcctatgatatcgaagtcgtctcttataattaagcttttctctcttttttttttaattaacacatttatttatataaatatatttgcaaagaacatattgatatatctttactatattaacctgcaaatataaaagcttttagtaagtgatcgaccgggtgcatagtgacgttaataatcaaccaaaacagttcccatttgacttgacattagattttacataaataaaataaattcaaacactttttcttttagcgtacacattaaaattatattcttgaaattagttttggcccactttctatatagctt

SEQ ID NO: 7264 - DNA, 1159 bp, Cannabis sativa
tggtgacttaaaggaagacatctacatgcaacaacctccaggtttcattgatccagatcatccaacatatgtgtgcaaacttaataaggcactctatgggctcaaacaggcaccaagggcctggtttgaaaagttgtccacagttctaattcaacatggcttccagttctccaaagcagatcagtctctgttcattcgagtcacaactcaatcttgcatatacatcctagtatatgttgatgatattctcatcatgggtagtgataacaacttagtcgaacaactcattcgtgagttaagctctgctttttctctaaaagatcttggcacaatcaactatttcttgggcattcaagttactcacacatctgctgggattctactcactcaaaccaaatatcttcaagatattctcacaaaggctgatatgcaaaatgtcaatactcaacatactcctatgaacagtggacttagactctcaaattatgggagtgaaccagttcaagatgcaactctgtataggtccattgttggagctttgcagtatgctaccatcactcgacctgaactggctttttgtgtgaataaagtgtgtcagtacatgcataatcccctgcattctcactggacagctgtgaaaagaatactcaggtacattgctggcactctcgatcatggacttcttctcaaacctgcttctgatttctctattgatgccttctgtgatgctgattgggcgactgatcccgatgacagacgctctacatcaggctattgtatctactttggtggtaatcttgttgcttggaagtctcaaaagcaagctaccatcagtcgctcatcttctgaagcagagtttcgaagtctggctagcacagttgctgaagtaacttgggttcagtccctccttcgtgagttgcacatccctcaaacagtcattccctctgtgtggtgtgacaatcaaagaagcactgtgctcatggctgctaaccctgttcttcatgcacgcacaaaacatatagaaattgatctatattttgtgcgtgacaaggttctccagcagcaaattcttgtcaaacatgtgcctgctactgcacaacttgcagactgtcttactaaacctatttccagctccaagttttctgattttcgaaccaaa

SEQ ID NO: 7265 - DNA, 2535 bp, Cannabis sativa
aaaaggaaatggttataccaccaccagctaggccaccaagtttgacaaagtatctcaagccttatgtcttgaagatgcacttcacaaacaaattcgtgactgcccaagttattcatacaccaacagctactgtagcctcttctgctagttctcaggaaaaggcattgagaggagcaatggattctactcgtgatgtggctgctgctgcaaagattggcaaattattggctgagaggctgttgctcaagaatattcctgcagttgctgtccagttgaaaagagaacaaaaatatcatggcaaggttaaagctgtggttgattcagtgaaggatgcaggagtaaagctgctctaaacatggtaaggccaagaaaatgaaatcacttttctttttttatggtttatgtgggaaaatcattttggtcaaatgttgtggggaatgtagttgtgtttgatgaaaatagttgttgtaattgatctactgtgcttgatgagaaattgtactctacaactcctttaaattggaatgaaaataagcaaacgaacaaggtgaaatcattttctttattggcaaatgaaaatcaatttgatgtaattttatcttactacagtaaaaaaaactgtatagatggaagtttatgtgataactacaggtgatctagtctataatttaaaaaacttcatcaaaatagtatctattttactttatatttttagattaaagtaatttacggcgtaaatacctaagtttaacacccggttacaaataatacttaactttaatgtgtgtggtaataatacataaattatatttttggaatgattgcaagacagtctttaattggtccaagttgttagatttttattttttatttaaaatataattgaaggatataaataagaaaatgacatgtggataatgatttgaatacttaatagttaagtacttatcgaagtttcaaattagttattttttttttatttttttttttttgaaaattaacatttcatagattaaaaaattagacctcatggtcattacataaaatattttttggaattgttgacacctcgatcaaaccagatagtttgttggcatacgtctaattagcctcgatatgggctacaaaattacaacaccgaggaatcttaacaaaattacaacccaccaacaatttagaaaaaaaaaaaaaatgcacctactaacatagctatcaatctcccatcttggtgaaattcctctaaagcattgatggtgatttttgaatcactctcaataaacacaaaattgtagtccaaggttaattactgaagtctctagagcaagtaagcttcaccaatgagggggtctgaaaaagaaacattgttgacagctatctacacaagcgagcccatatggtcacgagccatagctgtcatacacatggtctccctcccatttctcacgtcacaattgatcttaatctagtccttcggaggggggaccatccagtctcagtggtaacaacaggcaaaatctgcataacaatgcttaatagagtaaatataatgttgtatgctatttaaattgttgttatgtaccttatcattgcgagctctccaaatcgcgtcaataacaatagacgcatacaagaaaatctcattaacattagctcctcttatgttaaggttccataaaaaattcaatcagtctcacattcttgctccagattcattgatcggaatgagtccccacggtgacgatcactaaaggtggtaagacaaattacaatacagaaagagatgttctatggtttcatcctctcccccgcaaataaggcaagttgtatctttaattttcatttgttgcccaatgattttgcaaatggcaagcgcattagacaggatgctctaccacaagattttatggcattcaagaattttcctattccacaaggaaggggcaacatcacactgaggagacctgtccaatgcttaaattaagtaggtagacttagtagaaaattagtggttttcttccttagtccaaacccactagtcttttccattgccatttgggcacccacttttaagaatagcggatatcgtatctacttcataaagatagtctagcttctgcatatcccaattaccattatcagttaggagatccgcaacccaagtatattcctccgttggcaccctctttggcttagggataaactcctgaccatggcttatttaggggtcctcccaaatacgagtattcttcccatccttaattactttgcatgctcctttcttgaggatatgttttgttttgactacattcttccagaattaggaattagattctttgcaaaagctattgagaaagtcttctcccctcatgtatttggctctaagcatttcacaacataacaatttatgatcattcaacagataccatccccacttggccaggaaggcctagttcatctccaaagacttatgaaatcccaaacccccacgagctttaggaagacataaactatcccaagacctaaggcaaaggccct

SEQ ID NO: 7266 - DNA, 610 bp, Cannabis sativa
cttttgcaagaaaaataaaagaccatagagattaagaaaaaatgaattgaaagaaggactgaatagattaattttgtttagattattaatgtgaaatcagtgtttcaaccttaaattcactattgaccttggcaaggccaaccttggtggtgtccttgagagctccataggccttcctaaagctctgaaacgtccccataattttaattaattgaaatgggcaaccctccacagagctttctctatgagagagaaagttggggagagtttagagagaggaaatgaaggaaacaattaattaatttgattgatttaattatctcaaattcataaatttcaattttgaccgattcatttgccccattgtttagctatatttggaaacaatatgtgttatgccaatgccatgcatatctctttctcttcttgtcacgctttaatcatccattatttcttaccaaaccaaattagattatggccttctcttctggtacgtgacatgtgaaacactgctaagcaaatatatattcataatacatgaccttagaaaaaaaaaataatagataataacacaaaaacatttatatataggaggtattaatgcttacag

SEQ ID NO: 7267 - DNA, 1382 bp, Cannabis sativa
ggccatagggattacccttatcaactgagattaaggcttttgacccacccctaaagttcaaaatgccaatttaaaaaatgtacacaggaaaagaagaccctttatcccatttgaagtactttgaaatgtagatggaccagtaagggattagatgcaatgtatagattataatttttttggccacactcttagaggccacacagcaatggtattttaaattgcctcctggaaagtttaattcttagatttctttctcctccaaattccactcacaattctcttcctcccattagcttccctcacacctagaagacttggtagaagttaagcaaatgccaggagaatctctcagggcctacattagaaggtatgaataaaaaaaacaaaggttaaagggctgcctgaggaggaaagattaacatcactattgggggtattttgcctccgggagaattattgaaagatatcaagagactaaatgtgggatcgatggctaagtttctggatcgggcagatggattcattaagctcgaggaggcagtaaggtgtgtggataccgtaggacaaaagaagaatcaacaaccaactactgcagctagtacttccacctagaattcataatatccccatagctcgaatctaaatggaaaaaggtctaacaagggtaataaacaaggtaatgtaaagaaagacaagttcactagtgacaccgaacatcatcctagagagaggcgcttccaaatgtactgctttctccgtcctaacagatgatatagaaacaatctatccaaccacctagtctatggtgtcgtacaagaaaccctctctcatgaagaaggacataagtaaaagagatacaactaagttctgtcattttcatgtagattacgaccatgacacaaatgaatgtaacaattttaagtgggagatttaattcttgatcagaaaaaataacccgcacttacaaaataactagaactaactgatgcctccaccagttgacgggcatctgtaggtaatcattggggcccgcacctcactggagacttgggcaaagctagagaaaagtatgctcgagccttgcaacatgaacaaaatgatacaaatctggcagtggaggaaaggaaacctaaaataccaggcgtaggggaaccaataataacattctccaaggcagatgctagccatgttatcttcccacgtaacgaccctttggtcattgaaatacagattgcaaacatgatagttgcatagagtatgatggaaaatggaatttcctcaaatattctattccacatatatttaatacaaacgaacattacaaaaatcgtgttgtatctatttagatcgagtatttgataattttgagctctatttttata

SEQ ID NO: 7268 - DNA, 803 bp, Cannabis sativa
gagagatcgaaagagagtgtgacaaagagagatcaaaaaagtcactacaagaaatgtcacttttactagcacatttttgcactggtaaaagtttggtattatgctggcaaaatgaaatctatttttgatgtgttggcaaattaacattggtattagaattttcgccagcgctaaataaaaagggctggcaaaaatttccaccccgtagatgcgctggtaaaagttaaattttttccactgtaaatgtgcgtcggtaaaattttaacttttttgccagtgtagtttgcgagatgggctggtaaaagttacttttaccagcacagtagcaaactgcgctggcaaaagtgacattttttgtaatgagtgtagatacatattttttatatgtatattgtacaaatatttttatatataaaataaatatttatatatctatatatattacttttggcctatggggaggaggtgggtggtggagcggcgacctcactgttggcctgaggtggctcccacgactgggatgagcagaggaggagagaaccctttatggtgtctcgcacaattgagatgaatggaggaggaggaccctttaatctttgagaccatatagagacttctacaattttcacacaggtttggttttgctagatctacaaagacttcaggttgacacatgtacacaaagtcctctagatgaccattcaagaaggtattgttaatgttaaatgttttgatataccaacttttgaaaatgcaatgctcaagacaattctccctatgaatacttttacaacttgactaaa

SEQ ID NO: 7269 - DNA, 1132 bp, Cannabis sativa
gtggcgtgtgactactcaggaaaaggcatagaattccacgttgagcgaggttcaaactcgaactactttgcgagcgcgattgtgttggaaggcggagatggtgaccttgcaggtgtggacaggagttaaaggacgcttcatcccaaacatggcgacccatgcaacaatcatggggtgccatttggaaatttgatgctgcctcacacctccacccacctctctccttaaggctcacttcaggatattctggccgcactattgtcgccacagatgtaatcccacatggctggatgcctggtgccacttatacatcctacgttaatttttaatcctattatccttattattattattatcagaagctgaattgatcgtgtaatgatctgttgtataaaaggtcatgtgtaattctactgcttattaattataataattattatatgagaaatactaaaatgtactagctatcctatttaccatgtaaggtgttatattattatttatataattaagtatcatgttttacataacttaatataataattttataaaatataggtaatgatgtttaaggcatcattattagagcctaactatggatatttcctcttctttgtttgttatgatatgccccgtttgtgaagatgaatgtggtaatgggcgtattgatttttgaagttaacaacccataaaacaataactgaattgaaaagatgctttaagcccaccaggtgctgaatgaatcgatctgatctgataatctctcatttggaaacctggctttaaattgaccaaagactgaaatgtgagaaaagggtttgagacagttagaggagttgggctaaataatttcatgttttgggaatgttctttgggccttctctttacctttaatatgaaaacttttatgcaattttacaaactttttctccaaacataaaatgtcacacaaaattatattaaattagatatttcaacttcaaataagttttataatttaaacactaacaatatactgcactagtcatttaaaatgttatcgaaccacctatttatttatttattcaaataatagtttagaccctgtattgtaaaaaaaatggaacataatgataccatgaactttattttg

SEQ ID NO: 7270 - DNA, 672 bp, Cannabis sativa
aaacaacgtccattgaaccaagatcgaacaatattctagcaaatgaagaaattatcacaaacacaaaaatcgtgtacgatcaaaccattataatattttatactattgaacatatatcgtgaaactatcgaacacatcatacaatttctctcaatcgagcaattgttgtgtgactagcaaacatcattgaaacttcattcctaacctttagaaataatttttatcgagcaattattgaacatgtattgaacttattgattttttttgcaaaaaaaatgagaaaatcgtagaaaatgcttatatgactttttcactaacaaattaacaaaacacataactaaatgaacctaaaaattacaaaacaacactatacttgaagttgaacaaaattaacataaattcacatacccacaaaattaacattaattcacatacccatttctttttagccacaaacaaccataaactttgaaaatttggaattctcctcctatctctacaacatacttgtgtaaggctcttgttttatagaaatttgttcatcttttactaaagatggttccaaaaaattgcttaaatgacaatatttttcagtatggtgaagagataaaatggtaggatttagaaagagggaaagataagagaaaaagaaaaaaagaatgtggataaaaa

SEQ ID NO: 7271 - DNA, 806 bp, Cannabis sativa
acaaactcaaaccatgtcacgagataagacacaaactgtattatcagagagaaaaattcttttttatcatcattgctatttgcacaatgtaaactctgcttgatgcgctgcaactactttagaaacccaaactaattctccaatatttaatcctatgtcttctattattttatttatttatctatttgaaagtattcttttttcaattattacttaatcaatataccatcaatgcttatgtttatttttttggaacgacccattaatgaattattattattatttttttttttgttatttatttgaatatgctttagtttaataaaactaaatggctagttgataagtagttataatacaaaacaacaaatgagaaaaatagaagagtagttcgaatgtggcccctctatatagtataggccttttgtattattgtctctcatttttcgaatgcatagttttccttacctatagctttatttatatatcataaagtatatataattttatatacactcttttcccttcttaacaaacttaatttaattcattattttaatgtgaataataatttgtcaactaatatggcctatagtagttaatagttatatggaacatcgatggaaaatgaattgtacgtagcatataagttgcatatatgataccttaattaattaattaatacaaaattaacaattttaataaggtacatgaccgtacgtggttaatcatggcctatcttcatcttcaatttcatgcataaataaaaataaatcaaaatctgctcacgatttatattatattat

SEQ ID NO: 7272 - DNA, 679 bp, Cannabis sativa
gtggaccatccatcattttttcacttgtataaatgccccttatgaactcaagttaccacttttcattcgtttcccaattttcggacccttcaaagcttgtaactttctcaacactctttgagatcaagaaccaaaatcaaagctaccttttcttcttcaccctggaaggtgctgtcgatttctacattcaccttctattgaggattcgagcgtgagaacttcaacatcattaacttccagtgttcgtgagtttcacgccagaagaggaaaacaggattctagattttgacatagaacttgactcgttgataaccctagcatcttgtctctgagaaaggtgcgatcgacttttccagccaaacctagcaatgattagtctaatgctttctacatcaagtatgtcgcttctttagtctatggatcatatttttgggtttgctaattacaagttatttttgcatgttctgttctaagatgcgattagggttttgtctgcgtgatgtcatagcagttagatttgggtattatgaaacatgctatttttagagttcactattaggaatccttaagatcgagtgttttacggcagatatgctggaaaaaatttcccatgcccacttcattgatcttcattctactcttcctcttcatcattcgtgacttcctatctggaatgaat

SEQ ID NO: 7273 - DNA, 1653 bp, Cannabis sativa
caaagatggtatcaagtggaaccaagttatccttgccaaatatgtctgggctatcactactaaaaaagacctgatatgggttatgtgggttgataatatctacttgaaatctaatagcttttggtcttataatctaaagcctgactcgagcttgtattggcgtaaactttgtcacctaaggcaaaagtttaatcagaatgagatagttaaagttggttcttcaggtgggtttggaaccaactggttgtacaacaaaagactgattcaaggtcctgtcaattatcacaggctgctcggagctcactaactgtgcctaaacacagattcatcctatggcaaatgatgaacactcatctcctaactagagataattaatctcgattccacatagtgcttaattcgaacttatgtccaatttgtgaggagaaggaggaatcccatgagcatctcttttttagatgtctattgtctcaaaaagtcctggaattaatcttttcttggatgggttacagggcttggccgatagcttacattagttggtatgattgggttattttgaggtcaagctaggatacattggctcaatatcactatcttggcggctgtaatctacaacatttggcttaacagaaataggtgtattttttatggttattctagatcagtttttggtttagttaatgatgtaaaaaattctattaagtacagattacaacttgtaaacaaaagaaacatgtcaaatcacgagagagactacttattgagattacacaataggtagttttggttagtcttggcttgtcttggctggtttgtaaggggcggtctttgttcttgagccatgtgtggctttggtgtttgtgctagttgttgtatttagctctgttgattaatgaagctttttcttcttgattaaaaaaaaaattagtggtgtttggctcaagttttttaaaattatttttagatttttcttaaaaataaaaatgaatattctacaccataccatgacatgaacaaatcaaacgtcaaatccaaacccgaatctggaccccagctcgaacctagactcagactcggactacaacttgaacccaaatccaaacccaaacacagacttagatctggaccacagacccgaaccctagactcgaacccagacccaagacctagtcccaaacttggacttggaccccgaactcgaactcagacccaaacctagaccctagtcccaaaccatggaccccagacacaggaccccggaccccggaccccagacccaaacctagactcagaccccaaaacatatatccagacccggacctagaccccagacccaaacttggaccccggaacctaacccaaacccgaccctagacttggacctgacctgaaccccggtccccggatcccaaaccccaagctcagaccccaaacccgagctaggtcctaggttggggtctgggttaagttttggggtccaggtcaaggttcagggttcgcgtcctagttcgagtaaagccaagatctagggctaggtccagggtcaaggtttggatcagggtcaggatctgggtcgggtccaggtccaaggttgggattggggtccacatccgggttgaagtccaggtccaagtctgtgttcggggttcgggt

SEQ ID NO: 7274 - DNA, 651 bp, Cannabis sativa
ggtcaactaaacaacaatgaaattatttgataatgaaaaataagaaaaagtaatagacgacatacaatattaatagagattcgagcccatatttgataatgacctactcctcttatttagtatttttatcaagatcacaagaacctggtcaagtgagtttcttgatgttcttttataaggaatatagatggtactttcacatcttaatttctctcttgagagttcagaatttggtcccctaagcagtgagaatgacccactatttataggattacaagtgagtaaataatattgattaccaaatatacaataaagaatgattgagtcattctcatgattttctcaatccaacgattcccccaatcctaccattctaggtattcaaagtgacatagttttcaggtattgggcagttaatgcgaatatggatttggtctttgtgatcatcttggtcagatggtctagtcaaaattaggttattcatttcgacaaatcaagttggtcggatacatggtcaatataccatgtagtatttccctatctcccaactgcttcgcccaacgttcagctctaggaacttgaaagcctcttttctcatcaccacgtgtcatcttattaatgccacaccactcgataagttttgagaaaaca

SEQ ID NO: 7275 - DNA, 1274 bp, Cannabis sativa
gtgttcctccatcaaccaacgacaacatcaactctgatgttcctactgatgttacatctgcgcctctggcacaatctctacacacaaatcgtcgagctccaacctcacgatccagatctcagctccccgatgacaccgagaatcaatctccaagaatcgacccacagcctccagctcaagatcagagaaccagtactaatcgccatctcaacgatgatgtatccaaccctttcttcttaagctcaggtgaccatcctggtctagtccttgtttccacagtcctaaacgacactaattaccaatcttggaaacgtggaatctcaatggctttagctgcgaagaacaagcttccattcatcgatggctccctcccacggcccgaaactggtaaaaatcttttaaactcttggcttcgctgtaataatatggtcatgtcttggttagtcaactcggtttcatctgaaatagctcaaagtatcatgtactttgatcttgctgtcgatatgtggcacgatcttgttgagcaattcaatgagggcaatggccctcgaatcttccaattacaaacccaagttaccaggttgcaacaaggtgacaaatctgtcacttcctacttcacaaaactcaaatccctatgggatgagttgaaggaatttcaatctaataccccttgctcttgtggtgcaatgaaacactttcttgaccattacaatcaaaaccaagtccttcaattcttgaatggtttgaatgagtcatatgcatctgttcgtgcacaaatcttgctcaatgagcctataccgaatctatctcgggtttttgctatgatcgtccaagaagaaaggcaacggtctcttggttctcatgacaacccaccgtttgctgcatctgtcaaaacaccagcagccaatcctccaataaacaagaagccacgaccctcttgttccaattgtgggaaacctgggcatttagttgataaatgcttcttcctccatggctttcctctcggctatggcgacaaaaagaagtaagacaaaggcaaagctaaagctcaccaggcctcttcttccactcctgctgaaactgctgtcaatgcacctgatctgtctgtccaatgccaacaattaatatcgcttctcagccagcagctcagcaacactactgctcgtgttgacactgaccaagctcctgctgctgcctctaatttggcaggtaattccttctttaatgaattttcttggataatcgataccagtgcaacacaccatatgtgtgca

SEQ ID NO: 7276 - DNA, 526 bp, Cannabis sativa
gttattcaacaacagcatgttggtgctgctggtgtgggtgaagaaattgttgtggtagtatggccaattcaaaaaaactgtaatgatgtggtgtggcctgataagacgactacagtggcgtaggttgatttcttggtaagagtggccctttaatcaatggaaacatgctcaatcaagtagaatgggatctttatctcatatgatagagtggaacaatagacttgagcattggactaaattggatgtgaataaaattaagattaatttcgatggagtacttttcgagttagaaaggaagtttggtgtgccactacaagagaaagcacttttgctgacgagttttgtcactggcaaaagtatacgtatctcgtcgacatagtttctccagtgacattttgcgcagacaaatgatgtcaacaatgattcgttggcataacaaattttttaagcgagttaagttgatgcgccaataaaagtatctataccggtaaatttagttatcgacacaagttcattgctgtcaatt

SEQ ID NO: 7277 - DNA, 627 bp, Cannabis sativa
tgactaaaagtctcatttaatcaaaaaaattatgctgtgattaaaagattatcactaaaaatagcaactttttttgtagtgattgtatttcagagcaaaaccgttgtccaattgactattattgcaaaaactagctaatactatattgactcgtgaattaatatatatattaataccaaaaccatgttaaaaacatctcttagttcttattattcatttctttataactagttttttaaaaactcgaaatattcaaaaaaaaaaaaaacatgcatatatatatatagataatagtattataggaagtatcatgaaaatgaaaataatagataatacacacgtacccttttatcattaagaaaaagccagcagaaggcatggaaatacaaatacagatcaaacaggtcagaatagtataaattacaaagcaggactatatatatatatatgtacgtattagtagtgtacgtacttgatgcatgcatgcatgcagcccagcttggtaaatcatacatcgtttttattttttatttttcacatacacaacatgacatataatacataataattaagattgattgatcgagcatgcatgcagtacgcaatcatgcatgcatgcaatagtac

SEQ ID NO: 7278 - DNA, 703 bp, Cannabis sativa
aatcattcatggttacgtaactttcttctaataagccaactagtttctttcttccaattattatatacaaataaaaccatatcctatttgcatcattcctatttttttttttttttttgaagaatcctatttttaaattgaattattattatatataaggtattctaattagctatatatagtgtagttgagaaataacaattttgaaatatctttataaatattaaactctatctttgtttcaatggcaataatgaaggccatgctcatccttatagttacttcccttggcctgtcaatagacgacttatttattataaaggcttgtttggttaaacatgaacgttatatacatttacaaatatatataaaaataaatatataaatgtcaacattttataattcatgatactttgccaaacagatatatatttccccacagtttgtacttgttattagagaaataatgggataaagttcaataatatgtaaagagcacgtgatcttaaataattaatatgataaatgatgaagataacatattttttctttcagaatttgagttgctcaagaaatataacgaatcaaagaaaaagtattagtagtgttttccataattacgatttatcatactgctatttttgtacataattaaatatatcctattttacttaaattaataattattgtaaaaaatttatag

SEQ ID NO: 7279 - DNA, 1293 bp, Cannabis sativa
agcccacatattctcatacttgaataggcgccccttacacgatatacctccctttgagtccaaaaggataggcccatgatcggaagccgttgaagagaggtgcttcaccactgcattggggaacagaatgcaccattctgacgacgctaatcctctatcaagtctggctcttttggttggtcctccgtggtcatgattatttcgatccttagcccatgtgaaacaaggaccttggaagcccaaatcaattagacccaccccatttaccatccttcgaaagtcgaacgagtatcttgaggagtttccttgatgagaatattgaaaacattcagagtccttgagagttccattcatatcccccaagagaaggacagggtgcaatgattgatggaccatgtccccaatgcttatccaaaaatcttctttgtcttcccaatgaggtggcccatagagtcccattaacaaccatttgagtccttttggttcaaaatcaattactgcggagattagatactttgaggatgcatcaatctcacattttacattattactccaacataagcctaatccacccgatcttcccaaaggagcaacatagtggcagttatcaaatttcattcttgtgcatactcgattaaacttgtccaggggtaaccgagtttccgaaagaagtagcacatcgggtctatgttgacggagcagggccgccaattgacgaactgtcgcgttattcccgagaccgcgacagttccaagcgaagatcttcatggcgattgtggaggcttttttgggcaagtctccacagccccaaaacgaaaatcctcattcacttgatccagtcccgagttcaatgaaaccgatttgtcctcctcaacctccgttatggtacaagtacctttcaagctctgttgtttctcaaccagcacaaaacgattatccaagtcaatttttaagtcaaagagcttaccatctttttgaaggtgtaccgttgtagaccctccagccgtctttacggttgattttttccatttgaatgacttgggtgtagccgagaggctatctttagcttttggtggtcttcccctcttcctcggttggcagctgttcgtggaaggcagagtagccaattttcgtggtcttcctcttcgtttacaagagctggaggcttcagcggaccccaatttaaacgcaccaattccatttggttgattttggttttccgagtgttggtgtggtattttcgtaggtgagtgaagctgagtttgatcttcttcgcaagagttatgttcagga

SEQ ID NO: 7280 - DNA, 779 bp, Cannabis sativa
atttatttatttgcttcctacttctgctagtcttcttatttgaattttccttcttaattttattttaccaaatagaagtacgaatttaattttaaagtacttaagtacattcctcgtggaatcgacctcactctttgtgagtctgttacttgttaatgatacatatacttgcgtgttgaaaataccacaacaaaaatacacttaaaggctggccactaatactttacaatacaacacaacaaattgtatcaaatagaacctatagcaaaaaatatggtagcccttcaatttagcctaacaataaatactatactttgtctaacatcctatttgaaaaaaaaaaaaatcaactttgctcccaaaaatatattcaagagtatatctttatagtattgttgtttgcagttaaatattatctttgatgggtttcttacgccaagcctccatctcctttggccaaacaaattgaccaaacaaattccgcacatcctgaatcactattttttgtgtaaacacaatcaaataaaacatgctgatgagtcttattagaggtcgcacaaactaagcaaaaacaagagtctaaggtcacgaatcttccaagatggtcccctgtgagcaagtgattgttaatcccttaacaaacaataaactagtacttaggaacactaagcttgtgccatatagaacaacaatatgacactatatcactagcaataagagaaagatataaatattttatcttaaattgcccttgtctcttagcctccattaaggaatga

SEQ ID NO: 7281 - DNA, 1167 bp, Cannabis sativa
aatttgtatacatgatcaagtgcatgagaatcttcaaattctttgggttgtttaccatatacctcttcatttaagatttgagaaatatggatttgacatctatttgaaacaacctaaaaccaatcaaacaagtaatagacaacaataatctaattgattgaagtctagcgaaagggaaaaatattttatcaaattatattccttccactcatgtatacccttgtgccactaatgttgctttgttttgaacatctgtaaaaaacttattagttttattcttgtaagtctattttgtaccaataatattgatgtacaatggtctaggcacaaagatccatatttttttttctaaaaaattgctccaactcttcttgaatagctttaatcaaatttcatcagttaaagattctttcacatttttgggttcaagcaaagataagaaacaaaaaaactgaacaatattactaaaccttcttcttgtaaccatcccatcttttgaattcctaagaattaaatttgttggatgattcaatttaactcttctagaaggctctttctgatattcattttaaatgatacttggaaatttcttttttatctgctggggatctatctcaacaaattcataatctgttggtacagattgatcagttttttcaataagagaatcactgacaatggtattctctagaattttagtaggctcatcaataaacatatcaattgctttcttagtagaaaaatcaaaaaaatccctagcatcatcataacaacatttgcacactttattatagtttaggttctcatgttatacacatgataagtcctactgttagtagagtatccaataaaatccccttcattatttttagcatcaaacttaccaagatgttctctatctcttaaaatgtaacaaacacatccaaaaatatgaaataagcaacactaagttttttacctttaaaaattttcataagatatttttgatgtacctggacggagaaaaacatagtttatgatattcagaggccgagacagcaaggtcctccagcaatgcctcctcagcaggtgccagtcgctttagttatagtggtgtcagcagaataaccttttggtggcaatcgtatggagcctttggataaatgattttgtaaacagacacctcca

SEQ ID NO: 7282 - DNA, 991 bp, Cannabis sativa
ttctttttttttttttctgaatttccaataaaatatatttttgcaaacttgtaacttacagtccataaaaatgaatattgaattatctctactccaaaaagattaattttacattaccatttagctttcaaatttatgaatcataccctcaatttgtaattaaagatatgtgccatatttttatttgctagtaaaatacaccactaaattttattatttactctgataaatgtgaaaaaagtcactaaatagtacaaaactaaagtaatcttttaactacaattttaattgtcactttggttaaatgtatatggttttcatttcaattttaatttattatatgatttaaaaacaggattgagtctctgatttatatgatcttaatatttaacccatacatcatttcttttaaattccattttccattaatctacaccactttaatgttaccaaaataaatcactgaatagtacaaataattgtattcaagcactagagtaattttttcccaagagacaagagtcactttcctcattattttgataaggccatagattattattgtcaagtctcaccaagaccattgtgatttcaatttgaatttattaattatttttaaaaatagatttgagtttatataaatgtggtttttagtttgatgttgtgatgttttttcagtttcactaactttggcaacaactattaataatgggaaagtatttttttaatgtgatgggatgttgattgaagttgttataactttattgtctaatatccgaagccagttttgtcctatgcagttcatgatttgacaaaacatgtctttcagttaaacaatgagttatccagattcgttgaaatctactaccgattataatttgctgcattattaattatgtgtgactctagttcaccacgtcaaaaaaaaaataataataataataataataataataaaccatacaaccttccttaaaatagatatgtacat

SEQ ID NO: 7283 - DNA, 564 bp, Cannabis sativa
tccatatacatattcttgatcaaagtgaccacttccttgactcactcaatttaacattttcgaattcaatgttgatttcacatcatcgagtgcgatcgaccctcttcactacaacattgtatctttaatgtgtgcaaaagactttggtaaagaactgagaaacaacgaggcttgatcttcatcttcaatggcgacatcaatgttttcaagatcgagaatcaacttgttaaactcattaatctactctccaatagatttgtcttctatcatcttgaatgaatacaaggcatatttcatatatattctattcaccaatgatttagtcatataaaaactttcaattttcaaccacaaacgttcggctatatcttcttttgtaacctttctctgaaccttatctccaagattcaaaatgatcgcactatgagcctttgcaagagtctctttcttgtcttttttagacatcgaatcaagaagagcgttatctcattgtagagccttatacaatccttggtgaaccaaataacccttcatcttcatcctctataatctaaagttatttgt

SEQ ID NO: 7284 - DNA, 1136 bp, Cannabis sativa
aatccaaggatatatctcagccaatataccaagaaacaaaatgaaaagtaaaacttcaaacgagaaaaattactaaaactatggcacttggatttgcgtattcaagtatgcctgttgaatttggaaggagtttgaaaaataagagaaaaaaatgaccatgccagtcagtatagcatgtggaatctacttttgcttaatcttcatattaaccgtatatattcgtacatttatggaccaaaatctgggatcaaaaaacagaactaatggcaacagtaaatcttacgcttatttttttagtattacacatcaaaacatcagtatttctctgctacaggtctagatggaaaaagcctcaaaagaaaagccatcaatgaccagaggcataccaaaccaaggacttggaaggttacaaccattgaaaacaaagcaccacttctttccatcacttctggggatcccaacggaatatctttcaaggcaaacaacaatttctctatgaaaaaggtggctcttgtcaactgatatagtctatatacctgcacattcaattccatcatcaaattctgcactcgattcaaaccagaaaaaactaattaaaaaacttcaaccggaagttatttaccgacctcaaaaattattggaacaagtggccaacaagatgatccgcgcttgtcaaggcttagttcaaaaacatactgagcagcgcagccaactagaaaaggaagcaccgcaaccaaagctgggaaaccaattactggccaggttacatagacagcaaacatgggtgccataaccttgaagcccattgtaaagaaagaagttgttaagtatcccctaaggcctgtgatgagaccccacctcttgggactgaactgtaaatatggtctttggacatggtgggttacaagaagaaatattgcaacgccaatataaaatgcagcttcaaataccaacgagctcactatttctgcaatgccagtaaaaagattaccgggtgttaacatcttgtgtatttgagaaacttaaaccacaattccaaacgtatgaactataaaaaccagaatcacattgatgatatatgtagaagaagaacctctcagcaaaatatctgataagagattcatccatgttatata

SEQ ID NO: 7285 - DNA, 1867 bp, Cannabis sativa
aagtagagtttttgcgtagaatacagaataaacaccattaaaatcaaaccaaaactaaaatacatagagcttgaggttgcaggaaaaagaagtgatgactggtttttcagtcacatagacaatcaatattagagtatattattaaaaattaggagctatatttatctttttaaactggaaaacatcaattttaaaatactaaaatttctaatttctgttggaaaacaaaaaggatagaaagttattcaaaattaatttttgaattctaagcatataatgcaaatatgaaggacacgtctccatggctttattagttagtcttagttctttaaaataacgagtaaatacctgtctcaatacaaaagtgctcagactcgatagttgaagaatatatacgatcattggaggtaattagtctgattcaagtcccacttatgttaatctgatacttccgtggcaaaagaactacaaaaagaaaaatgtccatacgtcatttactccaatcaactaaaaaaaaaaaaaaaaaagcataaagcaattagctaatcatttcatagtttgtctcaaaagcaaacttgtgtcaacagactgtctctgccaaaacataaataattttatttcaatacaaggaaagagtaatagatgaagcagcactacaagatttcccttttttcagtcaagaaaactgcataaatccaattgttcatgactacgtagagcaaacagaaaagtccccatcagcacaactagttgagttaagcatacatacatgtaaaacaatgatctatcccatttatgtaatgaaaatgaggacagcaaatgccaaagacagttgcacaagcgagctgtacacatgcatactaattacacaataaagtgagctattgtatgcatatatatcgcccttgtaataccagtacatccatactattttaacaagcggagtcataagaagataagttcatcttatctctcatcttttgatggtaaagaacatgaaagtgtatatgaataatgaacgtgttgtgtgagcaagaaaacttaataaaaggaaatggagattgaccaaattactattcaaactgaaaaagagtctacctagcaacaatgcatgagttgataaaaaaacagggagagcagaaagtgggaagagcgtactaacaagaggcaaagagagatttaacaaaagcaagagtgcacttctcctagttccagtaattagtttcaataagatccccatatcagtaccagaaattcagcctctaaaactgtacaaaaataatttaaagcaatttatatgaactataatttaattataagtgagtccaaataatacaaaactccaaaacaccacagagagccaatctacatttatagtttccaaatttatgagataagatcttatataagattgatatatatatacatatatatatatatatatattcctttcattgttgttagacacaaactgaaaagtcacaagcaacaagttctatgaccaaaactagggtttgaggcatttccaattttccaaatgaagtaacaagagaaaatagggaaatggatccccactcactccttcataacagtcccaaaatccaaataagaaaaaaaaaggggtaagtctgaaatactctcttcaagctttctctctattctagtttcctattacaagtaacaatagaacattggccataaaagataatgggttatcaccttcttgctcaaataggaaccacaacactacacaccctattttttcaatagcagcacatcagaagatgacccaaaaagagaaagaaagaaaagaaaatcagagaagtagacaaataagacaatggagttccaatatcaagtgtaatat

SEQ ID NO: 7286 - DNA, 1443 bp, Cannabis sativa
aaaaaaaaaagttgaaatatatgagaaaatcaagtaaggataaccatatacttttatggtaaccatttatcataaaatggtaacttaatatcttatattattatttttttcatatttttttttttaattttaaaattttctcataaaataaattttgagaaaaaaagtcatattttgtaaatttatactttaaaaactataaaaataaaaattctccttctaagttttaagtacttaagaaaagttacatattgttttggtctcatgttggctaaaaagataacaatattttgagttggccacaaagaaaaagaagattttgtttggacagaagaaatccttccacctaattacaaggttgatcttgaaatttggtaggtctaaagaaaaaagaaaaattattaaactctttattaaaaaaatatttagtgttttcgaaaattattaaaaaatatgtgtaaaaggaaaatacttttttaggccactagactcggtgaactctagatacgggtgtagcccgccttagttcagacctaaccttactagtcgtcatgtttttgtattgtttctaatatcaaagttttatatcgcctaatttttcaaaaatctctatttcatattggtcgaataacaaaaattttatttgtttgaacaaaataaatctagacctaggataacaaagattttatttttttggatggaaaaaatctcttcacttattcacgatgttcttctttttcttttgctttagacacttgtacgaactcgacaaccatctcgaccgcttcctaagatcagcttcgaaagcaaaagttgcctcaccattccctcgatcaacacttcgaaccattctcttgcaactagccgctgcatcaaatcacaagaaaggaacattgagatattggttaagttcgggccccgggaacttcttgctctcatcatcagagtgtccaacaacagcattctacgcggtagtcatagatgaagactttacacaatgcaaagaaggtgttaaagtgataacatcaacaataccaatgaaaccaccacaatttgcaacatcaaaaaatgtgaattatctcccaaatgtactttcaaagatggaagctgaagagaaaggagcatttggttcaatttgggttgatgaggaaggttacataggggaaggaccaaatgtgaatgttgcctttatcacatgtgaaaatgagcttgttgtgcctttctttgataagatcttaagtggttgcactattaaaagacttattgaattggctccaaaattggttgagaaaggggttttgaaaggtgttaaatttgctaatattacaattgaagaagctaaaggagccaatgagatgatgtatgtggggagcacattgcctgtcttgcctatcatcatgtgggatgaccaacccattggaaatggtaactagtaactagtaa

SEQ ID NO: 7287 - DNA, 681 bp, Cannabis sativa
aagaaataaaaacaataataatgttatttatataataattaaacattgtgaccaccactatagttgatgatgatagataacaattaacatttatcaataggtcattctcactcaaaacccaatatccaattaagattggctacacaactgtatcccaaagcttttggttttcttaatcttaattagtggacacttgtcacataccactttggctttaatacttccattacatcacaattatcacatctccacgtgttcatttctaattggttacatcccaaaattaattaaaattatcgtaattaagctttcgatgctatgtcatgttaaaagagaaagatattattaaacgagattagtcttttaatacatattattattattatcacgtgagacgtgagcatcttgaaaaccttggataagaatctatccatggaccgtacacgtggcaccatataaatgttacgtcagcagttgcatggagggaacatacgtaggttcttccattccatggatcccactgggtctgttgatttgtgccacgtgtcatggacaacaggatgttctactgtgcgacgcgtgtgtttagtgagattaataattatttacatcaatattacctaaccttggtgggctctatcttcgcataatgcttttcttcggccgacacccttttaaatt

SEQ ID NO: 7288 - DNA, 730 bp, Cannabis sativa
agtgttgctcatttcttggctagaacatcttattctgttgttgatcgtgtcatcagaagtcatgatgtttcttctgatttctttaatgtaatcttacatgattgcaattaataaattgatgatttattttttaaaaaaaaaaatcgtagaggattataaaataggcaatttagatttttatagaagcttattaaatgagcagtctattttctatagaaacttattaaataagcagaatattaaatggtaagggtatgattaattaaagagactattaaaaaagagatgattgcgtataaaagagaagtataaaagagaagtgatgagatgggatagtagtgtgaaagatagaaaaataagattaggaagtaatgatgaaatgagagatttaaagagagactcttccgcgcttctcatatgtgttgtgtgtcccctcaactttctttttataggtgttgagcatttaacttactctacaaacaacttccttggccagttactctaaccttatctttttatcaacttgttgatggacaagatagtatctcattcgcaaataaatatttcacttaaaggttcttattaaaggtaattactcttcctattatatccttttatctatcaacaaacaaaacaaatgatgttaatgagcccaaatttgagcgaattcatttctttaatcacatagcaaacgtccccaaaagtgaagtggcaaaaggagtttcattca

SEQ ID NO: 7289 - DNA, 518 bp, Cannabis sativa
aaagtgtttgaccaagatccagaccctcccctgttacttaaatttagacaacttttttgtacttggagattaaatatatctggagtttccaaactcataaaatgtgaaatattagttttaattactgaaaactaattgagttttgagatggataatactaaaatgtgaattattagcaaaattctggtgaagggtcgtgaacttaatttaataaattgtcgagtgagaaaattattgcttctagcacagatcatcagatcttgttcttgtatttattatcaactttggatatttttatatacacccaactaattatttgtcgtatttgcctaatgtagctatttgttgatcttggaccggacaaactggaaaacaaacatccttacttcactcttaattccatacattttcttcactcttccttccctactgttcgacttattcaggtaattaccaacttaaggaacacttttgtttttaaaaatgtgcttaattatttatttattagttccttgtac

SEQ ID NO: 7290 - DNA, 1448 bp, Cannabis sativa
  modified_base (212)..(218): a, c, t, g, unknown or other
aatactttttctttttacaatttcatattcattcatacttttagctttgatataaaaaataatattttcttttagaattatactcatttttttaaaaaaaaaaaaaaatccttaaaaataatagttttagacatctttttataatttttttttgttttttttttttttttgaaaagatagtttcgataacttgtatttaaatactatatttnnnnnnnaagtaattttttattatgactaaaagtcacatttagtcacacaaaaattatgttgtgactaaaaaattgttactaaatataactacttttttttattgacctacttgttctgaatatgtagctcaaaaatataatttaaaaaaggtgcttctagaaaaaacttattctgttattcaaaaaaaaaaaaaaaaacttattctgacatttttcttaaggactttttgttaccaattttatggtgattttggatgagattaaacaaaggacaatttgtatgaaactattaatgtaacatattctaatttatttaaaagttattataaaaatctaaaacttgatagtgacaatcaacaaaaagaaggaaaataaaaattccaaaatctttgatttgattatcacttctcagcagaatgatccatcttcataaataagtgaatgtactttaaaatttattattttattttttttttcaaactctctttgattatcatggttattcataacatataattcaaacatgaatgttagacaactatttaaatatatcataaactaaggaaaaaatatgtcaaaaattaaattaacttttaagatcatcattagtttttaaagtttttacaaaaatattcaattttaagtaaaagtttacaattttactgtaacacataatttttttacaaaaataatgttattttataaaataacagtaaaactacaaaacagaacaactacaacaatagtggaacaactaaaaaataaccgtagaacaacagtaaaacattaacacaatacacagtataaaacttacacattatttttgaaaaaaatacagtatttttgaagaaaaaaatttgccccacgataaaaagaataataaaataaaatatttcagtatatgatgtaaaaattccttaattttttaatatttgatgatttgttataggagccatcttccaatcgggagccatgtgagttgcaatacccttaattttgctggcagtccaaagctaacacaactcaaaacctcccatgcgccttacaaagatgcacaacataaagcaacgttcatgttgtgtttttttagtttagttctttaaatattttaaagtttgtgagtactctaacaataacctatgtacatatcaaagggagtgagagaatccattttcccaaacaaacactaatttgacttggagaacacatagagacataaaataaaattgtactacg

SEQ ID NO: 7291 - DNA, 801 bp, Cannabis sativa
tgtttaattttcatttctataaattatttttattctttacaatcatttcatcagggtgggctatatcaggtaacttgtttatcattaggtttatctgtcaccattaaagtaaccatttgaaaaaataaattattcttagtaaatatgtgtttattgaccaattatttgttttatatacatactttcttttaaacttcaactacttgttttatatacattctttaaaactttagttgtggtgaagaaattactcctcgtgggtagactcatctttttcttcacgttttaagacaaaacccataaataaaatatattgaaattttgggataatttatgaattctagctatttcgtctgagtacgatgtttcattgagaatttgattgttgcagcgacctctcgtagattcaattaattcactttttgatgtggatgaaaatttaggggtatgttaggataagatttggtacacattaaagtttaaggataagatttggtatatattaaagtttaaagtttgggggaaattaattgatataaagataataaccaatctcaatagttttgagagaatttttagtggcttgaaaagcaagtgcatgatttgattcatattaagtttttggtggaggaattctaattagcctatagaattataatacaacaattaatgagaatgaagttgaggtgatgtttggtaacatttttttaattagttttctgtttttaaaattgaaaaagttaaaatatttttcaaaaacatgtttttataaaaatgttcattttttaattttttaattga

SEQ ID NO: 7292 - DNA, 930 bp, Cannabis sativa
catgatgttcatttcgttggcaaattatcaatttttattttattttgtttatttataaaaaaagatgtgagcgatttagatgggctttcttaaaaatacttgcttgttttggatgtcatgttttcattatttcttagacacaatatttttttactctaaattgttgattggtgtcctatgttcttttttattttttttttcagttttcgggttcataataataataaaaaaagtttagagtgctgatattttattattttttggggcgtcctatgtttatgggttttttttttggaaacatgtattacttggcatttttgtactcgttgtcctttctcttttttttttttttgaattggttaaaggaagagttattggtttcctttttgaataatttctaattttatgggtttgatttcattaattgtatttatcttaagtaactactcactttctctttttaattctcctctttataccccttaactcaggatacccccctctctcactcattcacttaatttctcttaaagtttgtttctttcttatgtgtgtgtgtgttaaagagttctttctagggttttaagcttcaaagtcagcaatggtgaaaaccaagagtgcctgaggtggtttgaggtgccttgcccgtagttccctcaaagttgctccagcatctttgctttctactcctgtcattgagccttcttctgttacagtttctctattttttctttggcttctttgatagaaaaaagagggggagaaatgattattttctttgttgtcaactactcagggggagtagttgtgagggtgagttgtttatttagggtttacttgaacttttctgtttaaaaagattactttaatttatatgttaacgagtttttatgtaggagagtatttttatactcttatattatttccaac

SEQ ID NO: 7293 - DNA, 572 bp, Cannabis sativa
actttaaacaagaaattcaaaattttcactaagttcaaatctcaccaggtctatcttcaacagcagagccaatcccactacccaattcaatctgcttctctctcaaatcatcatcaacagcaaaacaaactccagacccagaattcttcctcctccgagtcgttaacctcaatattgggttttgggttttggggttttgagcttgaattgagctcaactgtgttctgactgagttagacccaaaacgatcgaaacagctgtgcttattgttgttgaggttgagattgagattgaagtgtaattggggaattagagaaccgcttgtgcttcccatctcaaatctcaatctctgtgtgttgatttttggttcaaagtttggagctttggttggttcgttggtagttgttgtttagttcttttgttcttcttccaaaatatttgcgaacacaaaaaaatctgaattgggaaatgattggttggttcgttcttaaatctttattacgtaattttaacttgggccttaaatgggcttgggctttttcttgagcccaagagtattgtatacgcattta

SEQ ID NO: 7294 - DNA, 588 bp, Cannabis sativa
ttctgggatttatattacacttaatatttattaaaagccttagccacatgatagagtttcagtaattggataaatgctttgtttgatgtgattaaatttagtttttcaatattgttggagatgaatatgctaattttggaatgttatgtctcccactttatattttcttttgtttttctttaaattatgtttttgattctgagttctttgctaaacagcaaatccattctctgattatgtcccttaattacacgggaattgagattaggacagcacatgccctggaatcttggaatgctggagttcttgtaatggtttcgggctctgtgcaattaaaggatttcagcagtaggaggaaatttatgcaatcttttttccttgcgccccaggaaaagggctactttgtacttaatgatatttttcagttcattgatgaagaaccaatccatcatcatcatcccacagtcatgttagcccaggctaatctcgattccaaccgaactgtttcaacaacagcccctgagccaggtactagggtttatacgaattatagattttaagatttcttttgttgccagaccttgctaa

SEQ ID NO: 7295 - DNA, 658 bp, Cannabis sativa
taaggagtctttttgctcctgctctatcaggatgacttttacttttcctgccactgcggcggtttgccaagtaactctctcaagtgcctccctgatctggatagaccgctcaacaagtacttgctgcttggaggagccttcttcccacttttactcggagtttcttgtttgagtatagtttcttgttcgggcacagcctcttttgcattcttcataggctttggtacgaaatcaggtggaaaaagtttgtacttgacaaaattggcctcgatagtcaagagggagatattacgggaagtagaaggtagttggagaatttttgtgcccttttcttgagctttagtgtgaacggagggcggtagtaggaaggcacctactggaagctggtctggacggtgcccatttctttgatgaagtagtattcgtccataaagccccctatcttggtcacctcggtggtcgtggtacccgtcaaccacttcttttttatttgagaaaaatagaagtatcccaacatgttctgcttggtacttgacttcagatcaaagagcctgttggtgtcatgcggggacggctcatcccatccttgtgtggcgtagaggacgatcagggcggataaatacttgatacttttgggggtgaattgggtcagacttat

SEQ ID NO: 7296 - DNA, 970 bp, Cannabis sativa
tacataatttcttggttgttgattttatatgcctcctctcaattaagcaatttcacctttcatgccagctgcattctactatatatgtaactactacgaccaagctatatatattactatttttcaaaccccatatattgatcgaaacaaatatgagccatatatacacatatagatgagatgagatatggtatatacattatggtcataattaataacaataataattaagtccatatatatatatatgtatacattataggtccacagcagaggcactcaaattcagcattgagtttgagagggaccatgtctcgatcgatcagctgagagacaggattagtttccaccgccgattataacgtatccaaaacccaataaatatattatgactatatatatatttatatggtcctggaccccttgtaataattcaatccatttaatcaatatatatgtggaacacacattgttattcattatatatatatatatacatacatatgtatatataattggtgtgtgcgtacgttagattttggtggtggttcagagattgctatttgtccagcttgaactccgcgttgtgcccaaccccagtgcagattatggcccacagtttattatcataataaactcattcaaaatcagataataacaatatgagtaatagtaaggagtactaccatcctcttatgtgtcggtattgctattggtccaacttaatattaagtctcatagtttaatataatagcttttagagaatatcgttaattagctaatcgcaacgcgacatgtgaagaaagtactaggctccactgatgcttaatagcaaagttctaacaatatatatgcatgctttcaacaccatcatcaccacatatatgtatatatatatatatctgtatatttatatatttatagttttatacgtacgtatgtgtgcttacatatatctatatatatataa

SEQ ID NO: 7297 - DNA, 1080 bp, Cannabis sativa
aaaaaaaaaaaaaaaagcagtataaattaaagatttctaatgccatttgcacacccattggaacctaagatgaactattttatgttaccggatcatgttttgcgaagatgtccgggtaggggaaaatggttttaagaatttgttcctggaattagcactaatttccgtggccaaaaataaaagcataaaggagatggtgattggggggacgaggtgtccagttcaaactctgggtggaacttccacttcagaagaaacctacaagacagggaggtttcaaatttgttggcaatgctgcaaattttagagcaaaatccaggttttagattgttgaaggacgtgaggtatggacacctgaaactagtggggttttttcatgcaagtttgttttccacaaacttagctcggaccacttagtgggggaggcaactttttttattattttgaaagggagggagaggcaagttgagccaaggtagtttggaaaagttgtgtccccaccaagatcaaagtttccagttggttactagcctcgggaaagctgaatgttcatgaggtaggagaaggccataacatatattgtccccaccccagtttagttgaaaaactataaccagtttagtcgtcctttaaaataatactcactaggatatcaattgatagaaagtctatccaagttgacattcagaaaattagaatcaaacacaaattggaaagaggaaatctccacaataatctacaagcaaataaatctcacaagattggtgggagagaaacgagtgtttgcatccttggttgcataaaatcgatccagcagcttttttatgtgatcatgcattgttgcatcagtaccaatgccctcctatagtatgtacaaaaacatagaactcagcacaatatcactgtaaaacttataacagaataaagaaatactaacagaaacaaaacccgataaaacagtctatattttaatcaccttgtccatgcaactcagtaaatcagcttcactcaaaagtggtggtggtctagtgactcctgaatcaagagtcaacgatgtaggaacaaactgcaaaatacaat

SEQ ID NO: 7298 - DNA, 768 bp, Cannabis sativa
gccagtttttccaataaatagatttgtgatcaatagaagacccccaccaaaatctagacacaatagattcaatttctttactgattttagtagggagacgaaaataggccattgcataagagggaatagcttgaaggacaaccttgattaagatttctttgccagctttggagaaccatttatgatgccaggattggacaacaaataacactttatccttaagaaaagtaaaagactggtatttagattgagatagacattgaggaagaccaagatgtatagtagtgaggggtttattgtccaggtggaaagtttgggaaaacaaagcacacattctatcatgcgtatttggggaaaagagaataaaggatttatcaaaatttataacctgaccagaagctttcgaataaatattcatagcactatttaaggcattacaagaattcatatcagccaaacaaaaagaatactatcatctgcaaataaaagatgggaaatatgaggtgcattcctagagatggcagtgcctttaagaagttccttatcctgaaaagatcaaagaatggtagaaagtcctttagagcaaagaataaataattaaataaagggaaagggggtcaccttaccttaaacccctgggaggaagaatcctaccaacaacttgcccattaatagaaaaagagatagtagcagtagataaacacctcataatattagaaacaaaattgataggaaaattgaaatgatacatgatatttctaagaaaat

SEQ ID NO: 7299 - DNA, 592 bp, Cannabis sativa
atgtagatataagcaatgtacatctttaattttacaaattcatgagcaattcattgttgctagtaaatttgttaagaaattattttcaaattaagaaaacaaaagttaatgcaagcaaacccttaaaatatgatatttatgtgttacagcataaaatttaataaactttacaacttagttttcacaagaatcattccttatgcaaaacttgataaacactaaaatccaattttcaaattcgcaacatcgagtaagctaatgaaaagtaaaatattcaaattcgaagaactacccatacaactcccatcttgcctttggttcttcagaaacaataataaagagctttactaagcagactaaattcatttgagaaattaaattgacaaagattttcaattcacaatattaaaagttaatattaattatctatgcacaaacgtttcacaagcataaaaagggagaagatcagagaacacaatttattttatgcaattacaaaatagacattataatacacaacatcaacaagaagataactttttacctcatgaaggaacttgctccaatgcagcatgacatgataccagtgttt

SEQ ID NO: 7300 - DNA, 517 bp, Cannabis sativa
tcaaacattgtcgatgtcattattaattaaagttcttgaaatcttcaatgcagttcttgaacttgaagcaccttcaaccaagttctgataccatttgtttatctctgatcacctcaattaagaacaatgcaataggatttcataatcgttaacaactttctaatctctttgttaactcagttggaaatgaatgagaataaatcatttcctcatgtaggtaatgattagaccgaaatacccaactcatatgaaatgataagttggcagttggtccaagtaacaaaataattgtcactttctataagtggtaactggttacttataagtaaacataacaatataatttattggagatgtccgtattataaattttaattaagaccccttgttaaattctctatttcatgataaggagaagtggcacatgacacatcattatattttatagtgtgcatatttctttacaaatttttaatataagacccctttgatagaattacagagggactaaaacaaa

SEQ ID NO: 7301 - DNA, 759 bp, Cannabis sativa
aacagtatgatatacatgcaagacaatatcctagcctccactctctattccatatgccacactctctctcttgcttctctctagaaatttcaccatgatgtttgagaaaatcgtccacactaacttacgtgattcaaatatctttgtggaagatcatgaagaataaagaagaagatagtgatctgaattccttgtagtacctagtttcaaaaaggacaaaaggttagagaattcaaagggtggagtcattaattaatttcactatgtgattgtaagtatttcttatgtaatctctattttacggtaaatcaattaaaagcatgattctaggttgttttacatattattatattataatttatgaaataaacatgaaaataaatcgatcttattgtatgtttgaggaaacaagcttacatgcaaccgtgaaacttcctatggccagtggtcacatacaataggaaggagtagaattgggcatgtcacttacaaaaaccaatggaaaatattttgtagaatttttaacctaaatatgcaagcattgatcaatgaaaggtctgtgctcgcataagtgatcaagttaagtgtctttgcaagcctaaagtcattaagcttggaccaaagtccaagatgatgtcaaagcaccattaaatggcataagataatgctatacacgaaaagtagctattctcatgtcactgttcacatatgacattgccatcctaagcttaggacttcattatacatgttcctcgaaga

SEQ ID NO: 7302 - DNA, 800 bp, Cannabis sativa
caacatcaacactagtaaaaaattctccatagtcaactcatgatgaggtaatattgcacatgtgacgtataatcatataaatgtgtgtttgtttgtccacttaattatactatatataagcgattattctaaatcgtcgaccgatccttacctgataattttctactaatgcccattaagttctgtgacggtcggcgtcgacagttataataacccacaacaatatcatacccgacagttgggaaattcttttttttagtagtgataaagagaccacgaaaaattatttcgataaattctcttatctatattatttaggagattttttaatttatttttcttcataattctaaacatttatcaaaaatataattcaaatagttatttactatatgtaaaataattatgtgtaaaatatttaaatcttatttttgatactataaattattaaaaaaaatatataaaaataattctgtatagtaagaacatttaggattattaaaagaaaaagctaatttagaaaacttttcttagtacaaataagttataccacaagaattaagatctccggttaaaaagtgatgtcttaaactatgttaaattaattaaataaaaaattaaatttctaataaaattaacaaaaataattaacatatttaatataaattagattaattgatgtatcaaattttaatagatttaacacagtataaaacccttatttttaaccggaatcttgattcctacaagagcatcccttccaccttcgactggcgaatactttacctatgtgctattat

SEQ ID NO: 7303 - DNA, 698 bp, Cannabis sativa
aataattatatgaatggtatgtagagtaggaaattataatacttattatggaagagtaatagtacaaatttagaacactttaaacaaatgacacttaggatactcttaaacttttacacattttagactcttttttctcacacttaaagtctcctacttcaacttacactttggcacacactagtactacacttcaaatatctaaacttttttagaattttctaacttctttacaagtatctattacttaagtagttttaagtttattctaaaactttctaaaatattttaagtctttattagtactttttagaagagaattattaaaaaatactattagtgtctagtaccctcctcagtatcatactgctattcgtataattaagtattgagtactatataattaagaaaataacttttaagaaatatcgctaactaatcgtgaggtgtcataattttgggcactactgatgctcaataataattttttttttttaagaatattataaatttggtaatgacacttgtcattgtacaggtgatggaacttgatttgctctcccttaactcagtacgacaatttgcagttgagtgggatcagctttcaatgcctctccatattctaatcaataatgctggcatcttacgtatgggaggtatattaatattatcattaattaattttaccaacaacaaat

SEQ ID NO: 7304 - DNA, 636 bp, Cannabis sativa
aaacgaacaacaagcacccatttttacatattttatttcccaccaaataaaaccaaacgaatctcatcttctctgatcagaaccacattgttttctgtccatacaaatatatgttattgtttgttatatcagaccccacaaacatagttcctgaaatggattctcttgtctcttcccatcacactcatttacttcatcactctttcaatggcggcctcctcagccataactcaggctgttccgctctcttttccaaaccaccactgctctaggttctttctgccaggtggtctctcttcggtgtcacgttttcgcacaaaccatccaaaagcttcgcttggtgttgctttcaatggggcccggacgttatctcatttctcaaaacgggtgtccccttctggggctgttgggttgacctccagttccaggttcttgcaaatgggctctcgagaaacttgttctggcagagaaatttcagcccagtctagcggtgcagagagcagtagcacttccacattttcacaaaatgtgagtaaattttttttctttaatatttgatttaattatgtcgttgttgagtcttgaagggtctttttctttgttgagttttgcttttcattgttccaaaatattgga

SEQ ID NO: 7305 - DNA, 1285 bp, Cannabis sativa
gaggtttcttcagaaaatggagttgatgttcctgcaagtgatgatgctgtcattgaaacggtccaagtatacaacaactcggttgagcttcgtgaaaattgtaaatcagatgttaatgttgaagaagcttctgctgagccacaaaatgaaggttcagcttttgtgatcgagctacctcgtgttttgaagtatgattgtggtagccctgattgtgtctcaacgcctcatgatgttgtggcggattttgaatccaattcgagtgatccatcggctaatcttgttcctcatgtgcaagtggcacctgaaattggtccatctgataatgaagcccaaatccaagaagtgtgtctgagtgagccgaaaaaacaaggggccataggtgactgggaatgtctaatgtctgatgctgtcttgatttttgattcacccaacacttcagagacttttaaggggctgattcatgattcactggagcctgttggcaggtgtagtaattttcttgggacagaattccaacaaaatgagattaataatgagcatgaaatgcaaattgtagatccaggttgttctgaacaacataatggagaagaacccctttctcaaactggagatgtcagtcatttggaggatatggaacaaacacatgataggtttaattcaaatagtggcatggctatcaatccaagtaagcgaaaggataaggaagctgaaacccgcatggcatttacttgcaaggtaaaagcaacagatttccattccctctgctgcatcttttctactattgtagaggaacggtcgtaggttgttggggacactttattctcatctttgtaattacttggtgtcaatcttctgcatacaatttatatgtcatgatctccaaatgttacaactgtaaaattaaatatggtttaaccaactgcttcttttttgtaattctaaaatcttatacctgttcacttgttaacatcagccgctttctctttaaaaaaaaaaagaaaaagaaaaagaaaaaaatactgttcaagttttttatgctcttacttattttcttgggcatgtttatacctcataaatacgaaatctagtttgaatgttctaacacttgactgtgatttactctctttgtatatagtcggttttcagcttgcaccgaggaatgcgaaggcgctgtctggactttgatgtgtcagtagctcgaaggaagaatttaggggatggttcaaatagtagttcagttttagctcaacctgatgaggagacccctgctaatgagaggcgacaa

SEQ ID NO: 7306 - DNA, 1072 bp, Cannabis sativa
gttagttattgattgtttgtaactgatttatttctcacccttgtcttttctatgagcatgaattcttaattgctgcacaatacttccattgcaggcagaggaatgggaaattgagagcttgctcaaactaatgatagtgactagctaactgtagttatggggtctttcagttcagctcagttcagcagcatgtatatcctacacccgaagacagttctttgaactgcctgttgttccttgaaccgcggggcaatgaaaacgaattccaattttttattctcttggtaggtttttctcccaatgaagccggtttaatccaaaagcagcgtacccagttttctgaatttaggcattttctactaatgggcaacattttctgagtttattgaagtctaaaatgtgctctccatacctgatcctgagctgggttctctttttgaggttttgagcctttgaggggtacctatttgcataaaccaaagctttattgaattaaagtttcaaatgcatggtgcaatgtctgtgcaatagattttctttttccatataacatacattctctatacatgtatgattgagttgatatggattacaattacatttacggacttcaagtgataatgcatcgaaggcactgaggaatgtgcttttgagttttgggatagcaaatagtttaaaaagtacgtaccatgttttgctgttattgtatgctatttgttttggtagctttattttagagaaatgcttaggaaccatggtgattggtgtttagtacctttgtgaggtataatattatttagtgcaactcaatatcgagttccacttgttttatttagttaaatattttgttttatttagttaaatatttaaaaaatcactgagctagaggcaccacatagcaatcctctttgttttattattattgtataagaattaaatgaggacatcgattacttgaaagaaaaggagatttgattgagaaatatgactccaattaaattcatcctatcctgttttttctcactttgcaaggaaaaaaaacaacaataaccatagacagagacccagcgag

SEQ ID NO: 7307 - DNA, 1270 bp, Cannabis sativa
actcttcagaaggtcaaaacaagtgttggtggccaccttcccttaagaatgtagagaaaccagcatttgtgaccattttttatgcctcgttgagaattgggactattatacccaatcattcaaaggaacaatgaccagaaacctgtagatcccctttcccttcattgttctcaattagttgatctacagtccaattttcttttacttcattactcaatagcttgaattgctcttttaaactagaaagctcttgcaaaattaagaatctcaattaagtagagaaccctcaatggtgcataacaaaaggaaaagatccatgacacacacttgaagtcactcacatcttatcccgacttctttgcatgggctgaagcatacggtttaaaattagcttgcctacatcaattaaataaatgaaaggaattagaaatattattttaaaaacaaaaaacaattagcggcagaacacagggagaaatcacttactaatatttgacccaagcttcctttgccttatttttttttatctcagcttcatcttttttgtctaaagcaggagcactcttttgtttaggtcccattacaaaatcctattacacaagaaaaaatatcaaaattaaaaaacattacaagccgtatacaatttgaagataaattttttgaatagttgattgcaatagtccaaaatttcagtatattaatgacatccctatacttaattttctttcttgtttcccataacaagtatggatatctttctatattatctaaatacatgtactatagtctcattttatagacttaagaaaaacaaaaaaaaacaaaaacctaaagaacatgatattatggttggtttggataaacaaaacctagctaacaaattttaagctttaaaatgtcagtgtggtatagctcaatcaaaaaatgtgtccaatttacagataaacttaagcatatgaaagccaagaataagaaaaattccaccaaggaagaacactaaaatgataagcctgctacagttgattaaataaagaagaaatatgggttttctaaagttggtgtaagtaacgataaattgaatatttaatgcttaatcttctcatatctgaaggatctaaaatcagtttggcaaattaaacatacagtggataggattcaaaatgagtgcaaatttcaattaatttgtgtattaccttgtgaagcttcaaataaatatagggaatttctgggtggcctataatccgcttgttgtagaggggtgttgggaagt

SEQ ID NO: 7308 - DNA, 578 bp, Cannabis sativa
aatattgaaaatatgtatactaaagttattctttgttaaaatacatcaaactaacttcaactatcaagtaggataatcatgaactggttaaaaaaaaaaaacatgaatgcagtaataatatactaacctatagttgtaatagagtcctcatgttacacctttaaattgtctctttaaaagaaatctagctattgggccatcaaaactccacagttaagtgtatttggacaataatagtactagaatagttaatctttattagagttagtaatatgtagaaataaattgtcatatataagatgaataggctacttttcttattgtcaattaattttgagatggaacttcgttcatcttatattctaaaattctaataacaatcttctcgaaagttcttgcacccctaaattaattgtctctttcaaaaaaaaaacctacctataatagcatgcataatactagatctgaactcatggttttgtcttttatgggtagttgtctaaatatattattagtttttatactacatataaatttttttaacttttttactcttttaaaactgcattttaataagt

SEQ ID NO: 7309 - DNA, 832 bp, Cannabis sativa
tctctagatcacagtaacaattagtttagggttttgtacccaacatttacaaaattaggtttacatttagacttttaatatggtactgagtatcttcagcaccaattgcttacccactttaagaccccgttttgggttttgtgaaaattgtatttacttggatttcaagaagaatttcatagatttggattttatataccatatacttagggaaaaaaatccttaattttgccattagtattaatgtttttctgtttttgtattttagatgcacaacctcttcagtggaagatttgcaaaacctttaaaagcaattcatctcaggtgctggatatccaatttggagtttctcaatcaggcttaaagatggtgaggtggaagaatttgctctttttgttaatacttttattttcaacgttttctacatacttcggcacaattattgatgagtaagtataacgaattagctactgatgtactgctgaatatttccttcaaatgggtgtttttaaaatgagaaagaaaaaaagaatgttacaaactactttatgcaatcatcttatttgtcatgtgtgaattacaaattgtaagaatgattttaaccatgaccatatacctttcccataataatttatggtatagtaatacagttaacaaatttattactattcaagtgttcttctttattctctgaaacaatcatttataggttgctgcttattcagatggccatatcaaagtctatgagctcttagatcccttggaactgaagaattggcaacttcaggtcagtacacttcagtttcaatcttacttctcttactctacttca

SEQ ID NO: 7310 - DNA, 935 bp, Cannabis sativa
attagcaatggcgtccgcacattctaaagtagacaatttcaatggtactaacaattttagtccgtggaggatcaaaataaaagaagtcaaggaatttcaaaagcaatcgatcgagaagagcttacaattcttggagatggcaagaagaaactcaaagagattcagataaaagcacatagcgccatacttctgaggtaaggagatgaagtgctcaaagaagtttcaagtgaagaaactacattaaggctatgggagaaactggcttcgatttatctgaaaaagtccttagccaataaattttattttaagaataaaatttacacattgagcatcgatgaatcgaaggatctcataaagcacttagataagtttaacaaaattatcttagatctcaacaacatagggatcaagattgaagatgaggatcaaggtatctattattgagttcattgccaaaatattataaatattttatagatacaattttatacgggaaggaaaatttgactatgacagaagtcaaaactgtattgaattcataggaaatacaaaaaagaaatgataagaaaactaatggctatggagagggtttgtttgttcgtggtagattagaaaccaaagataacaaaggtggctatcacatgacaaatcacaaaggaaatcagtataagggtttaaaccacatattcacaaactaagatcaaaatcaaagacagacaaacaatgctattattgtaagaaggaaggccatgacatggatgaatgcagatgctgatgtaacctatagccatcagcatatgtcttaatggtttccagttatgaatatggtcatttctggatacttgactcagggtgctcattctatatgacaccaagaaggagttgtttagtagtttcaagaagattaatggtggtgtagttttactaggaaacaa

SEQ ID NO: 7311 - DNA, 1556 bp, Cannabis sativa
atatttagaaaaaaaaaaattactctaattttatgatcatttacgttatagttacttaaaatatttgataaaatttaaaaaaatttaacatgctaaaaataagatccaaacaatttttcacatgcttataaaataaaaatctcgagtttaataaatggtttgaactctattttcgatagtttaatttttttgaatatcttaaataactataatgtagattactaaaaaaaattagactacaaaattttaagagtctccttttttgagggagttcttgtataaacattttatagtaaattagggacacaattttactatctttttacttatgtgtgtgtttttattttaggcgtgcaaatattcccactctcttctctaatcagtcccattaactttactttgttctttaacaaaaaagaaaaaacctttttttactgtttaggtctctcttaacttttcccactttctctgaccaaaacaaaaaataaagactcaatttttaaagccctctatgtctgatgactcggagatccatgaaacaaaaaacatttaattaattattcaattaatccaatgtaattaattactaattataatcaaacccactttgatgggaagcttaacttaagaaaaaaaaatacaatttttaattaaaaggaataatcacattacacaatgtaacaacaacatttgatgaaacattatagtggcattttggtaattttaactactgattacaaagaaataagagatcataggtacaaacaaagatctgatttttctttcactttcatggaaagttcatcatcactacaaaacccctccactttttatctctgaaatttcataacaaaaaaaaaaaacatttacagatgaagatactaccaacatactagaactaattcatacatatatatatatttatatctctatatagactatataagaacttattgaacccattttcctctctaagaacaaaaagtaattaaagtagctttgacttgatttgaccaacaagaacaattgagaaagctttgttcttagtccaaaaccaaaactcccgccactaaaaatggcctctttataagattgaatcacaaccgttgattggacttttcatttggatgggtcactagcacaccgtgatagaagattagactctgaatctaaaacataatttaaaaacaaaaaaaaacattaaattttagtgaaaaaacaaatctttgatatttaaaaatctaatctttaatcaattaagaacacagttcataattattacctcttgctgcattgaatgatcttttgcaatgaagaatagcgctttggataccatcttgctgttgaagaagagaatcgtctcttcttttagcagccgccgcctgcgccgccgtaccggacggagcaacggcggccgtcgaagaagccgaccgacttttacccaaatgcttacagacaactctaagtccggccggaaagttcagagacttgttaacattgttcgccgggatttctgatgaagccgccgattccggcggcggcggaggtggcggggg

SEQ ID NO: 7312 - DNA, 725 bp, Cannabis sativa
ctttcaaagcatatttttatgtaataaaatgttactcttaagtaatgtcttttggatggagtacatgttcaaaaggttcttaagtataaataacctaaggtctgttcaatcatgtaataactttttactttcaataaatataagttactgaaggaacaacacattctgacccataaatgaataaagtgattatttatcattaaaattatgttaatcttttatatgattgcttgcaaaaattagtgatttattttctaagtcacgaagctagctaacatgcgtacaaacatgtccgctcaggtataaagtccgaataggatactatggaatactcaggttaatttgcaagtgactaagagactaaaacctatttgatcacttcggaagcacctacacccgtacaacataggtatgatatcatggaaaatactaaagaaaaaaatctaagaagtaaatatatatattaagaaaataaaaagacttttatcagatatataacagctaaagctcgaagttaaaagctgtctgatcagccatatgtctgcataatgaaaaaataaagccaaatttaaaagcctcttggctggttaaattgtatcaaaaacaaaggccattaaggttgcacaaaaagaagaaaaagttaacacctcagtctatcagggtcgcaagatttgggtgaggcagggttaatagctttagtctggttggtgcttgcccaagcaact

SEQ ID NO: 7313 - DNA, 1511 bp, Cannabis sativa
gaaaaaaaaaaaaaaatcaattctgtattaagcaccttctttattttagtagtaatatatctaacaattttttttttgaagtgaacaaggggccgggaatagccccaacccacatggtactaactttgttaatcaaagtttcattctaatacatgagcaacctgatttgcttccctataaacaaaagatatcccccactaatccttacatcctacaggagactacaaatatgagcaatgatgccatcaacatctcgacaaccaccctcatctttcagcaccaaattaacagcttgtaggcagtcagtctctattgtgaacaaaatttaatttgatatataattatttatatttatttatatagattttttttaaagaaaatgttcattaaataaaatatacgaaataagatagataatatttgcagggacaattgacacattaaccataccaaaaagattgtttgaaacaacctacctagcaacattgtgagcaccaaaattataaagtctcgaaataaaagtaaaattacaacctaaaaagttacgcgagaatctactacaaacaaaaatatagttatcaatccgttagaaagtggtatttccaatcatcactttgataacaatctctgaattaatcgctctcgacaacaacaaaacgatgcttccacacagttgttgtctgaagtgccagcacacaggcctccacttcaccaattaagggatcggaaataggcaaaacttagaatcaatccacaacactgttcccacatggtctcagaccgacgctacaacacacatcgacccatttctcactttgacatcacaattaattttgattcaatcgtcaggaggagaccaaagggggatctcatcatcaggagcaagccaaagtaaagaggatccataatctgcataacagtgtgatagaattaatatcatgtttgatattatacaaattattattgtataccttatcatttcgagcttgtcaaatagtatccaccacaatagaagcaaaaaaaaaacacttcttcgacaataacctcacccttagagtgaagaccccaaaagaattgcacccagtcccatatgcaccctctggattccaataccggaatgagaccccaaggagatgccctccaaagatgagaggaaaaatcacagtacaaaaaaggtgctccataatttcctcacccaccccacaattagggcaacttatatctttaacaggtgatctcttggcaagaatagttcatgttgagagggcattagacagaatacactatcacaaaactttgtgacgctctaaaattttacgatttcaaagtttgtttcacatggcaggggccacctcaccaaataaagagttttttttcttacgaaaatttacatagaaatccatgtagcaactaacagaacaaattaaatcgcaactaaaatttacaacttacatgaaatctactgtagtgcaactacgggagtaactaaaaccgtaaattaaaaaaaaaaa

SEQ ID NO: 7314 - DNA, 897 bp, Cannabis sativa
taaaaacaaataaataaaagactagtgttgataggtgtatgcgtgggttaaagaataatgtattgtatgttatatgtatagcgacgcagaagatagatacaaaaaacatgcagagatatatgacacgttattatattaacaaaataataataaaaaaaaaaacatacaaaactacaaataaggaaaaaaagaaaaatcagagtagtgaaaaaacaaagacagataaaagtgatatttgatcatgtatcaaaaatggagactactttgtcaaagaataagaggagcgctttcactttaagatgctattatatatgataattatttataaaatatatatcacttggtaattataatgttgaacattaattattattactgtagctaataataagattaatgataatcatatgtttataaggtgttgttgggtggatataggagagaggaccccaccaagcatgttcctttgctttgggctttggctatggatggattgggttatcttcacacttgagacacacactctctctcactctctgtacaaaagaaaaaggagtgatccacatatatcaagtatggtggataagcattatcacaacaccaacattgcacccaaaccaaatcctttctatctttattttttttagattattaaagcattggctttaaaaaaaacatattattgttacacgtgtaaagtaacattgtgttgttgttgtagtagtagtagtagtagtagcaaagctagctagccctaaagactaaagatatataatatatgtttatgttctagaacataataatatgtaacatttgtaagattgtagttttaattataattaataaatgggtgtgtgctgtaacaatttttgaattcctcatttgggttttctatca

SEQ ID NO: 7315 - DNA, 667 bp, Cannabis sativa
ttcaagtattaaataaaaatacaatattgtgatttttcgcttttaacccttgtaaataaaattaatatttttgtaaaaagtacgagcattacggattcaaacttgagacctcattttttgtgagaataagtataaaactattagattatatacttataatcacttttaaaatatatttattaatgataaaaatatgtgatttatgatattttagatttagttttttttttttttttcttatgtaatctcatgtgtgtacatataataaaattaattagtatatattttaaataaaataaataaaaaatatttaaaaaatataaatataattggataacaaatataagataattggatcggttgaggttgattatctattgatacaaatgttgattatttattgaatcaaatgtaacaactaatctgattctgttagatggattataattggactagatgactttttctcccataaacttttaagttaatttatctatataatttttgttttaagaataagatgcctacttgtattaatctatatttaagtggtataattaagtaggaataacatttgttgattaaaatttgtggaagaaagtataacacgtatttacagtgtaaaatcgacaaatttacaaagccctacattaattaatccaaaaaa

SEQ ID NO: 7316 - DNA, 672 bp, Cannabis sativa
  modified_base (559)..(571): a, c, t, g, unknown or other
aaaaaaaaaaaaaaaaccaatttcgaaaaaactagagttttccccctactggccaaccggttgatcggttcctgctgcagaaaagaaaaactctggtcttttgaaccaaaacccaaccaaagcgtcttcaaacctattcaaaatttctagaacaattcaacatcataaaattaacatatccaaacattcaaaattcaaaaacacatcaaaataaccaattcaccataattgagtgaaatttgagttcttaaactcaattcacctaattcaagacctagcaaccaaggaattatccaattcactcacaaacaatgttaaattaaacctagaaacatattctgaactcaatttacaccacagacccaaaaccatagaaatacccaataaaatctaacctaaaacttaagaaattaatgagaaaaagaaggagaacttacctcaaagcttgaacaacacctagggttagctaatttagctagaaaatagtggatttgatgaacaaaacttctttgcttcagttggtttctagggctcgaagggggagagagagagagagagnnnnnnnnnnnnngagagagagagagagataaagagatgaaactgtgaatgagaatgagtgagaaaccttacctaggctagtgcgagcaatgagggtcattgtcgtcttgggca

SEQ ID NO: 7317 - DNA, 1582 bp, Cannabis sativa
  modified_base (452)..(452): a, c, t, g, unknown or other
ttccatttctttccgatctgatttttcatttcttatcgatgacgagctcagatcttggcttatgagtgattaatcaggagactaggggttttattttattccttatagtaagttatattcaaaaatcacaacttgtttggtctttaatagatagaattaaggagaccataatgatgatggatttatgcttaaattaacaagtttcaaattcattgtattactttgtctttagcatatgtcagttactttcttgtgtttcttcagaattaaattacaattgattgaactgtttagcttacttttttttctaatggttttgttggtttagtatatgcattcaactagttacttgacataataacaaacaaacttaaaattgaagccttttttttttcttttccgtttggatctcgtttcggtcaatttgataatacacacatatatatatatanatatatatatttatatatatggctgtgtcattgtaaattaagttcttcaataaacctttgctatacactgtttatctatcaaccttaggttaattatgaatgggtattcctaaaaagggttttcaaaccaaagtctatagctttatcacctggttgtcttgttaaaactattccaattatgatctactactggttcacagtttatctcatcttttttattttaatcaattttggttctttggttgcgtgaaaatgttacattttacaatttggttggatattcttgattagaacaatacattttttggtttaattttgtgagatggggtgagatggagcttgtgaaatatatatatttgaagtttcgacctgttttgaatttatttgtctatgctatgagttcaagggggtcatttctcttagagctaagttgtattacgtttaggcttcgttttgtgattaggatgagataccattggattgaaataaggaaaattattagcagcaaaaaaaagtggttgcttatttaaagacaataaattataaaaaaaacaacggtacacatgaaaattgcaattgctaatgcaaatttgagtttcatctcagtaataatatggatgactgcatagtaattttctcgtttggacaaaattactcttatataattttttcttagatgtatatttagttatgtgtatatttatttagttgttgacgtatttccaatatgctctttaattacattgacccgagaaggatattcaaatggtcaggcatgtggccacaaggtctgaggttagagtccctctgagtattttcatagtaagggagcctagtttcagggggaaaaattgtatatatgtaagctcttacctacatgacaaaaatacacgagaaattcattatttccaacattctacatatgggcttttcgacgggattaggagtctttatggctcaaattacgttttggaataccttctatatgattttagctagactaactcacttttttaattttgattgatagacattttttaatagttagctaattttatcggtaatatatagtgctaaaatgaataatacatgtctaaaatgactaactctgaaaaaatgtaataaaaaat

SEQ ID NO: 7318 - DNA, 2173 bp, Cannabis sativa
gtgctatggcgaagacgagagcaaacaaacatagtaagccaaaatcaacagcgaagaagaagaaaaaacgcagacctgattctactttggatgcgaggaggattaaatccatggatgaagtccttagaattgagcctattttgttccagatgaagaagataagaatgatgaagtgcaagttgcagaggctgaaatggagctctctaggagatggagagtgctcgaagagatgagattcgaatggaattcgctcattttaaggaggctaaacaattcagtaaagctcagcatcaatcagcgaatgttgtcgcttgaggtaaggaagttattcgtcctgtcctaagatctgagaatgttattcgtaacctagattccaaatttgttggttcatcttccaaacagaaaatcaaaatcacaaaagaggatatacaagaagaagtggatttctggagctcttctattgtttgctatgtccttggggcaaatcctccaatgtcgattctagatggatttgtaaggcgtgtttggaagaaaaaattgacaaggtgggagtgatctcgtatggtttttttctggtgcgtttcaggtccatagttgatagagatcaggtgttatctacaggatatattttcttcaataagcgtcctgtgatcatgagagcttgggagccaaacataaattttaaaaaagaagatatccacactgtgcctatttgggttcaattacagaatcttgaattgaaaatactggggtgagcaagtgcttttcaagattattagccaagtgggagaaccagttatgcttgattctttcaccaaaacaagagaaaaactgagctatccacgcatacttattgaagtatctatgcagtaggagtttctagagcaaatatgatttgatgataaaaatggagaggacacgacagtctttgtgaattatgaatggaaacctactacttgtgcacattgcaaacgaattggacatactaccatggattgtcagaaaaaaggaaggggaaaaagttgaatgggttgttaaaaaacaagcagggaaaaatgaggcagcgggagaaatgacgggtgaagatggcttcatgccaacaaagaaaatatggaaggaaaaaattaaagagaaacaagcagcttctgttgttgcagtggcaaattcttttgaatttttgcaagaggctactgatggtgaagacagtgatcacttgttagcataaggaaatgtcacagagaaaattggggatacaagaggagggggagtacctcctcttcccaatggataaaatagtaagctggaatgttcgaagagtcaacaaccaacaaaaacaacaaatggtgaaacagtttcttgctgtacgaaatgttggtttggtggggcttcttgaaactagagttaagcttcaaagctcggagccttatactcaaatattttcaatggatggttttttacctctaataatgcttggaattcaggagggagaatcatagttagttggaaaccaatgagctataatgtaaatatactaaagtgttctagtcaattcattcatctagaagttacaacggtggataagaaggctagctttcatgtcacctttacatatgcctttaatgatggagaaggaagaaagaagctatggcaagatcttcaagagctagttactgtgaaaacatggatagttataggagattttaatgatattttggcaaaggaggagaggattgacaagcgtgtgaggtataatatttctactgttgctcatttttcgtttggatgatattaaattcagtgcaagctattttaaatggactaataagcaacatggtgaagatagaatttactctaaaatcgaccgagctttagccaatcaagcctggttgggtgatcaccctactactgaagttctttttatgaatgaaagcgtctttgatcacactccagcagttcttaattttcacaacaaaattgtaagtggaaggaagccgtttaagtactttaaaatgtgggaaaatcatcttaactatgctgatatagttcagcagacttggcagcagcatttcaatgttactaaaatgttttgtattgtctccaaacttaagagcatgaaaacgtctcttaaggtgttgaatacacaacattttactgatattcaagccaaagaagc

SEQ ID NO: 7319 - DNA, 995 bp, Cannabis sativa
ttaatttgaggatagtataatcatatatataatgtgtaattacattcatgcattgtccttgagtgtagtttacactaaatttttggctaaaaaaaattgaattatcataaaattataagacattttccatttgcatgcacgtgaaagcagttggactaggcaactatgtcttaaatttaaatgatatatatacaaaaaataaaaaatatatgttttaattaggtctatttatgtatgtgaatatataattatagtactatacgatattgaatacgatgatatatattccaaatatatatacatatatttatatttatttataatgcccaccttttctcatgctctttctctctcacaaataagaaatgtatatgctcaaaactcttacataaaaaaaattaaataaggtagctagctacgtgggaacaactcttattaaaaatattattatttttaatattttacatttcttattaggctgtcaatgaaggaccacatgacatgaataaatacttgaaataatatatatatatatacataattatataaatcctcctaaacccctaaaaatttgtttatacatgaaaaaaaaagaaaaaaaaaaacgaggcctagggttttgttactttcggcaagaaaatttgttgaatatgtttataaaagtcaaacaattcaactatttacgaaagcacttgtgtaccaatatatacttttctaattatccaccatcgcatatattcgcatatttctttttcatcttcttttagcttgtagtttaagtaatcatattattaattattattaaaaaataaaacattatttttagtgtgataattatagattcttgtttagaatggagagcctttaattaaccctttatagtttttaccactccatatatcttcagtcttcacgtttgactttgaaaatattactatacttttatggatatgcttttagaaaacgagattttttgtttgggaaagtggttataa

SEQ ID NO: 7320 - DNA, 548 bp, Cannabis sativa
tggcaaacataagatgtgaaatagacgaactcagatgactaaccttgaacccgacgatcgaacttgatgcttctttttacaataacagtcaagagaacacctcattgcacaaaataaaaaggtaaggcgagataggttcaccttgtcggaggcctctgccagggcgaaactgttttagcgggccgccattaagcaaaatcgagaaggatacagaattgatacatttcatcaccagttgaataaatttgttcgcgaacccaaatgccttcatggtcttcttcaaaaaactccacttgatcctatcataggccttagacatgcccaacttaagacccacaaacccagctctacccttgagctttttaaaagaatccaatacctcatgtgccatgatagcaatccatcttcctggcacaaaggccaattacaaaaggcgagatgagctcttggaggaggggcctcaattgatttgccaaaatctctgagatgatcttatacgtaaagttgcagaggctaatagggcaaaactcgttgaaggtattagctcc

SEQ ID NO: 7321 - DNA, 1201 bp, Cannabis sativa
tctgataccaagttgaaaaaatagctagtaatgagaaaattactcagctcaaatgatgttgaggtatgcctctccttatatagataaagtctgatacaaagtagaaatattttgaagcattgtaacaagaatataatacgcggtctgcctataacaaattctaacaacctaagggtattcccacgatattagaattaggaaaagataattacaaaatgatgactatgacaatgtagcaagaccataaaatacaaggcaaaataaaactaatttgtctcttaattataacaaagaaaattaatcaatccttaactattaacctttaaaaaaggtaatttacaactattaatatgaaatttaaatgagttctcttaattttctaaggaataactaatttaaatatgatttttactcttgaagtactaccattttcagatcatgcctttagaactttttttatagttaaaaatttctttcaatctattcatgtttctaagttatgcctactctatcagtttcaatcttacgtggccaacaaaaaatttagttgacactatgaatactaatgtggcattgttacgtcaacatcacatatataaatacaattaaaattaatttttagtttatttatttattttaattcattttaaaaataaatttataaaacttataaataacttttcaattaaattacactaggtactgattttgtcaaaaaaaatatcatgtaagtcatatgtttgcttatgtacaattaaaattgacaaaaacataactcaataacagaaatagttcataaagaattttaagaagcatggtttgaaaggaatgaaatcttctgttaaaaattagtgtcacatactgtgttaaacctatcaaagtttaacacattaattaatctattttatattagatatgttaactacttttgttgattttattagaggtttaatttttttataaataaaaaattaattaacatgtcaaattttaattgatttaacataatataagacacgactttttaaaaaaatatatcttaattcactttcagcgacataaatcttacttactctatactcaaatttaaacacaaaatacatatttccattcatgaaattcaactaagtaaaaaaaaaattaattatgcattagaatttgaaaggccctttatttaaattatttcaggtgaaaaattacg

SEQ ID NO: 7322 - DNA, 577 bp, Cannabis sativa
ctaacaaaatgcattattcgctttgaacatactaaaagaagttttgttgtgttttgcttacttgtttagcagcagtgtttggaggggctatgaatcgatttccttggctaataatggtgggatgtgagcttccaccaatggcgtacataagccaatgagtgtagtcattattaaccacatggaagaaaccccatctgcaccttggcatcctctgtacaagtcctcttccaaaatggttgaaagccactgtcacttgcataatcttgtcaccttcaaagctgtcactagcaccaaatagcatcacctgtgttcatatccaaatcatgcaagaagaaatcccatgttttaaaatctccaacaaacaccaaatatatgtaacaataataataactcaagttgtgaaaaaagagaagtaattaattacatcattgtgatgagtgaaatggcaattggaaatggttatggctgtagagccttggatgacatcaattaaaccatcttgacaacggtacattgaaatgtgatcaagccaaatgttggtcgatccaaagattgaaatcccatctccatcagcaac

SEQ ID NO: 7323 - DNA, 965 bp, Cannabis sativa
tctttctttgttcctttcattccagatgctccaaaggatgcaagaaaactgctcaatttgtttagaggaccaaaactgagacatattttgcataaaatccataagagacatattatgtgttaagaaatcatttattgaaaaagatgagagttgctagatttttcgtggcctcttgcagcgaaatagagcatgaatggttgattcattgcccttgtgacataaggagcatgtagctgaatcactaatatgtctgtggtgaagaatttcagcaattggtaggcagtcatgcatagcacgccacaaaaaaaaattatttttgatgggagagacaaggaccagaaggttttccaccattgaagagaacagtttgtactagcagtaggctgttgttcctcaagtctggtgcaagtgtataaccagttttgaccgagtacattccatttgtttcaaagtttcatattagttggtcattttggtcacacagagtaagtggaatactctgtatctttgcaacatcggattccagataacattgttggagaagggagtgattccattgtctttgactggtgatgaaatctgaaaccttcataaataaattctgatttttgaagatcaaaggcttgaaagaggtaacaccagggagccatggatccgaagcacaagagatttggtttccattacccactttccaacgcagtcctttgttaagaagttctttacctcaaacaatacttctccatgtgagtgatggataagatccgatctcggcttcaagaaaagaattatatttgaaatatcgagctttaaggatcttgtgcagaagtgatgaaggattatcaaaaattaaccaagcttgtttggcgagtaaggcttggttgtagtgaacaaagcttttaaaacccatacctccttcaacttttgctttacaaagagcatttcaagttttccaattaatcccagat

SEQ ID NO: 7324 - DNA, 634 bp, Cannabis sativa
ttttaattatagcatgaactgcaggaaaatttcgggaatgcaatgaagggagaagcttgtctaatgtgatgagtttagctttagatctattaatggtgtttcgcagcttttctttcacatcaattgtccataaatgtaaaagtttgaagcaattctaagaagttcaagggtctaagccacccatcaccttctttaagacctagaatctcattctctgctctcaaccctttttggtgaaatcaaccggtttcagcatggccgagctcaatctttctccaaataacttcactttcacttttctcttttaagacttctcaaattgttgtgcatttgatgtgggtaggcagtttcatagtatgttggttaagaatcctttggttattgttagaatttggaataaaagaggttaagataaatggggttttatctcaaagtcaattagtaatgggatgagtagctcattcatcttatatatgataatttcgtgggactaactctaatacacccttacgtctgggtttgaaaagtgttggtataacgaacgacttttaagagaccatagggctcattcatcttatatatgacaataatgtgggagtaactctaataattatggatgttttttgttcacaat

SEQ ID NO: 7325 - DNA, 993 bp, Cannabis sativa
ttagggtataaaacccaacaaatattaccatttgcatccagtaaagacttgattttattattagagtttctagcagttgccttagcatgaaaaaattttgtgttacgatctctaaattgtagccaatcaacatgagactgttgttatcaatattgttcttcatttgcaaagagtttatccaaaagagattcaaccgattgtattacttgaggatggtctgaatttggtgtagaggcagtatggagttgtttgaccttatgttgagcatttgaaataggcttgaagttgcataaactagccataagaacatggagatcatagagaaaaaaatgggtaattgacagttgatatgatggcacttatatgagttcatgaaggataactaatcgaagaagaagatggaatttgaaggaatttcaaacatatggaaaggaaaaactctaacagctatatagagcacttcacaatagtttatttgttatcttagataacaattaattttagtttaattttcttaatgactttaggtgtgtaattttctattttgtatattaattagtaaaatcttgataccaatcacttcaaaagttttgattcttccgacaagcacttggcaaaaaaaactaattaaaactcaaatactattttagtttattactgaataaattttaaaaaagattttcttttttattccaatttataaatcgaaaattatctataattattttaaactgaagtttagtatataaaataatagagaatacccaaaataaaataaaccctacttgcatgtaaaatcaatatgaaaaagtcgtccatccaaaagctaatttaataataataagaagaagaataacgtttagtgttagggtcattttcgccttatccacaaggtcatcatcaagtttgggatgagtttgaataatgtacaaatggggagtattggtatatacatttgaatagttgagtatgaaatatatacattcgaatgtt

SEQ ID NO: 7326 - DNA, 805 bp, Cannabis sativa
acaccttaaaaatgtaaacggaaccgtactttgaagggttttcccactaaaatatgaagttagatgatttttttgcaagtaaattgatagttgatgaaattttaccgcaaattactgatacaaaaatgtgtgtagtcccatcaagaagttgtaacaattaatcaattaattgggtcagatgtaaatatgtaggtaaaagaaatccagaaacgtgtgaaatgagttttgatgtgtaaacaacagtaagctatatatgtatatagggtttgaaaatatatagatagtctggctttggcagattagaattattgcccttttcatcacaactactacgtaccttatatattcaatttagtgcatattttatctccaggtaacagcatatcatagtacgttaccttaaatgcaatatatcaatatttaattttttcaattaaataatatacatttgttttaatttttaaaatgaaatttaaaattaagatttttaattcttaattattgcagcaacattaatatatatatacatatcactactaattaatacctaaaaaaataggtaaaaatcatgtatagttcaattaggtcttacttttctaagatttagcttcctaaatattaaatctggccaaaaaaataatattcattcaacatttcatcacatctaattgaagaaagatagcattacttcaactattacaaatcaaatcattaattcatacaagagttcataaccacccaaatctcaataaccttagttcatattaggactgaactctaaattttgagcgagttcgacccgaac

SEQ ID NO: 7327 - DNA, 831 bp, Cannabis sativa
attaaaatggataccatattatatttgattacaaaacccttcacaagcaaaaatattgaaaatttcggatagttgctgttgaaaattgtcaaaattagccttagcctaagaaaaaaaaattacatgtatagattcttataaccaataagagacttcagtagtcaaaaacatggtaggccaatcaaaagacaaaattaatttagctgcatcattgttgctggttggctctaaagtagttttttctgagtagttaaaagcataagcaaatcaccaaacaaggccataatctcaatcattagtcataacaacaataatagcaacaaagagagaaattcaataaagtaagaaggctcacttatatgtagcagtcaatgttgagagttggaattatcccattattcttttcaaatctgaaagactcaatcataatcatcatcatcattcctcctcgcacaataaataatacatccagtcctgcaaatatattgattagtaaccttgaaaatagaaactcagaaaatcagtaaaaaagaataatatatagatcaaaatatatttgctgaagtaaatttgaagttgaaaaaatagcaagtcgagatgaatagttacctgtcttcaaagtctctcttcttacgttctgtttcttgggttcgtatgtttggtatgtgttgaattttgggccaatcttctcctgttccttccttgcacctaggaattaacagactacatccttctattgacaaagtagtaagagtctggggcaattctgtagcaggtaagcactctagattttccaaataaagaagatctaaccgatgaagggaggtgagg

SEQ ID NO: 7328 - DNA, 754 bp, Cannabis sativa
atatatatatatatatactcctctatccgctatatgcaatatatccaatatccattatccatttcttctctaatattacattaatattagtatctcactcacaatcacattcttctagggtgaaagccaagaataatggacacaaggaccacagcagccattccaccccaaaatcttgcctctgcctatgcagtaccacaaaaccttggggcaacaccagccgcggcggcctctgcctacgcagtaccacaaaaccttgccgcaacaccagctgcagcggcctctgcttatgcggtaccacaaaaccttgccgcaacaccaaccactgctgcctctgcctatgcagtgccacaaaaccttgccgcaacaccaaccgtggctggctctgcctctaataactctgcggcctatgcacctcatcaaactggccttagtaatatgaccccatctcatcaaactgggctgagtactatgaccccatctcatcatcctcatcatcagattcagaaccgagctgcagttgggctcaatggccgcactgctcgcacagcacttggactgaacggccgtggaacacggactctgggacttgatagccgtgcagcccgtggtggaacgtctgatgaaactgagctgagcaaaagaatcatggagcttcatgtgtctgatgagcgcggtcttgcagttaagcctgttcttaacgtcattgatgtcatttttcaccgggctactgctgacctacctggatacaatc

SEQ ID NO: 7329 - DNA, 1379 bp, Cannabis sativa
atgtattaatgttacactttgctagttttgaccattttggtttgttttatatataataaatatatatatctaaatataatacagaaaattctatatatagcttgttaattaacttaataatttggtagatggtctttttgtctagctagcataaaagaattaaaggtcattgagttttatcattgacattcctaacttcatacactcacccaaaaaaaaattatattattatttagttatatattaatttacatgatctatgtatattactattctcttaacttgtcaaatagtgcacttttcaaaaaggaaaaaaaaaaacttgtcaaatagtggctatattaatattcaaattgggtgaggtaaaatattcctatatatatatatatagataatatattaagcagtacaaactttttcatgtgatgagcacaacaatattgaccaccgactattattaattcttaattccatgcatgtttttttgaaaatatatctttttcagaaattattttgataattttgacaattatttatataaaaccctttataatttcatatatatataaatgtattatatatcttccattaatggctgtgtataattaaatttaatactgaatttactattaatttcaaatttattttatcaaattaggagaaacaacaggttattgaaatgtaatattattttgataaaaaaaatagagtttaattatgttaattaattatttttttttagtaagaggaaaaatccatactttgttttttaaaggagaaaaactccatcttcttaatttttgaactaattattactcaaccgaacacatatatactaaatatattatttagaaattaaagattattatgtacagaattatttttgtttagaaaaatgcatggttatgcaaatgaacataaagaaaatgatcaattttgccaaaaatcactaaaatgttacaaaaaatatataaaaatgtatatattgatgactcacataggtattgagctggcgaatgaagcttgagaaattgttgtgtttgaaatacttaggaagtaatagctcagaaaattcaggtggagaccatactatgaatccatctccttcttcattccatgaaattattgatccattattattattatcatgatcatcatttgatccaacggctctggttctttcttgtagctcaagcaaatcataagtcttggacagaaatggagctggactacttttaaccctacctgctaatatagtagagcaagaagaagaagtagtacaacaacttgttgtgttactactaacaacttcattattcttagccatatacataaaataacaaccaaagcttataactatgacctatatatatatatat

SEQ ID NO: 7330 - DNA, 1504 bp, Cannabis sativa
tgtggcataggaagttaggccacccttcatcgaaagttttaaatcaagtgttgagtctgtctaatgtaaaaatttctactaatgaaaatccaagtttttgtgaggcttgccaatttggtaagtctcatgccttgccatttaaatcttctttaagtagagccactaatgttcttgatttaattcatactgacctttgggggccagcacctgtaatgtccaacaccaatctaagatactatattcattttgtagatgactttagtcgctacacttggatatatcctcttaaggccaaatccgatgctctagctgcctttattcatttcaaagccttagttgaaaattagtttgataggaagatcaaagagttacatacggattggggaggagaataccaatcgttcagcaacttagttgctgagaatggaattctcttcaaccattcgtgtcctcacacatctgagcaaaatggtcgtgctgaacgaaagcaccgacacatcgttgaaatgggcttgacacttcttgctcaggctaatatgcctctgaagtattggtgcgatgccttccaaacttctgtgtacttaatcaataggttacctactcccgtgccttaagggaaaatcaccctttgagactcttttccaaaaaaaaaaaaccagattataacttcttaaaggtcttcggctctgcttgctacccatgcttaaggtcctaccaaagtcacaagttccaattccattctaccaagtgtgtcaaccttggttatagtgaatctcataaaggctataaatgtttaagttcaaatagaagactatatatctctagacacgttgtgttcaatgagaatgagtttccgtttaaaagaggctttctaaacaactatcacaaggaacccgaagttactgtccaaactcccaatagctggttttatcttcctgtacagccacctatctctcaaaatactgctacctgtactgaagatgaaacaacaagtgtctctcccagtgatcctcaacaaagcacacctcaacctggacaattttcgactgatataaatctccagaaatttcccctgcagtatcacagtctgccttgccaggttcttcacaacagttacaacattaggtagatctcactaacaatctttttgtcgagttagatattggcacatcatctgctacatgtcctgaactcacttccaaccgtgctgagtctgcaacagaaacaactgagcagcaaccacaaacagttcagcaacctggccatccaatgatcactcgatcaaaggttggcacctttaaacccaagatgtactctgctcaaacaaaatggccagtaaacacaacagaaccaaaaacactcaatgaagctcttgcacacaaaggttggaacaaggccatgtcagatgagaatgtgactttgaagaataataaaacttggatactggttccaaggaagaaagggatgaacattgttggcaatacatgggtgtacaagagcttca

SEQ ID NO: 7331 - DNA, 584 bp, Cannabis sativa
ctcgacttcattgatgcccgaggggcgcttgggcttaattttgcgactgaggggagcactgagggttggtacaaaagatgctccaagggagaattgcagtggttgagaggccgttaaatctgcaagtatagtggagaaggctcgagagaacggtacattgtgccaattggatccatccgtgacagaggggactagcatagtaggtggtgtggataagtttggcaaagggacatggagttgctcagtatttgtgacatcaagatagagtgatggaggggatttaggaatttgcggggtattggtctctaatggtgcattgacttcaaatcggggtgaattgatgggtgtcggtgtggggctcattgggtggacaagttggtgggagatatgagggagtaggttatagcgtgcgggggtattaatagtgggattccatcccgccgcaaaggatcgagcatgagaaattgtttaaacaggtaaggaaccagaagtttttgaggatctcgccacgaaaaggcctgctgaagcagtacgtgcttgactaaagtgttggataccataattcgatgttggtgcattgtaag

SEQ ID NO: 7332 - DNA, 2346 bp, Cannabis sativa
aagatggatgctcgaggtaaaaatttgccatttttcatttttactattgtaagagagtcaattgtagtgaaaatttagatgaaacctcgtgtttcttactatacaccataaactattttctaaactagattttcacattccaacaatgttacttatcaaccattttataaggacatatacacaaagtatttaaaatgatactttttgtacatttttattgacaaactaatttttttaaaaaaaaatatttttatagaaagcaatgtgaaaaaatatattctaaatgtagcagcaacatgaaaacaaacgtgcaaacaacatagatgttaaaacaagtgttctaatttttgtaaaaataaaaacttcaaacttataaaaatattaaaaatattgtagattcgtgttttgttaaaaaaaaaaacagggtaattgtaaaaaaaattctcattataattaatctttagtactcatttttcatttcgtttcacagatcataccggatgccatttcagagtcttaccaattgtctaaaataaccctagaatacaaaagggaatgtgggagtactagggacatagtccaattcctttgtcaacctaatgaagatggaagagggttacttaaacatggagtaaatcaagataataatcataacaatctactaaatactttggctattgaatttctcaaaaacaatggattcacggggtcctttgagatagggccatttaggtacactcatcttccccaaatcgatcatatagagccttctaagtgtactcatctccttcgattcggtcaacttctgcttcaaattctcttcttctttgatcatgttcttcgccacttcttcaatggagtttggtattagttctgaaagcaaattttgctggtgatgtcaacaagaacaagaaagcaaagagatagagatatcttaacggtcaaagtgaatcctttcattccgaattaaagtcaaatgaaagagactttgaaaaggagtaggaaaattatcgagttttaaatctgttattttcagtatattgataaattgtaacattattctttttacatgatggtatataatgtagttctacgtgatctcacataaattttaaggaattctagataatttaggatgttgagattaagattcaaataacttattgtgcgcgtgcatgttttgatatttatgtatgcgtgtaatatgttatttgagtcattattttagcattcaaaattatttagaatttctttaaaatttatgagaagtctttaataataaagtaagattttctgtttttattatataagtttttagaccatcttcaatgcatggttataatttgtgatatttatttttgtactcatgcataataatattttaagatgcaaattataacaacaagtaagacaatgatcattcaattctgttacaatatgaattagaattttaataaaaaagaaaattagaaaattttgataaaaaaaaaagaaaagaaattcctttctttaatttaattaatgaatatattaaaaaatcaagtaacaagtgaaatatgtgagaaataattcataacaaaaaaatctatttgataaacttctaaatgatcctaataatacaacaatttaaaacgaatttataaatcaactctaaataaattacaaaaattttaaaaaaatattacttttattaataaaatattaatcactctatctaaacataaaaatctaagcaaattacatgtgtctaacaaaaataacaaaataataataacaaaacaaaacaacttaacaacaactaaactttaacctcatatttggcataaagaaaaaaaaaattattcatgttatttttttttatcttgtttaaaaagatagaatggaaaaaaaattaaatgtgtaattacaatttaataattttatataaattatttttgatgaaaagatttttaattaattttgtaagggtttaataaattaattaagattttcttacaaaatgtgattaattgaataaaaatattatataagaatttgagtgtgagtactaagaaaatataaaaataaaaagatagaatgagtgtttctaatttttttttttaaaaaaaaaaataaaacaaaattttgtgagagaatgaagacatctctaaagaaagaaaaaaagacttaaaatagaaaaagagtgaaggggtacacttatagcaatatactaactaaagaaaaagagaaaaatgaaaagaaaacaaaaacactacaaataaaaaaaacagtataaatgaaaaaaaataagctatgaatagtataaatgtaaaaaatttattgccacaatataaatataatatttta

SEQ ID NO: 7333 - DNA, 1337 bp, Cannabis sativa
aaataaaaccggcctttgcaggatcaatggttaagattttgtagtagatctaacaactagggagacaagaggtctagcatgattagcccagggcccaccagaccattaagacgagtctcttcacatgatttaactgtcagttgcactccgcctttttggatggatatgcctcggcacgcgccaaagggaccaactgagatctttatggtgttgcatggttgccacgcaagtagatgctgatgtcaaatctacccttagcagagtagtgctcatatagaagatgtgtccttgattttgatgttcaacacgagttaacagtcagtattaggaaaatatgacaagctcctgtaacttagagagtcccaaaagcttggggggtaaatgttatctgtgttttcaggcatgattaagggacctggtgtattagatgaatggattaatcgaaatatctcataaggtctcccagagagaacttcttgacaatcttggaaatgtgcaataaacacttgacgagacgagccatctgcccatatgtaacatctttcgaaccttgagaatggttgaggtagatggctcccgaataaatatcccttaggtgatggtattgggatgtggtactagtctcatggtcagtgacgacgtcgacatcatataaaaattgctctataggtagttacacctttttctgacacaagatcagatcttgtcctccatgccatgccatggtagtgcatgtactcaattctggacgtgccttttgcccaacgaccttgttagagagtattttacaaaggagaaacatttacacgacacgtgtcctagtttgtacaaaatctctcactacagctatatgccacacaatgaagaaggttcttaacaaccaatggttagatcgtcatattgtggtacccacccttgtagtgagtagagtaaaaaaccctaggatgataaagggtattccctcatccccatgtgtggttagaaatacccccatttttaatgagcgagaggttaacaatttttacttagagaaactctactgaaattcttagatagctttcttctaaagagaaacaaaaggagtacaaagattattgttgtagacacttgtaatactcaaacattcaccctaaaaggctaatattactgactcgtgaactaaggatcattaacgcttgaaccatgcaataaatatgcttgtttgtttttaatatcttttattttcttaagctcttattactttgtttttgaaaatatcggtaaacaccattcacaagaggtatttctgtgcagggcggggacacgtggagccgccgcattccatgacctttctcagt

SEQ ID NO: 7334 - DNA, 533 bp, Cannabis sativa
aaagaaagagagaaatagaaataaaggtaatcgaatctcaaatctacagcccatataatattttgtcaccctgagtgttctctgtcggctccactggggacaccgccaaaagaaaatatatatatcaaaggccatggtaggtaattaaactcaaaataactattttacataatttatatataatataactgtatttttttagttttaggatcaatgtatattcatatgcatgcgccaaaattaaacacccaaaccttaattaattaattcaattataaggaaacatttgtccgccattacttattgtcggaccctaaaccaaaattttaatatttacggacaatattttaatgttaatttattagggctaatatacatatatgtatgtatataaatataaattcttgtttccaccattaactattattcccttaataataatttcccttacccgacagaaagattgttgtcttaattattgttaagatctttaatttatcatttgggttagttagctagatagatatgttaat

SEQ ID NO: 7335 - DNA, 2154 bp, Cannabis sativa
atgatgatgactcaaaatcagatgatggctgtgttccaacaacaaatgatccaattggccagcgctgttccagggtttaacatgccggatctgcctccgattccaccgattccaccatttcagcctcctggccatgcagctggttcctcctcataggctgcccctcccactgatgacgaagatgatgctgttgatttgtagttttttttactttacactgtagatattactgtttatgttttctgaatacttttacttacgtttaatatatatagttttgtaataacattataaatgtcagttttataatatattggatattatatttagtattatttcgatttttaatataaatttaatttaaaaattaatttaaaataaattttttaaaaaaaaaatcttttgctggcgcttaacatgtgcggggaaaagtattataaaattaaataaaaaaataaaaaatttctcgccattacatcgccggcaaaacgtcgtcaaagacacatgagctggcggacttattgccggcgattacgttgtaccggcgaacaaatacgccggtgtaaatgcttttaccggcgcaagtctgtatttcgtcggcaaaaggtcattcgccgacaaaccattgccggcagcttttgccgacgagttacatgtacttttgccggcgagcttatgcgtcggcaaaaggagctttcttgtagtgcgggaccgagactagacccgaactcggaccgggacccggactgagacctggacttggacccggaccgagacgcggactcgcacctggactgagacctaaacccggacccagacctagacccgaacctgggacccgagacctgaacccgaaccgctacccgagacctggatcgggacacaaacccgaattcggaccccgaccccgacccgaacacaaaccctgacccgaagccgaacccaaactcggacactgaccctgactgggcccccgactcgaacccggacctaaaccctgaccccgactcaaactcggacccaggactcgggactcagacttgtaggtggtgttggagttgagtgtattaaaagtatattataactttacacgatcaattagtacaagtcaataccaaatattgtattatattatataatactaatacaatacaatacaacacaacacaatctaaaataatacaatacgatataatacgggtacgagcttcgattcagaacgctaattaattgaggttgtaattgccccgattaggtgttgaccaaccgacgggaaataatcatttaagagtagtgtattttaaagtttattatatcaattcatgaatgagcaaacttgtggctttggtataaactattgaaatcacctcacaaagtaaataatgcactgagccccacccccgctgtcaggccgtcgatgaatgttgtgtttatatctgtatgatcatcatatactgatgagttagtggtgatctacacattatttttatggagagagatacacacattaattacataattatattgtgaatgcaggtctgcttgagactgacgttggtccagttaattaattgatgtgatagacattgaataccaagtttgttttcgtatagaaatttactatacaataactctggttacctacaaattggaatatatatacaccgacttttgttgacttgatgatttcttctgtttttttagtatatattattttcttgaaaatctggtgtcaattgcatatgtttgaaataataaaaagagaataaacaaggcgtgtccatattgaaaaatataataggtgaactctaaaataaggtattatacaaaatattttatataaatgtacaaattagcaaagatcatatttatacttcttccatattagcttggatatacttttgaacaaatagacaaattaaaggccagagaaagctgatggtgaggtgacatctaattcggaaaatgtttacagcttgttgccttaagttgtgccaccgaaagcgacgaactggtataaaatatacttattcgattaattactaaacatgcatggagagctatacttttttcttttgaaaaagatggagagctatactgaaggctcattaatcagtttatatatatattttatatcccgtatgacttacacgt

SEQ ID NO: 7336 - DNA, 1478 bp, Cannabis sativa
tcaacattaaatatggtaatattggtagaattcattctttgccatcatcatcaaaatttaataagtttagcacttgcaaacgagaacagatacattttcacaatgaataaatattaataacattacaaatatcagaaggacaagaatccccacctcaataaaattgtttgaaaaattaataactcatgaattatttgattttggtttcattgaccttcataggaaacttggtttgatcaaccaattattgagtagtacatggtgaaatttagtggcttacccatctactccaaattttccatatttgccttcaatgtactcatttatcctttgttcactcattaatgagggcctcacaaatctgcaagtgattcatggactaatgctaataagtcaatggcgaaaatatgatgatgaagctaatgagagagcagaatgaacctgtgaaaaaagtcaacaacttccatggttttggcatcaatcatcacaaccgggaactcgagaatttcaaccttaccctccaaatccagcacaaggaagaaatcaaaattctgtggacgcattttgtttaagtttgaattatcaacttgaagatcccatgagcaatcatggttgaacttctccatatgcataggagatcatccaactacaaaaaaaaaaaaaaaagatgagatttttccttcagtagaagattataagatttcttgtttatgaaaactataaaaacttatctttacaagaatatacacttgatgcattaaatgcaagttcctcgataacaagcccaaagacaatatcgtgactatggagctggacatgcgctaactatcaatatgatgccgaaatagattagttttatatcaccattcgatttgaattagcaaatgcaatatctccttgaataatatggattccaaacatttatgagatgaatgtaaatgagtcgaattacttatctcccggtctattagtgaactatctctccaaggattgtgaaaaatgttccactagaaatattttgttattgcttcgactcatattctccaaaatgtggatcaagtacacacaattcacatattaacaaagttcataccttaaagaaggattcaaataacacttttatgcagataatgaagaagctagatacaattgcagctatgcttttggcctatatctccaagtagatgatgctagaaaaaactccttatggatcacaagatcaagaagataagaactcccacaatctttgtaaaaaaagtgctatgtaagcaaataatttattcacatgcataccgctagctcggtgaatttataacaagttcgattatacttcaataaaggtattaaaaaatacatatctaacaacacatctgtatgaatttccctctgatctgcagcaattctagatgcaactacaagacttaaaacgaacacaattaaaccagcagtaaaagaacattaaacaaacaattaaagaa

SEQ ID NO: 7337 - DNA, 824 bp, Cannabis sativa
ctcaaaggcctcatctagaaaatgtgaaatggcagttccattcaagttattggctcttcctaagttctgggtctctcaaattcaaagatggcacctcttctcataactctttggtcttatgcttcattctagacaatggatcttggaacattgatcacctaaagattacttcgatactaataatgtggaagatatccttaaggttcctacttgcccctctatggaggacactctcatttgggattgtcaccccaggaatcttcactgttaagtcatcgtattatctagctaaatccttggtctcttcaccctctcccacttcctctaaaagcttaccatcatgtgctaccctgtaataccaatcttttctataaaaaaatctatctctcacccttattgctctctttgcaatggccagaaattatgaaacgattacgcatgccattctagggtgtaccagagctaagtccatactaaaacacactagtcttcactccttatactccacaaatagtcattatgacattgaggattttttactaagaacttttgatactctacataaggatcaacttcctcttctatctgacatctgttggatggtgtggaaccaaagaaacaaggctatcttcaacaagccttcttgaacttttatagatgtagaactttttgtctctaatcttttgtaagattacagggaagttcaaatacgtggctcctattggaattcagaggccattgctccccccgactgtgatgatcaccatcaagaattggataacaccaagcttctttctagtgggatgttcaaactccaagtggat

SEQ ID NO: 7338 - DNA, 787 bp, Cannabis sativa
aaatgctcatgatttagctagctggagatggcagtaaacatggagatgagattgaataataatctatggggaactcaacttgatgtaaggtcagggatagtgtctgccaaagcaaacaagaatgttttggtttgttctgactaatttcaattttattttattttttgggtggggtttgatttgggttattagggttcagcttttgttaaccaaataagttctgccacttcattattctttacttactaaggtctactccttccccttttcttttgtttctttttggtctcttattaataaaatactaatatatattctttcttatgtttttttcaaaccaaatctaaataactaattaagaaatggggtgttttattcttggagtgtggaagttaaacccaatgattcagttttgatcttcttaatttcttgatgaccattgctaattagtttggtcatctttaatggtgtcccaaaaggattgagactcaagaggctttctaacatctatatcggtgctcttaaattaaaatatgtaaaggtacaagtagtgcctagaatgtttaataaaaagaaaatatcaataaacttctataaaataattttacggaacaaatatcttgatcgtgaaatatcattgagaaataacaatttgtgtttttcctacgattatttttagtatggaatgagtcaatcatttactttagtttcttattaaacaaaaatagtgatattgtttctccattaatcaagaattttaatttttaggttaggactctcttagttg

SEQ ID NO: 7339 - DNA, 922 bp, Cannabis sativa
atcgcattcattctcctttgcctcgaggaaaacaaagctgtcatcggcaaagaataagtgcgacactttgattctctctttcccgaattgaaccccattaatctttcccgccctttcggcttcatgaataagacaagagagaccttccgaacagagcagaaagagatatggggaaagcgagtcaccttggcgaagaccccgggtaggttggaaattcccaattctttctccattaatgaggaccgaaaaggacacactttccacacatctcattacttaatctatccattgttcctcataacccaatcccctcatcattgttcgtaagaaattctattccactctatcatatgctttagacatatccagtttcagcgccattttccttccattcccaaaccttttagtcctcatacaatggagactttcgaatccgattatagcattatcttgaatgagcctaccccccacaaaggcactttgttcctccgaaatgacttgatgcatgcttattttcattcggccagcaaggcattttgccacaattttataaatcacattacataaactgatcgggcggaattccgacattcgggtgggctttgaaatcttaggaatgaggcaaatgagtgtatcattgatgtcctttatttgcatcccttcatttagtattcctaagcaaacttttgagacttcttcaccgattatggaccaatattttctatagaaaaggcctggtaacccgtcaatgcctggtgctttttgtggatgaatatcgcgcatggccttgaacacctcctccttggtgaagggctccaacaaatagtcatttgtagcttgggaaatacgatgcggaatgattctttggaactcttccagctcctctttattaggcgggtgggaagtaaataactgcttgaaa

SEQ ID NO: 7340 - DNA, 685 bp, Cannabis sativa
cacactctgttttaacacccacatcaggtactactaccgctccatttcccattttccatgcaaactcaactaatcccagttactctgccttcccaaataaccctgctaacactttgccaaatactaatgtgccacttccacaactccccactctacccgactacctttcccaccagcatcatcactcacaaaccagcaattgcatccctgtcaacctaccaataccacacatactatcactagccgaatgcctctttctccagcattccctttgccaaacctgcaccctgttacatcctcttttccacctgctgtaagttcttgctttcaagcaaattcctccccacttctggccaactctggtgccaataaaggcaagcaaaaaatacaccatgatagcaatataaatcaacaaattcccactgtcacttcctgcaatataaactagcaaccatctcatactgtcactcatcctacaccctcttcaccctctcctgttgcaataaatgtaacccataaaaacattgttgctgacctctcccatgtctacataccggaccttcacaataatacttttgccacctatcctccaccacttcacccctcacctacaaacactagccttgcctctcccatactcatcatgccccaagagcacctccctacctatacacaggccacggtt

SEQ ID NO: 7341 - DNA, 647 bp, Cannabis sativa
gagagagagagagaaaaatgggagtggtattttaggatttagagaaaaatatatccatttttttaatagctatttaaggaataaatttaggtataaaaaattgcataagaaatcaaatttttcatcataaaataattgtattttttttttttttggcaaagctgaaaaattcaaacaaaaatatattctttctttcttgtgattgaacaactcagagattcactgcaggttctatctttcttggggtttgaatatttattggcctatatactcaaataatcgtaacaaaacaaacaacataccttatttattatacctttcactttgggttggaaggaactttttctttctttcttttcatatatttgtaattatagtgagtgaccattcggcgcagctttcacgaccggccacgccgacagttttgctttgttctaaggtcaatcaattattgcaatttatcacatttttatgggaacaaatacttatcgaattctacaacaattcggtaccaacattatcaattggtcaaggttatattcatatcactgataacgaaattatgtaatttaaaagtgtaagacaaaatattttaattacatagttctaaccgaccatatgggaggagatgttgattgaaagttgaa

SEQ ID NO: 7342 - DNA, 1082 bp, Cannabis sativa
agggcataaaacccaacacgagaaccgtgcaccctacacatattggatgccgagctccccaaaaattttaagatgcccgagatggcagcatataccagagactcggaccccagtgaccatctatcccatttcaaccgggtgatgactgtcatgagggtcagtaatgatgcaaagtgtttatgctttccgctaacactaagcagttcgctgaagaattgttcaaaaagttagaaccaggattagtagactgctggaaaaaactataagtcagcttccggacacactttttggtcgcaagaaagattaaccttgaagtcagtgccctaactaacataaagcaattgcccgcggaactgttaaagaattttgtaaaaagattcaaagaagaggcttcgaaggccaagaaggttgacgacggacaacagcttgcacttctccaacctgggatccgtacagggactcccttctggaacgaattagaacaggagggagccagcaacctccaatatttctagaagagggtctaaaagtacatcaatttagtggcctacggaggatattatccaactagagtgtcgggataggcacttggagttcaacttctgggagccctacctccggccactcctcaaatgagcggcatacaattttctgctacctcaggatataatcagagcctagctttggctcccgcgttatcacattttgggacacccatgggccatccctcggggatgaatggccaagctccctctcagtccacgcataccaccagcctaacaagacctcctcagagctcttggagcaagaggtcctcaaagggtagcaaccaaactgaggataagcgacaacggagggggtacaccgctcagtatactcaatacactaagcttacggacacacaggagtgggtatactttgccacaagacaaaatacgcattaccggaagcctcctcccttgtatagggatagttcccgaagggatcccaataagaggtgtgagtatcacaatgacattggccacggtaccaatgagtgtaagaacctaaaggacgagattgagaacctaattcgactaggt

SEQ ID NO: 7343 - DNA, 1172 bp, Cannabis sativa
aattttttttttaatttttggtcacttcatgtgcttataaattcgctaatattgtcaactataattgaaatatttgtactttccggctagttagctgaatagtcaatcatcatgccatccttcatcaaaagttgaagaggaccgtaagccaatccatgaactaatgaaaatatatgtaaactacaatgtgtacaactgaaatctacacaaatatttgtgataatttcagccacttgatcaaggataatttttgtatgtttgccttcatacaaattttgaaagctcatatatagatcctcttgtaccaattttttgatcaaatgaagaacatatttttttctcataaaaagcttctgactatgtttgagttccttcaaaggtttacctaagacttttcggtgaagttcctctatatatgaagtgaaacttacttttcgaacaataggcatgtgctttagttgtatgtcaattagatccaagatagtttccctattaatatcttcattttgaataaaattatttgcatcgttctgttttatatcttctattttattttttgttattcgtttacgatgcaaattaaaataattaattgaagtcaagcatttccttgctatcaacggcactcatcatttccatcattctcttatcatccataatttaatataatataatataatttaaatgtaaaaaaagtaataggcaaaaattagggaaaaaatgttctatgagacaaagaatatttgttcttacaaaacaaaatgtagtaaacaattatgctataaaacactagttaactaaaaaattcatttatattattatggtttactaagaacaatttgtattttgatatatatacacaaattaattaaattattattaaacatgaaacatgtagtaaataattaagcaataacattttatcaaataatttatatgaaaaatataatacaatttcctcatataaaattataatcttataaaaatgtaaaatcaaagtaaatttttttctttagttgcactttaaatttctaatcaagtgagcatatgcactttctatggtttattttttttttttatcattattatctttggtcacttcctgtagtttataaggtaagggttctcaaaagaagagcatttgtttttaactattatcaaaaaaaaaaaaa

SEQ ID NO: 7344 - DNA, 544 bp, Cannabis sativa
atcgaggtttggcatcagagtttcaagagccagggtcgaggtccaaggactaggtgcgggtgtaagttccaggttttaggagctaggggtggaattcaggtttagttctgatctatgtaaggattgggtatgggttagttttctaagtccaagtctagtttcaagtccggggttgagagtcgaggttggggtctaggttgggccatggtagggaattggtgtccgagatctgggcttgaaggcgaggtccaagattgggatcgaactagagatttaaaatattaataaaaaaaaatataaattgactatgattaacaaaaatatttaaagaagtactggaagtattttttaaattttttaatattttgattccaattttaaaaattaaaaattaaaaattattttatagaacatacttttttaattaaaaaataaaatactcattaaaaaagtgttagaaaatatgtcatacgtttctatctccttttaattaataattaaatgaatgtgtgatcataacggtataatagtaactatattaaaa

SEQ ID NO: 7345 - DNA, 1129 bp, Cannabis sativa
taaaataaaaggttggttctaccacacatcccagtaaaataggtatattggtacaatttttaagtgtcttgcaaaaaatgtgttatacttatttaagatattttataaaattttgaaaaatttaaaataatttacaatataaattttaatgttcaaaccgtctatttcacaagcgtataaaataataataataaaaatcatgtgtgcaaattgcaatagactttttaaaccctatctttaaactggtatatcgaagtagttcttggtgctagacgttgatcgaatgaagtttttggtggttttgtgctgggccatttgatatgcaaggaatgacagagtatggcaaataaagttgtgggtgcagatagcatcgtttcattagcaaaacactatttttaacaatagaaacttgctcaaaatttaggtaataaattattgtttattggctttataccaggagacgggactgagtaatgagtagctccaaacgataatagtattaagattaatgttgatgcggctatgtttaacaaggcctagagctatagtgttgggtatgtggctagaggcaaaagtgttatgttgttggaaggctgcacaaagttgtttcatggtttggtagcacctgaagttgcagaagcgatggagattagagtagctttgagttggattaattaaagatcgtcggtggacacacgtgattttagaaacagtctgtctttttgtggtacaagccattcgtagttctattgttttaattatcatgttcggtcgattggttaatgattgtaaggtttaattatgctctttgaaaaatgtttctattcattttgtaaaacgatcagtaaatatggaggctcatttctttgcaaaagtctctatattacaccctgattttcgtttcagtttggagagtatcccaactgatttgttacctcgtttggtaactaagttcattggttaataaagtgttgctttttcattcaaaaaaaaatatttttggtgtgttaatttgtttttgaattgtttaaaattttggaggatgttttaaataagtactacgtatataatcataaaaaacagttggaatagatttttttattaaataccgaaacaaataaaagtacat

SEQ ID NO: 7346 - DNA, 1343 bp, Cannabis sativa
tgatctaactccatagagcactcccaaattctattttttaaaatactcaagcaaaataatattgtaattattttaccacaaatattttacattacaccatttatttgttggagtaggattttgggaataattctttatatttttaaattttctttattttaaagaaaaaaatctcagtagaaaaaaaatctcagatagggtagatcctattatgctttatgtattatagtttataaataaatgatactattatgctttatgtattatagtttataaataaatgattatttctttaggagaaagcaagcaatgatatcattgggagaagatttctacaagtcttgcttcaggaggaagcaaccatcactatcttcaggagaagatttctacaagtcttgtatcgggtggaagcaagcaacgttatcttcggagaagatttggtcttgcatcgggaggaagcaagcagtcatcaagtaattaatttgaagggaattcaaaccttggtgtcttaaagatattcattcagcaaataggagtacatgaagcttgcgaaaaaattattagagggagtctatgttttgtttatgtcaattacattgtactttcaaaatttaactaatgaatcttatctctaggcgtggtcccatggactagtagcaatctgcaaggcttgctgataccacgtgcaaaatatcttgtcattttaatttcaataattttactttctacagtgcactttggataatatttaatttttaatagaataaattttaattttgttcaaataattttataatagttccacaataattaaattatttattagttatactattcaattataaaaatagaatttcaattagtatcaaaacagttcactaaactcttagtgagatcttgttgttatttttcgtttaatttgttttgtgtaaaatgtttccttttccagaaagtagttcggtgtattatccttcacctctaaatgactcaaaatatctatatacttgttgctcaaatacgctaaagagactatattatattctagaagtcaatcaaagttcctcaatgttaagcgagtaaggatagagatccaggacccttattatcaatctactattggggaggatcagagttacctaaagctttaagtattcaagaaagatagtgagtaagtgtgatccgagaaggctttgactcgctgatcccagagttcattcaatagtatcatatttggaacttgaactagtggttatccaccctctaacaaaggatcgaatcttgtccactgcgtatgacagtggtagtgcatgtacgtgcctttgaaattccttttttcttttttt

SEQ ID NO: 7347 - DNA, 618 bp, Cannabis sativa
attgagttattgaataattgggtatatagcttaggttatactatagaagagcatctaggggtcggcaaatagtgtcactagaatttttcactttttctttgttttgtagtgattaattactttcttttatgttgctttttgtaatcctctaaagtttaagaaataatttatataaatgtgctatatcgttgttagtacaattaaacttgatatttaattgttattcaaaaatattcaagaaaatttactgaaaaatatgcttaacactactacaaatttttgtatataggtgtacaactaaagtcctacattagttaaaaatagtaaggattataagtatataaagatggacaatctctccattagtatggggtcttttggaaaagtgtctaaaaacaaattgaagagggctttgatccaaattaacagattaatgtgataccaatgtggaaataaatggtgtccaatgttctaacaattctaaatataattaagcggttgatggtccatcatatcgttttgcaactacaataaatcctagtactttggagagcttgtggctagaatatattcttacctaagaagtttgttcagagagagtaattattccaaggatca

SEQ ID NO: 7348 - DNA, 832 bp, Cannabis sativa
caaacccttctaagcaaacacaaagagtactgttttgtatatgttgcgaacactaaaagggccacataacatattgagcttggccagtctattgggtgataaacacaaattcacaagccattgccttgagttctccttccacacataacataacttgccagtgggttcaatcttcaatttagtaaaagcatttgggccagtagcaacaaatacaaaatggttgtcatactcttttgttacaacttacaagagtaatatttgtgatactatttttatcttcaccactaccaccaccaccaccattaccaacactactcttttgttacaacttacaagagtaatatttgtgatactaaaccatatttacaacttacaaactaacacaaaaaaatcttccacaaagtcattagttggcccatggagtttattagttaactatttgtgatactatttcatgtaattagagggaataggcatatatatgagttgatattgaatgaattagttattctatggagtatgagtgcttgtaattgacagcatattgacattaatatatgagggagtacttgacatttttgttggtgacagtaaattgataagaaaaactggtcatttatgattaacaatttgattgaaaataaacaaaggacttaatttccacaaaaataaaaataaaatacaccaacttgttttttcattttcttctacaagagttataattccacatttagttcaatattatgatatatttaatgatccaagcattttttttttcttctttagagtcattgctcgtaatgacgttaaaacaaaaggttttactgataga

SEQ ID NO: 7349 - DNA, 746 bp, Cannabis sativa
tatatatacataaatgtttgatgatgagatcatgacaattataatgtatagaatcagttgataatgatttgtctaacacgtttatgatctaattataatttgttaaagtttaaaattagctttaaacatattattaataggttaattttatgttaatcttatcaatcctaacacaattttttaaagggaatatataggccataaattttttttgaacaagaaaattctcatactttaaatgaattcatttgtttggaattccaaactcatgtattagtatatgaacacaattttttttttttttttttttgagaacaatatatgaacaaaatttaatattaacttcatgtactcgagagaaagaaccccaacaaaaataataatgaattacaaaaatagcacatttaaaagtttacttaaaactgctataattttctttctttcttaaaaaagcccataaatattgtttgagctaggcccatattagttttgggccagccctggaacaggatgaagaggcctttaaaggctttaattttataaaaatcacataagttagcattcatgttttgggtttaataaaatctatttttgctattaattattggttggaagatttcaaaatgaggacatgtttattgggaattttaggaaacccattattgaagaagcaatccttaaattagagaattatcaattaagggaacttttcaaaaataccctttttttatattttattataagtt

SEQ ID NO: 7350 - DNA, 642 bp, Cannabis sativa
tattgtgtaagtgcatatataagttgtaactttaaagtgttatatatgtgctatgtaaagttattctttggaaggtaacatataatctctagctaggcctgtccactcttttagagctatgttggtatgaacctcatgttgttgttagagcaagcattatattgaccttagattggtctgcacatatattgatttatggatgtcaatccctggttatggttgtaatatataatgagtttgcacaaggttgaagagtcacatcattagtgtagatatgaagattgcaaaggctcgtctacatatatgtgaggtgactaatatgcaaataaaccattatagggactgaccctaataacgtgttggatgatggtcaaatttttgcaagtgaggaagagtttgtttttgtactttgataaagtgtttgtactcatatatatatatttatgtcagttgctgtccatttcctaatggtctgtttcaactattcaactaaggttgtccattgagattgcttctacttcatgtatatccatgagtgagggtctgccatactattattatagttacaagtattgtatgaacaatagtgaccattccatatatgcatatatttttttttatgttcagtggtgtaacatagtg

SEQ ID NO: 7351 - DNA, 1331 bp, Cannabis sativa
ctctctctctctctctcaaatgatgatgatcaaagacaaatggaggatgaagatgaatagtagtagtgatcacttgatgatcatgaataataattcttatgatcatcatgagatttcatcatcatcattaccatggggtattagtagtgtaattaagaactattcatgtagcttttgcaaaagacaatttaagtcagctcaagctcttggtggccatatgaatgttcatagaagagagagagctaggttaagactcttacctcctcctcctctcacctccattgcaccacaacattcttcaaaccctaaccctaaccctaataactcaagccctaatatttataatccaagcccgaaccctagccctagccctaactcaaaccctaatatttatgcaaaaccaatccctaataaccctaaccctaactcaaaccctaatatttatccaaacccagaccttaaccctagccctaataatttgtcttcatcttcatcatcaccatcaccttcttcattattaccatcacattattcatcatcgtctactttatacaagcaaaataagaaatcgatattcatgatgaacttcaaagctgatcaaaacaactgtgttgttccttttacaaattcttattcttattctcattctctttctattgatgaccgcttgcaacaatgtttagatcaacaacaagaagatgactacttgaagaaattgatgatgaggaatattactagtactacagaaaatattaataatgttaggttagacttggaattggagttgggtttgctcaaaggtcatgatctaaaggagaatgatgatgtgctggatttggagcttcgtctatagctataaattggtatgaatattataatttattaatggcatataattagcttataataattaatacttcaattatatatattatatatcattttaatttctatatgtatgtatataattttaaatggttggtttttatttaacattataagtaataataaggggttttcaagaccgaccttgaaatatagtgggtcattgaaaataaaatatagttggatctttttttaaaattaataaaaaaatgtgtaatttaaaaaaatgaaaaaaaaaaaaaaaaattggtcattagctagacgggtcttaaacacaggtctaatgttcttgtgcccaataggagtttgggtgtttgcatgtatccttttgcttaattataactatatatattaagataataacttgattattggtttattagtcatattagatttatattatacattatagtaaatctcatgttaattttcttaaattaatggca

SEQ ID NO: 7352 - DNA, 799 bp, Cannabis sativa
gtgtaaattttcataactacaagttcaaacttaaatttataagatcacattcacattgtagcctaaagcagtatttcattattttaacattttatgtgtatatataaaattatcatacattcaataataataataatataaaataaaattatcatattatacaataataataaatcaaatcaagaccaaatttgtgtaaaaacatcgaccaaagatttttttcatttattttgaacaagattactcctttcaatcttattgattcatcagtagattttttttataattgttgtatgtaaactttggtaaaattgggcttcaattccatcaataattaaaatagtataaccacattaaaagagaaacaaaataaatataaaaatcaaaaaagggttataaataaatcaaacaaaagatttttatcattaaaacaaaggcgtgaggtgtgcttcttttctcctgatcgcgaaggtaaagaagactcatcaaaagtttgaatcaacaccacagaacgatgtgcgagacaatcgcatactcaaccagcggttcaagaaaaggtgaatcaagaggatcacaaacaaaattcacagatgctctcgatgggaatttttcccaaccaaggaggtgcaagagtacctcgattctaagagcttttactccagttaaagaatgtcgagaatgatcaggacataaattttagaaacgtgcccaacagatgtggtttgatctctcctcgtaggcgaaatatgtgggtgttaaactctatttttctccacacttctcatgaaggatggccatg

SEQ ID NO: 7353 - DNA, 589 bp, Cannabis sativa
gggttatttttagtttaattatgtgaataatttgttgaattatggtactttctgttttcatgtttcagccatgctttaaagacttgatttattttgtttgttgagaaatgaaagaatgagaacctttttgagttttgaaaacatgttaattttgtataatgaaattaatgatttgtcaatattaaaggttttgtgattttttatatataaaataaaaagtgagaaaatttgaattttggaacttaagaattatagggttccatcttaaaatcgattagtgatagctaaattaggtaattcacattcttatacatgactcgatattttattatttatttatttaaagtgtctcacgataagaatcaaagtagacaaaaaacaaccattagtgatctcaatagaagacaaacttgaacattagttccatcgaaaaaattaaagacaaagcaatatttttttccataggtcgagattagttggcagatatccaattagtgcaatggttaatcaataaaattcatatcaattggtacaatgggttaatcactgagattcatatgtaagtgagattctacttttcactacaaaa

SEQ ID NO: 7354 - DNA, 718 bp, Cannabis sativa
aataatatattggtaaactaaactaacacaaaacacattaactcaatcattacatgggtttagtttacagtctctttcgaaacctaacttagttcataatttctcgtcttaaaaaaaaatgtcttttttagatggtaaaatactaaaaacaatgtttggtattttctgctatatataaaattcaactttctaatttaaattttgaacacacacaaatattttcatgagaacccaaatctcacaatatattgtggatcaagatagtatttttatccattcacaaacttgaatcacaaaagggtgtgaaggaaaaaccagatataaatcagtgacatttgtccatttggtgaaactttgtagttttcgttaagggaaagcaaagccgaaaccaccaaaggcccactataaacaaacacaaccaaaccttacattttcatttcattatttcaaactggaaaaaagctgagtgcttgaaaccaaaaccacactcatttatttaacagtattcagatttcaagactactaataatgataactcaaagccaaaaagaaaaatgaggttttgaaattgaattcaacttcaagtatcacatgttagtttatgcacatctcgtgtttgcatttatagctcactcatcttttacttttatatataaatatccttctgttccattctttgtacctgtcctccattcattagtgtccaaaagggtatctc

SEQ ID NO: 7355 - DNA, 854 bp, Cannabis sativa
ttttttacgtagaacttacttctaccagcagcctatgatcaatcaaacacatagtatgttttggtcctagcttgaactgagcagtcttatcgtaagcatgtaatagtgtaaagtcaacagagcgtcagaaaacttacttggtgtttggataaaggctggaaagttatcatgtaaatctgtccaaaaacattgaacctagtctattacatggttgtatccggcctaagagtcgaagcccttgtctggctagggggtgaagcacagtcgggtttaggggttcagcatttggaaaacaaaatgaatggatattaaggaagtactgaatgaggcagtcataagcctcttgcattcaccaattgatcacatctacaaaatgaaaagtgcttggaaaaaaaggctctagttcaagaaaacaacaagaaggcttacaaggataaaagatgatggaaataggaaaaatgagagattggagcaaatttataatccaattgtgatcctggtggttcgaaataaatggcccagatatttcctccaaaaaaagcatcctttgatccgacaggtggggaaccaaaaagatcgcatttaatgcacgacttgaatatctaaacaagtctcttgtcttgtaaacattaattgaggtgtcatatcaattatcttgtcagcatatgaattagaagcgtcgcatgtgggccacgccaatgataaatgttgttattatcccaatgcatgatgacatctcatgggatatatctgtgagttcggctagcgccacgtgtccaaaaatttcaacaataagcaaagaaatattgcaagctcctggcccacagggtgtcccagaagcttgggagtaaatg

SEQ ID NO: 7356 - DNA, 877 bp, Cannabis sativa
agagataccaattttttttattgggtgtattgaaaataaaaacaaaataaaaaatcatgaaaatgagaatagaattgtctctaggtaggaaagtttttacaaccatagataataaatttaatggtgatgataaatgaataaatgtataatagtagtactgtaaatacggatcagattttttaacagcacgaaatcaatatgagcacgagagcaaataaataaatatcttttattattttgtactccctctttttattttgaggcatattttctttttatctaaatatgaaaggcaaaaatttgataattaaatagaaagagaagccaagccttgggctacccctaaagcaatctggtgaccaataaagttcaattacaaagtgactacatattctaaactttataaatgtttcaggaatttgaggaagaaataaaaatggagaagggaaaaaaatagtttctgggaagtggaaactagcctataaactgaaaaagcaggctcattccttgtatcactgttctcagttctcaccattaatcatgttaatgaacaaaaaaaacagaagtatgttccaagttttgaagaagagaaaataaagagagttagcatgatgactatttgtcagtggttaatacatctaaattcatacaccaacttcagaactggcatcagaatcatgtctactactccgataagagttccttttagtggccacaagggggctgttctcttcttcatcaatggcaacgggtctctctaactctccacctttgaagacaggatgtacgtaagcatccttaagataggctctcaagttgaggtttggttctgtagccttttcaagtgtgtccttcaccattgcttcctgttatgaaa

SEQ ID NO: 7357 - DNA, 704 bp, Cannabis sativa
tgatatgcccacctcctcctcctttgtttcaaataaatccttttggtccaaaatctggaccttagcagcgccacctaaaattaagcatctcatttggcgtactatctctcattctctccctatcgcatcttctctattttttagacatattattcctactcccctttgcccagtttgccagttgcaatcggagactgttgaacatggtatccttgggtgtaatcatgctagaaaagcttggaaatagtcaaagttctttaatttttacaataataataaggatagatcattttgcttgtttgtggccactgctttagatgtttacgctaaatctgatttggctttgttgttctgttttatttggtccatttggaattagaaaaacaacttatttcaccaaaaaataggactctcttcgtaccagctttttgattatgctgttaactatttgcatgaatatttagatgccaatgctaaaaagatggttttgactcctcctgtcccgcgtctgaatcggcgagaagtccagctccctgctggtcagtggatagtctatacagatgcagcactatacttaaagaatttgaaacacagttttggagttgtggctattgataatgcaggttgtaccagagcgggttttatggctccctgttctggtgtcgtttccccggagggcgcagaagctaaagcaatccttgcag

SEQ ID NO: 7358 - DNA, 1598 bp, Cannabis sativa
gggaaaatatattcttattttatggtgtcctgtgattagtatgtattttttttatttgtagaaaaccctgtgacttgtattcaaaagactgctctcattctcattttttgtaaacactaatacagaatacatgagtgatgaccaacatcatgttttgaggattatgctggatgatgcatacgatttggatcggcttaggcgttattatgtgcttttggaacagtccctaatagagcaaggtgagtccctcatcatcatatttatactagtttataaaacatacctaacacacttaccacttaccacttgaaaaaaaatatataaaaaacaagaccaaaaaaagaacaaaaaataaaaattagaggaaactatggtgcctttgaaaaaaaaaatagaaatatgctccctagctattttttatcttttttttattattatttaagcaaataaaagagaaataaagtggtagaaagtgggaaaaaatgaattaaatattaccaataaaaaatgaattataattaaaaaaaataaaattactccatatactatttttttttttaactttttttttcaaatttacggtttgagtgtctaaagtgattgcaacgcagcgctagttgcaataggggtttctattcgattttgtgttgcaatttaagttgcagcgctagttgcaataggagtttgtatgtaaaattccgtaaaaatgcaaaaaaaactgttttgaagtgtaaaaatgaaaaaactccctaaaaaatctctttatttttcttaaaggaattaaaaaaaaaaaatctttaagtaagtttttttttaattatagccttagaaaatctcaaaggcaccaagagtgaggaaatatcattgataaatgacttgactataataatatttctaatataaataataacactacaatattccttttcaacctaacttattgaatgggaggttgcatgtagtgttatttttcactataataaaatttcattttatataagaataaatattgttgcttaatttaagaaaaacaacttgttgtggtggcacaataatatttttttatgtttatttatttatttaaggtgtttatttcttttttttttttgtaaggtatttattgctagatacttattacaaaataaagttaaaaatacatatatgtttatttttaccataacaaaatattatttatacaaaaaaaataaattgccattatttattattgtgatgtgatgaaaatgggaagcaaacaattatttgtaattttttatttgattaattaattgtatggatctgtatgaggaatcttttatatgtatatatttttttaatgaaattaatttatatttttcaaaataaaattatttttgattctttaaaaggaaattatttatttgattgttacaattattatggtgtaatatttttatatttgaggcactctatctttaatattaatgtaaatagtattataatatttgaggtactatattagtaattaaggtattatgttaaatttttttatttaataattaataatgtatctataattatggggtgaattgttaggtatttaatttaaagataattatatt

SEQ ID NO: 7359 - DNA, 1430 bp, Cannabis sativa
  modified_base (259)..(270): a, c, t, g, unknown or other
gacccaaactgagacccgaactcgagaccccgacccaaactaagacccggacctaggaccctaactcggactcgaattcgaacccggacctaatcccgaaacccggacccggatctggacctgggacccagacccagacatcagacctggaccttggacccgaacccgaacccgtagttggtgttggggttgagtgtattgaaaatatattataattttacataacctattaagaaaagtcaataccaaacatagtatnnnnnnnnnnnntactaatacaatataatataatacaacacaatccaacacaatacaatgcggcgtagcaaacgagttctaattgtaatgtaaaataatgactattctataatatttcaaataaatgtaaaaatttatattcaaaaccgtgaaggtgatataaggggtagcttgtatttgagaaagaggttcccacgaatatataagaggttcgcgcgtgcttatagccaacaagcatgtaatgatcacatgaatgtacgtattgtagagtagtatttgcagtccccccaagttggcaaataaaccttcccctgagcagcctcacgaagcttgatatatgcaagtgaagttaaaataaactaagtgacgaattggcccataaagctattgtgtttttttttttctatccttcactagtaactttctttcgatctttcactcactccgaatcaattctctccaaatgcacatcgatccacaccaaaaattctgtctagctaccttgtttctgtttgctttttctcaattcaacttttctccagcaataattgaaatgccattccaaaatattcatatccatatgttattttttcttttctatctctctctctctctctctcctcaaatctcaattctaatctatatagatgcatatcaatattatttgtgacaataatatactatacatataaatcatgacttctttttaaaaaagttatatatatttatacatcatgattcatgacttgacttgtgcatacaaggttcttcattagtggcctcatcatgacacgtgtgtggtggagcatcattaaatatcacaaccgggtatggctagcaaacctcaccaacgcttctcttgttgttgttgtttctatctttttaaggaaaaagtagggctataaagtaattgagtagaataaggataattggaatataaaccgcggcggaccgacgctggtcatgcaagaatgagctggaggaacctggtgtcactactgttacattggagagagtagtcaggctcatctggcatgttcataaactaatataataaaaagtatattgccataaaacaaataaccctacagtcccaattttttttttcctaaatccctacccttcctattacccttgctaaacctcccccataaatttatataaatatatat

SEQ ID NO: 7360 - DNA, 629 bp, Cannabis sativa
caacgaagggataattatatcatgaattttttgtgcccttcatgcatggtagagattttcttatatatatatatttttttataatttaagcgtttatatattacaattatgttttaactgggagtcaaactcagaacctccaagacacacactcacttacggtggttgagattttcttatattataaccttataattctactttaaaatgtgaaatcatttttaatagagaaatgcttaagagcataccatgcataatatcctatatcgttatatgaataaataatggtattgcataataattattggtttttgttgaaagactttaacttagttttgtttttctttttacaccaggtttctcatacttttaattttttttatttattttaaatgtattgtaaaatacttaatgaattttaattagtttctaaaatttaaaattaattaaaatagtttttaaaaaataattatgagttgacccaacaattagattgcgacacttgttatattagtcatcaactaacagatcttaacagaattacattttagaaattttgggtacttattaaaaaaactagtatcgaggcagtgcaatgcattgcactgatttttatatgcaaagaagag

SEQ ID NO: 7361 - DNA, 537 bp, Cannabis sativa
aaaatataaaataaaatattttgtatcatcctgtccctgtcccgtttaatatttaaggacaaaaaataatttccatccccgtttgttttctatttcaactggaaatcctcgccctattaggggcgggttcccgcgagccacacccccatgaaaaaaaaagtgtatccctagtattaattcttttttaaaattaaattatttttttattacttgttaatctaaattgttgtgcatgtaaatttaacaaaaattacaagattttccttaatcacactattgtattaaaaaaatcatgaacattgataaattataggaattttttattttctctcccccattttatctgtaattgtaaacggagtacatagttaatttataatagcaaattatttctcaaaaaataaaattataggaatttcatagtagggtatcattttgtttatcaaaacataaataaattataatttaactatgcatattataattataataaatattttattggttttttgaattttttaaataataataaataat

SEQ ID NO: 7362 - DNA, 1157 bp, Cannabis sativa
tgctagaggtagaatagggactagatagctttggctttttggctctcttaaccttggttttagcatagggcttggccttttgtttctccttatctctcacaacttgagtcaaagtttttcggatagagcccatgatggatttcttgatttttgaatccagaatctctacaaaaccaagaagaataatattgtacttacaaaacaacaattaaacgatacacatgagtaaacataagcagatactagataaaagctaagagtcgggcatgaaagtgaccattaagagaactatcgtatggctttccctgaggaaataatgttatatctttctagtttaaaagtttccgcactccttaaattttgggaaagacatggacaagaagggatctaccataagtgtatcagggggcagcatgcaactactctaacccttaaggatttcacctattctataatggcttggggtgtgaaaaaaatagtagggccttttacgtctcctcgaggtgctagcctcgagagcaacctcattcaggtatgctgtgacaaatctctccacgagctcttcatccttagtcagggggccagggtggcagaacacccagtctgcaaccaaacggtcatctgcatctaatgccgtcttcatccttttcgcgatcccgacaacaattttttctttagcctctacccaaaggtttctaatacctctattgttaatggtattcatttaggacccgaaggtcttattgtcgctcccagaggtgaagaagagtgattaatgcatgaaggcaggccaatgctgaatatccatttagggagtataaagcagaaaacggttgagcatagagagtcgaaaaccatttgtgaggcaaaagccagatggttatatgatgattatacttttttgacataggatcagatcttgtcctttgcatcaggccatggtagtgtctgtaccacctctacacatgcctttttgcctgacaactttactgggtgtttttaccacataagatagactttttttcgatgtgtgtcctccaccaaaaatggtccccattgtacggatgattccccacacgaggaagaacaatcttgggggcccaatagtcagacatttgcatatattttacctcaataatgggatattttggaaaaat

SEQ ID NO: 7363 - DNA, 546 bp, Cannabis sativa
aaagcttgcaccagaaagcagcagtctcatcatcaaagcagttggttttttgtttttgcaagaagttataggcagatttaactgtgtatatgtccgagtttttgaatgaccaaaaaagttggtccgttgttgcagaaaaggacaaaggaatgctacagattaatgtctgatccctgacctcaaatagatcagcaatgatctcatagtcccaactagagccatccatagatagtaaattagccacagtaacatcaacaagagcaggatgggttgaaataacccatggattggactcctcagacagccactgatccttcaaaactgagattgattgcccattaccaacacaccaacgggcccctgcccgaaccagatcttaagattccaccatgctctgccaaataaagcttgaattagagccaagttgagcattacaaaaattaccatccacataataccttgctttaaagatttttgaaaccaaagaagagggtcttgtgagcagccgccacccttgcttttcatgaagagcaagattaaaatcac

SEQ ID NO: 7364 - DNA, 1812 bp, Cannabis sativa
aacaataggggtttgaggggttctcggtggatttcaccgccatccatcctaacttacaaaagattggtctatctctacaaggatggtcttcttgggaaactcaaagctttccttcctagtcccgcgctataggaaaaaaaccctagggatgattttgtgcatggttcggaccacatgctaagcagggtgttgtttccattgcatccatacttcaaggagattgcaaattattaccacatcagtctaactcagttgacttctaaggacataaagtacctatatgtcaagtttgtcctatatgcttcttaaggataggatccaccgttcgccctcgacacaaataggcctttttacttaaagtctagtcctaagcaaaatagatattagtacttctacttctcccatatcaaagaaaagtggttctggtaccacggacatcgacatgtctaaaatgggtggctatgtggaggactattactttgtcaagaacatagggaccaaccataccagctttcagcaccatatccttatttctattggccttctttcaccctggatcatagcaatagggcccagaaaacactccaactttctacggaggcttgtaatatttttctactggctactaaggcaaatttttctaagtacaagctttattcgtctgatgaggaccaatagagtgagcaagtgacggagggggatgtgtccatacggatagaaagagtttgcacctgagcaggaaactccaaagaagaagaaaaagaagaaggctcccaaaagtgaccaactaaccgttgagtagccttttaggatcaaagatagtcttgaagaggtggaaggaaagggaaagaagaagatgactattatgattaggatgctccttctttacttgttcagaagggtgatcttgtacacgtgcagggtagaccatttttacttagctttgtttgtctttacttgttcagaaggatgctctttctttacttgtttagaagggtgctccttttatttttgggtagtcatgtcacaatggatgttgcacactttaaagaagaggtcgagtgatgcctctagccaaaagttaaacctcctaaggtggaagatatagtgccaaaaagcattgtcgtgaacactaaaactccccagttgaccagtgagaggagtttgactactgtctcctcagatgctctcaaggtcgtggtcctcgactctattcccttggccaaaaagaatgccaagtctaaagcttctactgctccacccaaaggttccaaagcgacaatagaaaagggcccaaacaacccaagctactagccactcctcctatgttgaatccagagactaaaaaggataaggagatgctcacattttacgaggagaatgttctacttgagatgaacaattacttggttggggcaaaggttatgtctttggagctcctcatgggaagaatgctaaaggaggccactcgagtaagtacttttccttttgtttttctatacaagctttacctcatacatgttttaatcctcttttattgtgtatcttaatctgatgatggaagacacttactccaaagccaaatctgctgccttaaaagttacaaccaccattagaaatttgaagaaagaggtagaggatgctaaaaaggaggccgagcataagatttttcagctgggagaagttattaagaaaatccttgctgctaacaagcgcattgaagacttgaggaaggagattaaaggtatgtcgtcaacagtgtagcttgaggtagatatcgaggcattgtctaaagaagtgaattctcttcaa

SEQ ID NO: 7365 - DNA, 706 bp, Cannabis sativa
tttattgttcatcaaaataatcttatatttctggacctttcttataacaatatacatggccaaattcctacagattttatgaactcaagtcttcaaagcatgacaaagatagatctatccaacaacttgataacggggtttcataactacacaaccgttctgccttggtccaatttgcttagtttccacatgcaatctaacttgttgcaaggacagcttccgattccaccatcatctatcatacattatgatgtctctaacaatattctaagtggtcgaattccctcatcgatatgcaattttaattctatttcgattcttgagttgtcaaataataacttgagcggagaatttccactttgttcagccggtgggattagtgactccatgttagttttgaatttgagaaacaactcttttcacggcatcattcctcttcaatgtcaacataaaagcgagttgagaatggtagatttcagtcacaatcattttcaaggaaaacttcgacaaccattaactatttgtatgaatcttgagtatgttgatttctctttcaatcaactcaatgatgtgttccccacttggttggggagtttccctcgattaaaagttattttgataagggcaaacaaattttatggagttataggaaaatctcaaaacacttcgagtgagtttccagtgctacaaatcattgatatgtcta

SEQ ID NO: 7366 - DNA, 1029 bp, Cannabis sativa
gccgaccatgggttcaacaacctagctggccataaccttccacaatctggcggccatagcctcatcaaagtggccaggcaatgctccctcagcctcgccagccacttggtttgtaccctagctgacctgatccgccaacagcctactctatacttttggtctaccatgaccaaaaagtaaacatcttgctagcagaatcccttgacgaaatagaagaaagaagagagcaagccaactaaaagcgtatgtctgccaaaaaaaagttgccaggtacttcaataaataagtcaaggagacgaaattctccatagaagacttaatgcttcgaagaacatttcctgatacaaaagatcctacaacaagcatgtttggaccaaactaaaaatgtccgcaccacgttacaagataacaaaccatggtacatacaaactcgccgagtacaatgagaacatcttgataagtactatattatgttaatattttagtgataaattctttaatttattaatattttatttgttgatttaaatttttttatattgttataaaatgtaatacaaataaaaaagattgaaatataattttattataaaattttaataattggataaatattattttagtgtgattaaattttttaaaaaaaaattgatataataataaaataatattaaaattaagatttgttgacaatatttgaattgccatgtgccacccctaacttaaaattctatcgcattttttttttattattttcaaataataagttaaaaatgttctaaaaaaaagttaaaaataaaattagagttctctaatattccataagagaatagatgattattttgtggagaattatcgaaatcaagcctccacttcactaaataatattacaactttctcaactgccaaaaaaaaaaaaaaaaaaaaaaatagcagaccaaaatgaggatttaccgttgttgactttacatgaatctctctttcattactaccactcctcactcttgtcctttaacaccttaaataatt

SEQ ID NO: 7367 - DNA, 831 bp, Cannabis sativa
taatacttaagtaactatgttatcattgctttttgcagtaaaaatactcattataaacaaattaccacttaggcggacataagtaccaaacaaattatttaaatactggttatatatataatagttggattatttttgtcattaaataaaaaatttggctactcaagtgttaaagtgtaataattcaaataatttttttttttttttgaatgaatgatgcatttcattgaactactgccaacacaaattaaaagaggaacaaattcaagtaaccttgatcactaaactctcgccatatcaggagagagagccatcttggcaacatcatgagcaataaaattcgcaaagtgatttcaagaaagaacttggaaacattaaaactattacaaatattgtaaatatcttacaaaatcgtgccaaactccacaaagcaaaagtcttttttattcaggagcttagcaacatattggcagtatgtctcaacttgagactctcaacctctacatcatggtagacaagtctatagcaaagttgaagaccatggagaaatgatgcaattgcaaagtccacagtgatgccacaggaagaatagcgaccggggaaagagccttaggagcacgaggagtcttttggtttgcctcctagtagttacgagaacatgacaaagcccaccccaaaatgccttcagttttgagaagtttatggtgatgatttggtttgcctcctagtagttacaggaaaatgacaaagcccaccccaaaacgccttcaagttgagaagtttatggtgatgaactcattggttttggcgatacaaaattcgccacaagag

SEQ ID NO: 7368 - DNA, 766 bp, Cannabis sativa
tctctctacccacttgttctgaggcgtagagagagaaaaccatgtaaattcgttgatgggtatttgaggagagactccaacaactcatctgggcattacccacttgtggctgtttccgctgtggctgctgaggctgaggtggctgaggcggtggaagagaaggaagaaggagctgttgggtcggctgctgttactgctcctaagaaacccaaaaagggaaaagctgctttgcttttgaagagggatagagtatgtgatgataaagtttgaatttttattcttaattatgtttcattgttgaattgttgttgattatattgatgttttagggaaattctgtgtttggatttagtttgttcattatattgggttttgttaattatgtttcatttgttgaatttttgtcaaatgatattgatgttttaggagaattctgtgtttggttttgtttgttttgagtgattttttgttgggttttgttttagtattatgaggaattggcttgttttgattgacaatagtatgcatacaaagtaacacttttgttatgaaaagaaaaaagtaaaggacttttcttcattgttgaattttgttttcagaattggattttgtgagaaagtagtgggcttgtttgttggttgatattgggtataatcagaatttgtagtcatggaaaaaagttagagttagtttgttgatcatattaaggatacaacagtttttatagcttttgtttgttatgtgtaatcataatttattggtatga

SEQ ID NO: 7369 - DNA, 888 bp, Cannabis sativa
caaatgggcccgtgaattgattttaggacttggaagtacacacgtcctccatatagaaacacggataacactcacctttttgcctgagagcaatataaggaaataatatttttaaatagttaatatggaaagttttttgtaattacacttaattctcatttctcattaaggttatgataattggagagtgtaattggaatcctttaattactttttagttacacagttatagcgtatttacatggttagacaaacatgtcaaattacataattacatttaattgcacctaaatctaattacaccatgactttccaaactcgccctagatatttagggtacgtttgaaaagcaacgatgtaattagatttaatatattgtttgataaaatagttagtaattacacttaaattacacagttatagtataattaaaaaatagcaacccacataaaccactcgaaaaactactgaagcaacccaacccgtaaattaaaaaaaatggtatataaaatatttcttttattattattgttagagaaaaaaaattcctttaaaaccttattacaaattagggttgttcaatttttattttttttattttttttttaatttttataattcacaccatacatagcatttaacccaaattaaattagtgagtaaaaaataaaattgtaactttttaatttttttacaaaataataaattaattaataaaaagtttgagtctttatagtttagcatctctttgagactgagagcgatacaagcacaaatcctctctttctctgttcaccaaagaaaagtacaaaccctcttctccatttgatttaactcaatatctctgttatcccaaccaatcagactctcgattccacccaaatgggc

SEQ ID NO: 7370 - DNA, 965 bp, Cannabis sativa
  modified_base (433)..(439): a, c, t, g, unknown or other
gtgaaatattactatatagttacgtgtctgtactatgtagaaatagaaggattattttgttataaagaaagaacataaaagaaagataagatgtatataataaagcctaggagatgcatgtatagatttcatttattaggtcgcgcgcggaggaaagaacaaaagtatatgataatcaagccatacatgaatctacacgtacgtgcatttacaaagcatatgatagatttgtgttttaaaaaaggtacatatcaatatatttaacaagtacagatttcgtacgtaaataaattatacatttgagtatatagtaatcatatattattaatttattcaaaaaagaaaatcaaatattaagttctacctttgcttttggacaattaattaaggtttttgtctcctaaacttagacatgtaccaaatcatgcccctnnnnnnntaaggtcgttaaaaatgcccctaaattattgagattgttggatttaaaaacttttgtctaatttcattcaattttactacttcagtgattgtttatatactaaatcatgctctcagactttgatatctaccaaatcatgcccctcgaacctcgaacttttacatgtactaaatcatgatccctagactttcatccatgttaaacttttttactaaaattggaaaaaagtcctcaaatctaacaatctcaatagttcagggggcattttcaacgaccttaaaagttcagtgggcataatttgatacatgtcaaagttcagagagcaaaaatcctaattaaccttatataaatgaattcatattttctttttaacttttggccatgtacgtttcacattggagatagaagcaagtgtcgttttctaaagtttgttcattactaattaatatatatataactcttatttgttgcaaatctctaaattatataagatttactaaattagttcttttttcttttttttttt

SEQ ID NO: 7371 - DNA, 947 bp, Cannabis sativa
tttttttttccacatttatattataggccataatttttaatatttaaataatttttgtagtgatagtcttaaaaaaaattgtcattggaaccgtcacaaattctgccttttgtaatagtacacttttatttattttatttttatttgggtacataattaaatttattaaattaaaaaagttattttgtttctaaataaagtactaatgtattagagaagatacttttctgtttattgcttcacactacaattacaatgtaatagttgtaatattaatgtgattatatatacgtatgagagacaaacctctaaataaaaattggtttgtttggcttttcacaaatataaataaaaatactcattttgtaatatttaataaaaaacataagcacatacgactcgagctaacatttattaattgcaattagtcatgtgtaataattaatacatatctaattataactagagggcaaacgttgttcgtacgaggacgagtagtggaaatttcaacactgacccacttaataattaaatggtcaaaataatctccactaggactactaccacctactatacacagctcacaattcatttcttccatccaaagagagaaaaaaaagtttaaggctgttattgtgaagcttctattataattttttagttaatttttatgctcaaaaacaaaaattagatgatttaaaatatttaagataagtgttcgttatagttataagatcatctttgtaaattttaattttttttaaaatattttacagtactgaaaataagtttaaaattttaggaacacgggtagtaaagtggaatattaagaattttattttcggtaccgtaaactcttaaaatttttttaaaaaaatttgcaaggatgatattataactaaacaaatactgctcttagtaaaatgaaaaaaaaatattttgacatg

SEQ ID NO: 7372 - DNA, 900 bp, Cannabis sativa
gtatctggctgcaaagactctagccacgagagagtttggatgcttaagaattcgccaagcttgcttagcaagcattgcttggttaaaatgaataatgatcaaaaacctaatctgccatcctttcttgacttacaaagtttttgtcagctatgccatggaccttaggtctattgttagcattgaaatcccaccaaaaattagccatgatggactccaaggaatgacaagtagctaccgagatacaaaagcaagccattatgtaagtaggaattacttgaatgaccgatttgaccaaaacctctttgccacctttcgaaaaaaccttgtgtttccagttactaaggtgattccaaaccttatctttgagatattggaagacttgtttcttagaacggccaaaatgttaaggaagccccaagcatttcttaaagaggctttaactgggatacctatgtaatccgaaataaggttttgatccctgatagtcgtgtttggggagaagtagagagaaaatttttgggggttcgcttgttgtcccctggcttttttataaagatggagaacctccttaatagcattgtaggaattaatagaagcatgataaaagaggatactatcatccatgaagaagagatgggaaatagcaaggacagtcctagctactttgtacctattgagagcatgtcttctttcttgttgacgaataagggaggaaaaatcttcagaacacagcaaaaagaaagagagaaaagatcgccttgacaaataccccttgtgggaatgacattgccagaaacattaccattaagattaaattaaaattaaaatgtagcagttgtgagaaattaaattacaaagcttatgaaacaacaaggataaatatataaatatgtattgatt

SEQ ID NO: 7373 - DNA, 564 bp, Cannabis sativa
gttgacaagatcctgcaaaataaactcatcagtatagaatttcatgcttagattactgtcacgggtcaaacaatgaaccgagattatgttatacttgaagttgggaacatataaaacatcctgcaatgtaatgtgatctgtgaccttaattgtgccactttgatgtacagagacaaagtctccattagggagaagtaacttggtaggggtaatagtacataggcattgaaataaatgtatactagaacaaatgtgtctagttgcccccgaatctacaatccaggagctattattaggcaatttaattatgttggacataacaatattattgttacctgtaccattaccaagatcagaattgggaatgttggtttgttgtccagcaagtagattaagaagctgctggtattgtgcagcagaaagttgtggcagtaaagcttgcttctcactttggtcatcatttatgtctttgttggtttgaacctgatttgcagcagcatcttttgacttgttcttgttgtaaccaggaggatacccatggattttatagcacctttcgacagt

SEQ ID NO: 7374 - DNA, 866 bp, Cannabis sativa
aaccataataggcttccctacttgcccaattatcttaaacaaggattcttccccccaataattcagttccaaatcatccaaatggacccaaattggaaccattagaatgtcctccttcttgaaattcacctctggatcctacggtttcattaccactagtcttttgttaaagaaaatgtatcccccttttagaacttcatatctatcatccatggtgttaaacctaatcagaaaaatgccatacgacactattccaactcttttcactttgtctttccaaaccttctagcaaaaatccttccaaaattagcagaggaggattggctcctaaaacatagtatacaatggatggcttccaaaattctacttcctcatgtatatcatcctttataattttgactttgtttaaagaattcgactgagataaagacttctctagatttctttgaacattgctagatcgtagtataggggaactagtgatgttaccttgtgaattgtgagtagagcatcttcgatttgcttccaggaggtgtccgaaatcctttcgtatatcttcctactgcctaatcgatcagagagatgaactaggcgacattggatccgggaaaagatcttggacatctggaagttgaataccctgccctgaatcatattcccctatttccccaatttcttcactatcaaagaaaataatcaattatattccaagaatagcacccagtgatttagttttcctaacatcagagcttgaattcggacccttcttcttctacaagatcgttgagttaagcttcccctaccccttggacctcattttgcccatggccccaactcgtgagctccaaggttatgagagagagaga

SEQ ID NO: 7375 - DNA, 1074 bp, Cannabis sativa
ggggggggggatctttggattcctcacataaaagatttctacctgaaatcaaatggatcatccaatcctagttctcgtttagttgtggatctcttctcctcttgtggaggttaggatatccacaagttaagatctctcttcgatcgagagactgtgtctataattttaaaaagtgggtccccctctggacatgggaaagataagtggatttggactcttgaaaataatggtcagtttcgtgcaaatcggcctacttgacccaggtcatggaaagagctccattatgtgaggtcgcttagtcgctcttgaacaagctttggaatcgtaaaattttggagcgccataaggttctttggaggtctattctatccaatgctctccttgttcgtactgtcattaggaagagatttcttatagaggacactagctgccctttgtgcgggatgggcgaggagtctatagaatacttgtttctttcttgtgacgaggcgttacatgtttggaggtcctcgccttgaggcgtttatcctatttgtgacactggtatctacttgtgggattggatcaaattcatcctgtacctaaaacacaagggaattgatgctgatgaggttttcctttaagcttcaattgttgttgacacgatctgccgatcccggaatgcaaaggtacataataatgatacagttgatgtaaagaagtttattgactctatttgtacttcttttgcagatctacatgcttctttattttccttccccgatttatgctggaaggaggtttggtcttcttcccctgaggattggattaaactgaattgtgatgtaaaagtaggattagatagcattgtactgcagttgttgcccgaaaccatcttactagggtggtttggattcaaacagctcggttgaacttctctgatgcattatccagtgaggcggtggcctgctgcttggctctatcgattgtgaaggatatggttttcaagtttttcattgtggagagtgactcgagagtaaatatgaatgctctcaaagggaaggtgtcctgttgggcattggataactacgtctc

SEQ ID NO: 7376 - DNA, 846 bp, Cannabis sativa
ttatctcatgcttgtttgtatttgtcaacagttgggaacttggcaagaagtcagttggccaaagaacaagtgaggttttacttaaatgaagaggagaataagaggaggaacatgttgaaaaagtacattgatttgtgcaatgatgctaaggtacgattaatatgaataattaataaaaatttagtgagcaaaaactttgttcatgtcttagccatgttttttttaacagagattacttggttgcggttttgtggcaggtacctgttgacacagtattagttgagcacaattcaacagcaaaagcaattgttgatctcattcctatacataacattaactatctggttatagggaaaaagctacctaatttgaggtacactttatgcctgatttttttcagacataaatagacatattttagttttggtaattatataagtgtggctaataattctttatctcaggatattgaagaaaaaagtatctaaaggagaatatgtgaagaagaatgcccctgaattttgtcaagtaaccattgttagtgatgaaacaagagtaatccattcatctaatcaacaggcatcatcaagtgatccaagaagatctaatcatcatattaatggccaccctgaaagaaacttgtttatgtgtgcatgtttttcaggcaagttattctaaaccacctaattattattagtctcatgtcatcttgaattggttggcaatcgctttttgtatactgtggatcaattggaaggtgccacattggctcaaacaaccttttaattgggttgggcagcattaaaatacctttttagcctttaattacctatttattagactcta

SEQ ID NO: 7377 - DNA, 549 bp, Cannabis sativa
ccaccacaatcttgtcttttttgacaatgtgttcaagaaaagagacatgtgacagccagaattcacactttttgaatttcgcataaagtttatgatctccgagtcatggcagaatcatgcgaagatgttgttcgtgctctacttctgaccaagagtacacaatgatatcatcaataaacacaattacaaagttatcgaggaaatccttgaatactctgttcattagatccatgaaagctgctggagcatttacaaaacttgtcgcctaacgactaatcaaaatgcagcccattgtcccaaaaattgaatactctaggtctaactgccccaatatgtataatcttcacctggtcgacctcactactattcagccttagctttgcccttaactaaacatgaaaataataattgtaactcagtaagaaaagcataatcgtatcataacataataaaccgataatcaatttcgatatatattgaagataataaaaaataattggaaataaaaaatagctagaaaataataaagtatttaaaatatatatttat

SEQ ID NO: 7378 - DNA, 1215 bp, Cannabis sativa
gatttagagttgtcacatctgagcaacttaactatgaaaactaaatggattttaattgtaaaattgagtacaacaactgattatattattattagtaatattattgaattagatatgtgcacatgcatgtttatggtttttgattatggttattaattaggacttggaagggggtaggatgagtgtaggacccttttcaaccaaaaaataaaagagacacttaattggaccatctaaaagataatactgaaattaattaggcattaaaacatatttattgacaatttttaatatatatatatatataataaaataatatatagtcttaacagattggtttttagctttataaaaaccaaattatcgggtcttcacaaaatgaagatgctatcagtttataaatttgttagttggagtaatgaaaattacagctgatttatcaaaaaaaaaatatatataatcataacttatcattaatttttgaataaattatgcaaattattaataattagttaaagtaatagcatgtaatttaattaggacattttctgttggagacacgattaagattagaataaaaaaaaaaaaaatcaaataattagctgcctaattcacatatcgttcgacaaaaaaactaaaaaaattaaaattaaaaagattgtaacatcacaattaattttaaaaacacttatattcatcagttaacttatcactaagtaatctatgtatttatataatttttcatcacaattatatatgttgacgcagtaagaattcgtcaacgaaataacaagaacttaagataatgtttcaagatcttagtagaaaaacactcaaagtaaatactattctcttcagtatttagaaaaattacagtttaattaattaatactttttctgccagagagtttcctttacaatgagttcaatatatgactctatctatagttattcacactttacaaccttaccaaattcctaaatcttaggacgtcaaatcactttcacacctggtaacataatatgtcaagtagtttgatatatcagacatcttaagttacactaaactgtctattttacttgtacttcagatgaaatgaaccttgtctcctatactactaatattcatagggtagtcgctatcttgtccgtgatccctaacttaaacatctctagtctcgatatcttctttttgcttccatttgtatgagtaga

SEQ ID NO: 7379 - DNA, 1516 bp, Cannabis sativa
agttgatgttatgagagagagaaagatcagaattatcaatgagattttcttattgaaaatgaattgatgagttgttacaaagggactctttatatagagtagcagagtacataacagaagtcaccagactttagtaactaactcatctaacagaactaaccaacataactaacataactactaactaactaacagttgtgctaatcttgagtgtcctcaacatcccccctcaagctggaaggagggtattccaatgacagcttgtgacagaggaagttgaatttgggaagagtaagagccttggttagtagatcagctggttgctcttctgtgggaatataggagatttgaactttgtgtttgttgatgagttcgcggacataatgaacatcaacctcgatgtgtttgatacgtgagtgaaacacggggttggaagcgagttgctgagccccttggttgtcacaccatatggtaggagtgtgagatgtgatgatgcccatttcttgaaggacagcagttatccaaacaacttcagtggctgtagtggagagggccctatattcggattcagtactcgatcgagcaacggctgtttgtttcttggatccccatgagataaggttgttgcccaacaaaacactgaaccctgtagtggactttcgatcatcgagattacatgcccaatcggcatccgaataagcatctatggtcagagatggagcaggttgaaataccagtccgaggtttgtggtgcctttgatgtatctgagcactcttttgcatgcattccagtgcatgttagtcggattttgcatgtattgactcaatctgttgatggcaaatgagagatctggtcttgtgagagttaggtactggagagagccgatgatactcctgtacaatttgggatcatgaaacaagtcatcttgagttgtgtacagtttgttgccggggcacatgggagtggtgcaaggctttgaatcttccatattggctttgtgcaaaatgtcctgagcatacttggactggttgagatagagtttgttgttggttctgtaagcctgaaacccgagaaagtagctgacagacccgagagttttcaaagcaaatttgttatccagattagtaatgacttgctgtatggcatgagggttgtgaccagtgatgagaatatcatctacatagacaagtaggagcagcaggttgccgttggtgttggagatgaacagagagttgtcagagacagagttgataaaaccccatgagagtaaggcagcctttagtttttcataccaggctcgtggcgcttgtttgaggccataaagagctttttgtagtttgcatacatgagtagggtgctcactgtcttcaaaccctttgggttgttgcatgtacacagtttccttgaggtccccatttagaaaggcattgttaatgtcaacttgttggatgtcccaattgtttgtgactgcaagagtgaacattattcggattgttgatggtttgacaacagggc

SEQ ID NO: 7380 - DNA, 828 bp, Cannabis sativa
tattattattataaaaaaaaataagattattattttttttttaatataatcaaaatagagaagaaaacatgtattgaaattagaacgagagagtgagagagattacgatcaaatccggagttggcgcagtagagaaagaaacggtcggagtccgtaccaagaacggggagtcgtccctctcgagcataagatttaagagcatattcaatcactgaaccaacaagatcatcctcactcaccacaaacctcatgggtcctgcgcttcccagaacattcaccgttatcagcaacctcttcttctgagactcaccatgagaagaatgacagtgagaatccatccccatcttcttcttcgtcatttttttttctcactctagctcctctatgtttttgacaaaaccctttcaacaaaagaagaagaaaaatatagagacaaggagagagagatatatggagatggaaatgattctgtctagtaataaggatcaaggccgaggcagcggtagaagcgggactttatagtagagaaaggcagcgcgtgaggagtacgcgcggcaaccctcagaggaggatggtgaaggagaagacgaaagtgcatgaagaaattatgtgtgagagaaaagagtagagattgatgggaattgctgagagcctttccttctctttccctgttttctttaaaagtgaaaaagtgccaatgagagtccaaatagaaacctttgccttttatgctttgttagttggtttatacttatattacaaacacaaaccaccaccgctctttcaataatttaatttaaatattaataaataaatccaacattatta

SEQ ID NO: 7381 - DNA, 518 bp, Cannabis sativa
ggttagcgatattttttaaaatctttttatttaagttatatgtaatgagatacttaattacactaataacgataaaacatcgagtaaggtgcgagacaccaaattctcttattaaataaattgtatacatttgaaagagaagcttatatataattcttatcgagaccaacttcttgaattcaatctcaaagaattgtaaaagcgtaacatagttcttgagctgcctttatttacataggagagagattacaaaagggagctgataaaaccagcttaattcaacaataacgaactctattaaatcagagtacaagtagcaaaacaaattgaaagaactaacagcaaatcaacttaaactagtaactaattaaattgaaagtagctacagttttttatttatcacctcccctcaagcgaaaggggacacacttttagcttggcctttagatacaaaaatcgatctattgtgagagattttgttagtatataagcggtttgattgaaggaaggaacatatc

SEQ ID NO: 7382 - DNA, 801 bp, Cannabis sativa
accactaccctccaagtgctgctccacccccgatggacggtcatgtcgcaatgattttcggaggcccatccatcaaaagaagtatcaaaatttcctgtaagatgtatcttaatgaactcaaataggacaggcaagtgtgtgctctagtgcaaacactagcacagaggccgcgaatattgagtatgctaatcacagaagaagatgtcatgcatgttcatttctccctcaatgacccattggtgatcgaggctccgatcaccaaaaaaaagtgtgtccaagatcctggtggataatggaaatttgattaacatcctatctaaagtcactttccaagtcattgtgttgactaaagaaaacctcgtgccttccccgatctaacttcaaggtttcaatggagactctctattgcttgtagggaagacttagctcccaattatgataaatgagattatagtctaaagaaatactttctctacttttaagtactacacgattgttgtggaggactgtccaactgcgtataataccattctgggacaacctgtcctggtggattttggtgctgtaacctccatctgacacatatggatgaagttcccctgtgacaacgaaagtatgggaacggtgaagggttaccaaaacagcacatgaaagtgccataatgtctcacccaaatcagtctccgtggtccatgaagagaccaaggaacaaattcctagagcacatacccagctagcatagggggtaccctgagaagaagatgagtgagggtagaaataatggttgaaccgctagaggatg

SEQ ID NO: 7383 - DNA, 641 bp, Cannabis sativa
tttaccaaatctccctcaatcatgtactttgagacttcatctctaataacgataagttcttcttcagaaaagtctttggtcaatttgttttctatgctaaggtcattaagaattttgcgagctcgggttcgaccaattccatgaatgtattggagagagaactcaatccgcttgttgttcggaatctcaacccctccaacacgagcacatttcacgcttagaccaccaatctgattgattaaaaaaaaaaaaaagagacgaaacccagtttcagaaacactgtaatgaccccttaattgaactttcttctattttgaggcaggtgggagcaaaacccatcaaaggttttaacaattaaaattgaaaaaaggaaagagaatagaaaatcatttgagacattattcaaaaccaaacgctagctatccaaacaaaaaaagaaagggaattcgaaaatcgaaaggaagaaaaaaataaagaagaaatagaaagggtaccttgggtggggtagcaatgggaaaggagaggcggttggagagagtgttagtaggtcggccattgcagattacagcaagagagggcgccacaggcatagccagcgtttgtgccattttagcgctgtaaatgactgactctgtctgtgt

SEQ ID NO: 7384 - DNA, 1799 bp, Cannabis sativa
  modified_base (1624)..(1626): a, c, t, g, unknown or other
aagcccatgttgacttggttgtgaggtacttattaatgatttaaatcatacacgttttgtccatgagaaaactctttttaaatatatttaaattaatttttgtaataattatttattttaaagttattttagaccaatagaatattgatatgtatcatgtatatgtattaatatattttagactagttacacttaaacccttgtttaattaattaagtgaattataacaaattaattttttggtatatacataaaataattatgccacaaaatatttcacatatatatagcaattgttaagtgttaaataaaaatgtcatcccttttatctattattattattattattattattatttaatggacctataagatcagtaaagagagtaaaaaagaagaagggaatttattcattttgtttttaattaattgtaaaataaataaataaataaaaggcatctttatttactatgtagtgcatcttaaaaactgtcctttacttttggaaactaacatatcgatcgtctagttgctgttaacattttttccctttacatttaatgcatgaatcatatataggataggtcatttctttcaataaaaaaaaaaaataatatatatatttaaaaacaaaattaattaataatttaataaactatatatattctaaaataatttatatataagaaaaagtgatcacatgatggtgatcatagtggtaaaactatagaaaagaaaaaacatatgtgtattagtttattgttttgatgattttcttgttccccatttttactatattaggggggtaataataagtaataattatatatttctaaatgaagataattatttaattaatatataatccaatcaaagtgtttattaatggtgaaacatgctggctaatcactaatcactaatcactaatcacactcatatacatgtcaaattgtctatttcactttcaatccataattaattactttttaattaaaaaaattcacctatcctcccatcattttcttcccttccccatctcaccattaaacaaataatataataagaaaaataatctatttcaatataaaaaaaatttagtttattttttttaaaatggtgatatatattatacttatcaaagacattttatataattttaaaaaattttaaaaaatttaacaccttaaaaatagtgttcaaataatttattacatgtctatgactcttttattttatatgtgtgtgaaataaactatttgaacacacatttctatgttataaactattcttaattttttaaaatatcttaaataactacaatgtacacgattataaaaaaattatgaagttcatccatcaaaccttacaaaatgtgacatgtattgttattagtccaatacaatatcaattagtatcatgttaatttaataaataatataaacaaaacccataaccaaatacaacacgttcatgtaaaagaaccctataataataacaataataattaataatactctatttcttacttgaatatttatttattttatttaaatattgttattgaatattagtactatccataactttttataagtgtcactttatttttatttttttttatttnnncgtttatatattacaatcatattttatttgggactcctgtagcgtttatataagtgtcactttacaattaattaatcttatttcctattaattattttcttaaagtatataaaaaatgatgcttaattataccatcaataataccttttaacattttttttttattttatttt

SEQ ID NO: 7385 - DNA, 1126 bp, Cannabis sativa
atttttacaaagcaaactggtctctcctaaagaatgatgttctcattgctgctcttagctttctcaacggggatgggaatatttcccctcttaacaccactcttatcactctcattcccaaagttaaaaaccccacctcaatctcggagttcagacctattagcctttgcaatatcatttataaaattatctcgaaaaccatagctaataggctttagcttgttctcaacaatctgatctctcctaaccaaagtgctttccttccgggtcgtcttatcttggacaatatcattatagctcaggaagttgcacactccataaagcttaaatctcgcaggaggagaggttggatggcggttaagcttgacatggccaaagcctttgctagagtgaagtggtctttcattgttgccatcctttgtaaatttgaattcccttctcggttcacccaattggtctctacttgtatctccactgccacctttcaatttaatgttaatgaaagggtggctggatatgccaattcaatcagaggtattcggcaaggagatctgctctccccctatctcttcctgctttgtgccgagggcttctcttctcttcttcaatagcaagagagaagtcattctcttattggcttcaaagttcccaggcgtgctcctgctatttcccatcttctgtttgcggatgatagcttccttttctgtaaggcctctattcagtcttataatatcattaaagaggtccttgcggtgtatgaaagggctacggggcaaaaagtgaacttccaaaaatcctctctatacttctctccaaatgttggtcttagggatcaaactttaatttcagattttctgcaaatccctattagatcatcttttgaaaaatacttgggccttccccaacacattggaagaacaaaaaagcaaattttccattatcttcatgacaaagtttgggcccatatgcataattagaagaataaagttttctctaaaggggggaaggaaattcttctcaagtctgtcattcaggttatcccacctataccatggcctgctttcgcatcccctcagccacttgccactctctggagtctattatggctaatttctggtgaggcttc

SEQ ID NO: 7386 - DNA, 856 bp, Cannabis sativa
tagtatttttgtaaatgacaattctactatttgattagttagcatgtcatggttgagaaatttattaactttgattatactctatcatcatagtttcacaaatttgttaattaattatagaaaaattcttaattgttgctaaaattgaaaaaaagaaatttgtaatgattgtagaatgaattgaatgaatacaatgatgtgcaaagcaatttatgtatacatgaactaaaccaactaaactcacaagaactgatttaactgaaataacaaatactaacttaacaatacaacacagctaacttaacaaaccataactgacaaagaaaaagaaaagattaagactaatattttgttatccccttaaaataaactatatatatcgtatacagacatcttacctacatgagatgcaagtgttattgaaggtagatgtttggtaaatgcatcggctagttggagttgttagtgttcaagaaatagatcgaaacgaaatgaagagaaaagcattgattttattgattgagaaaagtgatacaaaacagctagggagagaagatacaaaacagttgtaactaacctaactgacattaactaacttcactaactaactaggtactcttaatagccccttcaaacttagggtagtgaaacaaaccacaccaagtttgtcacgaagaaaagggaacctagagcttgatgtaggtttagttagtgaatctgcaagttgatgttcagctggaacatgttgaaccaggatttctttgtgcatcactttgtcccgaacatagtgaatgtcaatctcgatatgttttgtgcgtgcatgtaaaatgggtgatgcatgtcgtaagccacaaca

SEQ ID NO: 7387 - DNA, 707 bp, Cannabis sativa
ttattacctaaacatagttttatttcatctacaacatacatctcgtctttctaataatcaccacttatcattatcaggaccaccacaacataatccttttcaaaagtacatctatattcaaatcaagtatattgttcgatatatagtacatcaatgttcgaatcaagtatgttcaatagtacatcaatatttgaatcaagtatgttcgataatactgttaatcatagtaatattacttaacacaatcaagtttgcttccaaggacatgaacttatcacccgtgggaagagagtttgaacaagatctccacaacatcaaactcaacctcggatgcaccttcgagtcccaaatccaactccaaagcacattcctatctccaaatctggctttttgatcaacctagtaggcccctttagcactgaattttcccacaagagaatccttccagattagagagtcacaagtagcattcacattaatttgtatcttactaatttggttgcccaaatcactaccaaattggtaacaaagataacccatattccaccttcttgtactacgatacagcaaatcgaccacggttcttagactgggaaaagtgccattatctactgttgtatgtagatgatatgataaatgcaagcaaaaacataattaatttaattgtagccatttccaaatttaaatttaatcaatataagtcaaaa

SEQ ID NO: 7388 - DNA, 1051 bp, Cannabis sativa
tcaccttttcttcgcagatgatagcctacttctgtgccgtgccaacaatcgatctgctcatgccattaggaatgcccttgatctctattgtcgagcttcaggacagaaattaaacttggacaaatccgtgctttccttttctccaaatactctcacatcggttcaagctcagttgcatcagattcttcacatgcctatccaaccttgtcatgaacgttacttggggcttccttcctactctggtagagataaaaagattttgtttgctgacatcaaggagaaactttggaagcatctgtctgcttggcaagagcaattgttctcaataggtggtaaagaggttttgttgaaagctgtagctcaatcgattccaacttatgctatgagttgttttcgcctctccaaatcactcattcaccaaattgaagtcatgatgaataaattctggtggggttctaactcttctaaatctggcattaattggaagagttggtccgctctttgccagcctaaatcggaaggtggtatgggtttcaaaagtttcattcattttaaccaagcaatgttagcaaagcaggcttggagggtcttttccaatcctacttctttgcttagtcgtattttgcaagcaagatacttttctgtttcctcattcctggattcaaataaaggctcctacccgtctctcacttggcaaggaattgtttggggtaaagaacttctcgtaaagggattacgttggaaggttggagatggccaaaacattttatttgcatctgatccttggattcctggctttaccaacttcaagcctctgcaatcggtggtgacttccactaaccaatatgtgtcttcttttatcacagcagataggcgttggaatttagagttactgtatgatacttttcttatctcggatgtagaaaaagttctccaaattcctctgtcaatcttccctgctagtgatcaactcatttggaactttgaaacaaatggggcatacacagttaagtcaggttatgcactagccactagccttgaagaacaaatg

SEQ ID NO: 7389 - DNA, 794 bp, Cannabis sativa
tgcatctatattaagtttgagatgccccaaaggtggaggagaccattgaatattctcctttgacaacttctcatgtctgcgcttgaggcggagttggaggccatttggatggcttgccgtgggcaaaagagttgaactggaatagcttcacctcttttctattctgtcttgtaagtcattttctaactgttatgtttgtttaattaagcatgatactcttcattcagtgaacaatctagctattgaggctaggaagtctcgctatggtattgtgatctttggtgagggagggatctcatcctgtagatccaagacttttattttagttgaaatgtttcttccattaaaaaaagaaaacttatgttgaccatttttgtgcccagagcctaatccttctaaggcaactttgtagctatgtaaataagacaccacccaaccagagtactttctatgattccatgaagcccacaataagcttaaaaagatttcaagttcagtaggaaaatcatcataggtaagttaaataagatcaaagatacagtaaagaatgagagatagcctcaacattggaagcacacaacaaaaaggtgaatcaataatgcatatggaaactatgctagacaaagaatctcatgtaccagaaataaaaaagaatctcatttcagtgaccatgctagacaaagatggatgcactatcaaggtggaaaatggagttctcaaagttcaaaagaatgggatttacattttgcaaggtaattactcaaatttattctcagtagcttcaagaggaatac

SEQ ID NO: 7390 - DNA, 1049 bp, Cannabis sativa
cagatttatattcaattatgtattaaaagaaaaattaaagtaacaaatgaatgtcaaataaataaatatgtatgttaatttcttatctaatttaaatggggaccaacttaattaatgtaaaatatatagtatacaatacaaagctacctgggtttatattaaaatgtatattaatctctacgattataatttatatatataaatgtacattaattatactattacctctgtttcaaacccaatatagtaaagactataaactgtgtttgcatgaataaaaaacgtataattaattgattataattatttcgaggtgatctatctatatgacttttatatatataatgagaatatttgaatatatatacagccattagtggggctcagcgcgccccaagatttatcttatttttacagagtcatatacatataaatatacattaattaaggaaatatatatatatatatatagatataatcagtactagatttgatttatgtatattttaaatactatcctacaatatcctctttaaaaagttttaaatagtgtttctcatttagtttataaaattaaaaagattaacatgtaaaatattagtcccattgtatatagatagctaggttcattatcaagaaaatattatatgcctccattcatgatctttttacttttattaatttttattattaatgttgatcaattttcctatatatacttctttacttcctcttcttctgttcttatctttccttgtaattatcatagacacatgacttcgctcttatataaatgtataaatatatatatatatatatattgaaatggttaaaattataggattttttttctttacaaaaatatgaacgttgtataccttgtcttgactaaaaatgtaactaaaaaaatccctaaaaatatatctatatatatttacttcttatattagaattaattactaaattgacttataatattatatatttacaaatttaatttactactatatacatattattgagatcatatgatattacttttcattatg

SEQ ID NO: 7391 - DNA, 850 bp, Cannabis sativa
gaagcatcctgagacaatgagcgaccttcgaccgatttcattatgcaatgttttatacaagatcacttctacagtcttggccaacaaacttaaagaagtcgttcctttagtcatttctgaatgccaaagtgcttttctctcagggcgcttaatctctgacaatattatgatctcctttgagataatgcactacctaaaacgaaagaggatgggcaaggatggttatatggcactcaagcttgacttaagtaaagcttacaatagggtggaattgatttttctagagcaaatgatgatacaaatgggattccacagtaagatagtctctttaattatgcattgtgtatcttcggtcagatatcaaattactcatggcagccatgtaatgggtcctataacacctagcagaggcattcgtcaaggggatccattatccccttaccttttccttatttgtgctgaagggttctcatcgttggttaaacggttcatacaaaataaatggcttacaggatgccgtgtggcaagaggagctccaaatatttcacacatgttgtttgctgacaatagttacatctattgcaaagctaatgaagttgaagctgctaatatcctcaatctcttagctatctatgagcgtgcatcgggacaaaaggtcaacttgaataagtcatctgtttttttcagcaacaataccaaccaggttgtctgtactgatatctgtaatctcttgggaatggtagttgcatcccaaaacagtacttatctcgggctgccgtgtactatggggaggagtaagaatgttattttaggcttcttgaaagagaagatgcagaggagaattcagagt

SEQ ID NO: 7392 - DNA, 999 bp, Cannabis sativa
aaaaccgagaaagacgaaaattagacttttacatcagcaacagcaaattcagtaatgaaacaaagagcatcaacaacaaaaaattcatttagtggacactaactaaatagggtaataaatgataacagatatactcacttccgacgagctccaccgggtcgactgggttcaagcttaatctttttaccagctatatcactcctatttaatgacttgagtgctgcttctgcagctctaacatcatagaattcaatgaatttgtggtgtctcttatgtggtgtttctcttatctgttgtgtccaatagataccaaaaggatgttaaaacaccataaaagcattagataaatgagtttagacattagaaagatataccatacctctttaacctccccataaacaccaaatattaggcgaagatcttcgtttgaaacggacggatccaaattaaaaactaccagtgttccttggttaatatccttgtctgagggattatcctatggtcaacaaaacaaaagtcaaaaagtgatgccaaaagttaaataggtagaaaacaaatgtatgaaatattagtttcaacctttggaattgagaaatgaatgtcaagcttcctccgcctcagtggtttgttttgtaatgcacgcatagccgttcgagcatcacgaatatcataataagatatcatcacaaatcccctgtgtttacaggctgtgtaaagagttctaatacctccaaattgctacaaaatgataaaacaaacaaatagaatataatttagacccaagaattgaaatagctcggggcatcagaggtatgtgtgctcgtcgagaaatgattaacaacaaaatcaaagtacctcaaagagagctttaagttcagaatcctctacattactgttgatatttcgaacaaataatgttctagaaggatgctctccgtaaggatgttctccagcaacagttccaacaccattcggaacagcataaggaggcagcccgtt

SEQ ID NO: 7393 - DNA, 874 bp, Cannabis sativa
tactggtgcttctgcatataatattgtaggattttgggagatgtatttatgggtcgctaccacacagtgttcgattatgggaaaatgagagttggatttgctgaggcagcttagacgaagaagctcttccaactcattttacatttgcttaatttgtatctatggggaaaacccttaactgttatattagcttcatcgtttaactaatgcaattgtactatctactatggacatgaaaccttactcatctattctatctgtatataaatcaagatgatgtatgtacaatgacagcttatttatatgtgcatgaagtttaaactatacattcactcatacacacaaacatggtgatataacaaaaggacacctaagctaggttagaggactttttttttatctagctggtttttattttaaagggctatgtcttagtttttagtacacctagctgacactgttttatgttatctagtacctatgaataaaggggaggaattcatttctaagtttggaaatagaagagaatagactctagtggaagataataactctctccaaagctagattattcttttatttcatcatttggaggaatacttacctctttcttcaaaattggatatataattttactctataacaatatcttatcagatttaaaaaaaaaaaaaaaaacaatatcttatcaaattttgaagcattgaaatcagatttgaagaatgaggtttcaaattttactccatgattccatgcaaaaaacaaatggctattcagcttcaactgcaattgcaagagtcgctccaacagcaattcaaggccttcttagtagaggtattcataaaatagctgatcaaatttaatatgtacaatc

SEQ ID NO: 7394 - DNA, 1325 bp, Cannabis sativa
gatttttgatttttttttttccaacaattttctccaaatattacttattttgattcctttcaaatttaattattttaattttttttttctttaaaaaaagtacaaaaataatgtaagtaggcaataattataaataaataaaataaaataaaatatcacatatattaagttagttccatcttagtatttataccatatgatgtgagtaagtatgattaattaattaacatatagttacaataaatatccattaaattccaattaaacactttgtcaaatctaatctagctagaatggtggttggttaaggccatgtttggacaaaataatcctaagttatgtttggaaaatttttgagttactatggcattggataattttatccttaacccaccaaaaggatgggttaatttagtgcaagggtactattttttttaatataaaatatttattcattttattttaaaaattaatttttgatttttgaaaataatattatatttactatgaaaataaatcaaatattttttatttacttaattttttttgaatatattctaaatttattacatattatttaatttaaaatagtattttttatttataaaaaaatattagaaacttatttaaaattattttatactttatttacttttgtattacaccaaatatctaatctaattcaatcttaatttttagttcaatccaattctgcataccaaataaatcctaaatgtattttggtaagaagggttacacactatagacatatcaaatcatatttataatttctagctttatccaaaattatcttagcttatttttttttttttaatttttttgaatggaattatcttagcgaattaatccatccaaaaatgataaattcatccaaaagcttcttttatatattataagtgaaattaaaataatagtaataaatagtatttactcaaaaataaatatattttttattttaaaaaatagtatatatttcctttagttatcaataatattggtggggccaatctttggtatgaaccaaggaagattttatatcttgatgggggccatgacatcctcaaccataccaaagctcatctgcccaacctttttttaaataaataaaaattaatattattctttaatctttgtaattattttgccaaatatatagagctctttttacattaacttcccaccaattcttctttttttaataatttttttaaaaatgatcatgagtactaattaattgatcatctactttagcagcccacattggagctgaaattaatttgagtcatatttggtttaatgtctac

SEQ ID NO: 7395 - DNA, 1043 bp, Cannabis sativa
aatgacttctcccgaggagtttcgaaccaaagctcccatgcctgttttgccttttttcccagatactgcaccatcaacattgagttttaaaagtccaagagttgggggagaccattgcaattgcccctcgtggctatgcttttgggactgagttgtcttacattgttgggattgctagtaaaaagtcaaatactcttctgtctcttgttggatcctgactggttgctcacgctgattcttgaaaataaaagaattcctcctattccaacacttccattgcatgaaaataaaaaggttaaaagtttcagatgaaaaatatgactgaatatataatagtgtatcaagaatgtgtattcctcttaaactattcagagcatgtttgaaagtcgtacctgaccacaccttcttgatatccttataatcaaacaaagcatactggacagactcagagtgtatgcggcatcgaggacaaatagaagagttgagacatttttgattaagattttcagcagtggggatagtgttttgacaaagacgatagatgaaatattttattttagggggaatacaaagaccccagagggccttccaccaagacctaagagtgtcagcactagaagaagaaggttgggtggtgtgagtgatggtttttgcaacatgataaccaattttaatagactaatgggcaaaggaagtgtacagccaaaaaaagagtcattgaggttgttatctgggggaggaagagaaaggatctcactgataatgtcattagggaagtatcttttgataagggggatattccaatccccatcggggaggagcaagtcagagacatgagtaaggtgatttgggagggaaatggggagaaaacgatagttacggatccaatggtgatcaaagatgtgagtggtagcaccattacctattcttttacagaggctaacttttaggagagatttcccccagtgcaagctctgccagacataggatggggaatgacccaagggggcattcaaaaatgtagatcgtgggaagtatttgga

SEQ ID NO: 7396 - DNA, 842 bp, Cannabis sativa
cacactattttaggtgcaagcataaacagactataccttcctaaacttactcccctcccctgttcttttcctataaacaatatctgtaatgagaatcttgttttcactttcccaaattttgtagttacacccaatttggttcttgatctacattgagaacaacccagcagaagaaaaggatattattcaaccaagaagatagttttagatttctgaaaggtaaaagtgattgttttagatttctaaaaagtttttgtttttttgacagttcaacaggattaagaaaattttacaagcctattattatgaagtatcaatggtacctagtagtatcataaattaatgaataataatattatttaataattattaaattaaattgtagaatttaatacttaatttaaataataacgatatgatcctttaaaaagtattatgcactacttataatataaaattagagcattgttattgaatgcccaacaaattcaagaagtagcaacttacaataaattagtaatattttttaaaaattattttattaaagagaagaattgctaaaagacaatactgcttagcatcgtactcgtcataccactattagtgtaattaagtatcgagtcacatacaatttaaaaaaataacttttatagaataccgctaatcaatcattataaaaggtgttgtggtgcccaataacagcaccctccattaaattatatactatacaactcgctacttaattttacaaataacaatataacacttgaaaagatactaaacaccagtaaccagtagtactttaagcatttctcattaaattattgaaagtgaaatggcat

SEQ ID NO: 7397 - DNA, 1577 bp, Cannabis sativa
tcatgtatcagtcaataaagtttattccataggaatagcaaacccccactaagacctatcgtaggaacttctataccattaagaaatttaaaagcattgcgatacttagtaatagcaccaacactaagcttagactctataataaataaaacatcaggactattttgagtaatgagcaaacagagttgacggaatgccttggggtttctcaagccacgagcattccaactaacaatattcatggggattggcgaggctgaccgacagccttcgccaaagaaacgccgctgtcatccactgccagtgagagttgggacaactcagaggaagcatctgattgttggtgatgaatctgattagtagagtcattaaatggagtagatcgagtgcgacatcgtttgaggacattccgaacattacctcctggactcaccaattgtcgcttagtaaatagagaagacactctattctcattgagtgagttgcaatcgacagtcaaatttgttgggatttggttcacatcagtctttgaagcagcagccgaagagactatacttgaggatacatttgaggaaagaggtaaattggatgggaggggggaagtagcatgaaggtaagcaggtgggactgttatggacaaagcaatggatttagtcagaattttggtatatggttggttaatattgtcttggcatgccacggaaccattgcagggactgctagcatttggtaagagtgtagaagcagtttttgaaactgaagtttgaccaatatcagcagttgttgaaggaggattcagtttaaaattgctagaattaacataagtggattcaggaggagtagagacaattgacttccctttagattgaagtatggacttgtcttgggcatctattaggagagaatctcgatccagagcgaattgatgggcattggtttggttattggatcccacaataccttttcctttctcacgattagtaacagaacttgggagagcaggaaactgtttaggatgaggaataataggagcaatagtgttcctagccaaccgtgtgataaaaggccaaggcccctcttttgaaaaatcctgcctgtacctattatatctcgcatttggtaaagccgatcctgccatccatggaccatatgggagatctgtgtcttttccttcatcaactttctccaaaaattgagggcacttatcaaatacatgtccaatcacaccacagtcatagcagaaatccgggagcctttcataacgatagtcaagccataattcatcctccatccatgggaaagtaacagtttgtcctctgagtaatggctgtgagacatcaatagccactcgaatccttaaaaaaggaccccatccttcatttagagaatcctcgtgaacttcgatgaaggtaccaatgagatttccaattacacgagcaagagattcagatttactaagaaatgacaatctgcaaacttgaatccaaaagggagtaatggtgtaagaatccactggggcattctgcagaacacttggagaacagagtatcatatgctggttatggagatgccaaggt

SEQ ID NO: 7398 - DNA, 729 bp, Cannabis sativa
agaagtagcaacacggacctcgccccgatcctcgacttccaggactatttcgtccccaaacaatcatttcaacatcctccctaggatatttagcatgttctacaccagcaattgcaaagagccgtgcaaagtgtggatcctcaatcgaattcctcctataagttttcataatatgtaattaatgacaaatttctcaaatactaattaatttagatgataaactacttaaatttggtaataaatatttaattacacactaattaatcgtaaaacaaaatttattcacattagcacaattattatatgcctaaatcatgtagttaataaagaatttttttttagttttaatttatactaaataacatataaatttttaatatatgttttcaataaaaatataaaataaaataaataaatgaaatttattgataaaattaacaaaaataggaaataaattaataatacaaaataaataaaaattatgtgaaaaaattgtcttcaacctccagcataaagacctggatccctggtttgcgggtcacacggacctaacaacaaaactcggacagaaataccattttcaacgaccaaaatacatgtttttaattttaaaataatctaaatgcaataattaagagatccatgcatattttatacatcgaaaacacgtgaaaattaggctttaatttcacaaaacatttacgagtctgaacgtgtatttccaaaaaa

SEQ ID NO: 7399 - DNA, 704 bp, Cannabis sativa
ttagaaggtattaaacactaatatggtttagtatttttcttttataagattatgtgattacgttaaggactaaaggtcaattatgggaccatatggctatggctatggaggaacgtaagtcaaagagagagagaaggacatttagtgttggtttcacatattataaatgcattttgactaaaatttatcaatataattaattagtttacagatgctactagaaaataaggtggagaagaggacaaaattatgaagacgcgtcgtgaattaaaggaccatgattttcatcacattcacatttacattcacatctctataaatatattatttgagcatctcaatcattgattcttaataacataaaaccattaattattctcatcaacatctttcttaataacttaccttattattaccttatgacttgtttgtactcttattcaaattctatttttatatatgtaaatcattccatatatattgttctcaaatgaaatgagtgtctaccattgcatcatgcatgcatgcaaattattacttgtcacatgcatggtcatggatatgatttagagattacttggtacgttaaaaagctttgcataattgcatttcccttaatttagtcaacaacaccatacatagtacatacacaaaagtcgtgattggtagtgaacatatacatacaactttacaacttagaacaa

SEQ ID NO: 7400 - DNA, 845 bp, Cannabis sativa
  modified_base (134)..(138): a, c, t, g, unknown or other
caaggggttcaatctcttcaaaggatcgcacgtagtcctttgattgtgatttttataaatatatatatagggacctttgataatatatgatccacctcaactaactaaactataaatatttattctttataatnnnnnaaataaaaatctaataaaacttttatttattattttaggccctcgaaaagtataggccttaggcacaagcttagttcgtctatgcctaagaccggccctgcatatatgttacttattattttcatttgagtgatttccctttcatgtgttatctttatactaagataatgtgtgtgtacaatcaattttatatggatagtattcaactaccaaaatgtgtaaaatgaaaaatataaattaaataagcatatatgttatataaaaatatataatgtgtctaataatggctgatccaatggtatgctatatataatggaataaggttgtgaattaactagcctttctttgctatgaaaaggcatgcctaatgcagccttttgactttggattatgctggctttaagaggaataaaaaagtaaggttatacattgctaattctgcatatatataatatgcgtatagatagatatatttttgtacatatttacgtaacttgagcatgcacgaacagtataatgcaatttctttatttactttgaaatagaagtagcaactactatcaattaacccataagcaatggccccctattagtactatatatataaacatgagttaaacattgatggtgtctagtgctattgtcctactttgaaattctgattttattggttttgattagttcactttgatactttttagacgtat

SEQ ID NO: 7401 - DNA, 543 bp, Cannabis sativa
aaaaatgaaggggtggttttcacccaaaaaaaaaaaattactagaagatgtaaaaatgcaacatcatctaataatgataaaaaaattatttgaaaaaagtatgtctcttatagaaataacaatactactgataaataatctgtttcaaccacatgaatagaaagttttaaacattaagaattcaatctaatgctaccatgtccataagaaccacacattcagcttcaatttaaatacaattttattaaaaataaaataaaataaatagtgatggtgtagctatagtgatctgcatgcatattattgtagttacaactacaacaaattggtgtttagaaacgacgtctattactatgcatctattgttgttgacacgatttggagaactcacaacaataaagtatataacaacaatatagctagcatacaatattatattgactttattaatcattattatgcagattatgcctaatctattttcccatagcatgtggatcttactgtgaccgggtggtcactggattaaaatcaattgtgacg

SEQ ID NO: 7402 - DNA, 648 bp, Cannabis sativa
ggtttatgatattcctggtgcaaagaacatactagaaatgcctcctttggttgctcaggtttgtaaattctcagcacaataatgcatatatattttttacatgttgttataatgttaagtaaattgtactcttgagattattgagttaaagattgcttttttacttgttatatttcaggtgacaaaattcaagtgtggaggctttgctttaggcctttgtttaaaccattgtatggttgatggaattggtgcaatggaatttgtgaactcatggggtgaaactgctagaggggttcccttaactgtccctccatctctagacaggactattctcaaatcaagaaccccacctaagattgaaaatcttcatagagaattctccgaaatcaaggacatttctagtagcattgacctttatgaagaagagaaaatgctctacaggtcattttgtttcgatcctgaaatgctcgaaaagctaaagaacaaagctaaggggaatggagctcttgaaaaatgtactacatttgaagcactctcagcatttgtgtggaaagctcgaaccaaggcgcttagactttctccagaacaagagacaaaacttctgtttgctgttgatgggaggccaaagttttgtccacaacttccaaa

SEQ ID NO: 7403 - DNA, 1253 bp, Cannabis sativa
atctggttatatccaaaaatatgtgcccatgaaagtcatcaattcgtaccctgctattgcatctaccaattggtcgattcttgaaagtgggaaataatccttaggacatgccttattcaaatttgagaaatctatacaagttctccatgtgccatttggttttggtacgaggactggattagagatccatgagggatagaaggcctctcgtatgaagtcattagttaacaatttgtcaacctcctctttgagtgcactttaccgctcgagatctaatggtcgctgcttctaacgtattgctggatatttggggtcaatgttgaggtgatggtagatcacatttaggtttatttcaaccatgtctgagtggctccaagcgaactgatcttggtttgccttcaaaaaaatgattaatttctattttacttcttcttccaaacttttcccaatataaatacactttatgggattgtttggatcttgaatcacctcatctaactcttcaattggtttgagttggttgttatcatcttggattctaagatccaaatctttttcttccttcttgatttcttcagtcagaattactattagttgatgactggatcttctgttttgaagttccactcgataacactctctagccaataattagtcgcctctaactcttcctactctagaatgcgtaggaaatttcaaggacaagtgctttatcgagctcattcttgcatttgcattgtagacaacggtggttctcctatagttaagggaagctcgattatgcctaagctagctcgcgacactgtcgcctataaaactgcataaatttaccatgcatggtctttgttttgcctcttctaatcccatcttcttcaatgtgtccttgtagagtgtggccctccaaaaataattaaaatatcctcgccctctatggggggaggtcacaatcttgggttattcgagttattaggctgattagactcatttcctttagttctcacatattgcctaaagtattcccgtgaaatcaaaatttcaatttcatctttcaattgatgacactcctcggtggtatgcccaatatctttgtggaaacaatagtacttagttgaatctcgcttgttcctcgcgtgcctcattggttatggtctatgaaatgcgaccccatttcattggcgaggtagatgttctcacaagtttcattcaattcaatatatactaaataaatgggtacatacttctcgtgctttttt

SEQ ID NO: 7404 - DNA, 1195 bp, Cannabis sativa
catctggattaccagttttaaaacctttagcttggctcatgtgggccatgtaggccatgtagaaatatagaaatgttatctttacatccatttgttccacctcaagtccttccagggttgtcggtagtacgcctcactgcctattgtctcctgaatatttagatccactattagaactctcgtcccgagatgagttaaaggaactcaaagatgactcggagcaatcttcaagcaaaagctaaagaaggtcttcgtctacccgatggtcacctcccagtagttgccatggtacatcttcaaaaaaataaggaacatgaaggtgaatagcgctagtaggttatccatgatggacacacctattagtaaaataataataataataataaaagaagtggagagaaagcatacatgtaagacacccatagtagatatatatatatatatatataaatggtgtgccaagacaacaccaatttacctagcgaaactagatgagcaaataaagacaatcacatgtgataaattttgtgatggcgatcttattggtgctctccaaaattcgtatgagtgtaggtagtataatatggtgcatataacacatagaaaaggtgtacatacaagtattaaaaagtatgcaagaggcagtcacaatcaagtccccataaccccatttcggggtgaagtgaaggtaacactctgagcaaaaaaaaaagaaggagaaaatccatctcgggagtggtagggaacacctatatctcaaggtactccgagaccacacccaagctctaatctcagggtggggtgttcggaccatctcaggggggtcagggagtgcatgtgtctcgagtatggggtgctccacccatctcggggggagggggttatcattcctggggtacgaggtgttttttgtttgagctaaactaagggtgggggaagtttaaacctcatctcaaaggggtcgtgctagtcttgaggtgattaactagagggtctcaaaaccatagtgtgagttcaaactcggggtgtccacagctcagctcagagtagtgcaccctgagacccaaaaactacttgggtctcaaactcatctttagggggggttataaatctcatctcgggggtggttcatagctagtccggggtgttcgtggtcgagcttagggcgagggatgttcatgttgggttttatgcc

SEQ ID NO: 7405 - DNA, 684 bp, Cannabis sativa
tgtgagttgaaatccatttagtttttcattcaatattcttaaatgctctagtcaacttattcatcttcatgttgaaaccatggattaaaaaacaaagttttttgtcacttttatttatggttttaatgattaggatggaagaagagagctttggaaggatattaaaaacttggttactaattatgcttggattgtccttggtaacttcaatgatatcataagacaagatgagcgaattggaaatcgtgctaaccacaaaggatctaaggaattcaaagaatgtttggatatatgtcaacttgaagctgttaagtttacgagtaacttttcacttggaataataaataacaaggagagaaaaggatttactccaagattgatagagtgcttgcaaaccaaaattggttggttaaacaccctgctgctgaagtagtattccaaaatgaaggggtttttgatcattcacctaccattttaatagcatacaacctgaaccttggtggcaagaaaccatttaactactttaggatgtggttaaatcatcctaagtatactgaatttgttgctgcagaatgtagactacagattattggtacaaatatgttttaatttgtgtccaaactcaaacgacttaagtgtgtgttcaagaatttcaattagcaacactttgctgatattcctgct

SEQ ID NO: 7406 - DNA, 984 bp, Cannabis sativa
tgttgctaaagtcgaatctctactaatggcacaagaggtacgaaatgaattgctgattttgagcttgacatagccaaactagatgtcaatcttgtagctcaatcaaaaaattccttacctcgacccagatttacctctcatcctccaccaaaaactcatcaatcaaatgttggtagagctatgtcgtttttaccacgagctggttatactatgttggatcttatcctactcctttgtacaacaactatggctttctccctcttccatcatatccacccttctttcaaccatttcgacctctcagggtggttttcgtggtgctaatacaactggtcgaggatcatcaaatacaaaacctcagtgtcaactttgtcacaaacatggacatactgtcaacaaatatttttacaggtttgacaaaaccttcactagtccagagtgtttctagtcattccatggcggatttgtaaatatggcagaaatgcaggccatgcttgcctctcttgagactatcaatgattcgagctgataccttgactcaagggcaactcatcatctcacaccagatgttacaaatttgcaaaacactcaagaattccaaggttcaaatcaaatttacatgggaaatggctcaggttttcatattaaacacactagcttttctaccattcaatcttctttcaattctcaacaactttacttgaaaaatcttcttcatgttctgctatcactaaaaatctcatcaatgtcaatcaatttgctaaagataatcgtgtctttttttgaatttcatcctaatcattattatgtcaaagatcaagtcaatatgaagactttgttgtttgggaatgttgaaaatggactttacaagtttgatcaaccaactacctcatctcagtctagcctcaatcctactactgtgtcaaactagcactcattacctatcactagtgacactattttacaatgctttagttccttttc

SEQ ID NO: 7407 - DNA, 635 bp, Cannabis sativa
  modified_base (96)..(96): a, c, t, g, unknown or other
ttcgaggcacatcattaacattaattacccatcttttttcaattctctcttgttctcaaccgttagatctttattcttttaatctaacggtgatcntccttaaagtataaaacttgagagaaagtcaccatttcaccatttctgtctttcaaaattttttaagctcctctgcaaaaaatcatccctgacttctcaaaactttgcatgccctctttatcattaacttattttttgcaaatctctttggacacaatcttcaacctcaggagttctcaggatatatcacgtcactcatcccatcctcagttacagagttcttcgttgtgcgaaaacaattcttagggttttgtgcttcaaagatgcccagaaccccctcctcattgaaccacacgagaactgacactaggggagtgtcagtgctcgtttgagctataattgttttccccaaggcttcttctaaggggctttctctcacttggtatgtgaccattggcattggaaggattctttgattgcttgactccctcattcctccatttgggtgactaataaaacctgggaagtgtcagtggttaagttatgtgtcactatacttttggtattcttatgcgaccactgacaatacgggagtgtta

SEQ ID NO: 7408 - DNA, 707 bp, Cannabis sativa
gcgattgttgagagaaattttgttttatgattttggagggggtttaattactctataaacagttaataaaagataaacagacttgaagaggatgtaattctaataggcataagaatggaataataaacttgttaaaaaaaagagaaaggaataatatacattaaacacctcttctataccaaaatgataaagaaagatagaaaaacaaacataactaatattatgatggtattgtttatttcagttggcgcctgatgtttcgtcatgtggagtcactctacatgtgatgtcggttagagcttacccatttaaagaaccaacaggatttcatgaactttagaaaaactattaaggtattttaactatatggtcttacgaagtttttcttttttattatttgagatgtgtgaaaatttaaattctaaagtaaacaaaaatacttttcccattggctatgaagatgaaattttaatttaaatataactattgtcttcaaatcatttttcctcataaaattcctatctctctagaataattaatgagcatttagcctgagtatagagcctaaatcacatttcaaatcttgtcttgcaataataacattattggcatgatttaatgctattttgaaaaatttatgtgatgctaatagaatccaaaggtgtttattataaatgtattatgtttaggacactggcatgaaccaa

SEQ ID NO: 7409 - DNA, 595 bp, Cannabis sativa
atatcagctgggacaataagtgatacatcacttggctttgtttacttaatttgagaaggtttgtaactaatcacatttatttaaatatttagtatagtcttcaattgaaggttttttatattatatatatatatatatatttaatgaatcctagagatagagacaccataatatagatgagtggatttagaagtgagttgagtttaaataaaagtaaagatagttctatagttttcttttacttttcatgctatcttcctttaccctttttcttttttaacctaattagtcccccacaaacaattattaaccaactgcagacatataatatcaaaggagatatcattttttggaaggaaaaaaaaaagtaaggggggactaatttatatttgttttaagaaaataaaaaaaaattgggtgaggggttaatttatttataaataatgagccatatttaattaaaaaaaacacatatcttattttatataataacccttctatatacaagtgccttcatgctttaagagggttgtaaagattaaaaatgagataggtgtaatgtaacatgttaagagagcttttttttttttttttt

SEQ ID NO: 7410 - DNA, 1079 bp, Cannabis sativa
accaactcaaatccaacttcataagagtttcccaaaaagtcacattttctcatattagttgaatgaatccagcaaacccaaagcacatcatgcttttttaaaatagcccagctatactttgctatggtaactctgttccaagtaggcccatcaagaaacccaaggcctccaaactttttaggcaagcaatctttttcccagaaagggatatggattttgtatctattaccttcaactccccaaagaaacgctcgacaaagcctttctacttcttttataacactctgaggcaagatgaatatactcatccaataattctggagacccagcagacagattgtataagttgaactctccctgcaaacgaaagatatttactagcccaagtaggaagccttaactttattttttttttatgttaagaccacaatcttctttcctccattttgtaggccttcttccaaacagatagtatgaagcaaaactttttttcctcccccgaaacacctccaaagaacacttgagctttttcaagattagctttcagccttgaagaagcactaaaatcatcaagaatagatttgctaatttgagtgggttgagcatctcctttgcaaaagataataagatcaactgcaaaacaaagggagattatcctaaggcttctacacatgtagtgatagctgaacttgctgttaaagctgcaagatgaagtcttctggtgagatactccataactagtacaacaagagaggtgaaattgggtctccttggtgaagacctttctttcccaaaaactttccttgaatcgtgccattaatcatcaaaagttagtttgtgcttctcaaacagttcatgatccagccaatgtacttagataaaaaaaacaaagagctaccaggatgtcttccaagaacccccaatcaaaggtatcataaaccttactcaagtcaactttaatagcacaccgagaggtaatagaattccttcaatagtttttgataagatcctgaaggattattatattttgagctatggaacgaccttttgatgaaagccccttgactttggtcaacaag

SEQ ID NO: 7411 - DNA, 524 bp, Cannabis sativa
aaaattttctccaaagtccaaatttatattttaattttactcaaatgtataggttatatatagaggagactggctcaagcacaggtggtttgaatatgactattaatattatgttgttacattattacatatatggtatcccattttgagaatacaataaaatagaataggtcatcttgatcaccttgtgggccgcgttttatacaattcaacagctgactatttcatttttgttgtacacttaattcgtattattacaacctcaattattataaataccatatcacacacatatcaagctacttcacaatccaatattcaaaatcacaaagtctttttgctctgcatctacaaaatatacaaaccaaagaagaattattaaaagaaaaagctaataaccaaaacaataataaaataatgtcagctttacaagcttcaagtttgatattatcttcttcttcttcttcaaggggaaccatcaatggtgcaatccatatccccaagcttccaaataatgttcgttt

SEQ ID NO: 7412 - DNA, 1319 bp, Cannabis sativa
ccttatccttctgtggtgtgggggtgttaaacttccctttctttccactgttcctcccaaagatgttggtgctgtgttggtttctagtgtttttgcctctagaaatctaggcagagctgttggttttttcttgcgtatggtgagtcatgagactattggatgcctcattaccgcttgttgctgacatcccccatctaggcttgtcgtatggcttcgttaagtttgataaagttgttagctctataaaggagctcattcatgttcttggtagagattttttggatatctttccataagtcactcaatgggagtatgcccccagtatggttgtaaatcggccttcttttgtatggcctttgactttggtagccttgtccatgaacctctgggtgtagtacttcaaaggctcctcttgtcgttgtttgactttgacaaggtcttctagctgcgatggtgcatgtctcgaggacaagaattttgtgtagaattcccatgagaacttagcccaagagttgaaccttcttggggtgagtttaaaataccattgttgagttgtctgtgacaatgtagctaggaatatgtggcatcgcacatcaccagtaaccttttggaggtccaattgcatctcaaagtatttgatgtgagccagcgagtcttctcgccttgtatacatctttcataccagcattttgaacttaggcaggggcaaggcttttttctatgtcaagaaaggttatctccttgaccgatcaagttcaaggtctgagggctttggagtggctatgcctttgatcatgtccctgagtttgtccaactctgcttgcacagtaggatctgttgctatgaagacttgactgattggccctccttggggaggttgtagattctagagagataagggctggttggccataccttggaagagtgtatggtgatggttggctagacccatgttgaactgaagaccctagcaagtcattcccaggtacggaagctggtctaggctggccaagcctacacttgcatgttgtgcttggccgaccagacttgcattaggcagggtctggctgcccattgctcctctatggctggccagacctacaaagggtagggtctggccgctcgtgactccatagtcaaataatgttggttgtgtgttgatagggggtagattacaccaattcttgaagtttggtggatctagatgtgtgaagtgatcggtttcacttcttataacaaagttttgggtgtttccacgtgctcccaatccttatcggttgaagattgacctctcggcacctcgctccccttagggagga

SEQ ID NO: 7413 - DNA, 1647 bp, Cannabis sativa
atgtgatttgagtgggaagtgcacaaatttatgtgatgttccaaacaagcctttaatcaattccatcaatctgactttgcgaaaaaataaattcaataccatcaatctgaaatgttacataaaacatatctgtgttaagtatattagtattgcatactttaaaagtcgcaatagatagtggcaaaccaaaccatgcatttagattgaataaaataatgagaaatgaaagtgaattaatcgaaaccagatatgctaactttgtttacacacattcacaaaaaaaagaataataaaaaaaaaccctttcctttaccacttttttcttcttttttttcccctctttctatttgggcaagcaccctacaaactacagctccagaaacttttcttaattacaaaacaaatgcaatatattgtattgtttgctagaagtaacaaaagatctttgatttgaaaaaaaaaatgaaaatgaaaatctctatctactttgattgtttcgaaagaagctgaaatcccaacgacgaatcaaaccatccatgacattgcttgcaggatttcgttcaacagttaatgtggcttttgtatttgctgacaaatcagtttctggtgcgctttgggtgcttgatgaggcaactttttgagtaggctgtcccgagcttccggattctttggcaggagttttatgcttgggatcagaaacatgaatcttggttactgaagttgaagtagattctgctttcaaagactcgtgttggtgtacagaagtggaaatagattctgtctttaacgagtcattattctctgccaaagaaacagcacccggtttgacatctttctgtaaatcttttgaagaatctgatccaacaatagacggtgattcgtctccatatggttgaggatgtctcatatccaaatctttcaatgacaacagcattgcttccatgatcatctaaagatgttggaagacagattattttcaaatacaagcagcacatcagaggactaagttaaaagatactataactcaacagtgtacttaccttttcttcctcttcgacatcagttggaaaacctgccaagtcgtcgagttcatattctacgtattgatcatcatccatggttgtcggaacatggggtccacagggatcaccattggtgaactcaaaactaatcattttggaagatgaagaacaaagatcgtcatcacatttttgatcctgtagaatcaagttacaagacttggttcagttttcattgtagtcctattttaggttttgccataaaacttgtcccctataacccattcctacccctttttctctaacctacaagtactaaaaaagtcagaacagaaaaaacttacagctgtcagacatatcagtttacatttctagtcaaacccattcctacccctttttctctaacctacaagtactaaaaaagtcagaacagaaaaaaggtttgttttttttttgttgtacaaccatccaaataacatgtgatgtttaaaattaaaaacaaataaataccatcatgcacaacaccagcctagacttcaaaaattcacgaacagttgctcagacaagtactgtaccttatttttggattgattttcgtcagaaggaatatccgaaggaacctaggaag

SEQ ID NO: 7414 - DNA, 713 bp, Cannabis sativa
actgttatagaaagttagttataattagttatttagttaatttagttagtcttctactggtgtatataaaccagctaccacttgtactggtacattcaattcaatcaatacaatttgctttcttctgcttttcactaatatggtatcagaagtaaacttgtgagtttctccccaacgcatcaaattcttgaatccatggtgcgaaccagagctacctcttccactaccaccactgttactgatccagtggtcgatgcctcgaattaggaagctccaccaccaccacaaccagagaaaaatgtagggcacactcaaaatcctccattgtaacaacctcgaccttcttcaaattattgtcctccatacgaagatgtgagaagtccatattatctgagcacgccgatcaccctagccttgcccttgccacccctatcctcactgatagaaatcttcagccatggaagcgtgatttcaagctttccattggcaccagaaataaaatcttgtttcttgatggatcttttccccaaccttcaccaaatgatcctctcttcagttcttggatctggtgcaaccaaatggtcatgtcctggattcttcattctgtttccctagatatcaagagtagcatcatgtacatggacattgcatctcaaatgtgaactgaattgaacaatcgcttcaaccaagggaacggaccacgcatcttcgag

SEQ ID NO: 7415 - DNA, 1013 bp, Cannabis sativa
aaaaaaaaaaaaaaaaacctccagcagttaaaaatttatgaactttttgaagcatgtttttagttatataaataattcaaaattttgagaaaaaaaaataaaattaaaaaattgatgagatatatgaaaaattaaaatatacatttcagaaatttaaattataatttttacaataaataaaagaattatttcacaaatacataaaaataataaaaaaatatattaaaaatatagttgtacgaaattttaaatatttttacgattttttattatttgtatgttattttttgttgttgtttggatcctatttttttttattacttttatgttgttttcttattatttcatattatttttatagattgtaaaaatgtaaaaaaaataaaaattgaaccaaatagtaccaataaatccttttaactcttttttaactatacaatctcatacttatacatcatcatcacacttattttctccaagtgaaatgagattgcacaatttactcgctatttctcttatgaataaagagactattgactatcacaatcatctacgtaaaaaatataaaatttactaaaaaaaaataatattttatataattattccataaataaaaagatagagacgcgtgtcccagctgtttttgtggtttgttctcttatctatatataaacagcaaaagctgttctatcaaaaaaaacaccaaaagtagttattatgacaattagcctcgcgcaatcatttaattaaatccacttttctggacgctctaatgtcgacagctaacaaacttctttcttcaataatatttgagcacctatttcagtttttcactctttatatggtcaaatttttttaaaatagttttctaaatattaaattaaaaaaaaaaactaaaaatcaaaaaacaacaaaatactattttttatttttaaatataatttttattttttttcttcaacatatatatattttttaatattttctctcgagttcaggattgggtcaaggct

SEQ ID NO: 7416 - DNA, 633 bp, Cannabis sativa
cacacacacacacacacactcatacttgcatctacaacttggtccccatccttcacttcacttactcacatcctctccttttgccactttttgtttgtagattaccacggggtcgatcatcgagttgcttggacgcattctaagacccgtaagtatcgacggtaacttcgagaaatgtgtgtcgagagagtaagcttgtcgaatgcacttttgttagcccttcgattattagtcgactaatctcgagagttggcagtgctaattttcggggttagcagaagtcatcctaattcgctatcttccatcggcatatgctctctaaaccattctacttacattgtctggtacaacactagtgttctcgtatacatgatgcatgtccataacatgccacaaactagctcaatcttgatctcagtctaaactcatgcatattatctatctgtgggtcacaacaattgtgcatgtatttactttgaacaacccatttgttgtagtgtttctctcatgattcacacaccaaaactaaacaagtaccttgatcctcaaggcaccatgcttccatgcatgtcgacaggccctcaagataagtcactagactagtagcatacattaaatctctctctctctctc

SEQ ID NO: 7417 - DNA, 1093 bp, Cannabis sativa
ctctgcacaacacctatcaccatcaaatgatctccattcgtaaagacgattgttacctcataatttggatcttatctagtcgacctaaagttaatataaaattataaattaccttttactctatcactaggtctagttgacacattcaaatcctaagaggtgttggtttgtccataaactcaagtctagcctataaataaaatattatccttactcttgtgtaagatttctcaagcttaataatagtattagtgactcatcgtgaactataattaaggttcataattgatcaaatcaccaaaaaaattgtattacattattttaatttttagttaagtttaaatatttctttattaatgagtctctgaatatttgataaatagtaataaaaatatgatacagttaaataatgtgatagtagttaattgatatatatctaataacataacaataataacggtattgacgttaagtttaatagactcatcatagattcataatgtaaaacttttatctaattcaacactacatttcttgttatatttattttcttatctatcaccaagtggtggaagagatatttatgagattgtcaataactttagttggagataatcacagaaagaggcagaaaatgattattgagggaatataaaaatttaatttaataaagatggtgttaaataaattttgaaaagaaaatataaaatttacaaaaatatataacaaaaaattgaaaaaaaaaaaaaaactaaattacatttcaatcttttatttgattacatttaagtgtaatggaatgtttctcttctactattttaattattttaataaaatgacggttatattttaaaattaatagaattattattgctaattcaatatttaacatctaatcaaattaaattaataaaatttgaataagttgagatatagtagattcgaatgagatcatgattttcttatttttattaatttaaagggaatctttaatttaaatcatataatacatacttatgaccagatacagaaattaaagagttttgtaaaatagtgtattaatgatcatgattcatgcatgatgatgcattag

SEQ ID NO: 7418 - DNA, 1120 bp, Cannabis sativa
accagactgggatccagatttaatcctcactcaactatgggtaaagtcagacaaatagatccagaataataacacttaaccaaactatcggactactgaggagatacagacgagtaccccaaggggatcctggaagaacaatcgaaggggtgtcgcagagcgtcgaccctccgagatcaatccgacgtggcatgtttctaacaccaaatcccacaaaatcaggggtttatcccttgtgtcagacctaaggaaggcgcacaaaaaaaaaaaaaaaacaaatcacatctttttagcgtccactattctgacattctttacacgattagtggcgcatggccacctgtcaacatcaagttgtatgaacttgtttggacaatggaaacctttcaatttgagcctcacctacctggctcaatgtcaatattagctttaacctttcatgttaagggttaagacttttggctacacattctggatagaaattttggtaagagctcaataatattgactcgctgactaataatcattaacactctaaccacataaaattttcttcttctttatttttaaacatttttcctcaatttaatattttattaatttaatttccaaaaaatgtgataaatatatctagtaaatctaatttataaagacaaatattttttataaaatgctgaaataaaaaaaaaaactataataatttgaatttatttaaaaatactttaacggggtttcttaaaaaaatagtttgacggcttttttagaaaataaattaattttaaccagatcataaaatatttctaaactaagtgaacttcaaattgatattttaattaaaatattataattatgttgagaaaatactctctaatagtaattacatttgaagctgcttgtgaattagagataagtggcgaaacgcgtaattaataaagccgcaattaaggtacgtactgggtccgtcggtcgaatgtaagtaacaagatcacatgcacctaatcaaccaaagtggggcccagacagactgtcacgcgccacgttacggtggcgtttttggttgtttctggccctacccggcccgaaccttcttttcttttactacacgttgaacaaacggcta

SEQ ID NO: 7419 - DNA, 1055 bp, Cannabis sativa
tcataaagaaaaacatataaataaataaacaaattctgtttttgtttgtttccacatagtccttatctgaatacacaacacacttaggattgtgacacaaaaggtggggcctaattctgaaccaattttggttatcttgctttcaagaaagattgatgatgctcttcatgtaccacatccaccaggcaccacctactatatagtctatccacttgttaggcttttcctgtgttcttacttttaaatgatgtttttccagttctcatttcagaaattttgttgttttcgtacttttatataacatacttaaatacttgtttctgtcttcatttagctaccctttttcttaatctctttatttgtttatttttgggttattggaactcttatgttatcaaataaaacattgttaggtatcaccaaatgccagccagttatagctgtttgtgttatttttcattatcttggaccacttaagcaaattattttggccaaccatataagttcttagaaagatgtagatatctaataaaaaatgaggaaagtatttttgactaaaatggataataagggaactcttttttcctcttagttttcaggtttggatttatttaacatcacttctattgaaactattgtactttcattatcatcaagtatgagaactatcacattttcagctgatactaattgaaggaatatttgttgcagtcagatttgtaacaggttgcaaagaagacgatattttagagattgtcagagaaattctgaagcatgtattcgatccttcttgacaagacaccaaaccataaaaacaataaaaaaaataaatatgatttggatcatatgattcttctggttggacaaggaacattaaatatgatgagctgcatagtagaagtacctcgtgttgtgtgtgctatactttctaaccaaaacattacattttgaatcaaaacaacatgtgtgaaggtttttatagggaccaatttgtaatagaaagtaaagtaaagtaagtactttggtaatggagtgagtttgtgggctctaccaca

SEQ ID NO: 7420 - DNA, 1071 bp, Cannabis sativa
tatattattgtttttggataattatggctacatttcttatgtaactttatttagactaattaaaaattttctctcaaatttatcattgaattttttagatagttaaaagttacgttaagactttttctaacttttattgattttttaataaaaatattatagtgttgtcaatttttttatagtagttaataatcaagaatttagcttcaattatttttattatctgtgggattatttgtggtgaaatttctttatgtttaattttttaaacttaattattttattttttttagcaaaattttcttatgttaattttttttttgtaaacttaaggtgttagttggatattgcggttaaatatcaattagattattactgtattgctttcgaaattttactttcatgtgtacacaagtatatacagtagtcattcaattagtatttaagaccatctccaatagatctaaaatttgtgctaaatttagcacacaaaatgagtttatgttatatttgactcactatttacaattgatttctaatgcacaagatttaaaatgagaaaaaataattaattatactaatggttatttaatattttattgaggatatacaaaatattattatttttaatcttttattatttaaataatggttatatggtaaataaaaaaatataaagtttattaaaatcaatgaatcataataattagtggcattataataaatgaaaaagtaaaatttatagtgagctgtttttttcagcatattattgtggactaactttagcacaatactatatcttgtgccaaatttgacataacttttagcatgtgctaaatttagcacttttagaacactattgtagtagtaagtgtgctaaaatataccaatacactatttttatggcacttcgttggagatgctctaacggtaatatttaactgacgcctcaaatttataaaaaaatgtaaacttaaggaagttttatcacaaaaaaaaaaagagttaatacataagagaatattcctgtgtgagaaatttatcttccccttcaaaattaacaaacaactt

SEQ ID NO: 7421 - DNA, 1457 bp, Cannabis sativa
cataaagaaagaataaaagttgaacgtagagaaacgatccaaacaatgcaaaagaacaatcctatcataaaaaaatatagagctctacctctctctaatctttgagatgaaaaggtgaattacttggaatcctcttaatggactagtgaggatcaacttcaatactgaaattcacaaaagatttttgaaactcaaaagatgtcacatttcatagcctccaatcgagaatgtgtttctttcattcactgtattttgattttttgtttaatggcataacattttcaatttgggtatatttaggtatatttaggtatatttatattaatttttgtgtaatatacatatattttattcttcatatattttttttttaatttgaaatctatttttagagttattaagaattttagagatatatgtattatttttaaaatttaaagatttatttatttatgtaaataatgtgtatttatatatacatatataatgtatatatatgtataatatatataatgtacatatatatatatattagttgtgtatatatgtataatatatacttaaatttgtttatgtatacatatattttattatgtattattttttttatatttttattttgtttttgtaattgaaaatattttatttttgttatttttaaattgattaaaagggtagttggatttttagcagcttggagaaggtgtacacaaaatttctattgagaaatatatatttttattaatatgtgtattttttatattttagacgtattaatagtttttagattatatttgatttaaatatttttttttgatatattaaagatcatgtattattatgctagtaaaattttattaagaataaaatttttgtaattaaatttaaaaaacttttaataatatatttatcaacagcaatactagtctagtctacagttgggaaattatttcttatatattcctattagagtgtttttttggatattgacaatgttattcaaaacaaaagagagatcaaaatctcaatggtattatttaaaataagtatcaaatttaggaggaaaaaaaaaataaactcacaaaacaaacaatgcattaattagtatgataatgatagatgggggattgtgctgtcattgtaactacatgcaatatatatttaagctgatttagtttgtgtttactggtgatggtataaatatatttattttattattatttatattatttttatttacatatttattaatttaattttattatttttaaaatatattagtagtgggcattagcggcggaaccctgccactaatgttcgctgctaataatattattagcggcggagtcatatttttctgctaataagaattattaccgataaacaattatcagggaattaccgccgctaataacctatagctgcaaaattgagatttattagtggcggagtggccc

SEQ ID NO: 7422 - DNA, 779 bp, Cannabis sativa
aagcttgttgactcggatggtgggatgcgaatcagctagtcagatctggcgtacattagaaaaatacttaacaattcaagtctcggtcaagatacttgagttcagaacgaagcttcaaaatatcaagaaaggtaatcttggaccgaatgattatcttcttcgaatcaagcaacatgtggatctgttggcttcggttggagaagttttaattatctgcacgagaccatattggagctatcttcaaaggactacatatcaaatatgacacttttgtgatctctgcgaacacaagaattgaaggctactttgtagccgagattgaggctttgctccttgcctcagaatctcgaattgagaagactaacactgaactggatctcagtgctcatgtcacaacaaatgatgctgatgttcatcctaaagccaactacaccagtagtaggaacttcagacaatatcagcaagggaatcacaatcagtttcatacttaagaggaaattacaatggaaatttcaacagaaataatttttctcaaggtaacagtcctaacatttcttcaaatagctatttttattataatgatcgtgcttctagaagtgtgtcaagaggtggtggatctggtttttcgagaggagggaggttttctgcatcaaacaataaacctcaatgtcatatctactttagaattggtcacattgctcaggattgttactatagatttgacaaaactttcacgcactctcatgatcaagttcatcagtagcaccaccacctgcaca

SEQ ID NO: 7423 - DNA, 860 bp, Cannabis sativa
atctctaacttctcagccgcacctacttattcactctatttatctcttcttctttcttacaccagtaggcagcagatctcaatggagtcctccatgtctttcttctttttgtttttcatgtgcggtggtggcgccaatggaaggcaaatggctcgacattgtgaacagtaggggattagtccctctctctctttatgtgtttatcgtttccttagttttcttcttcttcttttctgtattttcttttcaggccaacgacgtacgtcggtgctagggaagaagctgctcctaggatgacgacggagctagggacgacactgacgtcggaggttaagaaatattgccctcatataaattttagaatagtcctcttctcttcatctgagaggtataaagttatttttctttttagttttcttattttactttttttttcttctacaatggtcactttccatatcaaaggaaaaaaatttcaatatcattgtatggatatttttattgatttcatttttagatttggttgtatagaataattttttttatttatgattaataggaatttattgatgtatatataaatatatatatatattttttttgtttctatatatgtcagtattgtattttttttctttacttaatgatcacttggattgtttttccttcatattgtacataatgtttatttgagtttgtttattttgaaacatttgtactttgtaattttttattttcgtaattttgatttatgatttttttttaaataaaaaaatgacctgtacggggggcctagcacgttgagattgcttacatatctcggcgggcctagcccatcgagaatgaccctttctcaatat

SEQ ID NO: 7424 - DNA, 1296 bp, Cannabis sativa
gtaaaccctaaagctgaggaagtgacgagaaaggctacccaatacaagctatttactgaagcacagatgaaagttgaaggcttgatcaccacaaaattactccattaacacaggttgatcgccgatttccaaagcattgacaatatgagtggcaggggccaaagtcaggcttcaaaggaggtaatagccctcgacctggccaaaatcataattgttattcgtgtttttagcaagggacatgtgaattctaggtcagcaccaaaagcccaccagttggtccaaagaagataattttggcaaagcccgagtcttataagatcttccaggaatgcaccttagctccatgaccagattagcttccatgtacgacaatctgtaactggaagtagctctagtatcgtgatgctagaaagccaaacagcgtattccaaaataagcaagtaaatgctcctcaaatcttgacagaagaccatatcaagctacaaagggaaattacctaaataaagatcaagcaattaatctataattaattgcccataattatgggacacaattttgacagcatgatcgtatccaaatctgcctagtcaacaaatctatcctcttatgggctgagcgtcacgaagatagcctaactatatgtatttttcatgtaaactccccactagagggaaaaagggaaactgagtataattctcttaacaatataaatacccaaaaaatccttcagattaagtgtttaactctctgacaatacttgctgaggaaaaaacaaagaacttatgcttagtgttttcccaaagacttttctagcttaaatacataataatattaactcgtggactaaggtttattaatgccccaacaaagtaaaactttgtgtgttgttcaaaatcctttttctgaattgtttattctttcagttctaattgaatgccccaaccacgggtcctttttctaactcattgactaaggcttattcacgcaaggaagcttcctttaactgaaaacaagttgtctcggcagggccaatttaacatcataatgcttaaaaaatgacaacaatggaggcttgataacaaccttgcccaaaggaaatcaaactgcataaacgcctccaataaatgatgctcctagaaagactgatcctaaagaccctggtacttctagtcctcataaggataaagggaaagagaaaataggtgaagcttctatgaaggcttcttcgaccaaacaacaaaagaaatataaaactactagacgacctccaataaaaaggaaggaaatcacgcctca

SEQ ID NO: 7425 - DNA, 682 bp, Cannabis sativa
tcaagtaatttcaccaacacttaaaagctctgatacctcatcagagatcaatgatctacattagattcaaatatcaatggctaacattcacttccaagtgcaacatatcttgtccgcctatatagagctaagattaataaaagtcatcaagccctaagatcaatgatcaagatccactgttcaaattcaacgatcgagattgagcaaaaggaaagattcctagaatatgctattttaaacagttatttattattaattttaatataaataactctcatactttttctataaataagtggctagattgttcattattttataagttctcatttaagtactcatgttatgctatcagaagctctatgattttctagcgcttagagtaccatgcactttgatgcaagttttgtaatcagttttcaactttatgcttaagaaactcaacggagtctcgttcctgtgatcttgagtagatgtaggctattactgctaaaagggatcgaactaatataaagttattatgttaaccactctttttactactttaaacttaaaaaacatcatttattaaacgatattatcatagccattttagagtcaatagatacaaagtaataactttttttttaccatggaatgcatggaaatgtagatggagattggaatattagataatagaaaa

SEQ ID NO: 7426 - DNA, 771 bp, Cannabis sativa
tataggttcctgagggagtggagaataataacaaaggtaacatttacttggctagtacaagtccaccgagtgtggttaaggcttataaggaacaattccaaagtgacttttcagtgtttctcaagtgtcgatccaaggagttagttgatggtggaagtatggttctaactattcttggtagacaaaaccaagatccaactagcaaagatggttgttacatttgggagcttatggctatggcccttaaccaaatggtctcagaggtatttacggacatcatataataataataataattattataatatttgttgtgtgttgcaacttattatacaatattatttaattttatggtgggccaggttctgttattggtgcaaatcaatatttatacattttaatttaataaataatataaaagatcgctaactactcataccatgttacatccatacttaatagtaatattctatttgatgacatatatatacaccatgataatggattggctagttgtaaataagtgtgttgagtcagcccgattcatattttgagaagcttgtaataatatgagttgtgtgtactcagcccgtaaaaaatataggtcatgctattttgtgccaatatttaaaaggatagactcgatacggcctgtcatggccggccataataaggtcgactactgcacagggccaaaaaaaataaaataaaatggttcaatatattttttctttaatacccaatagttttttttttaatgaacctaatttt

SEQ ID NO: 7427 - DNA, 748 bp, Cannabis sativa
taaaaaatccacctaagacattctaaatgatagaccagaaccattgaacttctctttcattatcttgttcacacgctccaccattgatggactaagatgattagcccaatcacccacttgaccttttctaaagaaaattttgttatcacacttaggccaaagttggccatgtttatttacatccaaattcttcaatttatcaaagctacacaactctaatattttctcaacaactccattagcctcttcttcttgtgagaaaggaaccccaataaagtttgcaacacttttggcttgaccaacactatcttctatcaaatcctcgtacttcaaaaacaacactttctcaggtgtctccaaactgactttccaataccctaaagcatggtcccaaaatggcccaaagcaagcctcacctctacaaaacatgtccacacactcttccataccccactcgtgctgcgaatggccacccgggtgtccattcgtcgaaaaatgccaagtagagactatggcatcaagagggtttcgagtaatgtaaacaattcgagacttggaatcatgcttaatagagttgtttaaagatgcatagggaatatgtgtagagatcaaacgagggcttgacatagtggccaagtcatagggcttatgatgggcataaatgttgtgctctaaagaagacacgagatgatgtgggtttgtggtgagcaaagggtgttgatcattatccataatatgatgtttgttg

SEQ ID NO: 7428 - DNA, 763 bp, Cannabis sativa
tgataagatcgattgtgtaattttctaatttatgtgcatatatatatattatttgggtgtaagtgtaactgttcaaatttgttttagccctaacaaatttgcgacaattttagatttttttttctttgttgttgttgttaggaagtgttaattaacttaattttgacctagtttccacaaaatcaacgtgacattatttactctgtgtaaactatcacaggcggtaagtgtctaactaattgttcacatctgagtattatgactaatagttgtattgtccttttgattgattctaactatatttttctttttttggataagaattgattctagtaatgttagattgttttggagcatatttcttgatattaaatctggatcttctttacaattggtgactttttttttatatatgttggagattcttttgattattgatcttgttttcggcagaactttcctatgatgtgtattaaccttgaactatgaatatgtgctatagtgtgattgatacaattctttattttgttttgtcatttagatttgtggttctgttattctcaaatattccaatggctgaatgtaacgaaaccgataaatacattgagatttggagaatgaagaaattggtgaaatcacttgaagctgctaaaggaaacggcacaagcatgatctctctcatcatatctcctagtgatcaaatatctcaacttactaagttgcttgctgaggaatttggcaatgctgcaaaaatcaaaagcag

SEQ ID NO: 7429 - DNA, 1734 bp, Cannabis sativa
ccttaactcatttggccttgctatatatgtcttggtaaactaccagagactttttataattctcaaaaattaagtataactcccacttaccgatccaacggttctagaatactaatagttacgtttaatggaaggatcaaaatctaaggcctctaataatgacgtaatttgcctcggtaagggcactaatctatccctactactagttaactataccctaggcaccacgcactcgtgggtgtcgcgtaaccccaacgcgtggaccgtatatcaccacatgtctagcaacattagaatacgaaaggactaaccagattgatatattcagattccatgttaaacccagatcaagggatcaagcctcttaaaactcccaagtagtgaaggcttagggtgtaaatgtactttttttgtcacaacaattagtattttagtcaaaataaaaacttatgatttactatgttgaatggagcttctgtacgaaaactgtaaaagcaaatttctcactttcaaatatggataagttgtgctcttaatgttttaggtgatcctaaaaaaaaaaattcgcataaacactactttaaaaagtagtttggttcaattcccattattattttcttgtataattaaatagaccgatcacatacttctaagtttggaagaacagggtgtgccaaagttatatccaaagggatcaaatgttggtaagtaattctaattttcaaatcattgtacaattatctcgttaaataatcttacttttcaattttcaaagcttatctgtttaatttataataacaaggttttcctaaaaaaaaaaaaaaagctcacgaaaagtttgttgctttgtttgaaatgatatatatatatggaacactttttaataggtattaccatactaaataaatttaactataaatattaattttaaaaatattaagcgatctttgatggcgaataataaaagaaaaatttgaatttctacgcttaaattagctacttaattaaagaaaatatcaaaaaaatacatctttttacactatatcaaaaataagtttatataaaaaatattaaagtaaaactcaatatttgtttatcatttttttgctgaatttttattattattattttgttttcagccgatggaagatttttctaattaagtagaaaaatttagcataaaaattcaattttttttttaatattacccattcatggttaataccattaagagtatataaatactagaagaaagcatgcacgtataattatttttatgttagatgctttctactttatttaaaaataatacaaaaaataattgaagaaaaaatattattagttattgtttgaaattatctttttatgtatattcaattactgtaaataatggtgttgcaaattagttttagttatggtttttttattaattgtcatatgtaattttaaaataaataatgcttaatatagagtgataattattgaatgaataataataatttgacaaaagagaatgtataattgtgtaatattttgaaaaaaataataatattgtgtaatgttttaacaaataaaaattaaactcaaaatgttaataaaatatcttaatactaaaaataaagaatttataaaactgaaagctaaataatgaataaattgttgatataaatatatatttcaaaaaaatcaatgcttaaagtaaattttaaggaaaaaataactaaaagaataaaa

SEQ ID NO: 7430 - DNA, 1018 bp, Cannabis sativa
  modified_base (323)..(325): a, c, t, g, unknown or other
ggcagcggtggtggtgggtggtgggtaatggtggatggtggtgtggtaataaacgaaaaagaaaaaaaaatctggaaaaggaatgaagaagaagaaagcaaaggaaaaaaaaagatgctgagatgaaccagggagaaaggaaaagaaaaaaaatgttttttttcaaattttttatttaatttttttaaaagaaaaaaaaaattgaaaagaaaaaaaattgttacaattttttaattttaaattaatttttttaaaataattttttacatggaccaatacaattgtgtcatgtgtacactgtgtccacgtagatgtacacatgnnnagtccaacatggcacttaatacctaaaatagaactattgagagttttatcgccaaaatttgagttctagaggttaaatacaagtaaaataaaagtattgtgagttttgccgcaattaactctttaaaaattatagataatcttaaataattacaatgtacacgatcataaagacaaactggactcaatactgactcaatactctcttaaatatcaaaaacaaataaaaattatgttaaaatacctttatttttgaggatgcactataaaataacctaaatttatttatcactgtcgcatacacatgttaatatttcattcatataacaagactacatgttctcaaaaaagaaaaaataaaataacaagactattatatgagtttagacatgtataaataaatttaagaagaattacccttatatactatttttttatttattttttttttaaatttgcggtttgggttgcttcggtagtttttatgtgatttgctatatgaattttaattgcgatttaagtttactacgtgagtttctatacgaatttctgtaaaaaatgaaaaaaaaaaatattttgaagtgtaaaaataaaaaattccctaagatatttttactttttttaatgctaagcttaatctttaatcttggtatgtttttcttaaatttccttctatttttattttctaataaat

SEQ ID NO: 7431 - DNA, 1076 bp, Cannabis sativa
  modified_base (234)..(235): a, c, t, g, unknown or other
  modified_base (601)..(607): a, c, t, g, unknown or other
ctccgcaaaatcagttctgtacatatgttctccggcaaggccatggacgattatagctatgttcgccaggttcgtttaataaagaactttcttattaactaatttacataacgctcctgatcttattaaataaatatacattaattttttttataaccataaatttcaataattggttaattataacttgctttttcaattttatttagcagtttattattattattattattnntattattattattattattaaatagccgaaatttaagggtgtgcataaatcatccaatgacaattcactaattcaatctaaatattggatattcaattgttatctgatcggattgaatgttatttttacatttaacatccaatcgaactaagtaattaaattttatattgttaatatttatatataaaaattaatattaaaattttactatatttttcttagattggatccaatccaatacatattgggcttaaaatatttgatcgatccatcctaaaaatacttagtctaaaatattgaataaatttaaattaaaccaatatatatacatataaaataactctagaggaaattacactctatacnnnnnnnatattgtcctcttttatttttacattcttttttaaagtatcatttttacctcttttttttaaataatgtaccaattttgcccttgttactttaaaatactctcaatttgactcttatatcagagtattttgggtacaatacatatgaaaagaggtatatttcaattaaatataaaattaaaggtaaatttacttaattgattaataaaagtgttacttttcaacttaacccataatctaacaaatagaaccgattcaattggattagatcagatggtaaaatttaacttttaatatataattagatcggatttacatagtactaaaaatattaaatgtggtccaataaacaccacttcaaaagaaaactcttgattttatttgtttatatttatttaagataaattattaatttatgagtaatatgttcctttttttttgaatggtaagtaatatgatttttgtttcca

SEQ ID NO: 7432 - DNA, 2130 bp, Cannabis sativa
  modified_base (1945)..(1951): a, c, t, g, unknown or other
aaaaagtcatgaatattagagttgctaagaaaaacaactaccaaaaagaatgtgacacttcagagaaaattaacaagtacccaagaaaattcactatgaattaaactcaaagaaatgaaaaagatagaaaatttatcaaaaaagactaccaaaattcaagaaaatccagaaagaaagagaagaaaagaatgcagcaaggtttgatgagaaagtgaaggaaaaacactacaaatgtttagagcaaaagagctaaaaaatctaacaaagtttatgacattattgtcaattcttcttcttcttcttctttactctaccaaaaaaaatatataatgacaatttagaaaagataaacaagtatccaacaaaatttactaagaatcaaagtcaaagcaatcaaaaagaaagaaaatttatatccaaaaaaaaaaaaaaaaacactacaaatgtatatgaagaaaactaacaaaaaaagagactcataaagcttttacctttgaatttgaatgtgatgagttttgatgtgtaactttagatctgatctgccaaaatggaagaagaagaagaaggtgatgaagtaagattcttgtgaagtttatgaatgagcaaaatattcattcaaaatctagtggaaactcaataaatgcaccaaagagagagttgagagatagaagagaaatattataagaagttgaaaaatggcaactttgagagtgaaaataagtaatgcaaaaaaagccaaagccaagtgtcacactcacatgttttgagtaaatagacagagaatggtagacaacaaatactatacaatacaactatggttgttttgtttggttatgttatgttattgaaagtgtgtttttgacttagagaattttcactttctatactccaagtggtatggagaaccaaccatatcatgacaagtggatgagtctttaggtgggatcatctgggcatgcctatgcttttgaaaaaagatttgatctttattttatagacactgcattttatgttgaccccatctcatccccccaaccgctattcaaatttttaatagccgtttgatgggttttgtttgtctcatcaagattttgatcaatcttgtcccttcattttttttttggctatttaaaagttttgcccctatgacatatatattattgtgctctcttaactcttcaactcattacaaatagttcttaaattgttcacagtattataaattagttattctgtcaagtttagtcacacgtgacaaacaaaatgataacatggttgtttacttaattactgtatcagcgttgcgtgtataatttaacattaaaacaataaaaattatacacttttaaaaaatcaattaatgattaagaaaattatgtaaaactaaatttaaaaaattaatttctttttcaaattaattacacatgtggcattgacatagcactaatgtggcaactcgttaagcagtcatgtcatcattttatttgtcacgtgtgataaaacttgacacaaaataccaatttaaaatattgtaaatagttcatgaactatttttaatgagttaaaaaatttagagaacacaataatacacatgtcataatttgaggaaaaaaatcctaaatagtcattgttttttactttaattcattgattgatcaaactagttttgtatgtaaaccaataccattttgttaggagtaagaataacaaagatttttactaagatagtattttgtatgtaaatactattttgtactttctgttttgcaaaaattattgattttatattttctaaaataacaaaaatatataggaccttaagctaaatttttgacattttcttttttaatataattaacttaaagacaatttctaacatgaatagatgcataaaatataattagttttgtcataacacctctagatcgagttattattaagtttnnnnnnnacaaaaaatcagtttagagttctatttgtatcattttaaaaaatgcacagctcattttgttatttaacaaaatagaggatccaatcaataacttttgcaaaatacataattcaaaataatatttaccatttaataaatatttatacattttttataattatttaataaatatatattat

SEQ ID NO: 7433 - DNA, 1792 bp, Cannabis sativa
tttggtctagtggtgaggtaggaattgggatttgaccaaggtttgaacattggatctattgatattgagattcttagtcttaattaagcaccaagtgtgctaatgataaatagataaaatcaaaactcatatgctaggcattgcattggaatgtctaacttcagaccaaaggctaattgtaagttaggccatttccaccctcatagtaccaaaaattaccaaagactaaagagtatgataaatgagatggatactacttgatatttggcaaaaatatgctacaattagttaaaaagaaaagaaaaatacaggtttagcatacacaggctcaacttccaagttttgcttaatctctttagaaaaaattaaccaatgaaatcgaactgtaatttattatggtttcattatgtaggtgcggtttaaggtttggaattttaaaatcagtatatgagtgaataactagagcaatatcaaattagttccaacttctaatccctctaagtggtaagtgcccaagtgagtataccccatggcctgttttttttatgtggacttcaaatgaatggttctcaaattgaaattacgaaagtttgcatgctcaacagcctaggaacgattgcccgacagccataagacctgactgctatcagacaaattggtaaacttagtttggaacataatagcattaccccaaataaagatttctgaatattgaggaagtgagacctttttgaacctataatatcatttccacaaactatacaaaaacaaacactataatatgaatacgatcttcttcaaacaaaactaagcatacattaacactttgttgaagattattgatccaagccacgaataattaatatacataccatcaactataggaaggtcatcagttagagcaattgcatctgctttagcacaaggacacctccatctccagttaaataaacttcatccccaatggtttacgacctctcgacaacctaatcaccactaaacaaaactcatgagcaaaacttgttaaaaactataagaccttcaaaacagaaacacttagaaattggattacactaataaaataatgaattaatggcataataaatagccgtggcatgatttgccaataatagtggcttagaaaatggaggccacacaactcgaaatattaagacaatactttggagggtgtcactatgcaaagtgctcgagatgtaaaaataaataacaaataacaatgtgtattcatcaagggattatccatgcatgctcggaataaatatcatcaagtgtatttatggtgcttaatggatataaggtgaaagtgtgatttaaacataaacaccaagaaatccgataaaagcaccaaaatatagggcatgtattcatggtaatatcctaagtttagggtgcataaatttggaaattgaatgcatctttttgaggaatttaaacatgagccatagtagaattccattagtcaactacaagaggagaaacaagggttccaatttaaagaaaaaagaaaggggtacttattcgagagaaaaatagaggccccaaattacatcaagatgtttttaaaataatataaaagtcctaccaagtaagatacaagcctcatcaagggttcaagtgtataaacaagaaaatttactctcctcaagcaattcttataaaagttacatccaagatttaagagccactaatccaagaaataaagaaacaattccgaccaatatacgcatatatacactgttcatatgtcctccaagaaattcgagaaatccca

SEQ ID NO: 7434 - DNA, 887 bp, Cannabis sativa
atgcctaatagcaatgctcttattgtaattacaatgataaactctttttgagtttttggtgcttcgttagtcggaataaaatttttcatttttgttcttcaaaaagaaatacataggatacatctcaaagctaattaattatattatatgtggtattatgtatttatatattatcaacataagattctctaacactttttaattaattgacaatgaaagtagtaattcatgcatcttatatataagactatgttattgtattatcccacataaaataaatagtaaaatattaagttatatataagaacatgagttattttattttctcaacatggtatctgagactctttaacacttaaaatatttaagacctaatatcacattacaatacatttagatagtattgagtagcattagaattgttataaagtacgtataattaatagtttcatatatataattttaaaaaatatcactaactaattttaaaagaacatttataaatagtgttgcatattattaatttctaataataatgctttgagtagcattgataccatttatcatttgtctagctatctactaacgtgtaagaaaaaacaacatatcaagtaggactactagtgaagtttggatgcaactttctcacatacaaaaagaaatgaatcaagaagaaattaagtatcacattaattaacaatcatttaatatatattattataggataacatattatatatataatacaatctctatgttaattgcttggtctttagtcgatagacctattaataactttccaactactctcagtctttaatttaagtataataactaataataatattaacaagtcgcccaacattaaagaaggttgttattttatt

SEQ ID NO: 7435 - DNA, 885 bp, Cannabis sativa
atcttgcaaaataaaatgactagaatacttgcttcgcatttttttcccaacagtcagcttgctttccaaaactaacgaatatcaatctaattttcaggcgttgtgtaaattgtgacccctcacccaaaccataattttgtgtttccttgaaagagtagcgacatatattattacagctaattagttatattgttctatgtaatcatcaagaaaaaattgaaggagaaaaaacagtataataaattagcaaaactaaggaggacggtaaagtttcctaatttcagctagtaattttggcatgttcctcttattaatatatatatatatgtatttaatataattctatatctaagaaaattttatcaacgaattagtctgctgtacaaaaattgcagaggaaactgggggcagtctatctaaattggaaaatccttaatacagtatggtcaaacaaaaagaaaattaaaaatatgaatcattttgcctcaaacatgaaaatccaaaagaaaaaaagaaggtctaaaaacgttgagcttactctgaaaaaagcagaagaaaaaaaggagttggaatagatgagtgatgaatgacagtggaagtgcctcgagtccggagctttcagaccaccgcccttaggaataacaaacgacgcatcgcttactacaccataaacctgcatttcgttctctcctcaccacacacacctctgcagaaactgtttgttccttgggaaatttttgtttttttttttttttatatatatttcagtactgactgattggctaccattttcctttacttttcttttcttctcttctcttttctctactttattaataaataaaaataataattctaaaagagcttagaatctaaacttgggcc

SEQ ID NO: 7436 - DNA, 761 bp, Cannabis sativa
ccctctctctctaaactgttcaattccatttctctctctactacccacctaattttactcccattagggttttgcgattcatgatcgatatgggttccgaaggatcgagggttgtcggtgagctttccaagacccagatttctcattctctctaaatcatttatatttttatttgttcccttctaattctctgattttgctagatttcattttctaaaattgctggatgtaattctaggttttcttttccctgatttttgactgttcgttatttgcttttcttgttatgccatttttttagctttgggagatatatctatttagaaagctctgtcttttttgggggggtcttttagggtggttgcatttgtggttgggtgtctgaaattttatggttgatcaagatcatcaatttctgctatttttttttttaattattcttttgattgtcattgttttagggcaattgggcatagagttagatttccatggttaagctgaaatgggtatcaagtatttagtgttgtgtcactgtgatattgtaatagaagttgattgtgtgtttattgattttaatattatgaaagtgaatgttaggaaatctctttataattttctgaaattgcaacatttctttttgtgtcactggccaatgctatgttagaatgatatttcttcaacgaattttgtgatattagtgtgtgaagtctgcaaaatgcgacaattgtgttttgttttgcgaggatcattcatgaagttga

SEQ ID NO: 7437 - DNA, 1413 bp, Cannabis sativa
ctaaatcattttctacttaatctcaaccataagtgaatctaataaagaaatcttttgattatgagtctcaagcttttgtcgctcgatccattaattcctaattttggtgatgatcatggttggtgtgttgacactggagctaccaattacattgcttataatatggatcaccttgaaactactatcccatattcaggccaagaaactgtggttgttggagatggcaagaaacttgttatttctcacattagtaaagtcattattccctctcatttctctgcaccattaaagttaaattatgttcttgaagttctttctataactaaaaatcttggcagtatttctaagcttacaacaaacaatcatgtttttcttaaatttcattaatcttattgttttgtcaaggacaaacaaacaagtgcaatcctgagcaaaggagacttaagaatggtctttatcttcttagagatgatgacttcactcttttaaacacattagtggaatgtcagcttgctataaccatgtcttagaaatctgttgattattttttgattattgtcataacaagtatactctggaaatgctatatctccttgtaatacaatcacagataatacagaatccatttcttcttattctatgatttcttcatctactgcttatgcatgtctcgaatttttctactaatgttaatctttggtattgtaaattcgggcattcaacccaagctattttaacccatatattatccaaagcaaatattcctcattcatataaagacttacaattttgtaatgcttgttaaataggtaaaagtcatagattccttttttttttttaatcctctactcgtgcaaaacaatcctcagaattaattcatactaatttatggggccatctcacattgtctctaaagataattacaagtattatattatttgtgtggatgatttaattaaattgtcttggataatccctttgttcttaagtcacaagcttttgagacttttattcagtttaaaagtctagttaagaagcagttcaacttacctataaaaggtgttcaagaagatggtggaggtaaatataaaccttttgctaaattttagagggatcaaggcattatgttttaacacccttttcctcatatatataaacaaaatagtagagtggaaaggaagcatcgacatatcacagaattagcttgactttattggcacaatctggtttagacctgaattattggtagtatgcttttcaatgtctattaaatgaacacccactcttgttattgggaacatcagtccttatgaatgtttgtttcaacaagctcttgattataacatattgaagtcatttaattgtgcatgctttccttatcttagaccttataatcatcacaaattggagttc

SEQ ID NO: 7438 - DNA, 623 bp, Cannabis sativa
atactcaggacactgacccgggggtgggacctagaaccgtaccactgtctcgatctcaaatctaaactcagacctgggaccctgcacctgaacatgaactagaccgggacccgtgataaggatctagttcttgactcgagatccgtgaaacggagcttggaacagacccgtagtccgtgtctagatttgggactcagactaggatccaaagtcagaccaagactcaaacccggacccagacctagacctaggacttgaaactagaacctgaacaagaaccgttggactaggaccttagaacaagactaggaccgtgacaaggacccgaacccagacctagaatcgaactcgaacctagccccaaacccaaattgagaccagaactccggcccagaccagacctaaatctaggacccaatctaatacaaactcggagcgagattgggatctggatacgaactctgactcagacccagacccaaactgggatggaaacctgagatgtagatctggactgagatcctgacctacactaaaacctagacccgcaccagtgaccctaactcggacctggacccaaacatagacgaagatcgggaccagacctgcaccaagacatagac

SEQ ID NO: 7439 - DNA, 748 bp, Cannabis sativa
acatccggattcacactgcgtataagacttcgcagcgaatccaaagcccgaggcttaccaagcccccgacaattccacgaaagtacaatcattgggggttggggggcttgataaggcccgcctcctcggcctggggaaaatcctgatttcccgaagagagattcgagtcatctccatctttgacagcaacattatccacaactgttcccttagaatccagccttcccactcccagcttctcctcagagtccaggcactgcttcttagcttgatccaactcatgaactttggagtgacttgcaatgtctgccgagatgggaatatcctcattatatctccttttctttcccactcccagttgacttttcttgctttccttttgaaaaaagggcatgtgattgcaactgctcccaactttaagacatctccgtggccgaccatcctcacgtgccaccttctccgtagggtccagagtccctttgaaaataattgccagatgctccacttgcttattaaaatcatctttgggctctagagagatgggcccaacaccctgatcgcatcctcccttggcctcattctctatccaggcccacagacgttagagaattatcctcaggaggcccagtaacttttgtcttagataattaaaaattcccctccatttcacgcacgttggctgccacgtccacatcagacattccattcccatgcaaaatgcctttgccactaccctgctcagattgta

SEQ ID NO: 7440 - DNA, 1123 bp, Cannabis sativa
aaatcttttccctgaggatgctgaaaacgcgaatgcagatgaagtcgtagatggtgctgctagcaaggtcacggatgatcccagcactccaacaacttagcttttttaatttcttttgtattgtcgaactttctttatagcaagttaaattttaaataaaattatgatcgtaggcatataacttcctttttttttctgaatttttataaaggtaaattagtagcttctgaattttaatattatgatcagttaatcaaattactcttaggtgacgtttgtttggaggtaataagaatggaatgaaaatgaaacaattttcattccatttctttgtttggttgtattttaaatcattgtattatagtcttttcactattttggtgaaatgactattctattttgaaatggacggaaatttatgtattttaaattttgttttatttcattcctattccaattctcatttctatctctattatacttttattcctcccaaccaaaacccctagaggtagtgaaatagaatggaatagaaagaaaataattttcattccattcatttgtttggttgtatattaaagtattggaatgtcattccaatctttttatcaattttttatgcattttaaattttattccattacattcgtattcgtattctcatttctatttttattcctgaatatgcttttattcctcctaatcaaaagccacattaattcttattactttgtccacattaatattcgtaatcatactacatatattcttttattattacaaaaaaaacaaaaaagtgtatgctataatcataacaatatatatataggtgatagtatttaacctgaaatttgtgacatgccatcctgaaaaattagctgctgtagttaaagcgtctctccatttgtgtatgatagtatcattgtaacgttgctcaagtttctctaacgcttctgcataacttcttttttgtttacgaacatcagtgggatcaacatggtaaaacacaggcacaacaacatgcctattgctctccacgcattgaagaatatgggccaattcatccaagcaccacgatgaagatgcatagtgtttggaaaaaacaactatcgaaattttagag

SEQ ID NO: 7441 - DNA, 604 bp, Cannabis sativa
tactatttatgcttggaatggagtatctctctcaaatcttgattaaagtaggtgaatggccaggtttcaaataccatgaaaaatgcttttctctcaagctaaaccacgtgtgttttgcagatgcgttgttgatgttttgcaatggggactacttttctatcctgctcatgttaagagaatatactcttctacttcaggtctgctgcttaatgaacaaaaaaaaaaatagtttattgttttggtatgactaaagttgaagtcaactggacaagattatgatacagattatgacaagatgaatgaatttttggggaaagccaaaagcattaagcatttcctcgatgaaatcccattcgatggtatcatatgcttttctctaatcaattttgatcatgcaactaggcttaaaaattttcctcccataccgcctcaccaaatcttgacaaatcattacattgtgagcaatgtatctaccatgtacaaatccaacttggttctcagcaattaaatctagaaaaaatttcctcaatcttgaacaaaattacttttgttgtagccttgtataaaacattgcagcataaaattggtcaaattctgtcatatt

SEQ ID NO: 7442 - DNA, 738 bp, Cannabis sativa
taactggtttttgtgatgctgattgggcattagattcgatgatggtcgctcaacctcaagattttgcatttatcttggtccaaacttggtatatcctggactggagctccaagaagcataaaaccgtgtctcggcccagcattgaggatgagtatcccagccttgctaatgccaccagagaaatagtttggcttcagtcgttaactgaaattggtcttcgacatatgcatgttcataccatttggtgtgataaccaaagcaatgtgctaatgtccgcaaatactgttttacatagtcgcacaaaacacattaaacttgatctttactttgtttgagaacggatcatcaataatcagctctatgttaaacatacccctgctcatgataaaattatcgatgtccttgttaaggctttctcttccactatatttgatttattaagagacaaattaagtcttgtttctgtcccaactcaatttgcagggggtgctagacatgctctatatgttatattttagttaggataaattagttatttttgtttcacaagtctcgtgtatagttttactaacttattcagtgtggctctagtcttaagtgcctaactacatattgtatttatagagctttgaagctcataattcagtaatgaaaaattatacctctcgagatgtgagacacaaaaatccttatatcgagtatcaatagcactgagagaagggacaaagcatggtcacc

SEQ ID NO: 7443 - DNA, 666 bp, Cannabis sativa
  modified_base (589)..(593): a, c, t, g, unknown or other
tgttggtattctagaaaaaatattctgattattcttgcattacattatattattttattttagttttagctactccttagttttataaaattatattgtaataatttaaactaataatataatttggttgttgagtgagaagttgccatttggaatggcaaacaatttgtaataataataattatgcaagtgggatagctcaggtctctaataataattaattttaacctattgtgacccacacacacgtatcaaattttaaagaaaaaagagatctgtttttttttttcctactggagatgagaaggctgctacaatatgcttcttgtaaaatataacacatttcatattttatttataaatatattatttaaatgatgtaaataaattaatataaagagactcatggtgtttatataaatatgtgaactaaagtgaagaaaatataatttttgtcaaatattttaaaggatgaatcagtaaaataacttaatatgagtgctgtaaattctttagaaaagaagcatattttatattttatttcccatagtggaattaaattaagctacttaataataataataataannnnnataataataataataaattctttagaaaagaagcatactttatattttatttatttcccatagagtggaatta

SEQ ID NO: 7444 - DNA, 597 bp, Cannabis sativa
atattttccttaaaagtataattataaatgttaaaatagaattaattcaggtataaaaagtatatttgtctcacctgacggagtttctatgtcttcattgttctcggaaggccttttcttttcataaaatttcaaaccatcaccagttgggttgggcaacatcggtggatgcatagcatagaagtttccaagagctgctgcgattgcttgaaagcacgttttttcattctcccaatccacctagagaaagataaattgtctcaaaaaccaaatacatgaaaatcatgctagggaagacctgaaattaaggaaaacatagcacagcctacatcatttcccaaacaaaggacaaagtcaggaacacgatccatgtcaggtgtgtactggtcaagtacaactggaagtctcgtcaaattcccatctatgtctatatgaatgcaaaaatattcttctagcatttcacgtttctgcttcaatagcgctgtactcatctagaaaatataacattccaataattattgttagtgtactgagaaagacgtttaggaaatgaaaatttggcattgagaaatgaagcattaatggctatggaggttt

SEQ ID NO: 7445 - DNA, 733 bp, Cannabis sativa
acactaatttaaattattaaaatgcgataaaaaaaaaaacattaaaaataaaagaaggtcgaagaagagttacaaaactctaaaacttttaaaattaagctaggggacatgtcgcctagcagcaggcaacatggagctagagtttcatgtaagattcctttaagacatgggattggtgagacttgattttaacttcattctctaatatttgtgttctcatttacatccatttaagaactgataacaacaataagatgttgaaagtttgaatcttgaaattatggttaccaaacactattataggttcactttctggagactagtttccatcaagcacattgttagaagctattttgcggtaggcgaaaataaatttttggacacatgtatgggttgttctcacgcttcttctatttcttgctataaatctttgtgttttatttgtagtttggtgttgtatttttttttcttttcttttaaactctatttatatgtaactttttttaaaattggattggctagaacaactctactgccacctaaaatcaagatttttgcacgggtagttgttcataatgttctaccagtagttgattctttgctgaaataaaatattaatgaagtaactatctcttctttatgttcaagtgcttgggaaacaattggcctgtttggttgtaaatatgctaagccagtttggaaacattcaggctgatgcgggctgaagctattt

SEQ ID NO: 7446 - DNA, 964 bp, Cannabis sativa
gtgtgaggttgtgctttggttctgtggaatatttttcgggtgtgttcattggagatctcttgctgtgtgagatcataaggcagtttcctacatgaactaggagaatttggaggaatactgtaatatttttgtaacattttaagagtaagccacttttacagcttaattaatgagtaatgtatacaagtatgaaacagaatggaaatcatttttgttggtttgaagtgtgtgataacgtttaaagtttacaatatacatgtttttttggcagattaaacgaggaaatgaatggtgttgacaatctagccacacaattgtatcctttatattgttttcattttcaatataagttaatgtagatgtagtactgtgttgcataaataatctcgatgtttccttaatgctcttgaagaaaaatcttgaggagaaatgtcgatgtgctagattcagctgtaaacaagctccttcggattccttgactctgtaagtctctgatttcttgagtatttccatgtcagaatgatccaagaaatttaggagagtatcttcgaagacagtttgctccttggctttggtttctaaaactagtcattacgagctttttagccaatgcaaacgaaattacaatgtggccttcttggttgatttggcatataatgtttaagaagatttgtaaattcttgctatatgtgttacattgtttactttctataatggaaaacactatggatctatggctgaaacaggctcagcattgtctaaacttttggggtttttttataaatatgagagaaattattaaagtttatttttatatgataaaaataaataatgaaaaaaatatgggaataaaaaataaataataattaaaatatgagaaactaaataaaatatcataaataaagttggtaaaatttatagtaacaattattgtcggaaaagtcattgtttctgaaaagttgtc

SEQ ID NO: 7447 - DNA, 1051 bp, Cannabis sativa
acagacataactgactataccttttgttactgtggcaggaagatggcattagtttgatgacaattataaaaggcactagcaaataccgtcgttcatggaggcacaattttgtctcagattttcttcctcctagtagaacagaaatcgactatgcatttgaacaagttgtagggtaagtgaactgaaacatttcttcttctttctctccttaagaagacacctccatgcttgcagctcacttgaatttgattcattgttggcctgaagatggttcagtgtcaagccatgtcatattcatgttctagtttattaactgtgattttacattttagctcattaatattgtacaagtagtatactagtatttcaattttgatataatttccaatattttatactgcacaaagatttatgattgttatcatcttcaagaaatctggtttagtgatgctacaaattgcattttaaatgagagtaaaaatcttagcaaaggcctaacttttcaggtaacgtgtttgaattttaaccaagttaatttgaatgacagattacttcgcattggtacaagttccttagcttactctactctagaagatgggaagatagtgaaaggtcttgctggggttccgagtgaaggtccagtattgttagtagggtatcacaacttaatgggacttgaactatatccattagttgaggagtttttgcgcgaaaaaaatgttgtaattcgaggtgtagcacatcctcaactgtttgtggctgattcaggaagttcatcacccgagttttctatgaatgactggttcagagtttttggttctgtaccagtcacaccaagtaatttattcagattgctttcctcaaagtcccatgtccttctttatcctggtggtgcacgtgaggctctacattgcaaggtttgttgtttctatatttattttttcatggcttcaaatcatatattttcttgctttgttttatcttttttatttcttcaaatttgctttccaataagagatttttcgtgcgtttctcatcaaagaattttctc

SEQ ID NO: 7448 - DNA, 1041 bp, Cannabis sativa
tctctctctctctctctatgcatgacacaccaacaaatacatagtgtttctctttgtgtttttgcacttttttcatgagaatctctctcagtttgcatgacccaacaagttgggctacttgtgtcctggttttttgggtgaaaatgacttggcaggtcaaacaatttcttttctttttatcatttttaagagtgtgcaaccaaacttttttaaccatttcttctgtatatgattacacatcacaatttttgtttagcaaccacattaggacttgaacaagaaataacatgtaagaaatcaattcatcatttgtgacacctatctattttgaaatttctattcaactgattcataaatcaactctcaaagtcttaccttattcaagctattgttaactatctatctaaagcttcttttaaagaaacaactatctaaagaaatttattcggtcgggtaaaactaccaaatccacagatatattacacttataactttaaattacatacactcatcatttcaatttctccatccaaatctcaatacactctttgctttttttctcgctctctcacacctctcttttcacaattcactcttcttctctctcacacacacactctacttctcacatacaaaacaaacatttatatagaaaaataaatttggacaccaagatactccaaagctttctcaagaaaactcttcaaaacttagttaacaaaaaattttaaacatgttaattaataaaataaaattaagagaaatgctaaaaggtaccagtggtgcttagcaccctcctacatgttaatataactattgatgcaattaagtattgggtctcatatagtttaatgtaataatttttagagagtatcgttagtaaatcgcaagacgacacgtctagaaggtgttaagcactattggtgtccaataacaatgttctaaaataaatttgagtcaaagttcaacaatctccacattaactcaaattctctaaactcacaactaaaatcattcagttcatactctcattgaacctca

SEQ ID NO: 7449 - DNA, 767 bp, Cannabis sativa
tagcaacagggaaatgggtgaggaaacataaaagctagcaaaatctaaagtagtcccattaggatccaatacgggtatgaaaagataaacggtgcagattaaatctccacaggctattggacaaaaatggaatagtacaaaaggaagttaggtctcaactacaagttgatttgttacaggtttcggccgtttagctttccatgtggaatctacaaatcgaattaatccttttaccgaattatccttttcccaatatcataatacctgatttttaaatataaaattgagtgaaaaagaacaaagaaaatagatgatagggtttgagggtttcatatatagtgacaggcacgtactgaacaagaagaattgctctccacatattctttcacgtcagggcacataccctaagacctaaattctgaccattcatttcagagggctaaactgtaaaacccctaaatgaagggcacaaaccaagaaaaaagaaataaagggcacaaagaccaagagaagagagcgtagtacagtaatttttgttgttcttttctttctctgaaagacgtcaggttagggtttggggaaggagaaaatggggaattcagaaagaaaatgggatgaggaaggcaattgtcaattgggctttcaacaaagacagaatctgcatgtgcagctgctactttggcgccgttaaagctttttcttaaacgtctctttcacatgcatttgtcacatagtagtacccttgaaacaatttacaatatattttt

SEQ ID NO: 7450 - DNA, 1414 bp, Cannabis sativa
atataatacactttgacaacatatacaaatattatatacattattatacacataaatttttcatcttctaatgacaaattcatgtcgccttttcaagtgcaatatactgattgttaggaatgtaccctcttttgtccaagctttgtgcgatttaaaaaatgcttgaattgtaggttactctactcaaatatatatgctccaattaataataaataattctatttacacttcacaaaatgataagtacactataatattttttaaaaattaagtttaaaataactttaaatataattacttaaaattttaaattttaaaagtattcatacattatttgttgaacaacagagcacgtgaaaaacttaattatttttttattgaaaaaataattacaccaaaatttgaatattttaacttaacgacaatacacaccaagcacttactttttattaactagacattcatacttaaagacttacttgcatactatttgatgggacactcttttaaaaatttgttgaaacttagttgaacacactatgacacacttcacttgtacactcaagttattactcaactaaccatacaccaccaccaaaggatcaactctcctatttatactactcaaatgtggtggattaatgtgctagaatattctagcaaattgtcaatttattatagactaaaaatttcttgaaactgatcttatgaatattaattctatataattttagatggttttataattttatcaaaatgatagaaaattctagatacttgtagaggaggtgttgatgttttaacactccccatcaacaccgactcatcatactgagttggtctctgagttactaaagttttgcagtgttgagtcttttagtgaacaggtctgctacttggtttttgctcttaatttggtgcatctcttctcagagtactttctctctaagaaagtgataatgcatctccacatgttttgttcatgcatgaaagactgaattttcagctagacgaatagcaaactcattgtcacaataaagtggcactgcataatttgtaaattggtgtagatgcttcatcaattgcatcaaccacgtactctcttaagctgcgattgttgctgctctgtattccgcttatgtggttgacaatgacactgttagtttcctcttactacatcaagatactactctagatccaagcttgaatacatacccagtagttgatcgtcgggtatcatgatctcctacataattagcaccacagtagccaacaatcttaacctcgtcacctttcttatagaaaaaaccatagttaatggtatctttgacgtacctcagtattcatcgtactactttcaatgcaaatttttcggttgttgtatatatatcgactcactacaacaattacataa

SEQ ID NO: 7451 - DNA, 718 bp, Cannabis sativa
aacatgcttggaatctatgtaagatactttactatttatagctctattgtttaggccaaaggaggttctctgcttaaattacctccggttaagtgttatcattcagtgagttttattttttgatgtactgaaagagctgtccctttttatgtcatatcctctcatttcgctccttcctgctgtgttgttatacaggtggtccgaaggcggcatgtgtaggctgtgctggctttgctgcattctcagtcgttatagagaagttcttggataggcatgattaagtgggattcttgctccaattttgcagacactgattaaggacgaaccatacgccatcgagtcagctagttacagaatatttattttgattcaatcctcaaatagattttttccatcccaactgatgaagggatagcaactacaaatagagcatactaacttaaatggtttttgtacaatttatttttcacacatattgttttcacccgagcctcatgggagatttgagtgagtgacataagaaacttgcagcttgctacttttgaataaaatagtgaaatgtgccctttcatacttcttcgaactttagttgttgtgttaactgttttttagttctttttttaagaagaatattgactcatttcaattataagtggcaaaaaaaggactcaaaacaatcatataacaatactcaaaacgattgcaaatgacttaaaac

SEQ ID NO: 7452 - DNA, 938 bp, Cannabis sativa
actctgggtggtagggagaataggcattcaatcagttaaatgttgtacctgtatagcttcagatataaatgcagcaacgcttcctgaagttccgaagtcaataatttcttggacatctctagcatacttctctccatctgaaccaaaaacacctctataggggtctgggttttgagcatgatgaactccactctgtaagtaaaacagtcaaatagcgaacgatgttagtcatctctagttttgggtccagcataatcttctaaaaatatacaagcaaaagcagaatgcaagttagctattattagtgttgtgaatcaacaccccttaatcaagaacaagaacagaaaattaagcaatctaaaacaagaattcaataaccaaatcaatgaataaaacagtgcaggaagcagaacaccagaaaattgagtagactgaacaatgaaacaatgagtttcatgatcagatctactatgaacaaagaagaagcttttattgctgaactttcagtacaaaaccagagatagagccatggatcgagcaccctaaactagcctaactaggattacagatttatctcatttgagggaagctatttaaagaataaacattcgcttttacaaccctccaagaacactcaatctctcttgaattctctctgttacaaaatttaagtcccgactcgagtgtaagtgattattgctacttatagatgttggttaggacagttactaacagaattatttagttgcgatgatgatgtgtcaaagttgtatttctgtagtgacttaatataacaattagtgtatgggtagataactaatcactaatgaagatagggatagttcacactctttatcagatggaatcttaaagaatagggaacccaacaagcatctctatacggcaaacatgagaaaatgattattgggcactgatac

SEQ ID NO: 7453 - DNA, 1571 bp, Cannabis sativa
tattgcctattttattacttctgtcacaacaatatgtatccagacttaattgttgaaagagcaacaacagattgctgctgaacattccaacttatggatcattcttcaatttgaaaatggtatgcagaggttgacttcctgttgcatgcttatgtctccaacatagtcagcgttactatacccttctatccaagtactcctgatttgtttcttgtagatcaatttcacatttgatgtgtatagcaaatatttaaaagttcacttcatgggaagccaatattctttttcttgatttgccatatatttgctcaaaacactcataacttgtgccaactcaggtcttgtgcacactattaaatacatttatgatctaactgcattagagtacgggacattactcatctgttcaacttccttctctgacttgggacatattgtagcttggacaacctgtgttgactggtgattggctgcttggtaggttttgcatctctcatagagaatttatctatgagtttttcaatgtaaactgtttgatgagtatgagttcccccttttcccttttcttttgatgttcattccaagaattttggttgcaactcctaagtcccttcatctcaaaatctgtctttaacaaattctttaagttttcaatctttttcttcattctgcttattaacaacatgacatctacatacaacaggaggtatgtgagttcctaggcctttgagatacaaacatgtatcataataacttttgacaaggccatgttgggtcatgaatgagtcaaaatttttattacaatgatctttctaacttgcacacttaatgctctttgtcttttttcacaaagcctttgggttgatccatgtaaatatcttcctgttacactatgaaatagtgtagaggtttattagtaatttacaaagggtgtgaatcactataaatatgaattgtatagctattatgggatagggaaggagtaaatagaactttggttcaattgagagattggcactgtctcgaagagtgcatttcggagatttgtcctgtcttgaagaggacccgtatctatcattggtgctttcattgagagaatctcagctagagatttcagagctccgcaatatgactgacgaagagcttcgtgagttcgtaagatcaatgattagatctgtggagttgcgtacaaacgccatgtttgagagccacgacttttcgactgcgacactgttggattcctcagcttaggcaccacctatttcaccggaggtcaaaaatatcattgatagttccgaggaaccagtgagcatcatgaagccaatggcgaagcctcttcatctcctcttcagcaaaatttctaatggatctgatccagaaagatcgcaatcaattttgattcgatctacggtgacggcggcagctcaaagatcattgaagtcggagaagacacctctggcttcgttggaggttttaattctgatgattttgccacttccagatcactcggctggtataccgattcatagtccttctgcgtcaatggaagcggctcggaggatgctaatgcc

SEQ ID NO: 7454 - DNA, 539 bp, Cannabis sativa
aaacaaataatgtcgtctaggggtaaaaattaggacccgcagccaggttgaccatgtgctaggccatttccaagaagttttttttagaagtcttttgggcatattctctgattccatcaacggcaatatagtcatctagtggaaaaaaatatgacccaacgcctaggttgacacctgtgactgggctcagcacctaggttgacattttatcaacaagggttatttccattcattttcctgaagaaaaaaaagtattttgggagcaaacgagatttcaagggagtcagaacaaggccctagtgcctaagttaacatgcaacttggttcacatatatttgctttggaaattcttcttaaaatggtcaaaaatgggctaggagatctctctcccaatctctaattaaaagtatcaaacaagtccccggagggaacttaggaagcattcaacagccaagtacatgacctagtggactagattcaattctgtttcgagctttcaactatttttttcataaaaaagagagctacaacttttgaaa

SEQ ID NO: 7455 - DNA, 586 bp, Cannabis sativa
ctgaaattgatatttgtttttttttattcatatatataccctttgctataattgttgttattttaaaaataaaataaaattgtcccccattatttttttcttctagaaaaatacaaaaatatattctctcatattttcttcctaccacattattaacgtgtaaatttggtttcttgtttatttgtcctaagtaaacaggtttaattagtttttaaggatttgtttaattaatataagttcaatagtttaatatatgtttttatatataaaaaacaagactataatatttatattcaaaagtccaaactgagctgacatataaaatagtcttaaatttaaaagttaagttgataaataatatttttttaaaaaaaattaacaaaatgaacaaatataataaattaactaataaaaattataaaaatacatttattatatattattttttaaaaaaaatatataataattaaattaagttataattttttttttagtattgcataataagatattataacaaaagcgaataaacatattaaatcattaaatatatataacaatgtttaatatatcgtatcactgaaaa

SEQ ID NO: 7456 - DNA, 1192 bp, Cannabis sativa
tctgaatttacgtctcgatcgaaccaactatgtgtattggagatctcaagtcctttctacagctcgtgcatatcagcttgaaggttttctcacaggatctcatcctcgacctccataacaattctagatactcgtgataccacaagaatggtgccaaatcctgcctttaaagattggatgcgtctggatcaatttctcatgagctggctctttaattcgatttctgaacatatgttaggacatgtcattcgatgtgtctcgtctgctgaactttggaatgtattgagtcaactcttctccaacacatctcgagcaagaattcttcaactcacaggcatgcttcaatcaacaaagaaaggctctacacctgtcgacgagtacatttttaagatgagatgccttgctgatgctttaatggtagcaagacaacaaatttctgatgatgaactcatcctctacattcttacaggattaggtaatgaatatgactctgttattattactctcacttcaaaagatgtcattaccttgcaggatgttcaattcttgcttcaaactcaagaactttgacttgagcaacaacaatcccctactgtcttggatcttcacaatctaacaaccaactatgcctctaagaaaagcacatctgcatctgtcaattctggaaataaaaattgaggtcgaggtgctcatcgtggtagaggtggtaggacaccaaataataatcgaggaggaaactgatcaatatgtcaagtttgtggtaaatctggccacactgcaatcaaatgctatcaaagatttgatctgagttatcaaggagaaggcaattcaaacccaaccgaacctgcttcagatgatcctcaagctcttcttgcatctgcaacaattgctactgatccccaatggtacctggatagtggagcatcgtaccatgttgtggctgatgcaactaaactaaatgaggcaatcaattacaaaggcaaaggagaattggtagtaggtaatggtgcttcctttcccattcttgctattggttcttgttctatatccacacctaaaccattatatctacacaaagtgttacatgttccttccatacataaaaatctcattagtgtctcacaattcactcttgataatgatatccatatcttgtttgactttaatcattgttttgtcttggataaggtca

SEQ ID NO: 7457 - DNA, 1051 bp, Cannabis sativa
catcatatccagtaactagttcaatgctatccagctttcatcgcccaaggatttaggcaatggtatgagcatctgattttgaaaacgatgactcccaaaactaaagtatacattctaattcagagcaaaatgaaatatataaatatatatattaatatcctactcattgcaagaatatattctcttttttcacttttttcctttttttatgagagcttatgacttttttaccatagaatttttcaagactcctttttctatatttatcatgattataagaggtggacaaaacaactccccaaataatcaataagtgaaagaaagagagctcataataataaggctgcttggatattggtaaaaatgataggtgtgggaatctaattatatatactcgttttccaaaggttacataattacaaattcactaaactttattttttattttctgatgtatattttatatgactttatacgagcatggtacccaagaagaaagaaaaagctctatgccttttcagctgaagtccatgttctgtcatttacactgtttctcctttattcccaagacaacagaaacaatgatatgatggcgataaacttatgagacgtgcctcttcatccttttctaactttctattctcttggttcatttcttagagagggtgtactgctgcatagtgttactccaaattcgaaaactatagaacacaacaactataatggcagttaataaaaaaaataaaaaataaacttataatggctgtagaaattaagagggaattttttttaaagaaagctaaacataattctaactgtttttatccaactcagaaactctatttacatcccctcaaatgaattggtgtggacacaaattttacttttgattttaaatagagaaaaggttctgttgacagagcctttgttaaaatttttgtagcttgatcaagaactcgaacatatttaatggagatttgtttgtcaatgatttgatcgaaatggagatcaattttaatatgttttgaccttgcatgaaaaatagggttgg

SEQ ID NO: 7458 - DNA, 673 bp, Cannabis sativa
atggaagttagcagcactggagcacctgcagagccacctggtctggcagcatcagccaaccatacacttaaacaaaactcttcacattttcttaaccacggccaccatcaccaccaaggaagttttccttcaaaatcccttgtcataatcatcatatccatcttctcagttgtggtccttcttgccatttttctcattatattactgctcaaacgactcaaatcagccaaaaaaagcaatgacctttacaaagaatgtaatagcatcaaccatgaaagtggcagttttattgctcaaactgccataaacttcaactcaagcccaggtaagtacctttcctttcacaacttttataccatctctatactttccttgattagagaaataatgcgcatgggaagatcccaaattggtagataaaattaaattactccattgttttcaagtgtgatgattattattattaccattccttttttttgctaagtattattattaccattccttatttctcaatacaaaacatgtagtatggaccacaagtgagtgataaaggaaacacctttactctcctattaaggaaacccatatttctaaattagaaaaaggcctcaacttttttccttatttgatatgttccgttcatttcactacggatttctgatctgggtat

SEQ ID NO: 7459 - DNA, 851 bp, Cannabis sativa
tcaataatattttgttgtaaatgtggacaaattaaacgtgtagcattacataatccctctgaagaactaagattttgaataagaataattaggcaattcggttttaatattaattcatgaggcggaattccattgggagttaaagtgttcaaaaattcttcttgaaatgattgttcacttgtatctaaagtttcatcaaaactataatatttagtagggtctcctggaaattgatgcattaataaattatttatttcatcaacatagtcattttttggtgttaaaattactcgattaaccatgacgtccaaattatgatcatatttgtttatatttggaaaaacagaagctattaaattttgcagtgatacattttcattttcgtatggaataattatattttttggtattttaatgttctcattttcatattgcctttctattccataaccaattcgtacaagaaagcttgaaaatccataatctttgcatgctctcatgttgatagttaaatgtatttttataaataatggccataaataagaatttgctaaacttgtatttattatttcttctttttttgctcctgggataactggcaagacctaacgaaaatctccaccaaaaataactactttacctccaaaaggcaaattacagtcatttatatcttctaatgtagtatctaatgcttcaaacgtatatttattcatcattggagcttcatcccatattataacttttggtaatggtaataattttgctaagccttattgtttagtaatattgcatgaactattatgatttatttcaaatagtagtttaaatcttgaatgagttgtacgtctgct

SEQ ID NO: 7460 - DNA, 1250 bp, Cannabis sativa
tttggacataatttgtaggttccttttctagatcagctgttagccatgaaagtggggcaaaaacaggattagctggtgttgttacaggaatcgtaatggggtgtgctcttctgtttttgactccattgtttaaatacataccccaggttttgttctgtgataatgattttatttcttgacacatgatatattattggccatgttttatagcatctccaattcatctctttataacattgatggttcaaaacttcaaatagtatttttccttgttttattatcataattttgtcttgccatgggcagttgcaaatttacaaaacactgaggttattttaccctttctattcgttcaaagcttgtatgtttcttgttttatcaatttaatcaaaacactaactgttacttttgcattctcttccagtgtgcccttgctgctattgtgatctcagctgttatgggtctggtgagttttgtaccatttcacaagatgtagtttgcggtgtctgattagtgtcaagaaaatatgctacatttgatttttgttttaagatccatcatttaagtctacttctgggcttagcctccttagatggtggttctcacatactattttagctttatttgaaaggaaatttgagctaagaaaagcattatttgcataatatttgtatagactgtgctttcatgtaacccattatggaagtatgagataggtggggatcctagtttcaaaataaataaataataaaaataaaaattatggatgtatcagactacttagactgtaattgttacattacctatattcatcttgaaatttggagaggctttggtattttgcagttgcagttttttttttcgtgcaatgtacatatatagtttcggaaaagttcagcaattaattatgattctttctgctgacaattatttacctcatccttctgatatctaggtggattttgaggaggctatctttttatggcgtgtagataaaaaagattttcttctttggataattactagtactacaaccttgtttcttggtattgagattggtgtccttattggggtgagtactccaaacggttatattagaacatagagatacaaataattgcctacttgcctacgcaaacaagaaaagttattgaatcaaaatattgaaagttatgttggctaacatcatttctgatagaatacatttgccagaatataatatgtcttttaagttctgaatgtttggacta

SEQ ID NO: 7461 - DNA, 745 bp, Cannabis sativa
agtggcaactttattaatcaaagagaatcacacattacacaataaaaacaaaatcagccaaagcatttttctcactgaatatgtgaactaggaagaaacaagaaccacatgcaacataatgtatagccttatttacagtaagtttaacaaaacaaaacttgacattagctagaagagcaagaaagcttagactatctctattctctaataggaaatgtaaaaattgtgcaatatttgacacaaaaagtaattttttagaaatttataccaaattttagttttgtgctccaatgcacaattgtaaaatttaatatttaattaatatttttttaaaaataaataaaatctaataactttataattaattgctttataatttaatttgatatttaactatattaataaaataatagaaatgatataaatgtaatgaaaaaaatagtgcatttattgtggtgtaaattttacatcataacaaatcttgtgtcaaatttagcacaaaatttgttatgtgctaaatttatatcactctatgacataccattggagcatattttttgttaaataagttatattttaacttttcaccatttatttacactttcaattgaaccaattgaagatgctcttataattttgaacaattaaaccaaaagatgaaggcatgaaaactgaactattaattgcttgaaaaactactaaacattaattcttaaaatactgatttggagagaggatgaaaatg

SEQ ID NO: 7462 - DNA, 2165 bp, Cannabis sativa
attgataatctataaaattagaggggttcgtaaaatacgtaattcaatttaatcaaatttaatttctaatgtatggattggattgtaatggattaaaaaattttaaatttgtacttgtagggatgaaattttgattgacatgtaaaagtaaccgattgaattcaattcatgtattaatatatttttaaaaaatatatgtatacaattaatattttaataaaaaaaaatagtaatttaatattttaaaacttattagtttagatgtatattatcattattatttatatgaaaaatataatcaaaaataaagttaaatatttttttataaatgtaaatttttttaaaaaaaacaattgtaattttttattttaatttgttgttaagatataaaacaacaataatttattttattttgccattaattatacgaagaacaaaatatttttttaataaataatacaatattaaaaagtaactaatttaaataaccaatttaatttgtacttttgtatattggggagatttaattaacgcaaatcaaatacattataaattgctgattaaattaaacaaacagccttatataaaatgattgagaggaacatgttttaattgtaggaggatcatgtgggttatattatatttttggtaaaatcaataggatgtgacggaagccaatacgtagtgatagtgtctaagtgtgtattttttgtatgtagtgttatgttttgttgtgttgtagtagttacaaaatcgataaaccatattggtgtttttattcttcattacgtaggcgatggctaatcaattaaggtttagatctagagagtgagaagctttactaattaattaagattatagtatattgattcaagattattgtaggtgacgaaagcaaatacgtaggtgttatatatttgcagattgttatttacaactttaatgttaaggaattgggtgaagttttctggctgctaccaataaaattgaggtataagaatatagaaatggtaataggaatagaataaaatttaaaatgcataaacaaaattgataaataaattattaatttttttttcatcatgcattggaatagtttttctttctatttcaaaatggaatagtcattccactaaaatgatggaaagaccattccattgaaattacatttcaatactttaatatgcaaccaaacaaaggaataaaatgaaaattgattcctttctattccaccccatttcattacctctaaccaaacgcaacctaaaatattatattgtattccttctttttcatgcattacttaaaattttgaatttgtacataatagatttaatgatttttttttacaataaaagtaccctaatattggtaaaattgtaactatcattttaagtgtcttaaatttaaaatcaaacttaacttttaaattggttgaaagaaaatttgaaaataactaaaatattttcgtttaaactcaatgattagaacttttagtaaactgtaaattggttgaaagaaaatttagaaataactgacaccattcaattggttttgtaacttttgtttacctttctctcaatcaaggttaattgttatcccatttttttttaaataaaatatcaattttattgaattaatattcagaatacaaaatagtttgaagttcaataaaaatgttatgcccaagaatgctacgaccaaatagctatcgaacatacctagctatatagtaagtaactcgatttactgatcgtctaacaaaacaaagatgaacgagcatgcctagcaacatagtgggcactgggcaactcaatttgtttgcctttctctcaatcaaggttaattgttatcccattttaataattggataaatacaaagttttgtttgatctatcaaaaaccaaaaaaacgataattgctttgataagtcattacataatatgttgtttccactggaagtccacccttagcgttagaggtccaaatatgtaagtgaaaacatgaagaatattgaaacgacaaaaaagatagccaaaggtcactgatactacaattcgaccagagaagcatcgtcgaccatatatttatctctgaaacgacaataaaggatacccatagttaaaaccaaatatacaatgacaatcaatatgctgataaaaaat

SEQ ID NO: 7463 - DNA, 749 bp, Cannabis sativa
gttttcagacatttcttcataaacagcaagtgcagaattagcatcgccttccttgataaacccgtctataatgctattataggtcatggaaataggaataaatcccatctcaatatatttcttcaacatgtcctttgcttcagatgttctaccaactttgcacaagccattaatgatagtgttgtatgtgaaatctgtgggggctatattacttgctttcatttgatcgaaaagatcaaaggctcgttcggcatcacctttactaaaatacccatcaatcaagacggaataagtgatcacatttggctttaaattcttttcaagcatctccttaaagaggttatgtgccacatccattgcccctcttctgcaatggccaagtatcattatgttataagatactacattaggtaccattcccttactactcatactatcccatattccacaagcttcatttactctgcctttattacaaagccaacataaaaggttattccatgtgaacatgttagcaacaccacactcaacagcctcatcaaacaacttcaaagcatcttcatacgaaccgaattccaaaaccccgcgtaacaaagaattcactacatagacatttggttcgatacctatgcgtttcatttggttgtaaagctcataagccttctcaatctttccaatcttagaacaccactctatcatgattgcataagtaaccttgtttggaatcaagccgtgctcgttgagattat

SEQ ID NO: 7464 - DNA, 514 bp, Cannabis sativa
tttctcataaatgtattatagggtacatgtactagagatcaaaaatctatgatatagagaaatatagtattgtaaaggaacctataatgtcaacaatactattggcaaaaagcaaaaaaaatatccttatttaattaaaagtggaatcaaaactaaatttctcttaaaaatatgaacaaagaaagtattgcttaagataatcttaactctaaactgtaatttaagaataaatttatcaacatagataaggtcaactccaacatcatcgcgcccactttaagctttgactccctataacttgactgctgttagctcttggttgcgcttgtttcttttctaatcaagttttataaaaccgtaacagtttgttctccgatatctcgatttttcaccaaaaaaaaaaacacttgacattatattgtaatttgacttactattgttattcttctgtttattcgtatgatccttgtcattaccattttctatttagaagcatacttatttttattcttga

SEQ ID NO: 7465 - DNA, 1855 bp, Cannabis sativa
tttacttcaacaattgttaccccagccgttataacagcctcagcaactccttaaacaaatggctcatcaattttaaaaatttcaaatgttttagacattcatgcagatgatgtcacagtcgtcgtcgccaaatatcccacaagtaatgatgcagatgatgatgcagtcacctcagacatctcaaatcccacagtctcggatgtcacaagtgatgccgacgcaacaaatgtcacagatgtcgcaaacttttcagatgatgttgacactacaagggcaacaatatgggcagcaaacatcacatatgcccacaccacatgggcaacagactgatcagacgatgacaagttcgcagatgcctccatactacccacagatgtcgaatgttcctcaaccgcagattccgagaaatgctaacgatgatgatgatggtgacgatgcaagaacaaatgtcttttagtatttttattttagttatatgaactattacttttatgtttattaatggtttatgaatattcaatttagtaagaattatctttatttaaggatattgttatatttgacttttgatatttgatataaaaatatttagtttggcgttatgtttcacttttaatttaattattttgtttatttttaattaaaaaatatttaataaaatttgattagtgaaaaaattaatatttaataaaaattatttttttatttatatattttttaaaataaataaatcaacggcgaatgacaaaaaattcgtcattaatagacttacggattaaaaaataaaaaaaaattgcttctttttgccaacgacaaagtcgttggtaattatttttatcaccgacgactttaaatgttgccagtgtaatctatcaccaacgaggtatcaccatcgacttcatactgaagacatgtcaccaatgatattcattactaacgaaatatccaccttttactcatgaaatttatcctcattaaaaggcatgattctagtagtgttgaaagaactccatagttaagaatacttaatttgacataatttcaagataaaaagcatgtgattaaggacaaaatataccgaaaatatttgtgttgattaatagaaccaataagtaaaacatacaacatatatctatattttttttctttatgaaagctatactagtacatggattgtgtggaataatatattataaaaaactttttcctcatatatatatggtttgataactgaattgttataaaattgaatccaacatatccaaaagtttaggaaaactatttttaatttttgataaaaagaagtgtaatgaccgcattttagattatggattagtaaaagcaactagtgctaattattaacatttttataattacgcacgaatttattatattgtgggtcccatttttagaaatgggcactagagttataatttctcgattccaaaaattttattaaactatatggatattatttgttgtatatatgaattatgcaattttttatgattttcgctcggtaatgacggaaaatgcgatggatggccgttagagtcacatgggtaagtctagaacctttttcttagtgggataaatatttgagatgaatagaataccgagtttgaggagggttatagtttttgacattttacccctaggcttgaattagcgtaagtttaagcgtcaagggcattttggtcattttattagtgaaatgtggtggctgtttggaagcttgacagttggctttttatacttcaactcagcctaggtttatccaataatttgtgaaattaaaaattaaagaaaaaggaaagaaaaacctaatttcctacatttctctctctctctctct

SEQ ID NO: 7466 - DNA, 705 bp, Cannabis sativa
ggtcctgtatttccggtttttaatcgcgatcttttatccgcctattacgatgaccgacggcgagatcgattaggcgacggcgacggcgacggagatgaaatttctggtcctccgtcgtgttcgtcttctgaggctgacgaattagacggaattccttcgggaacttactgtgtctggactcccaagggagctccgccgactccagggagatgcagaaagagcaaatctaccggatcttcatcgaagcggtggagtttcagagaattgcttcgtcgatgtaatagcgacggtaaggaatcttcgtttgtgttcttaactccgtcatcgagctcgaaacagaaggttgaagagaaaattggtcatgagaagataacgtccgttgcttccgccgttaatagagacggaagaagctcgggtagcggcagtagtaatgaaaagggtaagattagcacggccgtgaaatcgaagggtgcggcgttggcggtggggaaggcagtggggaacaataagatgatagcggctcatgaggtgttttatgtgagaaacagagaattgaatcgaaacgcagagaaaagacggtcgtttcttccgtacaggcaagacttggttggtttctttgctaatgtcaatactatgggaagaagtttccctcctttctgatcatcttcatcacttactctcaaacacagtttttttttttttttt

SEQ ID NO: 7467 - DNA, 1366 bp, Cannabis sativa
cacgttgtatcaactcttcaattttgaccttaagatgtttgcactcttctatgagatgtccagcatttttgttgaagcgacaatacttgtttgggtccctctaggctctttcttttttcaagggtggcggcctcttgaaaggcacttgatgctcattagtgaggaagatgtgctccctttagtgggttagttttgttgtgggtatatttgagaggcagtggctccaattctctcttggctttcttgtcttgtctgtcatccttgtatttgaaccccctctttttatgcgacccttcagcttgacccttcctaggatgttcatctttcccagctcctaagttctcatgcccatcttctactaagatgtatctactggctctttcatagaagtcttcaaggtcatcgaacttcctcttgagtatgttgttccatagcttgcttcttggtctaacccctacagcattagccattttatgctcatccttagacaatctccccaccttagttgcttcagcatcaaagtgctggatgtagcttttaaagctctcagtttccccttgcttgatattggccaggcttgtcctcgggacgacataatcttgggaggcactatgttgggacaagaaatcattattgaactgtctccataaagttattaatccaggggccaatctcttgaaccatttgtaagtcacgccccagagcgtcatctcgaagcactggtacctcgctttactcatgacccttttcattttcataattttgttgaaagcatctaagtgatactttggataggtgattcctttgtatggtgatatgttaggctctttgaaattgggggatagctgttcatactggatttctcttgaaaagggcgactcatcatcaaactcatcttcatcccagctgccctcctctaatgcagttgtggctatccttcagcagaggtgtaccatctccctgtcaagcagttgtctcttcttgttcaacttttctcgaaggtcctgcaatgtcagtcttggaccttctttatggttgtgcgttgccgatgagggtaccttcttctcaataattgtttattggttgagtttctccctcaagtctcccagggatacctttgagttatttttcttccgctgcaacaatggttccaggtttctccgagatttttgcctttgacggtgatgcctccgatgtgttactggttgagtattttgacagcccctcgtcctctggtctgcccttaccctttttagtgacttcaggtgccctatgtttgaataagggtgcgccggagtgcccctgcaaaagctcatctaggaccttttgcatgttcgccacggtctcttccaaccataagttattc

SEQ ID NO: 7468 - DNA, 2011 bp, Cannabis sativa
  modified_base (906)..(909): a, c, t, g, unknown or other
tcattttattctttttttttttgtgctcggtactattttagtatataaatccttttatatatttaggagtttattttatttttacacttcaaaatagtttttttttttagtagttttaccgaaatccacataacaactaacaaagtaatctaaatcacaacccaaagctacatatcaactcatagaaaccaccagagcaatccaaaccataaaaataataaaaaaagatttaaaaaaatattatatgaagtgattctcgtataatttataatctaaatgtgtgactatatatacattattataaaataacatatatatatatataatatctcatcagagcctaaaatgggatagagcagaagttgttccaaggcctttcgagttgaagtgagcaacaaactctttaatggtggtctctctatacttgggaggattatcttcgcttaacaattccttaattggaccatactttaaagacgattccatatctgtcctaaaaaagcaagcaacagatactcgaggaccgtcgtgatttgccactactctatgctcaacacttttcaacatgtcattcgatacaagctacaaaacccaacaattgattattattgcttataagaatataattttttaggttaattaggatttttgtcccctgaactttgatatgtatcaaatcatgccccttgaacttttaagttcgttaaaaatgcccctgaactattgagattgttagaatatttaaagacttttttccaattttagtaaaaaagtctaacatggatgaaaatctaagggccatgatttagaacatgtcaaaattcgaggggcatgatttggtagatatcaaagtctggagagcatgacttagtatataaacaatcactgaaatagtaaaattgaatnnnnttagacaaaagtccttaaatccagcaatttcaatagtgcatggggcatttttaacgaccttaaaagtttagggggcatgatttggtacatgtcaaagtttatggggcaaaaatcctaattagccaattttttattatgacatagatctagtgtcgcaatcaagtaccattgttgttttaattcagagtagtgtacaaaatattattgtaaattattctgaatgaaacaacactaatactaaagtgacactatatctaaaactcgaaattttatacatatatagaaagatgtcataagtcattttttatgacatacctgtagcaagtcgccaatgttaataaccaaagctccgggaataggaggaacatcgatccaacgattctgatgaagaacttgcaaaccaccaattacgcggtcaagtagaagaattgtaaagaaatcaccatcggcgtgcttgcttgttcccatagttagttctggctccggacaaggtggataataatggcacaaaacgtccaatccttgagcgcattccatgtcttttaagtaatttttgttgactccaagagcttcagatagtaactccaacaacacaattcctagtttcatcacctcatttgagtactccaatagtatatctctattaattacaatatagggtcacataagcataatgtaaatagggattatatatactttccaatcaatttaagcctagctaattaatacaaaatggtgtgatgaaataaaatctgttaagatcaatataattactatattaccctctttatttacaatactaaaaaaagtaccctagcatcatctaatatatcatatcattattttataaaatatcattaactattcataagactctaaatattaataaacccttttaagttcatgtaccagacaaatgactcataataaaaaaagattaatttttttatttgttttgtctaacttctgactctgttttgcctcttctcctttctttatttttctcttattacatcacaaagtacattaaatctaaacttaaatacataaaaccactcaatttaaaccaaaaaaaaagtaaataaaatatagtgtaatacct

SEQ ID NO: 7469 - DNA, 1021 bp, Cannabis sativa
  modified_base (717)..(721): a, c, t, g, unknown or other
ataataataataataataagtatcaaattatagggcacagagagattcctagatttaagtttatatgaattaaatcctaatcttcatccccttgattgattaattattaactaataagagcttgttgcttaggatggtattacttccttaattaacttattatatgggcaaattacaagggaaatgttatttattctttaatatgataattatatactaaagtaataataaataaaaaactcttcagaattttttttatgataactaagttgatacttgatacgatatcacataaatttagcaaaaagttattgtataataatttttcaaagcaaaaatcttgaatatatatgttattctcttttgtcttgtacctcacaatataatttttgagtgtgcggcacaataatattatacatttttatgaaggtagattctctttatttggacactaaatttttactctcataacctaactttatggtacctcatcagaataaactatcatattatataaatcaacttatccaaactcatcatattccccttggatatattttggtttatcttgaataaatttcagcatatgtttgcgttagaaaagcatggagatcatcaatacagatacaattttttttttacttttaaaagaaaaatactgttcacataaaaaaaaataattttttttctttttacacttgaaaataattttttttnnnnntttttttttatttttatagaattttatacaccttatagtaacggatcatgattttcaaagtaataaaaaaaaatagtttttttcggtttagaatagataaacatgaaagtataaaaaggaaaaaatctccaataaaacatctacaagtatatacccacatttctatagactatataatagttagataataaaagtataatctaatttaacgtaagggtaaaattgtcttaaaaattatcacatgattatgtcatttttataatagttagataggtgtaaaaaaattgaaaaaataaaaat

SEQ ID NO: 7470 - DNA, 1361 bp, Cannabis sativa
gggcataaaacccaacagctatatatatataattagggatatggcaattatacctacaagtttaggtatctgcgggtatccacccctaatgggacgggggcaggggtcaaattttggcagcagaggcgaatatgagtttaaatgttcatactcaagtcgagtttagggtgggagaatagatatttgccccaacctgtcctgatatgatatatgtatatatttaaattttaaaatcttaactattacaattaaaataacttcatgttttaagttttttattgattacaatatgagacatttcagtttttcataaatacagcgatgcatattaataatcacacttaactgctttaaaaaaatgacacttaaccacttatttttgattgccaactttatatttactaactccatttattatacacattatttcacttatgtttgtttttttttgaataatttttatgatatatatttttttaattctatttgagacatcatttttaaatatatatatatgtaagtgggaattctttcctcgctgactgttgtcaagaacgttcgagacttatacgcattggatgcgggttatagaatcataattaggtgtatgggtgcctagttacatttcagttttatgtttatgttttatgcttctcttattgagtcagttaactcacaattatgtacacatgtataggtaagggcaaagcaaatattgagtagtagtgagtctagagtcaagaagattatacatatcgggatgattaaacctgaagtgttagggtcttcagaacaatatggttcaaattttgttagtcggtgggcgacactttcatatatgtagcattttgaatatggttgtaaataaaaatgagatcccaaattatgtaactttttgtatttagtatttattaattaaaagttcaagtttatttaaaaggttttaattaatcacgttttttaataaactttttgattagcaaaggagtgcacagtaattagaaaatatagtgatgtgcctaatctatgcgttataatttggtatcagagctaccaaattatctttcaaagatcgtcaagatatgtatactcatcatcaaagataagctcgactcactatccaataagcctttacatgtttttgtaatttaaattaattttatgaataggaaagccagataggaagtatcttagtagcttgctagctgattaagagcatgttacgttctcatgtttgcgataattagtttacggttatgatcgcttcctggctaacttgacttgtgtttttgcatacatgtcctatagaatggagactcattgaaacactaggggttagggcaatatggtcgagaccagta

SEQ ID NO: 7471 - DNA, 682 bp, Cannabis sativa
aaagagacattccttgttatcagtttataatcttgaattacatgaccaagaaattctttgtaaactacttatcgcttgaacaagcatactcaatttgtttctataatcactgccgccagattctttttatctaatttagagtctcacaaactcccatcgtttcagcaacctcagaattcactactgcttgtgagaaaaaagtggagccttcaattaaaagaccattacaatctctagccattatgccaaaatcatagcttcgaccactctcaaatatagttgcgtccagactgaccttgatactattaattgatggtaaatttcaatgctccacaccatcatctatttgtaaaccaggccatgatgatccttcttgaggattttgagtatttctccattgatcacactcctttgcgttagcaacaatatttccagccgtcaccactttcttagaccaaactaatcatttttcagcatcccaaatagcccaacaaacagcagaaattatacatttgttttcagcttccaaaccagtaaaaacagccgagcaccaatctaaaaacagctgatcccaacacagttttatctcggggcaagttattaaactgtgcgcaatagcttcagtgccacggcactgggacaaaaagaactcacctttactctcttagataacagttgaatc

SEQ ID NO: 7472 - DNA, 1585 bp, Cannabis sativa
ggataaatctaggaggcgcatctgtaatcgccatttccaccaagacttttgcatattaaatacgagtcctatccttggtgaattggtccaccattatcagcttcccaagtgtgctcactaaggcactcaaacttttatttccccaatattggagacctagatcatgaagtcttatccaaagtggcacggtatgaatcaaatttagggcattcaaatctgtcgaccatggcctcactatcaccggtttgtgatcaaaatgtatcacacctgcttctacaacaaggtctcgagtagcttcgtcattaaatcgaaccattactaaccccatagtcattttggctacctgaataacccctaaatgactccaaattcttttaataaaactttcaaaaactttgataggaggattagcacccaaaactttgcaaataacagcagaattcaagcaacttacttcttctctgacttcatctacatcaagttgagcaattttgattccatccctaacccgtggttcagtgaataacaatctatgatctctgttcactctcttctctttcgtaaatgtctcccatcttgactttgttgtgttcgaattagtgtcccttgcagagctctgttccagatcctcttcaacctccattgcccaggttttatccccactgtgcgcagatcgattctcgaacagaccttgcgaatcaacaatttcagcaattaggtttagcccttcctgcgaacctgtgactccgccttcctccgccttcctccgctgcgtctccgactgactcgtcgactggggtttggatgactggctttcgtccgacttttttcctcttcgccatgggagagagaaaataggggaacgaaagagcttttatgtaaatattataatgcactttttttcatattcttttcttccctctagtgtttcaatctagacacatggatggagatcaagctaattaatcaatcgtcagagcacaagatgaacgaattgctggaatatttttgagccttaagaaaaaataaaagtcacctagaaaaatagaattttttatacctttgtatatatatatatttgtaacttttgttgtagaattttaaatcaaattttgttgcagacatacataatgtatttggaacgtataagaataaattttataatggtgttaataacttaaatttaaatgttataatgtatattttcttaattttctctaattattttttaaaaaatagagaagaaataaagcatacagattatatacaatattaattaaattaaaaaataatgaatcaataaatattttattttaaaacataattttaatattatttaaaataaatataaaagttaaatatatatagcaacacttttataattagtgttgttatatgatgttcataatgttacaacatatagcaacgcttttacaagtgttgccttatatatgcacttttagcaacactctagagacaacactcttaaaagtgttgcttattaattttctttagttaaaaaaaagtgtaattatatgtattttttgtagtagtgtagctcttaaataaaaatattcacgaaaag

SEQ ID NO: 7473 - DNA, 1140 bp, Cannabis sativa
acaaatcgaaatcggagcagttttcacacatttgaatcattacattttctctgttttatttggttcaaaatgtctatgatcattggtatttattattttgtctattgcattctctctgttttgagtggtgaaaatagtttataagtgatattaatttgaaactcaagtgcattgcctcagttgggcgcataccacattcattaacactactcaaaccagctcatagaaactcctcaatgcttgacatattttatatatgacatttaattttcagaacttgtcttatactaaatacaggggaaataatgtttgttaagccagaaagagcattttcatggatgaaatatcaacagttcaaaccacatttcagctgtataaattagttattaaaatgaaaaatgcagtgatttgttgtgtagtttcgaaataaattcgaatcaaatactgttctttctttctttctttttgctgaataacctcaaaatgcattaaatttaaactgaagtcgaaatagtagtgatcacatgaggattcacttctcaaaagctcaacaaaccatttacaaacacgaagcattactagtttctacgaatcccgacacagatagattgaaagaacaacaagtcgagtaaaaggaaaaactccaaagacagagatcgatgaggagaatggcctgaaccgggaccaagcagtctgacaacaaatcccagtcataacgatcgaaatccttagccacctttgcaccccaagtgagagctaacagttcactgtgcagcactgaactggcgcagcctgcctcgtccctcaccacgactccaatagcagccactcctttgaaatactgttgttgtacagtaactcaatgcactaatcagatcagactatacagaacataacattcatcacttgaaacataattgctcacttcccaaatcccctgccaaccaatacagtactcaatgataattgagaatgaacttgttaacatatagacagagagagagctattaaaacataaaactaactccatttactattcttacaattatagaatgtttacagttttctctttttcaccttttattacgatgaactatttttcacttctattcttatattttaggaagcgacaaaggtcac

SEQ ID NO: 7474 - DNA, 975 bp, Cannabis sativa
atacgtgtatatgctttgccaacagaaaaaagacagtaaattaaaaatacttctttattttatcaattaatcaaatttatctctaatttatatttaattgaaaaatagtttttttatatgtactgtactcaaaataccctgacataaaagtattttgaagtgacaggaaaaaaattaattcagtgtttaaaaaaagaggtaaatttgatagattttaaaaaaagtaaaaataaaagaagataatataaaagggtatagaatctaattttctcaataaatcaaatgcatgtattacttatgatggaaaaatattaaaaaaatttgagctcttatgtttactttttaaatttaattagaaaaatattttatttttatattatatggagttgttccatggactgaaaaaacaaataataattttttttcggcaaaaagaagataaaaaccaatttttggcaattttttttacaaaaatttcacttgaattatacaaattgttataaatatcttcgttctgttacattctattcatttttaaaaccaatttgctaccacaaattacaggtatagatgcaatacgatggtttatttaacaattttaagataaccaaaataacactaaacttatacaaacaattttagttctaacaatgtatatatacattcttattattcatcattaaaatgttatttttgtatttgttttttgtttgaatttttaaaattaatgtacattagtattatatcaataaattgtttaaagaactaaacagaatataactagagaaagatatttgtaacaatttttatatttcacgaggaatttatgcaagaggaacaaatcttatttattctaaataatactataaaaatagtattttccttatttattcatcagaacgtggcatttctataaactaattagtcatggtatatatgtggtatgaaaaaagagttgttatgaagaaaagcaat

SEQ ID NO: 7475 - DNA, 607 bp, Cannabis sativa
aaaggtaataacttataaaaaaaaagtgggtaagatttataaaataatttaattctaaattaattagatcatccataatcactacaaacattttcattagatagatactagatagcactacctttagatagctaattttttttaatcccttgaagagaagttgtggtgtgtttcgaattcttaacccaaataaaaaaaatacaacaaaaataatttttactactacaccatccaacacgtggaatgaaataaattttataagacacagaactcattgtcttattgccaataaatacagaagagattaattaagttctctctaatctaatcactatctcaagtcaaacgctaaaattattaaacatgttaaagaaaccatccaaagatgaaaacacaatttgtcactattcactacctatatagaatggtatccccaaaggggtgacctgagaacacaaggcgcattagccttaagtacattgcaccaacaaaaatggtaacaagtaacaaattaagcaaaaggcaaacccaccttgtgctcccaggggccacacctctgggatgtaccaaattctctcccatatgaagttgtggtgtgggtcaacaa

SEQ ID NO: 7476 - DNA, 704 bp, Cannabis sativa
ataaaataatataatataacagcattagcaatgatcgagtgcaattatgcacccaaacataaatttaaaataaaaatactaaatatactattattgttttcttgtttatatttaactacctaaaattcaacgcaattatagtttagttagtagctagcaaccattatcctaattattattggccccttcctcttgtgcctcaattattaaaaagaaaatcatctaaatgagtaagagtaaacttaaaaaatctttcctttactcaaattattaccttctcaaatagtaaaaaagattaaccaaaaataaacattctccagctgtggccaaattatttatttcgatttccatttttctttttaaatttttcctttccatttctatataaatatttatttcatattatatttcttagatgggagaggttggtagtgggatagggacccagcatccttcatctaaatccaatttgattagtacaaattatataaagtagatggattagtacaaagatgtttaaagaacctttcactaggcagagtagtcagcagataacaaaaaaatagaagtataattataacatcaataatgcataagataaattcaagtgatttttatgcaaaattaaatcagggcttttaaaacccatttattatcattaactcaagggttccattaagggacagacaaggatttatgatgat

SEQ ID NO: 7477 - DNA, 2728 bp, Cannabis sativa
cttacataacgtaaaagccatgcaattgcgagcgagatatcctttcacatgcagtgttccctagtattgcagatagacaaatatatacatcatatttattgtatgtgttggaatcagaatatgaagaaaagcaatccaagcactcttgacaagaataaacatacaatgaaagaaatgccaattattttttggcgaaacaattacagcacacttgaccatttaaaatctgcaactaaatgtatactaactcgcagagagagaaaataagaagcagcaattattctcttggtaagacatattggagttgaattgattgtgcaacataccgtaaacagaattagcatgggaatccttgattgaacgtccacgcctccaccccatcttcagcagcaactttacacctgattgaaagagaaaggagcaaaacaaatcacaatttgtactcattattatgcataaccattattaacaataagtacatgaactaaacctatggactctgtggctggaagaacaagttcatctggcacaggtccaggaatagctgacggcctgcaaaagataagcaaaccagaaaatttatcatgatggtaaatctatacaggacaataatatcaagaaaagagtaaagttacatatgaacatttttaaacaggtaaatgaaaaatcaagtaaaaaagcaagcatccatttatagacttggggtttgggtttgatatcaaattacaataatatcaaaccccattgtacatagacatgaacaaacacaacaagatcaagtgaaaaagaaaaaaaaactacaataaaattacttacaaagtttttggttttttttttttttggtaaaaaaattacttacaaagttacttacataatacatacacctaaaagatatgaatatttctatgaggcatgataattgatggaatttgagagaatgccacatgctctaatttaaatttgaatatgtggaacctgatattcaattgcaccaatcgccttttttttgtatcatgtagtgtcggtcaccttaaggtgtcatatagcaacacttaaatggcactactcaaatgtaccatgttcaccaaaaggtaaataataataatacaaagacaatacccaaatgattctcaaccagcctaactagtaactagagttcgaaaaaagttgttatctagcgaaaatgtggaggggagaaatatgtacatggtcccctttcattaacaatgcatttcagaatatgacaattcaaaacaaaaaaaaaaaaaagatatcaaattaaaatagcatgaaatactgaccaactaagtagcatggacccaagtgcagtaaatagagtacttttcaccaagtgaataaagatgtgttatagaattataaatacaaaattaccactgataagcagcctgtccataagtagtagttaggctgtttcggttagttgttgtttcagttgttggctttagttacaactggttgattgtacaagtagttgaggggcagagaagtagaggtttttagcagaaaaaaggaaggaaacttagttgttttcttcaaagaggtcaacctatcatatcaacttacccttgaattttgttggtctcaagatcaacattttctcaatgtaattcagatatgtttgtgtggttttccttgctgggttcttaccacccaccaagtgagtttaaaagcaagacccttaatctttgacagtttctaagttagcattataattaaaaaaaagttgtaaagtgattaagctactaacatgataatcagctatcagatgaccccatatataaataacgactaacctttgttgttgctctttctcagcttgttggcgagcaagttctgcagctgtaaatccaaatgtatcgaactgtgaggatgttcccaatgattgaccttccaattcctagattgaaatatgatggacaattatcaggcatacttgatttcaaatatcaaatattaaaagcaaacgtagaaatctacatttccactataatatgcttttataaaatttcattctcctttaagaaagaaataacaccttcagattgttttggctaaatttatgttgaatagacaacaataataataaagtgcaaaagacatgtgaaggcaagaggtacaactaagtcttatcctatcaatgcatttcacaataacttattagaaagtcatttacaggattcaaacctgatcacttacacactcgcccacataccacttgagctagcatcaagtggcatgcacaacagtgaaattaaacaatatcactcacataccacttgagctagcatcaagtggcaagcattttcacaatagtgaattattaaacaagaccataactgtagagacagaaaagtcactgatttcaatttctttctttcttcttttgggcaaggaaattaagtagtactcacaagcacagcatggaagtatttgattgttgattatcgtcatagtggactaatcctttttaattcttctattcaatgaagcatttaaacagataagtatatacgttaccttctactattatcagtctccacatctctagatcaaatcaaaatttagtgggattccacacattaaaattactaactcaaatgacacctttactcagtgtgtctccattcacacataattaccgcatgagttcttaagtgttggcaacacattattctgtgtggtttttctctctttcctttttcttatt

SEQ ID NO: 7478 - DNA, 604 bp, Cannabis sativa
atatattatgatgacattaaatatggaatatacatatataaataatttatggcaaaaacaatatataaacatatatttattttaatttgttgttatatatataaatataattataggtaagtggatggtatcaagaatacgaaggaattacatttgcaacatttagaggagctggtcatgcagtgccttgctttaaaccaaacaactccttagcacttttcacatcatttctcaaaggacaatctctaccctccactcgatcatgatcatgcaaaatcatccatatttatataatcatctttatgttttgtaacttcataattattaaatattaaaaaactttaaattataaataatcattaaccatcgaaataggtcaaattcaacgggcatttgaccatcgagatataaatcaatctcgaaagtctagcccgttgagtttttcttagtagtatatataattatgtacgttgtagtactatatgttataaaataaagtagaattggtaataaattatatatataatataagagattatacgtaatatcaaataattaatcattattgattatatctatatcttaatcacaagtataaatatgt

SEQ ID NO: 7479 - DNA, 929 bp, Cannabis sativa
aaaaataggtttataactagccccccctgatttttctttttttttttttttttttttgttataatacttatataataacttgtggcaaacaattataaataaattttgtaatattattaaaataaaagaaaaattttacatttcgtaccacacgagttttaagctcacataaagggtatttttcgatattgtgaatgaatattataaatagatgaatgtgatctcttatggaattgaaagaagatcataaaatgatgtgttttcttttggatttttcactaaagataattttgtagtaaaaaggtgagtgggtgaggatggaaataaacattaaagagttgtctggtcaccaccacaatagaaccacttgtaaaaatataccagaaaaattgagaaaatcaagaaaatgttgagagacttagggcccacatattgtacataggccctaggcttttgttggaaatacgttggtaggctagtcagcccaataaatttcttcgggattgggaccacatctttagattattgggttaccttgggttagaagcccggcatgtcatgtcataaatctagtaaaaaatgggcctaaatgagtgggcctggctcataacgagcctgtaggactggtccgtttctgaagccagctatttacaaaaatatatgaaaaaaaagaaagctttagcatgcaaatttaattatatcaatggtattttttttagaaaaactttaaaatatgaaataaattattataaaaaaaaaaatatcataaataacttaaaaatttatatatatatataaaaattttacttttatataatcaaaactaatttactcataaaaaaatttaaaaactcgtatataaatcttacttctatataattaaaatcaatttttttataagaaaaaactagttctggaataccatatat

SEQ ID NO: 7480 - DNA, 1088 bp, Cannabis sativa
aacatcatattcatatcaatgaagttttggtaaagagtaagatgttttccacaattcttttttcttttcttttttgtcatatgttttcattaattgaaggattgattatcatcactagtttttcatttagttggaaatagtgaaactaattatatagttataacaggtatctcatctatttttgaaaaactaaataatttaccatattaaaaatatgtatgtgtataattatgtttgaactgtatttgtcataattatgtgaaatatatgtatagaaaaaaattatagtacaccatcttataggtggtttttagtagaattcttaactagttcggtatttaagagagtttttcagtttttttttttttcatttatttatagtcgtgtacgttgtaattatttaagattatttgtaaattttaaaatgtaaatatttaatgcatgtgtataacatgcacaattattaacaaaataaatagattaaaaaattatattgttgacacagataaaacagtctatttaaacaaatttcttctctcatacaaaaaattctaatttttttcaatacagccactaaaattaaaaacaaaaaacaattttaaaaaacgtttggccaaatcttttaaaagcagttttttgaaattgagttttaaaaactagaaaacataaaatataaaaaaaaaaacattgttttctattgggatatttgaggtaaaatctctttaacatttgtaattattacatatataatcctaataaaaaataacaacaaaagtactttatcttacgattttgttgtaatcatactatattttggctgttaagtgtgaattaaattaagcctgttaacttaaaaacacgtgtcaacatatttctttagcttatttatttgacacttgatgactaaaaaaagatacaactacaataaaatcataatataaaatatttttatcgctactttttttgattaaaatcatatgtgtaactttattttttatttataatgtacatttagtaaattaaaatgcaacaaaaattaaatatacattcaaaaagataggtaacaaagatttaaatttacaaccctg

SEQ ID NO: 7481 - DNA, 713 bp, Cannabis sativa
aaagaatataatgtattttttttaaggaaaagagtacaatgtatttatttttttttagcttttttttagaacaaaataatattgttactgagcaggccagtgcccttatttattcacctgaaatgcggaaattctttctagactcaattggaagagagcctgagaaagagagataaatttagtttggtcaacgattactggaagtgctttgataaatttagtttggtcaacgagtaaacaagctagctgaagactttcatttttttcaacaaaaatattaatgagggtatgcaaagaaatctaaaagaggtgtcactttaattaagtttattagtctatcccttccggtgtactccatggagaccaccaagctctccaaagtaacagtatctaagatagctagctaggtagtatgatgcgggacttttaatggggttttgagaaaagaaactaaggaattcatcttaaaaaacttgggataaattatgtcttctcaaatctcgtgaggcatgggctttcgtaaagctaatgaaatgaaccaagcttttctaacaaagtggggctgaaatattttgaatgggtgccttgaaagctaaatatgctaggagaaagaatttcatcaactgtagctaaattggtcgaaaaaaaaaagcatacattgtctctttctatataatgttatagcactacaaacaaagtgaggcctaaaaaga

SEQ ID NO: 7482 - DNA, 870 bp, Cannabis sativa
aacgatgagtaaggaaacagaaaagctgcaggaaacgatgtggaataacttgctggccctagaagcaaaaagtcatatgtgaatacacagtgagtgggcaagaattgaagggtccacgcactccccgtttgggaatcatattctacgcgtggaaacaccacatcggtacgtagccccaaagttaccagagtatgatggaacatgcgctagtttgaacaaaaaatgcttccagtgtcagtccctttggaagatttagaggccattaagtgcaagacctttacacaaagactaagagccccactttacgatggtttaaatgcgtaccaagatttgattgtaagatttcaaacaaatttctcaataagtgttggaaccgcgaaagtagacacggacttgatgatgatacaccaggaactcgatgaacctctggaaaaattcatccatagatttagcggggagtatgtgagcattctaaagtgcaccaactcagttgcaaccaaggcattaatgcaaggattactgcatgggtcagaactgaaaaaagcaataacagtagaactgggactcaccctaacgagagccttcaccatggcacgaggatatgtggcattagaagtcaaggaaagaagacatgcaaaggacgtatcaagagagacttcatccatggaagattctttcctctttgaagcaaaggagcgagtcctaatagcacgcgtgcaacgtagaactaaaacctaacagttcaatgacaagagcatgagaggatccgtaataactaacatggcacaagtcaggcagtttaggaaccaacaatgtgaagagggactacctctgatgactatcatgctgaccgaattaatgcgacgtcta

SEQ ID NO: 7483 - DNA, 1051 bp, Cannabis sativa
aaagcccgccttgttgcaaaagggttccattagaggccgggccttgactttggaaaaagatttagcccagtggttaaagcttctactattagagtggtcctcactatagctgtctgaaacggatgggaggttagacaactcgacataagcaacactttcttaaatgggcagctagaagaagttgtttacatgagccaacctgtgggctttgaagacaagtcaaagccaaatcatgtctgcaaaacttgtgaaatctctctatgggctcaaacaggcccctcgggcctggtatgagcaactgaaacagaccctactgaactggcagtttgtgaattctcgtgcagacacatcattatttcttctcaagacacaatgacatgtcatcatgattctcatctacgttgatgacattatcatcactggaaacgacacactaaaagtaaataagttcattgacagactacataaaagctttgctttgaaagatcttggagcattaaactatttcttgggaatagaagtgttttgagatgccactgacatgtatatgtcccaaggaaagtatgtgattgaacttctaactcgtctcgacatgatcaacataaagccctgttctactcccatgacaggtgggaaaccattgtcaatacaagatggtaccgaattagaagatgcatcatagtacaaaagtgtcattggggcactgcaatacctcacacatactcgactcgacattgcctttgctgttaataaactgagtcaattcctaaggagtccaacaaccatacattggagtgctgtgaagagagttttgcgctacttaaaaggtacaatttatcatggttttcacattaaatacagtgacaaattgtctttggttgggtactgtgatgtggactgggcttgttgcccagatgacaggaagtctatagccggttattgtgtgtactttggagactctctagttgcttggtcatcaaagaagcagtccgtggtggcacgctctagtacagaatcagaatatagatccctcgcacagctcactgctgaa

SEQ ID NO: 7484 - DNA, 522 bp, Cannabis sativa
tatatatatatttatatctttatgtgaaaagtgacttatataatgaattaaataagaaaaccatataattattctctcctcattgttaggaaaatattacatattaaaagtgaccttagaacaattaaaatagattgagaaaaaatgatataaaatttaatataattaaaaattttataatttaaattaaaatagtcttttcttctaatttttttaaaaaaattataacaaaagtataaacatagttcaaatagaataattaatatttttaattatttttcgtaaaactgaataaaggaatggaataaaatgaaatactttttctatttttactataaattgctaaattaaaacattaataaacacttgctattagatgtgttcaaatagtttggtgttgcatctaaatttattgaattaatcacttgcaaatattggatgagtgatcaaaatgtgtttaggttttgtggaataaaaacctacaaaatcctaaaatgggcctcaatcttagagatgatggta

SEQ ID NO: 7485 - DNA, 1130 bp, Cannabis sativa
tttgctgtcaacaaactctcccagtttctcaaggctcctacaaatgagcactggtcaacttgcaaacgtattctttgatatcttgttggctcggttgactatggtctccacttcgtatcagctactacacttgagcttgttgcctataattatagttatttaaaatcgtgtacgttatagttatttaaaatcacctgtacattttctgaaaatttacaaaacatacacgattatgaaaaaaaattattcaaaataacttttttagatgtcaaaatagacatggagtctactaggacacccctgctttaggggtgcattcagagctgtaaatacgtatgtcttatactagcccgacccatatttttcttactttttaaaatacaggtcttgttgtgacaggccataaaaaaaatatgggtcgttttatgccatacaaaaatatcggtcgtgtcatgtcgtgcaacaattttataaggtaggtccgacacggtccgcaagcccaataatttcgtgtcgtgttcagattcgtgttgtgttttattcgtactgactcatttttcttaaatagacctacatgttttcttatacagctcaaattcatgctccatatttttgtatttttaatacaatttatgagctaattactacaatatatgtgtatttataattacttttatattttttttaacaatagttacacacaatcatacaaaaaataattataaatataagaatttaaatattaatatcattttaattgataaataaatatttatcattattattatcaaattattgagatttttaatgtattatattttcaaactaatttaatcatatttacatatcatacttttggatttgtcttaccatatcgtgtttaagctggtattttttatgacatgttatgttatttcacaacacaatatcctattatacttaaatttatattttttcgtgtcatatcgtactaagttcataattttttttttgtatgggatcataatcgtatctcgcaagctcgtatcagtttcattatgaaaagcccaagtcatatttacaccaatggtgcactaaagaaatttactaatgtaatttttttgataaaaagaaaaacaacaatgtattaa

SEQ ID NO: 7486 - DNA, 1026 bp, Cannabis sativa
gggctagtctattcgtgttgatgtgtcgtaccttcaaacttgtcgttatttagctcattttttgtgcaaatgtcattctaatttacagtatcgtgtcttgttgtgccaaaacttcttattttttgttctataagtcgttcccatatctttcaggcttatgctgatttcttatatatcgtgttaaaaagcttaactcgtatttacagctctaataaaaaggacaacttgataatgtaaaaagttcaagaaacaaaaatattaattattcttgtttaaaatatgttctcgacacaaaaatttatttaattaatttcttaaatattttagataactatcatataaaccttaatagtttatttgttctctaaaattatgatctaagttccaaacaaaagcgatggtggtgggtacaccataaaattatctatttatctatttatatatataatgattacaaaaatcagttaacattttggtggagcagatggacattgatagggttggccataaatagagaaagaagaaaaaactcatattgttgcaataattaacttttattgtacatttattcaatgttaattttccttatatgtagttttacttatcttttaataactggtttcatcatgtctcattatatatcttgtttacaaattgcaacttatgaatattgtagaagaaccggtgttgatcttttatagccgcacataaatggatttatatatatgcagagcccacgccagctatatatatctatggaacaaaatatgaacacacaaataaagtctttgatttctgatgaactggacccttcatctttaattagctcgatcaatcaattaagttcaaacacaatttcatcacgtgtggttactaacatctatctttaattttgagctgttaaaatggtattcgatctaactaagtcacaatttgttgctgtcttctcccacttgtgttttccatgtcttcttcctactatactactttctacacaaaatacaaggaccccatcttaattaataa

SEQ ID NO: 7487 - DNA, 520 bp, Cannabis sativa
caatgcccgcaaggccaaggaatcaaaccctgcttgtcaactcctcgtcaagcgccgcaccgacgacgagccacccaagatcgccgtaacgttcgtgaatggtgtggaggaggtgtttgatgccacttccacgcctgcccagaacatcaggaacatgattcttgaaaagggtcagcatctcgagactgagcagatgttccgggaagcaggggagtcttggcctgttatcattcctgaggaagagatcaatcagtacttcccaggaacaaaggtaaattctctcttttcccccttttttatcgttggagcatttcatcgaacagttggtgtggtttgggatccaactatttttccataataaagattggattttttttctggtgaaaacttagatgttaaagtatgctttatgttcaagtgctatagtgtgtttttctatgattgaaaaatcatcatatatgacatgctcaaatcaaagttagaaattatggtggcttaagcattaagtattgaactgttt

SEQ ID NO: 7488 - DNA, 1097 bp, Cannabis sativa
taggttcaagtccgcctccgaatctgagtccgtcatgagatgagggttcaggtgtgggtcccaaggtctaagtcagggttggaatccaaaatatatttaaagatgaaaaaaaatgtttaattttttttttaattttgattcttaattaactagaaaaaattaaaaaaaaaaaagtgatgaaaacagttttataaaatatatttttgaaattatttttacttttctaattaaaaaaaacaaaagttgattaaaatagaattaccaaacataataatatagttactctttaacaattatcattttacttaattaaattttttatatatatgggtactacgtatagtaagaatttttttaaggtacttatttacggataaaaattacaattttttttttggcaatagtataattaatgcacccacaattaagaatttttgaatagtttcaaatagaaacagcctattcgaaacaaatacaagtgcaacaaattatttggatttctattttgacattctaaattatcttcttttttttttttggaaaatttataggaaagtctcccataactatattatattatacactcctaataatttattcatggaccaagaatattgtattgcaatttttctaaatatatattcaactcccagtctcccatggcaattattattacttgtggtaagtcaatacatatgaactttataaaataatgtttaaaatattttttttaatgaaaataatgttaaaatatattaatattctgtaactacataaattaattaattttttttggaaagaagacagatatatattccattaaaaattatttgaaagtgcaaaatattttaatttatggtcactatttaagtagttatctaatttaattttcttattactaatattgtcaaaatatattctcacttaattttgagaaaatttttaataaaaaatttcacctatataaatttatagtatcgatctctaaagtttgctgctcaattttgtctacactaaagaactagtgaatatttagaagtccgtatatttgttataatatttcttctgcataaataaattatctaccatgtgtaatt

SEQ ID NO: 7489 - DNA, 691 bp, Cannabis sativa
catggccaccgtagaagcatttaaggaagttatttggcttaaaggaattctaagtgaaattcaaatgaaaccaaggaaggtaattgtgttctctgacaaccaatttgcaattcatctttgcaaaaatccagtctatcatgaaaggtccaaacacattgatgtaagactgttttggattagagacaaggtagaagaaggagaagatgagttagaaaagatcccaagtgaagaaaaccttgctgatgtaagtacaaaagtgctttcagtcaacaaattccaacattgtttggatttgttaaatataatttctacctaagatagttggattacccttttatggtttagaacttgtttactctctttggattaaggtggaatttatagttttgataatccaaatagagaaataaagttagttaataaccaattctgttattagttataatcaattctaattgttttggtacaattagtttttttagttaagttttcacactcttaagcttgggtagttaggctgttattgtttttgttttcttttcatgtagcctgattatataaaagcattaaggttctcattttgcttatgataaaagctgtgagattagattgaaaggggtgagaggaaacagagtgtgagagagagagcctaagagaactgtccaagttgtgttcttggagtactcaagtt

SEQ ID NO: 7490 - DNA, 901 bp, Cannabis sativa
gttacatttctcaattaatttattctaattttaaatacggtaaataagttcagaatttctctcccaaaccctagaatacaaaattgttcacaccccgtgtttccttcccacgtgccagtctcttttctctactctctctctctctctctctcttcggacccttatcttggagccgctttttccctctgggtgttacccttttctgtttctctctcctcgtacacacaagaacaacacaatatggtggtggcccaactgcaaagtggggccttattgccttcatggtcagaggctgggtgaactttgatgacgtgacaatctgtgattggtcagaaaatatgtgaaatagtacgtagagtggtctatgggaaacatgaagacaaaagcattgagatcctaaccaaatcttgtgaacacgcgtcggttggtcatgtcatttgggctgttttagtcccaacgaaattcatccgcagctacttaagcttgttgactaatcagacacggtcacattgaccaaatggattgtatgctgacatggaacgatctctgtgctcttcaatgtaccatcttcagacgtggacgccctaacatttgtatcttgaatttaggctttgtttgtttatttataatatatgttttccattttcatccactactctataataaatattagcttatcataaattgtgtgtgcatatttatagctgagatcttctattaatatgtgcttgtaattaccttggctaataaatattattgtatgacgctttctttagctaattaatgaagttcattttgctagagattttgagggggcgtcgatcaatacatttctaggtgttttatttgaagaaaatttgggtttatttagataggtgtctgacattgacagtgggttatt

SEQ ID NO: 7491 - DNA, 1117 bp, Cannabis sativa
  modified_base (520)..(523): a, c, t, g, unknown or other
ggcgacatttgtgtgctgacgtggatgccacatcacgagtatagctatcaaaatcatgttaccttgtagggaattaatgacatattgattacttgattgctaattatttagtttccttatatacagagatattattctttgtccgagattctgagaaagtaatttttaatcttgtgcgatttggtagaaataggaaactataatgggcttccaattacacattaaggcttcctctagccacacagatatatgctgacgatgctggaaggtaagatctcatctagacgagtcataggtttcttaaaggattgataagttatatgggtctgacctatgttgattgggcccactaatgggctttgaatgtactactagttgtatttattagggaaacttacaaaaatacactggaatttaggttaacttttacaaaaatactgtcacacgaaaatcttttaaaaaatactgtatttttataaaacaccagtagaacataaaacagaacaactcaaaacaacannnnaacaactaaaaaataccagtagaacaacagtgaaaacttaacacagatactgcagtatgaaacttataaaaaaacacaataaaaaagtaaaaagtatcacctgacagtatttttgtaaaaaaaaatagtaaaagttagtataccgtgtaaattttcttatttattatttgaattacacatgtacttaaccggaagcgtggataacaaggatcaatttataacatacacacacgataaggaattgatcttaataataataataaggagtaagttgaaaaatatcactttttttaatcaattaatcaaatttacctctaatttcatatttaattgaaatatacctctttttatatatattgtacctaaaataccctgacataaaagagttatatagagagtatattgaagtgacatgagcaaaattgatacaatgtttaaaaaaagaggtaaaaataataaactttaagaaaaagggtaaaaataaaagagaacaatataaaaagagtataaagtgtaatttaatatacattgtcgacccaactcacttgatttttttgttcgcaagaaacacacgatttacaagtctactagact

SEQ ID NO: 7492 - DNA, 587 bp, Cannabis sativa
ttgattttaatcatatcaatatttagtaacttccaatgctcgatactaatactagggaaaataaaatcttccctagcatcagtagaattaatttgaggatcattccattaactaaagtatgctcaggtagatgaaacaactccattagtaacaaaatttttgacaagtagaaagatagagatagagagagaaagaaaaatattcaaagagaacgaattctgttattcagccatgttatgaaactattatatatgtgtttattatatacacgagagaaaatagcagcaaacaattaacagaaagtagttacagaactcattaacaaaaaattgtttaactaatactaactatcataactaactaagcctccttatcaaatcccttaaaattcagggtgcttgagtttggtcctaaaatgagcaaattaattgctggagatcggtttagttagacagtcagcaagttgatgcttagcaagaatatggttgacattgatttccttatttagaactttatctcgaataaaatagaggtctatttcgatatgctttgtttggacatgcaaatttggattagcagctagcata

SEQ ID NO: 7493 - DNA, 1131 bp, Cannabis sativa
atgtcaatgtcaaagctacttgttcacttacacagctcatggaattggaactgtgcagaaagagcctcccacttaacgagcaataacgaagagagatataccagtttgttgacgtacatgaacaagaaaaagaaactgattaatgacaacatcttcacatatttgcgtagcaatcatgcatacagaaactgatgttttcaaaatattactactataacaaaatgtagcaattaattaccaaaaattaagaacattgtttgtttgtgaacacgggtgtgtgtttaatagttgaccgaacttaacatattacgttatgttcatttgaattatacttatgttttttgtctaaattttatgacaaagccattcgtcgtttaggacaacagtaagttttaatatcaaacgacaaaaacttgcaacaaagttcttgcaaaacaaaaaatgcaataaagaaacgacaggacatgagagccgttttgatgcaacaaatgacatgtcgttttccccagaaaaataatgtaaaagttaaaacatatcattggatggccaaagcggcaatgctgtcatagagtagagactagaattcgtttcctgaaaaattacaaatgttctcattgcaacagtgcaacttcctaaattaaagttccagataaataccacgtatatatgaatatataataatcactttccaaaaccaaaatgactacatatctatctcgatgtttcaaaatccttaatgaagattacaacatatggacccaaaaagtatactcattctgacaaacatgcttagagacaaaagaagctgattgaagcccgatggggatttcactaccaagttctacccttctgaatcatgttgcactgagcatattgttatacgttttcaaagaactatatttcaggtagggatatcttgatgctgcttcttgttaacaagcctctgagcatggcaataactcttcacagaattatgtcttcaaaggagcctttttctctctgtcacagattctagcaggagcatttgaatgcgacttgaacctaccccttccaccctcatcagtttcctggagaatagataataaacaatatgtcatcatggaaaacgcttgtttcccatctggttgcacg

SEQ ID NO: 7494 - DNA, 1086 bp, Cannabis sativa
gttagatatgtgattgaattaatatcatattgttagcccgcagttacctctaccataatctatacacatgcggccacatacatcccaagtaatgacaatactaataagtatttctatatatcataattctttctacacatttccaatactaacataattcaaataatcaggcaatcagataattagcaaattatctaataattaaagcttactgaaccatgagtcgactaagttttcgcaaccaatgtacatatcaaaccagtcttcaggattccacgtgtgtgtgcttttataaaatttccttacttttaaatttataagattataccaaaagtgtagttaattaaaatttaataatttaaaacaaacatataaagattctttttatgaaagataaataatattaatctcagggttctcctgtttccaaaatatttacaatctagtttaaaagtaagtgcttttacaacgtaaactttatattcccaaaatacaaccaaaaaggaataccctaatcactgggtcgtggcactgcgattgatatgtacattactgctacgacctttaaactcatggttgctcaactttggccttccctttacctgcaccatatagcacccgtgaatcacagagacttagcaagaacagtgaataaacaatgatcaatataacatttatctattcaagctcacattaacaagcttaaacaattacataatatggtaatcatacaatcctggtacttcataaagtacccttaccactcgttaaccacgaactgaatatgtcactatcgttgcccggtaaagcaagtgataaggaattaagaaacctatccgcagtttcaagagtaattactcgtaacgataatgaccgtttccaaccctcggtcataaccgaggctcaacaaacattttaaccataatctcgataataatcaaggctataatcattcaacccttaacatttaaccgcatacggtggttaccacttttcttacctcaattcagaactcaaatgtgcgagccgtcctgagtggaaaacaagctgggcgatcctggacctatgtcacgacaaccgaaactt

SEQ ID NO: 7495 - DNA, 842 bp, Cannabis sativa
gacatcacctagaatcgtctcaatggattccggataaaaaggtgccgatgtcggcagccgctttttgaggtaacccggttcgacttggctaagaacagggtacttctcaatgtttttgtagtaatcggcaatgaaatcaatcaccatgtggccttgtcgccgaaactcctcggggtccaacgggttattactacttgcacccccaactatgtttgaaagagcattgttttgggaaaaatcaaagtcaccgaggctacccatttgaatgaatataaatggattacttgtttgtttagtttgtatatatatataggtgtgtgtgtgtgtgagagagagagagagagagagagaagaatgaatattggttgtgttagagctctgtatactctctttcttttttctttgtgtgggatgcaagaaatggtttgtgatgtgagtatatttatatgagaatgtgattaataataaggcatatgggatgaagtttcggtctcttttccaagttagagttggtgaagttgtggatatttgactgaaattattaagtgggtgggttttgaaattaaagtttctttcctccttattctactaaagaccgttcgcacgtacgtacgtatgttatttgaacacttatataaataaggttatttgtcttgttgtgtctttcataagaaatgacgttatggagcactgagtcgtagtcgtactgcccaattgcaaatattgttattgaaaaataagctttacctctatagtggagttacacatgcattggtgaacatattataattaattaattatataatatatgaatctaacacgaactacacatgattaatagt

SEQ ID NO: 7496 - DNA, 728 bp, Cannabis sativa
ggtcacattcacaatctctgaaactgcttcttcagcatcaattattaattcaatttggcgttaagtacgtactactgttgagctgaggctttttcccctcgaagattgaatgaccattctattatatatgtatgactaactaccaacgaaagagtggtggtgggggcatagaaacattgaattagtgatgggaaatttgattaaatatgtttacatgtttttaaaaaatttctcttaaatttatacttaccaatatttttaacatatgtcaactttagtgtaattcccaaaatatcatccctatttacatcaattctctcttcccttcttcttcccacccgatctactccactaccacaacaaaaaatacattggaccatcggacagcatcaggttgcatcagcccacattgggtctgatgtcttcaacctccagccaaaaaatacatagggaccatcggactgcatcggacggaccatcggggctgcatcagggaccatcggactgcatcggaccgaccatcgggctgcatcggacccacattagggttcgatgtcttcaacctccagccaaaaattaacttcattgaaccatcggagtgcattggacgggccatcggacccgttaaaaaactcagattttcccaaaatacatatccgaccaatgccaccctaaatctaaccctgactaacagatttcacaccatattgcaacaaaacaatcgattt

SEQ ID NO: 7497 - DNA, 630 bp, Cannabis sativa
tgtagttttaattttctatgaagataaaaagaaaattaattgcattaccatgttacggaaaggaaaagctttctttgcatccttccctatggttttcgggtcgtaatgcacaatgttgacagggcggccagcagcttgagcacagagtttggctatgccatccaaagttacagctcgatcgcttacgcaattgaatatgttgccacttgcagcctctgggttctccacagctagagtaagcatggaagacaagtccctcacgtgggtaatgttggcgagttgcatccctgagcctgggattggaagtggtctatccctaacaattcctgctcatatatagttagatcactatagaaaagaacatagcaacactaactgatacaaattagtgtattatcctgttcaaaaacatagaagggttcacatactgagcataattctatgcaaaagttgattatctaatctactcactatcaaagaaccactcctcgcagtctttgttgtttccagatccagtcatatactggggacgaaatattgcccaagaatcaaaaacttctgcaatgtacttctctactccaacatgacttgcatcagccttcacagcatcctatataagaaattcaggct

SEQ ID NO: 7498 - DNA, 795 bp, Cannabis sativa
taattaattcccttaacttattatatgtttattgattaataaaaaattctaacttaattgttttattttttctatagaagtaacaccctaacaaccaaatgcagaagaaacaatctattcgttgaaatagacaagtccttgaagatttacttggtctttgaacacaacctaagaaaaactacagagaccaagtaaacaaggtgaaactggttgctacgttgcaccacaaaagattttgataatcaatacatttttttttaagttggtcaatatgtggccccaatcgatgacaattcactttgaggtcaagcaagatttatttggggttaaaaattactcggtatggctttcaacaactgacatcaaggaattgtgccaaataaaatttttaggagtccagcctattacaatctagtgcaagtatgatattcaactcttactaaacttgaaaatttattttgagagcttgttataaattatgtgtttttataaggtttttttaaggaacaatagctgcaaattaatagattaaacagattatatgtatttttaaatccaaggaccattaccaccaaggttggagattataatgcttgttgtcaagcactgctcaaatgtatggctgaaatcgataattcagctaaattggttgttgccccctacaacaattaacaagtaaatctaaaattaatagtttcataatttacaactctacataatttataacaatcgactaatcttacacatttgtttgtgtagtgacatgtatattggatggttgtactcatcaaacca

SEQ ID NO: 7499 - DNA, 840 bp, Cannabis sativa
accgaacaacagaagtcacttcttttagtacaaggtggaatcaacagttctaaggagagtatgaaaaaaatttaaggctcgttctcgatgacaagagagcaatgtggatgtgtttagagtgtaagaacttcatttctatgattgaggaggaatatggttcaattccggaaaaggaagagaacatcaataacaaaaccacaagttttcttttcattatatttgtgaaaagaatgaactttttgagtcttgaatgtattgaatggtggataatacccaacctattgctagttgatttagagtttgaggaagtacaagcgctagaccttaatagattcattgtggttgagctacaatcacacttgttggtgcatttcaatatcgggttttacgcattttaatttaataaataatatggaaaatcgttaactaattataagacgtcatatcagtgtagtgttaggcacattaagaaataacaattagatctttgaatagattctgggaagtatactagctaaattagagttaatctataactaaattagagttaatctacctcctcttacaaaaatgaaatctttcattttcctctagcatattttgaacactgaatcattgattcccaaggtaacatctttcaagggtatcccttccattccaacccaagtacttagttagtaggccttactccacaacctcttactctaactctatcgactctacttgttgttgaaagccaaagccataccttcttcttctatgaggttgccacaaaagtgacttgtggcttgtgagagtgtggagccatttgtaggtgaggtggacgagaaaagttgtaag

SEQ ID NO: 7500 - DNA, 827 bp, Cannabis sativa
aactaaaaaagactgaagacttggcaaaattaaccatttgtcctgaagcaagttgaaatgtctgaagtagattaagaacattagcggcttctctgtcgttggctctacagtagatatagctatcgtccgcaaaaagcatgtgggaaataataggggctctattagctactctacagccttttaaaagattagatgactcaaacctccttatgatagaagaaaatccctcggcacatatcaagaaaagataggaggacaatggatcaccttggcggatgcctctttgggggttgatgttgctgatttctttgccactattcaggattgtgtactgtacagttgaaacacattgaagtactagttgcacaaagtgttcatgaaaacccattttcttcatcatagctccaataaaaggccactcgacacgatcatatgctttactgaaatcaagttttaaagccatatagccttcttttccatgcctcttcctctttagatagtgcatgacttcatacgatatcataatgttgtcggaaattaaacgccccggtatgaaggcacgttggtactctgagataagctgagggagaacctctttgagtcgattagcgattactttggatataattttgtacaagacattgcataaagagattggtctaagatcacccatattcataggattctttttcttgggaattagaaccatattagtgtgatttaaaccagaaggtagcagtccagtacagaaaaaattcctcaccaattttatcacatctgctccgacagtgttccagttgcgttggaagaagcctggtgtcattccg

SEQ ID NO: 7501 - DNA, 752 bp, Cannabis sativa
acgcgggaagtttccctccctttttttttgagactcttgccggcgcatagatgcgtcagtaaaagtagacatgtgccaacaaaactaaaatgaaaggcagtaaacttctcgcgccttttggtgcttcatttttttacttttaccagtacatattcattattgcgccggcaaaatatagtattgcaccggcaaaagtgaaccctaattgaaagtggaatttcagattttgctttatgtcgataacttttaccgacgcatttgacgaaatacgccggtaaaaaggttcttgtagtgcaccatggagtctgaaatgatagcactagtctctgctagtgaagaagttggctaagaagcctactagctgagatccctttaccgatacaagctgtgttgatccattgcgatagtactccggctattgcaaaagtctaaaaccgttgttataatagtaagaaacaacaaatttatcgtaaacacaacactgttagatagttcctctcaacaggagctgttagagtggatcatgtacgcactgaaactactacaaatatcaaaattcatgacggtcctaaaaataatttttttcggggaccgtcgctgaaaaaattaagtaactatttaaaatcttagagaaaaatttaatattctcgacggtttaaaatcgtagtaaacaaaataggcgacgtgttgataaaatgcgaatttttagaagagccttatacccgacggttttcaaccgtcgggtataaggg

SEQ ID NO: 7502 - DNA, 742 bp, Cannabis sativa
ggtcactctttcacacttgactcattttcacatcactttctcctttaccaaacaacaacactactaattaacttattttataaaattctctctatctatattatatacatgttattttatgaggttctagattttgacccatcacaattcttcaattggtaattagtaaagatttttagagtacaagtttttttttttgggcaaatcaatacattgataagaaattgtaatgtcaacaataacaattaactccttgatgcaaaaggcttaggtggcaattttttaaaacatgtgtaccatattatatacatcaaatctaaatataaactaatcaaaaattaaatggacattcctaacaagagtgtgtattgattcatttttatttattttggttatttatattgtagttatttaagatattttataaaaattttcaaaattttattaacacatagaaaatatgattcaaacagtctacttcacacatatataaaataaaaaaataaaccacgtatgcaataatctatttagaccctattttcgacatgttaaattttttttaagaacgcatcaatataaacttctttttaataagtacatattagaagcacactaaactaaactaaattacattaaaagaaaaattaaattacataaagggtttgttctcaaatatataaatataaaacttgagtactaaataacattgattgtttattattattattactttgctttttag

SEQ ID NO: 7503 - DNA, 780 bp, Cannabis sativa
gaagtaatgttagtcctgcagagctaaagaatttggaccggttgaacacattagatttgaaaataaaaaatgatacttatttatcaaaagatttcatctctacaaacatgaagaggtataaaataattgtaggttatgaattcaccttacggttcgcatattcaagaatcctgatgttggagcttcacaacgctaatttgataaatgaatgtggttttgataagcttatgaaagaatgccaagcattgatgctgagaggatgtgaaggtgtccccattgatacttatgtatcaaatactgatggtttccctgaattagaggtctttgaattacatgatgcttctaatgttagatacttgatggagtgctatcatcccgtttttcaaaacttgaagaagttgaaactcgaaaaactgccaaacctgcaaaagatatatgctggagaattggtagcaggctcatttagtaaattaaaaaaggtggaaataagtagatgtcacacactgaaaagtctatttccagcctcaactattgctggacaacttgaaaaaatggaagtacagtactgtggtatgatagagaatattgttttccatagaagtgaaaatggcacccaccagaagattgtgtttgccaaactacagaaattggttctatgtgggttagaaaaattgattcaattctgtaaggttgagcgagagcaaaatttggttacttcattattattggattcctcaccaagcaccaataaattctcattttttatggaggaggtacgtt

SEQ ID NO: 7504 - DNA, 837 bp, Cannabis sativa
ttttaaaaaaaaaaaataaagaatacttagagcaaaattgttctaaaaggtatgagaaaattagcatcaaccaaaataagatttttgatacaaatggtaggccaccaaactagcattactcttatggcatacttatattagctaacaatgtgcaatcaacagttttggaacagttaaaaaaatatttttttaatcaattacaataatgtaatatgtcaaccaaaataaaaaacaaagaggaatctagttgcaccaatcaatcatcagtatatataaaggaatgtttaaacaaatgtgaggtggtatcacatagattttttattttattatattttttttcttattttttacatttttaatttgtttttatacttttagaggtgagatttcttttaaaaaaagtcccacataatttagaaaccattgtgagtgttatatttctaagttatatttagatgattgaactttcactttgattgtgccaatattaatattattaatttttatatgggtgattaataaatttaattttgcccaattaattataatttttgtgaatgataaatttaattttgagtattttttaaataaatacaatacatatttttttacacatatacttaaataaatatgagtcatagtaaggatacacatcaaaatgttatatatattttcgattatatcacaattagtaaaaaaattacaaaagtttcgcaacaccgcgcaaagcgcagcttggttctctagttctttaataagacaatgctttaacaatatccgtatcaaaaatatatcttagataattcaataattctacattgcacaaagagtcaaagc

SEQ ID NO: 7505 - DNA, 686 bp, Cannabis sativa
taaaaaaaaaaaaaaaagtttagtagagactaattatttactatatattttccttcttaatttataagaaattaatattttttttcaaatacatatataatacttgatctacattaattcttcttaatccaacaaaagataaacagtaaaagacattaaatcacgtggtcacgtggggagttctcatttgagcataaacacacgagatcttggtagttggtacaccaagagaggcttaaccaaattacatgattaattaacaactagttgatattttgacccctatatttaagagcatttttattaaatattagtggtgtctagattcttttataagtaatattttatgattggttaactatatttttaaaaaattatttttttaaattatataaaatctaatacttaattacactaataataatatggtatcgaggaagataaatacttttttaacaattttctatatctaattatctaatctagtcttaacaaaaacaagtaatttatttttaatatttaatattattttattttttttattgtgtaacatatttttgctttgagtgcataattaaacacagcccacaaattatttcaataccaatataattatttactctttcgatctcatccatgttgatactaatattttatttaaattaattattacatatatatatata

SEQ ID NO: 7506 - DNA, 1611 bp, Cannabis sativa
taaaaattatgacacaagataatatctttctttcacaaagaattttttttttttaaataataaatatatcaattttaaattaactatacgatattttatatgaagaaacattaatcattaaaaaaatcttgcatatatgttgtatataattttcacgtgtatgtcatgaatgtgtaacaaaagggaaaagaaatgaagaagataagggtattgatcttgtttggcaaagagtgtttgacatgttatacaagtgaagcatatgcttccaaagcaaaattatgccttctgccattacacaaagacaaaaactccctcttctttttcaaatcccacaaatacaactttatatagcccatatcttgtatgaaaaattctttgatatgtaggagcatgtttttggatactggtagaaagttttggatggttgcagaaattattattcttttaatttatatatatataaatactagataaaagttacgtgccgagtcacgtaaatgttagttttatttaaagtttggattttttgtttgttttttcttttaattctttaactaaaggaaagattatatgaatgattcattttattaaagtaatctttgtatcattgtatttggttagtaaaacatagttgtgtacataaagttatgatatgtacattagtattaataataaaaagtacattaattacaatatttacataattataatataattaattttaatgtgaagaaataatttataataagtcataacaatatatgactttaacatttattatttatttttagaaaattcaaaggaacaatatatgtgttttgcaaaatttaaagcaaacattatgtagcaaaattaaagaaaaagtagcatcttaaaatagaggaaaaagattattaaataaagtgttaatatagaatactattataaaattaaacaaatcatagtgaaacttcatcctaatcttccatcgtctcagctgtttaaatggtattgattatatttgatcattcgttttggatctacaaaatctgattaaaaatagcatataaatataaactaactgtaaatatcagaatttaaaattaaatttttaatattataatcaagatatcttatctaattataatattaaaaatttaagtattatttgagtgttttgaacacaattaagtaataaataaagataaatacctaacagaatagtttaacttcgaaataaataaattacacacaaatttataaaaccaaacacacctctgaatattgttttcaaacaattcttggatcaaaataaaaggatggttatccaaggctgccagctctagcattttataatgagtcattcataccaaagtctgcacgagcgtgttcaaaatcattgaaaaataaagtaaattggctatattaccacacacccaaataatatgtgtggatgctaaaaaaaggtagcacttggatttggagactgaatgctccatgacacacaccatggatataagaacatcaattaggaagcagaatatgaataagttgaattagtggaactgaaatagcacttttacccccttttgtatcaaaaaccctatgaaaaatatagaagcaatagatgta

SEQ ID NO: 7507 - DNA, 867 bp, Cannabis sativa
tttgaaagtcatatttttatgtgaacatttcaatttcaagtcagttttattttcatatatgatgtttttataaacgaaataaactaaatatggtaaaccacttaattttctcttcttaaaattgcaaaaataatgtggaacactagtcaactttgcaggttttatataaatatatatattttaataaaaaatgtattttattaaagcatttttttgcacaattacaagatgttactcggaatagaactacccgaataactacgatcatcatataaccatgaggtttgagcaaaaggatgagcaacacgattgacagatccatatccatatttgagatagcaacattaattgatttttggtaacttatcaaaaaaaaaaaattgattttgggtaaaaattgtaaaatttgaaaaaaaaaattctactttgattttcttttttatttaaattttaacatgtaccaattatgttttctgaacttagcagacttcttaaaattttcctaaataatcgaaaattttgaatttaaagatttatgttcaattccattaaaattttaaaataaaaatctaatatagtgattgtccatttattaaattgtgccaattgaactttgatatttaccaataattcttaaattttgatatctattaaattgtgcgatccaaactttcgtccacatcagacacccattagtaaaatagaacagaagttattacatccaacaatagttcggagagaaattttaatctttttgtaaaacaatcgtaaaacaaccaaatagaacaattaaaaataacagtgaaacaactaaaaataatagtggaataacaacgaaaacttacacagtatacagtataaaaaata

SEQ ID NO: 7508 - DNA, 785 bp, Cannabis sativa
gttgctatgtggattttggttgcatttcaagttgctccgttggttgctatatgaattgccatgtgaatttctataaaaatgaaaaaaaaaaaattaaagtgtaaaaatgaactatatatatttctaatgttttgtagtttatagttgtaccaaatttgataagatattgttaagaagtattaataatgtcaaacaccattttacataatataccctaatatattaaataattccacattttatagtgccaaattcaacacagtaaattgttttaaaaaaattaacattattaataaaaattatattttctagtaaatatgatattgaaaagcatagccctaaattcaaatattattaatttttatagtttgtacttctaaataatattgtatataacctttgtacatattataaatttagaatacaatgtcaactattacataggttttaaattcaaattcaatttcttaatttaattacatatatatagccaagagaaatttagttttatttataaaattaatttattgaccaataagtgtttcaaattacatagcaccaatcgttattattgtaaacataagataagagtaccaaatgaaatatgagtaatagtacctgcacacataaattatatattaagttacttatcacataaaaatgtattaaatttgtgtataatttacgtgtaaatcagatctgacctgaagtataagtgggttaggtctgtagttagggtcctcctagcccaagggtttaaaaaaaattcccctttttcaaaatta

SEQ ID NO: 7509 - DNA, 606 bp, Cannabis sativa
aatatatgtatgagtgtcaatagtagaaataataatagaatgtaaaattacaattggtcgaataaatcaatcaataaattacgtacctttctctatttttcaatttgattaaataaatatttattgatttgcttcatcacagaaaaagaacatgaagatcaaggagaagactgaacaacaacaccaaagaaaatcagaggacaatgataatcacaccaaaaaaatttgaggagaatgccaattgcacaaaaggaaattagaggagaagtgagaaaataattgtagaagaagagacaaaattgtgagctgttagggttaatttggattattgaaatctaaatatggaaaaagtatattattttttccattgtttaagttttttatttttttttccaacttttaacttatttacttaaatatctatattttcctaattcactttttttttaaaaaaaaatctagatttaaaaaaaaaaaaaaaaaaaaaaacccttagggttttataaattatttagttggtttgaattcattgtatcactgttatcaaataacattattatggaattaatgttaaaaattcgaaggttttgataaattcgcaggatt

SEQ ID NO: 7510 - DNA, 893 bp, Cannabis sativa
atatatttatgaattaatatattcatgacctaaaatctcacttagcgggcaggaactgattatctcccaactataacacaattacaaaccaaaagggtggaggttagtgcacttcgtcctgtttgtaagaatgaaaatgaaattatcctccatagcttagtaacctgtcaatttattaaattttgttggaatagagtaggaatcggtacaaacatagttttgggggctggttttctagactggtgcaagttggtttttaaacagtcgaacaatgagaggatatgtttgacaacttcactttgttgggctatttggagagctcaaaatgatgtggtttggaaagggaaaactgtgggaatctcacacatttttgcttctataatagcttatcttaaccaatggagaagtgctcaaagttctaccttagagtcatctgagacctgttatcagcctggagatggtgctgagcgctgggtttcacctagacaaaatagagttaaggtcaacgtagatacaaccctatttgagatgagtcacaacttcggatttggcctagttgctagggacagcaatggtgttcttcttcaaggtcgtactgttttagctcttggccaagtgaaaccggctttagccgaagcaatggaggttcctgaggctttgagccgaatcaagtcatctccatggcatcatgtagttctcgaaatagacagtctagtagtggttcaagcattgcaaagttcagtagaaatgatttctttatttggtttggttattaaagaatgtaaagaataggttattactatgagaaatgtttctaattattttgttaagtgattggccaacttagtagctcactcctttgctcgaacttttaatttaggctaattatgact

SEQ ID NO: 7511 - DNA, 1241 bp, Cannabis sativa
tcaccataaagagcactaatagtcagatcgtaattaattaagttaataagtcatttttaactaactatcactataaaaggcaacattaactactgaattaatgtcgctaaaagttaattaggtactacaacacaacttttggctacaggcaatttgggccaagtcacaaaattatgattattaatgtttgtttcaaactgtccctctagcgaaaatggttatactactgtgtattagaaagctatattatgtattgtttttcatgttttccattctatacattaattcattattcatattctattatataatgattatatatatatatatatatatattttttgttgacgaataaactttgcagtcaggaggcccaggatggtttcccctattaggaagaagggatagcttaatagctaataaaagtggagcagatgaacttccagctccatttgagacacttgatgcactcaaagacaagttctctcaacgaaacctcgactcaacagatttggttgcactttccggtaagtgtttcttattttctaattttaataatatttttatgtataaattaatatataattccaaacagaaacaaatagccataatattctcgtctttttctgttcaatatatttacgtcttttagccataatatttgaatggttttcatttggtcaattatttgagatttggttaccaaacattatgtgcatgtttgtttattatatattactattaatttataaaaggggtgattattgcccaactgttgtatttttttatagttctcatttagtaattaattatactaatgttatatataaattgagataaatatttgtaatagttataacgacagcaacatattattaactctaaacacaaaaaaattgtgtcagttctaaaacaaaataattagtgtaaagtaacaatatatattattgatgatgagctatattattagagatattattgagtgacgttataaatttgttattgtttcttttattcatgttcctagacatagtgctagctcatgcttaagctaagtttgattttactatatatagatagtaactatgtttagtggcttggtgtcctagttgtattactagccctgattgagacgacactcttttttcctcttcagactgtatttttactctgaaagtcttaatgaggctatttttctcttaccatattttatgtattatatatatatgaactctttgaaa

SEQ ID NO: 7512 - DNA, 861 bp, Cannabis sativa
catgacatgttcaattcgcgtgatgcatctttgattctcaggctacccttatgttttttcagctggtgatgattgttggtcttggataggggagagcatcggttctttctcagtcaaaagcacatacaatctgctgtagaaattgacacaacatcatcttggtgttgacaattctgggttttggcgcaaactttggcaacttaagatctccccgaaagttaaaatttttatatggagagcagttttgaatgcccttcccacctgtttatagcttgtcactaagcatgtaaacatctcttcagcttgtctagtatgcaagagtcaactcgaatccatccatcacgctctcatcagctgctgctttgctcaggcatgttggaagaatgctcaaccgtccctcaatattgttggtaataccacggttggtacttggcttcacattatgtttaaagcttctgataatgataccagttgttgcattatcatgctttgttaggcaatctgaaaagcacgcaacagtctcgcttgggataagaagacttctactccgcagcaagttacttcatcggcattagttacacttgatcaatggcacaaagctcaggataaagtcaatttattatcatttgctcttgaaactgatggctctaaagctgagtaatggactaaacccgtacctaatacaatcaagattaatgttaatgctgctttatttgaaaatgaaggctcttatggctatggaatttttgcacaagactcctcgagcaccttgcttgacacggttgcagtttgcaagaatggcacttttgctgctgaagttgttgaagccattggggtaatggaagcccttagttggctcaa

SEQ ID NO: 7513 - DNA, 1723 bp, Cannabis sativa
aatatattattcatcactcaacaaggtataattttatataatattatgacattatacattactaaatctcaattaaggaattacagaacattctcacgtggatagttataagaatttgcttattttgatgtcattattataattattatctatacagtgggacttatttattttgctggtgattatttaatggttaaattaaaaaaataactattatgtttatatttttataatttgctataataggttgtcaaaaatttattattaaaaaagtatttattaattaaattaattatgtacttaaaataaaaattaattaatattttaaaataaaattagtcttaattaatattttattattaattaaactttaaagtaaaattaacgttaattaatattttataaagaaaaataatctattaataaataaaattttattagattacatataatttattaattttttttagtgaatttttaaattaatgacaaacaaacctctccttatgtactacacatactttggaagttttgaaagattctctttttatttattttttttaatttttccttttcctctttatatattagatttgatttgaacaaaaagattgcttttaaagtgaacttgtataaagttagaagaacattttgctttatcactgctaaacgttttagacaaattccttgacaaaagttctaatacaaaagctctactactagcctggcctccacattagaaatattatacacattttttttttttaatttttttcaaaaaaaaaaaaaattgttaataatgtttattattattaatttgaagtttattattccaaagaaaagttgagcttaaaactagcctcgacacttttaatttatgctcgagccaaacaataaagaagaatatgtatgttatgtgagccttttcaaaataaattaataaataaatataccggtaaaaaagtttttaattgtacttgatatacttatatatgctaatatttacttacatttttaatttttgtttaagttatataattatttttttttaatgttattctatatatataacattattttttatcaaaatattaatttaatttatatttatatataaaaatcataataatattcaaaatttattattgattataattttaatttagttgtaatatttttaattttattattctttttagtttttaaaaatattatatactttttcttttttttttaaaaaaaaataataataataacaaaaagatatttttttaaatatgtacaataaatttaaatttgaaatataatattaaaaaaatacaattaatataaaagataaaaaacaagagagatatgtagaatttaaattgaaattataatgttttaaaatagaacaacactcagttatataattatatttaacttaaatatatattatatacatgaaacagtataatttggaaatttacacaaatgatatcatgggctattaagacaatccaattttgcagatattaatatgcttcaattgacatgtaacaagttgcagagaactaaatctccatagtcattagtcatcaatatgagaggtttgtatacatattaattttattttataccttatggtgaccaacaaggcgtgccattctttctttaaactttattttaattataagtgtcatattctttccttgttagttattaggaaattaaagtaactttt

SEQ ID NO: 7514 - DNA, 1435 bp, Cannabis sativa
agatatcctccctcctgagaacacgataagccgcaccaaagcagtcactcaaatcgatttcatcagtctattttacataaactgcacacctgttgtaatgtagtatgattcaaggtcacaacagtcaaaaatctatgacacactcaaaagcactggtgggttataatttgattcaaaaaatgttaagactctcatctcactcttgttctagtaacaagatcatgtctcatttctcatctaaccatattcagtcattacaacactcaatggtaacagaacagtggtaaaagataggcaaatttctaggtacactgcaattttttaattaagagacacacgagcgctgatatgaaatgtttgcaagaagatttgtatgagcttcctatgattacaattatcagttgttcctctgcttctctaagtaccatgatgctgattatctctttctcggcaatattcttttgtaagataaatacgacttatataaaacaacactaataacgcttgatgtctaatgatcaacactaataacgcgtgatgtctaatgatcaatcagtggctaatgacaattatatgaaaagaaaagaaaaatcatttaaccaaaattcattaggtaaatactttatattaaaagtaaataccactaaggttccttcctcaaatgaagaataccaaaaaaaactacccgcactaagtagtacttcaaacagctccatggtccttttcacaaagaaatcaaaaactactgacaatatatttgaggaaaaatgtcacaacaagaaatgctcagagtcttaattcattctctgtgcggcttccttggccaaaactctttccttggcttttgtttttgcttgtgatttactacccatgatgccaccgccccacttctttcggaactcgtcgaatttgtcattgaagttggcctgaaacataaaaatacatttgggttaagattgacacagatactagtgagttcatccttccaataaagaatatgttttctggatttaccttaatagcctcaaggattttgctgaattccatcttatcctcgttcttcacagtggtcaaacacaatgcagctgctgtcttctggtggacaatctgtcgaaaccagaatgaaaaaacaagagtaattagatatttcccccacgagcaaagccctatgttatcaagcatacagattaggtagatcaataccgatcccaaacgggatttccccttcacaatgcagtatgggatctccatctttctgcacaaggcaggaagccagacaaccaactcaattgggtccacatcgtgagcgatcactaccaattgtgccttgttctgaaaaaagaagaaataattgggtttgtaacttgttagacattactaatgaattcgaatgcacagcaacttttatttaagatataataatcaataaaatatg

SEQ ID NO: 7515 - DNA, 762 bp, Cannabis sativa
tggctcatcttcggttacatcctggtggaaatatttctggagactaaatctaccacaaaaatcaagatctttgtttggcgtgttctacatgacgccctccccattgcaacttcacttgtgtgtaggaaaataattacgaactcaacatgcttaatttttcatagagcttggaaatcgatagggcatgcactctttagttgcaaatatgctcgagcggtctggcgctcctcacaattgtcattcgactggtacaaatcgactactatgcataaaggagactaccttgtacatctatcctctctttacactaagtttaaaatggagcagattcagtgcaccttatggtgtatctggactgaacgtaacagagtggtacatggtcatcagacaaaaacagcagcaactcttgctggtttcagtaggaattatgtcaaaaactacatagcattctaggataaatatcgcccgcctgctactactgatgcaaagaaaacttctccgaatgttcatgccgtgcctaaaccgtgccagcctcctcctttgggtgctctcaaactcaatgtcgatgctaccgtagatagtcaaaggaatattacaggtattggagctattatacgcgatgatatggcataagttgtagcagtccttgccttttccattgttggaaatttcacatctcatgagatggaagaaaaggcaatgtttttggatttgaatcggtccttacagctgcaattgcaagtatctcaaattgaaacagat

SEQ ID NO: 7516 - DNA, 660 bp, Cannabis sativa
cctaatagactttacagacctgaataaggcttgcccaaaagattattttccgctttcacggatcgatcaaacgttagacgccacatctgggttgccccttgccatttgttctttaaggttactgggagtttgaggttgtcccctgccattgacttcatgagcgttggaaggaggcaataagaccatattggcgtaataacgttatcattcctcttattgattattctaatgccgtatattttaaggagtacaatataatagcgttaccatatatgaaatataataggaatgctaattatttgaaaaaataaaataaaataaaaaaaaaattcaacattgtgtattattttgagagaaaaaatattctaatagccaaaaatagaataatgataaaatttggggaaaacgagtaattaagcaaagtataggaaggaaggtgggcgaattggaaagctttggggtttgagtttgggttgtgaagcgtaaaacccaaaccttaaacctcacacaagaaccctcaaacgtttctctctcctccctctgccgccaaaaccttcttcttcgcctttcccatcgtcaccttctcactataccacctttctcttctccagcatcctcatggctaacaccactgaggtatcactctctctctctctctct

SEQ ID NO: 7517 - DNA, 585 bp, Cannabis sativa
catgatattatacaaggtttttcttttttacttcttctccttaggctttgcaggctttccagtacataattccactcacaaatattttcctctatttctgacacacttcacatgctatctatctaatattattatgtagaagggaaagagagagagagggaaagggtcaatgggtccagacccagtgacccaatgacccacccacattttattgtccacatggaaatgggagatctgacccacatattcataccattccaactccttccctgcttcctgccttgtttcattcttccccaaatttcccttttacaattttaatttatccaaatatatatctctatctcttactctctctcctcctcatatttgacccacacattctaattccctctccctctctcttacgtacctattattataactcaaatatgttaaaatataaacacaaaataataataaaatattagcataatgtgtctcacattcaccgcttctcatgctcatattcttcacttcaccttcccaaattgctaattcaacattgccttaacacctacactacatcctctctttattcttatt

SEQ ID NO: 7518 - DNA, 796 bp, Cannabis sativa
cccaatcttcctctgtcactacagaagtctctcccactaatccgagtgccttcaacttcaccaccacaagtaaccctgtgtatgacaaatcaagaacttctgatgtttggcattgtaggctaggacatccctctttcaatgttctagctaaagttcttaccactgtttctcctcaaactaaatgtactaaacacactttctgtgatgcttgtcaaatcggcaaacaacatcatttcagttttaaaagcactcctaataaaactactatgccttttgaattaattttgtctgatgtttggggaccctcttttcatgtttccaatgatggatacaaatactaccttagctttgttgatgattacactaaatatgtttggcttttcccaatgcaaactaaatctgaagtgaatagtttattcatccaattcaataactatgttgaaaggttctttcaaaccaaaatcaagagtgtacaaactgatttaggcaaagaatttgaacctctctataaactatttcactctttgggaattgtccaaagaaattcatgcccccacactcatcaacaacaaggcaaagtagaaaggaaacacagacatgtggttgatataggtctaacccttcttgcacaagcccaaatgcctctcactttctggtgggaagcatacacttctgctgcctacattataaatagactacctaatcaaaccatagattttctttccccatatgaaaagctttatcaccaaaaacctgattataacatgtttaagatttttggctgctcttgctttcc

SEQ ID NO: 7519 - DNA, 638 bp, Cannabis sativa
attttatgtaattgattagctttagataaaaacacttaaaaatagtaaattgaatgaaatattattttacacttgtcttcttaacaacaaacaccatcacttttctttatactaaacaacaaattgtaacgtatgtatgagatagcaaagaaaaaaagcagagtttcccgggaaccaaacagaaagtatatggttcatatgttgggggcggtggtcatatttaatttttatgagttatatgatttattttataacgtttcaatatataacagttaagttcagtcaggtagttttctcggtgaccaaacaaactttattcattcattcattcattcttttcccaattgtttatactttattttatcgcgaaacattgggtttgatgaaatagaaagagaaagagaaaactcaatataaaaatgaaaactttatttgttttgaataaataaaaatcaaatctttttttgtttttgaataaataaaaatgaagtctttgaaaaggaaaaggtgtgtgtattaagcatgactcagcaaaactgcacagcactctgagagagaaagaaagagagagaaagagaagagctaatgtgggagtggggatggcagtaggccattctctctctacttttgccataaat

SEQ ID NO: 7520 - DNA, 870 bp, Cannabis sativa
gctaattttgtaggtttcaggaaaacaaaaatcgactttacaacaaatgacaacgatccaggacaacaatcatttagaagtgttcaagatttaaaagcagcaggaatcgatttcaaaccaagtgagacttgttcacttagagacataacatttacatcgttatgtttcgcaggttggctaagattacctcccttaaccgttgatgacacaactggtccaaggtttttaaacctaattgcctacgaaatgtgtcccgataatatcgatacaaattatgaagtgacctcttacatatgtttcttagattcgctcattgattatcccgctgatgttaaagagttaagagcatctcacatattgtacaatcttctaggttgtgacaaagatgtggcgcatctctttaatgggatagcaaccgatttggttgctagccctgtttacatgaatgttataaatcaaatacaaaatcattacaaaagcaagtggaggacttggatggcgcaagtctaccatgaccattttagtagcccgtggactattgtcgcctttttggctgccgttttagcattgttcatgtcgggtgttcaaacttggttttcttatgaaagtagtgggggcgacacgaaaagtgctacaggtcctacttcttctcctcctccccctaattaagtagtacatagttttatattcagtgtgaaatttggagaaataagactatttttctccatgagtttgttgatcaatttttacaagtttgtgtgatatcttctttaaaatatttgaagtttcccttttattttttggactttcaataatgaattaatttttttttattctatttcgttgttgtttggttaaatattaaagttc

SEQ ID NO: 7521 - DNA, 834 bp, Cannabis sativa
acatttacaacatttgatcaattaaaaataaggatgaaaattatgatacttcttcgcccttgtaagcagcagcccttcacaaatggcttaaaaataaaattgattgatagctgaagttattgtgaggactgtgtcattttttataagtgaaaattaataagtgtcaatataattcatttctacgggggccaaaattcgatttgaaatgtaattttcaaagtacataatacgaaattggtgacataatttaccaacaaatttgagaaccataaaaatacaatgtatcaagtcttatctcctttacaacaatgttcaatttattattattattacttttttttgaaagatacaataatgttcaattagtgatacatacacatacgatgtttcaaagaaagatttaataataacattagccaattaagaaacgaaccacttaaaatgtaaccttttatatagtcaaattaaaaacaacacctctcaccaacctcaaacctaatctcacctcataacataatccctattttattttgttttggctttttccttattgattgaatcaatattcaatacttgtcatgttacaaagattttgcaactatgattgcgtttactatcagagttcccgcttaaatgattttaagatcattatttaaagttttcataagtttgttattcaaatttccatgagtgtccctaatttgtgttgctcataagctcttcggatgaataattaacttgtttggctagatatgaatatccttattttttgttgggtgtataatattactttgattatcctaacaaaaataatatttaggtggcgtttggttg

SEQ ID NO: 7522 - DNA, 684 bp, Cannabis sativa
taatacccatttttagcgaccaagtattaccgacggaccccgctgctattaacttttaccagcggacttggggattattaccggggaaatcctccgcctctaataactataaatgttgtagtgtatattatatcaaataatataacaaatactactgcatatcgtgtcaattaaaaaataatttttttttatcattgtatttttttaaaaaaatgtgtcaaaaatgtaactattaaataattactcatatatataaatagaagcaaggagagataaattaaactgagagaaagtgaggtgaaaataaatgatgaaacggaaaatgaactgaggattgatgaaagagaatatgaaatagaccataataaaaaaagtaaaataaaatgtttcgaaagaatttaattgtaccatattttttatttttaaaattttgattcttattatagaaaataaaaaataaaaatagttttacaaaacacgttttttgaaaatatttcaacttttcttattaaatcaatagaaaaaaactttttgaataataattttttttaaaaggtctattattataaattaaagagagtcatttacaataacagataaaataacggatgagattttctctaaccaaatactatcactatccacacataaagcttgtttaacctatccatgagtggctttgtt

SEQ ID NO: 7523 - DNA, 741 bp, Cannabis sativa
tataatagaaatctaagtaatctatatattatatatattcatgagttttgtttatatatggagtgatctaaatctagcaagatatagtgttaatagaaaattgttaaattttagtactttaaatgtttttttaatgatatttattgattgggtattgaaaaaatctacagttaaaataattgattaatattgtaaaaacatggccaacttttaaactaattaggattttagggagattttgcatgcttacaatttttttctataatccatgcttcaagaaatagatattgataaatgaataattaattggtaaaatatttatatatatcattattattatttggcttttggggttaatatttatcaaattaattagggcaagaaaaagaaccataaaggtaatgtagtggaaagcaccactccgggttttgttggatatatatttatatttatatatattatgtataaatattaaatagtaccccacaccatactcttacttgctaaattaattattatttacaaataaattatatttatatatatttatgcattgccacttcaattcacgtaagtttaaattttgagttttcccatgccaatattactaaacaatatatttatatatttcccatattaaaaaaagtgtctaatcatgagccatgcactatctatgcttgtcacattctttaatccccacttatataatatttatataatttaactagtgatcaatttgca

SEQ ID NO: 7524 - DNA, 530 bp, Cannabis sativa
ataaaaaaatcaaattttattaacctttacattcaccaatcaaggtaagcaacaactcagttagaatatttctcaagctaaaaatacaattaagatataataaagacgctctaacaaactcatgagcgactctattagttgaccgtttaacaaaataaaatgaaacattatataatttagccaacaccaaaatgacaacaccaaaatgaaaagctaaaatcgtctagcttcttaatgcttggatactaacagtttttagtacattgtggatatatatttttgtgattggttagcaataattcttaaaattttaatattaaattatatagggtttaatatcttctaccaaagtctcttcttcccattgaatcaaaatccatagtagctgctttaaaagatccacagtggctagcatctatgcaacatgagttttatgccttaaaagctgcaaagttgatagtacattggatagattcaaatcaaagcttgttgtaaaaggctacttacaaactcctggaatagactatgaa

SEQ ID NO: 7525 - DNA, 1060 bp, Cannabis sativa
ccaagagacaagagtttcaccaaggtacacagtatccaccaacagatcacctatcatcaacacaacaagcccagtcggcatctgaaaatcctgttagtttgagcttgtcactgtactgaatgtgaagaccataattcatggtacccttgagatatctaagtattcgttttgctggccccaatgtattattgttggagccttaagatattggctaagcttgttaacagcaaagcaaatatccggtctagtgttgcaaagatactgaaggcctccaattaagcttcggtagatagttggattgtcaagtttttctccatcatgaattgacatgttctttcctgtagctattggtgtagggcaggctttaagattcagcatgttgtttttcctcaataattcagctatgtatttttcttgagtaagataaaatcccgtatcatcttgtgacacctcaatgccaaggaagtaactcaggtgtcctaagtccttcaaggcaaaaagcttgcttagttgctgaatgaaaccgtgaagtttggagttgtcattccctatgatgataatatcatctacatatataagaacaaagatgattagtttctcatgtttgtaataaaacaaggaagtgtcaactttagaacttttgaaactccactcagtcaatgtatttttcagccgatcaaaccatgctctaggagcttgtttcaatccgtagagagacttatgtaacttgcagacatggtttggttttgttggatcctcgaacccttctggctgaaccatgtagacatcttcttcaaggtgaccatttaggaatgcattgttgatgtcaagttgacgaatttcccaattgtttgagacagcaatgaaaggtataacccgaatggttgaggctttgatgactggactgaatgtttcactgaaatccagtcatggcctttgatgaaatcccttcgcaacaagccgtgctttgaacctttgaaaggagccatctgcattccatttaattcgatagacccatttgcaccctataaggttgtaagcttcagaatatggcaccaag

SEQ ID NO: 7526 - DNA, 677 bp, Cannabis sativa
aaaaaaaaaaaaaccttaaagatctagatatatgtaattaacatgttaagaaataatgaaataattacacaaatttgtaaaggctataaacatttctagacaaacttcgatcgggttcacctccatgtaatcttacaatagaaaaaagaaattaattaaacaaaataaataaaaatgactatttggttgattttctagtgcatagatgagatgtgctttgttttacacgtataattgtccaaaaagaaaattgagaataaatatcataaatattgtctcgagtctgattattttgctattatttagacaattttaactagctttacaaaatatatatgtatatatatataatttttttttgaagaatatatataattttttttagtttagtgattgttgatgaatggtgttttttatttaatgttagtttgaatttttaccctttgacttttgacaggtattaaattatgatttttaaattttttgatagttaaaaattttcttcgaactattgagatcgttagatttaagaatttttatccaattttactaaaaaaaaatatgacgtggatgaaaatttaaatacatgttaaagttcacgaagtatgattttataactattaaagtttgggagcacgaacttttttttagatgaaatatttgttgggttttatgcc

SEQ ID NO: 7527 - DNA, 546 bp, Cannabis sativa
tgggtgtgtgtcttggaggttctgaattcgagtcccaagtaaaatatgattgtaatatataaacgcttaaataaaaaaaataaaaaaaaaactttcttattaaattaatttgttttttaagggttcttattaaattattattatttattatttttatgatcatttattaattattttcattccacacttccagccaaataaatagtgtaaagagtgaatggggcgaataattttcttctttaaaaattgatgcgtttttattggttcgggtagtgggccccacggtattgtcggtagaaatacaaacaaccatataatgatttagacacgttttctttaattttcccaaactttcttttcttttttctctgaatcaatgaccacacgctccacggtcagagggagggactacgtgtacggctgagatgaggtctggagtgaattttagtgaaatctgtgctgtcggcacaacaatcctgaatccgtacatataagcttgggctacagttttcagtcattacttggcattatttatttacttaaatt

SEQ ID NO: 7528 - DNA, 1252 bp, Cannabis sativa
aaagtttcctcagaaatacgaggcggctaattggtggccttccaaaaaatcccaaatgggtcaaaacgaatcgtttcaacaacaaaacaataatggttggaacgagagccttgagagagaaatgagagaggttattgaagttgttaagacaaaagatagagtagattacgagagattgggaaacttggttttgaaaataaacaaagcattggcaatttcagggcctttacttactggcattgctgccgttagttctccgtttgttggacatggatcttgggctggtgttttggcagtaactgccggagctttagctaccgccgttaatggatttcagcatggtggacaaattgggatggtgttcgaattgtacagaaactgtggcggtgctttcaaacatattgaagatgagattgaggctaccattgctgaagaagagtttgagaaaagagagaatggagagttgtttcaagtgaaattggctttgaaattaggaagaagcttgtcgcagttgaaagacctttctgcaaaatctgcttcggctcgtcttaatggaactaccatcgacgaattcgctagcaagcttatctgagctcattaattatatttttttagagattaattattctttaattctttgatatacatactgacagattattcttttgtaaagaaaaaaaatgtaacgtcaaattgagttacattaattgtaataatatatatacgtagtatacaacaaaatttataatgaatacttgatcctaatacatatatcttcttgtcataatttaaattatatttagtcttttgtaatttgttaatatatagtaacgaagatgtacttaacgatgagggttattgataaaaattactgattgttttttttagttaaatgaaaaagtggacttgtgtaatatcctaaactcaatttttatctattttttttaaatataaccaagtaaaaagatatttttaagtgcagagcaaaaaatataataagtcataatactttaggtcaattttgttcttttaaaaaattttattaaattttaatttaaccaaaattaaatttagagtactattttaaaattaatacaaatctaaattattatttttaacaaaataaagggttcaaattagaaatttttataaaatataaaatcaataataatatttatcaatatttaatattatatcgtatatataattttaatttaataattatgatatttcttttaaaaaataataataa

SEQ ID NO: 7529 - DNA, 584 bp, Cannabis sativa
  modified_base (159)..(159): a, c, t, g, unknown or other
ttatgtaataattattaaatattataaataacaaagaataatttttaaatccatttaaattagaaaaaaaaaaagtaaagaacatgtcacttttgtgacaacccaagtcccaaccaaccttttaattaaaagaaaatgtaataattattaaatattaanaattataaagaataatttttaaattcatttaagtcaaaaaaaagtaaagaacctgttacttttgtgacagcccacgtcccaatcaatcttttaattaaataaaaaaactttaaattttgatgtaggaaaatactttaaagatatgtgtaagtaaaaaaaaaattgtacaaaaaaagcagtatactgtcgtataaaatccaaaaatatacacagtaataaaaaataccgtctgacagtatttttgtaataaattggaaaaagtcagtatatgatggaaatttcccaaatatttatttatataattttttttccataaagaaaaaaaccatatagcatattagaatttgagtttttcttttaaaaagaaaagtttttgacccggtcaacccacgacccgccaacctgatcctgtcgcgggttgggtt

SEQ ID NO: 7530 - DNA, 832 bp, Cannabis sativa
agagagagagagagagaggtttaaaaaagtggtaatgggcaaaatgagagtaacaagaaaaagaaagggtttttaaagagcttggaatggaatgaaatgacatgaaaagaaggaaaaaaatccaaacttttgaaaagggtaattagatataaagatgaaagggagcaagaagaagtaaagttttgatttttaattcttttattgtttcaaaggtgtaatctttattttgtgggtttcaaagaagctatgctgctcttctgcaggcctcaactgttgccccccccacagcgatctctattttcttttcctttctttctttttcctggaaaatcacattgggatgctcaaattccatcatcatcacccaaagacactacaaactagagagagaaagaaggaagggggtgtttgttgtgttgtgttatcaacaacatcagaatgtggttgtagataatcattgattattatgaagagtgaatgagtgcatctatatataatttaatattagtactatctaatattttttataagtagcgtcttatgattgattaatgaaattttttataaattattttattaaattatatagaaccgatatttaattacactaaaaatggtactaagcactaataatatttttttagcaattatatataatgtgtagattaactttttgttgttatttattcttttctcccatattatattcctttgaatggtcactatctcaaatctgaattgatttttaactaaataataataattgtaaaaattaatctaatcacacaatattctattctattccatttattcattcaattctttttttttt

SEQ ID NO: 7531 - DNA, 712 bp, Cannabis sativa
accaaatgtacatttcaatttaatttgatatactcgatgtcttgatcaaatttagtattttgcattatctatgtagtatgaaatgataggttgtattcaacatcaacctactccactattacattctctttagtcacaaaattcatgattttatgaattctccatctatatgttgtattcctcttagggttcaggattctttactgtttggtaatttcatttgtgctgtcacggagtcacactagcagctattccatatttgtaattatgccatagtctgtatcgaactttcccaagtctaaataattccttaattgcctttaaggaaacctaattattcagccttattggtagagttaatgattttgaataggtttttacacttctctaaaaatcactactccattccagagtaatcactatttcttaagtagactttctagcgttgacacaagtctaaaaatcagagtttaggaatatactaatatatatatttaaatatttgtgagattttttttttgaaaaataactgatctagtgagacctagatacaaccaccacgaaaatcacaatcaaatctttacactcagatacaactataacaatccaattataaaacaacataaaacaaaatttcaaaacaccaccaaattagaatcgattttcaccgcacgttgttggggcctacaaaaaataaaataaaaataagaac

SEQ ID NO: 7532 - DNA, 840 bp, Cannabis sativa
acaactagagatggttggaaaacttaggaggaaacaaagggtttctagatagataataagaggaatactgtttgttaattttttccttttcctttttccttttttttaaactttatttgtaattacaccatatttagtaataaactaacaaagaagaattaaaggtaggagtaagcccaccttcttttattatatatatgtatatacttagagtaatcaagactgctcagcacaacagctaatacaaaatacttacaatagatatatttgtataattgtattagtaatgcatatataattagtacttaaattaaaattcttgaaaagggatgacaatattgaaatatataaatacatgtacacatacataccatatatagagatagtttaaggtttaactttatagccacaatcataggcatactggaggaggtcttcgaattcgtgatcattgatattaatataaccgttatcatcggcatcggcacgccacagagctttcttggctctgtaaaagccgctagaggaaccaagatctttgaacactttcttgatctcattcttggacagctttccatctccatccatgtcctcacttatgaacttactccttagttgctctttcgtccattcaacctcaacaagtttggacttgactgccaccacagccttcctcgtatagtttccgctgatgttggggacttgtatagccatatttaacacaaagctacacaagaaaagaaaagagttgtatgtatatgttcactacaagatcgaaacatatgttgctttatataggacttatttctctagatagctaggtatatgggtccgggacac

SEQ ID NO: 7533 - DNA, 1493 bp, Cannabis sativa
acccgtcgcctggcaaaatctcataaaagcctcattaacacatctgaccgagttaagattccccttgcaaaagataatgagatcatctgcgaaacaaagattagttagctttaaatgtttgcataaagggtgaaagccaaaccctttcctctcggagaagtgagctaataatcttgtcaagtactccatgataaggacaaagatgagaggggacataggatctccttgacgaagccctttttcacctttgaacttaccctggattcttccattcataagcagattataactagttccctttaaacaagtcataatccaattaatgaatctagatggaaaacaaagattgttcaggagatcttcaacaaattgccagtcaaccgtgtcataagccttgcttaagtcaatcttcataatgcaccttgctgaaatattcttcctcaagtaacccttcaggagatcttggaaaaccattatgttgtgagcaagaagcctgttcttcacaaaggccccttgattgctttgcactagaataggaagcacctccgcaagtctcgagcagatcatcttagagatacatttgtaaattgtgttgcaacaagcaatgggtctgtaatcactagcagttaaaggattaacaacctttgggataagagtaatcaccgtttcattcaaacttttcggtaatcttccatcagtaaagaaacccaaaacagctttggaaatatcatcaccaatatccttccagagattaatgaagaaacccgaaccaaatccatccaacccaggactcttagaagaatgaatgctaaaaagggcattcctcacatcattcttactaaagggtctgatcaggttcacttgctggttaaaattcagtctttctccatggtagaggcaatctgtgtagattcggcacgtcgctgaactactgctacccatgaactgtttgaaatgagctaaaaagtgatgtcttactttatcaaagtcatcttcaattgtgttcccttgggtaaatgtagttattctgttttcgagcttccttttcctcatagccgcatggaaataattcgagttttcatcactgtatttgatccaagtgatcttgctttgctgagagataaaactagaatagtttttctgcaattgttggagaagctgcaactgttgggaagccatctgttgaagtcttttgtccgtcggattcttggcggcttcatcttgagttctactataaacatctttagcttccctatatttcacagttaagtcacccacttcactcttactgaaccgaattaaactctgtcttacccggtgaagcttctgcataattccctctaaaccccttctatcagtaggagtctcccaagcttctaaaaccctttgtttgtagttcgagtgatctgcccaaaagttacaaaatctgaaaggtttgaagcccacattactcttcttctgattccggattaagcaaaagctatgatccgaaa

SEQ ID NO: 7534 - DNA, 1167 bp, Cannabis sativa
  modified_base (740)..(742): a, c, t, g, unknown or other
taattctctttattgatgcacaaaaaaatagtgagaatggaggtcggaactgaagcactaaccgttgcaagcaaaaccaatcacgcgacctaaaagataacaccccaaaattagttggatgtggggtactagctgatatgtttggctgtggcactggttgttgacacaatgggtgcaacataagttacaccaactgcagcaggaagagccttagttgaaccaacaggtgaagataataatttaggtaccaacagtggagtaacaaatgtagtagtaggaaacaattaatgggcagaatttggtacatgtgaggcgtgttatctcaatttctacacagggtggtgtggcgttcatttaggtgatatatggaacactttaagacatagacaggtgataccatattcgacatgttgtccagagtgggttattcctcaaaaacaacttgtttgaagaataagttggaatattcggatagggtaaatgacaccgtccgaccaacatcaatctcacagtaagcccacatacactgactaggacaaatgtagctgaaatatttagagatattttctttatttattttattaattgatttcctattttaatagactttccacacgtttggacaactatgagtcatgagtcttctctagcaaatgtaaatatagctcatccgaaaagtggtgctgagttattaagaattgtattgtaaatgttttgaatataattttatattttataannntattataatggcatgtcttgtaatattttttttttgtttttttttttaaaaagggaatccctaattgtaaaagtgattatgccatgattttataatttgggttattagcaaaattttattaaatcacattttttttaaaaaaaagctaatttattattatatactagtttataaaagtaaaaatatgtggcgtaacgttataataatcatgaataataatgtgtttgagatttaatagaataacaatatgtttgaaatttaactaaatttatatactaaacataattatataattatgaaagtaacatatgaaccaagtaacaaaaaataatttttaatattttattaattaataaataaagttacattaaaatagttttatttatgtaataaaattttgtaattttatttatattgaaatgagt

SEQ ID NO: 7535 - DNA, 1254 bp, Cannabis sativa
agagagagagagagagagttacagatagcaaaagaagaaaatggtaaaaacaagctaggtgatattttctgtcaatattcttgaacattttattgaaggacttattctttgacctttcttcattaccaaatttataacaatttactaaccaaatacgttaacctaaaagtagctatagggtactccattgtgggctgagctgagctagtgcaacattacaagagtacaaatatgaaatctacaacctctacacgtttatgcaattaactatgccaaagggtattttcgtctcacaatttgttttatctcagagtttttgctgaaaaagaaaaattattaaaacacagacacaaaacgacacgtggaaaaccattttaaggttagtgacgactttctgatacttcataaaccagaaaatgacaacttgaaacgctcacgctcgattgtaagccgttggtgtcacattaacgttaaaaaactcaaaacacttgcctttattggaatgcaagtaaatgcacgcgctaaccttgcgagtgtggattaattttctttaacaaagatagagtagcaaacatcttacaatggcaaaagtggttttatatgaaaccaggaagaagtagaaaataccaaccctaaaaattttaaaaaagcatcaacatttttttcttttcctcatttatttatttttctttaattaatatatatatattaaatacagaatgtagattggcaaataatccaaaggttataaaccaaagagtgatagatagatagatagataaagagagagaatccaaagctaagaaattaaagatcagaaatcatttcatcacaagcatcatataaaaaaaaattatatattatatatttttctctctctttttctactattccattcctttctatttctttcttctttccttctagggtttcaacaagtggttgtgtttataagagtgtatccaactttgtgttgtgtttcacaaatttggggacagtttggtactgacccagaaagagaaaggctcagtaggtatacccaagagagaagaaagaaaaacaaaacaagcaaaattgtttagattcatcagatcgatcgatttcagtattttcttttttatcatatataaagaaagaaaaaaaaacaacttaaatatttttcctttatatattattacataatatctgtgcgtttttgttttttagataaaagagaagtaaaattaaggaaaataaaagggggaaggttttttt

SEQ ID NO: 7536 - DNA, 788 bp, Cannabis sativa
ttacatttctcaattttaaaggataatattaataagtgaggcatattggcatgtgatgtcccattcacacgcaaacaatttcaaaagggtcttttggttgcgtgaaactattctcggaagaaattaataccatacaagtaccctaaaacaaaacaaatttatcttcttcaatcacaagtgtgaagtaagtaggtaatctcatagagaattttatgacaaagatatacgcagattattatgacgtaaaagttatcatcatggtctcttattgtcttaatcggttaattggaatatttagaagtaagcttgtactagaaaagggaagaaaaaaagtgggtgggtgccgttattgttaaacagagtatgtgacgattctgtgtttaatctttattatgcactttgttgttagtaagatgtaaaagtaaactaattagaaaagtaacgacaaatctattattaaaacaatatatatacataaaagcaaataaacaagcaatcacatacctataaaacaaaagtattcccattacccaccaccactttaaaaatttggtatggttgtaaatatttatgttatattatatgtaattatataatgatttttttttttaaaatattacaatataaatttaaatttattatactttttttttttcatcttttatcttatatcaaagtatctattttaacattacaatttaaatttgaacaaattgcacttaaaaaatatcttcttgttttcgaatagagtacacgtgtaattctaagttgatttcagcttagctact

SEQ ID NO: 7537 - DNA, 620 bp, Cannabis sativa
atccgagtctgaaaaacctaggagatgcaaagaggagttggcagggtagagtaatccctgccctgggctacctttgaggtatcggagaagatgtgacacagcctggatatgtggtgttcgaggagctgacatgaattggcttaatgagttgacggcaaaggtaatatccggtctcgatagagtaagatagagaagcttgccaatgagttgcctatattctgaaggattggttaaaggctcgccttgttgatcatccaactttgttctaggatccattggtgcttttgctggcttggaaccaatgtagccatgatcttcgagtaactaaagcgtatattggcgctgagataagaaaagtccagtagaggctcgggcaatttcgaatccaagaaagtacttgagttgaccgagtgccttaagtttaaattgttgattgagagtggtctgtagctggtgtaaaatggtaatattaggaccagtgatgacaatgtcatcaacgtaaacaaggagagctatgtaggtgtcattggttccacgagtgaatagagtataatcagctttggattgtttgaatccttcttgtatgacggctgcagtgagcttcttgtaccattgtcgtg

SEQ ID NO: 7538 - DNA, 563 bp, Cannabis sativa
tatctacagtaccatagatatacaatagatcatccagttcactacttgccagtaacctttatcaagattgtgcatgcagcgactcaccatactaacaatatgaaaaatatcaggtttggtgcataccattgcatacatgagggcaccaacatttttatatggaatacgctccttttgcttctacacattcgcggtgttaggtgacatctttacactaaacttaaaatgaggtgcaagttgtgtgctaacaggtttagtcttctcatccatgtcaaacctttacaatactttctttaaatactgagtctatgtcggacagactgtacttgcaactttgtttcttgtgatcacaattccaagaatcttcttagcttctccaagatctttcatttcaaattctaaacttggctgagtctttagtctagcaatctccaccttgctcccagataaaattatcatatcacaaacgtataagagcaaataaatgaagtaccatcttggagtttccaaaagtatacacaatggtcgtattgactgcgagtgtacttctgctcactgatgaa

SEQ ID NO: 7539 - DNA, 831 bp, Cannabis sativa
tcagctttggtgacaagtcacacattgatcgaacaagaggagtacctcttccaggccctacgcaaaacataaaaaggaccaaagttctattcgccaatcctcgagagaggatgagcaaaaggatgagcaaaaggatgaaggtgttggaagtagagatgcaagacctacatcaatagatagctacttcctcgaagagagacttggatgatgaggaggagtttgatgaaaaatcccattttctcaagggaattcgaattaaaccacttccattaaactttaaggaggggcggatgacaccaaatgatggtacaaccgatccaaagtaccatcttggtgcttttaatgagctgattaagatgaagaaagttccgagcaaggctagatatcaatgcttcgtggtcacgctagaagggggtgtgtataaatggctcaagaggctagaaccgggggaaattgcatctttggagaaattttcagaagagttcttccaacaacatcaagcatcatttaactatatcatgcttatcacaagcatcaccaatatgaggcaaggccaataagaaagtttgtaaagctacattcaatgttgtagctaccaaggtggggaaggtagatgaactcaagatcgccataactacaagagtatgctctggaggtgggctatgagagaagatgttgaaaagagaattgattgatctagatgacttctatggaagaagagagaagtaaattcatgtggaagaagaaaatgtatgcttaaagaagggtatgagtgaatactcctcaagaaacaaatcagacccttacatggtctgttagtcaatacacctc

SEQ ID NO: 7540 - DNA, 610 bp, Cannabis sativa
tttatggttttttgggggcaaaatgtacaaagatttaaaaaaaaaaatatgaaaaaaaaaatggtaatggttaacttaactccttaaagtaacaatttatactattttttcttataaaataacacttttgaaaaataaaagagatcatattttaaaaatcggtgtaattttcataacaattgtacacttttttgttacataattaatgccaacacaacacctaccataaaaactcacaaatattaatttattggaggttgatatattaggtatttaataaataagggatgagaaaaagaaaaagtaatttaattttataaatgagaaatatatttgagtacgtacttggtgatgaagcgcttggaccgtctgatgaagttggacttcccactggtattcccaccactgtcaaattaaaataaaattattattattatatataaacatgatattttttttaaccaaattttaactaaaatagttaaaaaattaaaaataagctttatttttaataatattttataatttaaattttttaaaataattataaagtaacaatattttttattacaaaaaaaaaataaggaacttcctatatttagaaattttt

SEQ ID NO: 7541 - DNA, 871 bp, Cannabis sativa
atgtacatgcaaaaggctataatgttctaatggccatactctaactatccatacaatgccaacatcccctggcaaaaatttccaaaattaccctatagttaggaatgtaactctacaggcaccattttaccattttgcatatttcagatattctagacctatcttgatctaagtatttctatcctagatacaaaatacaaagagtcaacaaagtgttgggatacttacttggtatatgagtagaaaatgaaagattgttagggaaatatgcccaaaagttgtgtacctagtcaatcacacgatcgaagcgcacatcaaaatccttgttgggctaggtgtggaataattcaaggtttaatggctctacatttggaaaacgggttgagtgaaggtttataaaatattgaatcaagcaatcaaatacttcttgtattcaccactacaagcgattgcaaagttaagggtttttctaaaatgtggggctctagtttagagtttgaaggcagagaggtgttgaaaagtttgaagtactaaaaaaagagagaaagtgggtttgatgaatctatttattctttggctaaatcctttcaatttgaaataaaaggtccagatcctctctccaaaaagtacaatttggttcgatggatggaaagttgaaaagatggaatttaaaacatgcttagggcatttatttttcatcatttcccacctcgagttccacatccattgaagaatggtcatttcaatcaacctgccatcattacaacttcttcttaaagatgcacccctacacgcgcatgttatcaacgaacacattaaaggcacaacatgcatgccatgacgtggcaacaatggttcttggtcctataat

SEQ ID NO: 7542 - DNA, 704 bp, Cannabis sativa
gtttaaagcatatgttgaattacaatttaacaccaaaatcaaggctattcaatctgactggggtggtgaatatagaccccttcaatctatccttgcacctctgggaatcaacttcagacacccttgccctcatacacatcagcagcaaggcagagctgagcgaaaacatcgacatgttgtcgatatggggctgtcctttcttgctcaggcaaacatgccattaacacactggtgggatgcctttaccactgcagcatacactatcaatcggctccccacacctgttcttcaacttagaaacccatttgaggttctctttcatcaaaaaccagactatacatttttaaagacctttggttgttcttgttacccattgctacgaccctaccaaaccaacaagcttgcctttcgaacagcccactgcttatttcttggatatagcccaagtcacaagggctataaatgcttgcatccatcagggagaatttatatagcaagatctgtcaaattcaatgaagttagttttccttatgacacactatttcccaaatatattcccacatcaacatctattcctacagcccccacagatgtctttcctattccaccaccccctacactcgtccataacacctcagacacaattctcccacaagattattcccatattgatgcctctcaaccctcatcaccaataccacaac

SEQ ID NO: 7543 - DNA, 1261 bp, Cannabis sativa
tgataaggtatatgtatataataagatagaaaaatgttaatatgtatggtatttagtatatttgtaagatgtaatataatttaatatcaaattttacttattttactttaataaaaatgatgaaaactattaactaattataaaatattattttataatagtgctagacaccttaatatctcataacaattaatacttgcatattttaataattccctaattaacattaattaattattactctcttcacaaaccaattacctcatatatacatatttttataattatgtccttctgtttgttttatttattatcattattatacgaaatcatgaaataattaaagaattaaagacaaataatattaataatattagaatagtgtaatttaatattaaatctcacttattttattttaataaaaattattataagtggttaaattttgtaggcaccacctaattaattgtggtgctatagatttatctattatataatcaaatctatttaatgctaaattaatggtgtgatactatatgagatataaacacatatatatttatatatgtatataaaaaaaaaaaaacactacataatatcaatcaaactacacatatgtacatgatatacaataactgagaattaaacttaagttttaatgtcgtaaattataagaattattatcgcaaaaaattaaacttatctatatatttacaaccgaaaattaaacttaagtattaatgtcgcaaattactcattaattgataattatgaagatcgaacaattcaaacatttatcatatatataccctactgcaaatttccatccacttaatttcttctatattgtaatttatctaaaaaaattcataaattttaagcaatattctagataattaattatagttatacttaaaaatatgaaacaaaattgctttaaagcctgtttcatatacttataaaacaaatcaagtttattttcaacattataaattattagaaattttaaaaaagaaaacctaaaatgttctaactaattaattactacaaaatacacattgttatatatataaaaaaaattataatttcttcacatgacaccaaaatagatccgctttgtaccagagcaaaatttactcctcattataaaaactccaaatatatatacatatatcaataaagcaattacatctatatatatatatatatataaatctgtatgacaattagtactgagtagataatattcattttgtagtca

SEQ ID NO: 7544 - DNA, 614 bp, Cannabis sativa
aggccccgaacccagaacatgccccgaactggaactggaacttggactccgaactcgaacccatacccagacctggacccaaacccaaattccaggacccgaacctgtaccccaaactcaaaccttggccctggatcccagacccaaccctagacccgaccctagacccggccccggacgctagggcctggacccaaacctcggagggacctcggacccagacctgaaccccagaccccaaatatggacccgaacttgaactctggacccgaatcgagacttagaccctggacccagacccatgacccaaaccctaaacccgtccccgaaccccagacctggatgcagacgcggaagcagactccagacccgaactcgaacctcggacccaaacttgaggcccggggtccgagtcacggttcaggtttgggtccagggttcaagtccaggtcagagtcgtagtttgggttcggggttcgagttatggggtttgtgtctgggttcaggtccgggtttggggtctccaaatgtaggtttgtgttcagggtgtgggtctgggtctgggttgagtctaactctagggtctggggttcgatccgggtccaggtctgggg

SEQ ID NO: 7545 - DNA, 1014 bp, Cannabis sativa
gcttatacgtatttccctatagatgcagtattgcattgaatagacctccgtaaacccaagccaccttctttttcagacttgcacacctccttccaagacacctatcctgagcccccatattcagcttcctctttccatagaaaatcacaacaaaaccgtatttactttatgaagaactgattttgaaagaatcatgatttgcctcccctacgcatgaatcgtgatacatttcatattttatgttacacgaaaaggacataggaactaatagtaaactgtcaatattgtatagctagttcaaatatatgtaaaattaagggataggcaataaaatgaatgagaattagaattaagtattcttactagagtttgacactaattcaatgggtgtgtctcaatatttttattaatttaatagttaagtatcttgtatgctctttattattggataggtgaggattaatcgatctaattcaataatataactgatcagatatctaattatgattaaatcagattagatattatttttgaatattcaattaaatcgaatcggatgttggatggagtgttcgaaaatccaatacatctaacatttaattgaactaattaatatttttatttagtttaaacgagtaattagattttatgttttatatgtaacaaaatatatatatgaattttgatattaaaattttactttttttttttttacattgaatgaatccaattcaatctaatagatactataattaaaatatggaatagatctgatctaataatcaaataaatattaaatttaaaatattagataaacttaaattaaatcaataaatttatatcaaatggataaaattgatccaatttattaaatgttagatcgattgaatgattaaaattaattgaatcagattaaatgataaaaattgatatttaatatataattagatagaatctagataaatttaaaaaatattaaatgtcaaaaaatattcttgtttttttttttttttt

SEQ ID NO: 7546 - DNA, 660 bp, Cannabis sativa
ttaaactgacacaagtagcattggtttcgaaccgacattttaaattggttttctttttcagttttgaacattgactgattatatagtggtgggtcatgctctcttggtgcttgtccttcgtgaacattattgtcataggagattgtattgtaccccctaagttagggcttttggtgatggttttctaatgggacgtcctaaaggatggtattgcttcttagttacataacattagtgtaaagttttcctttttgtatgttgttgttgttgatgatgaattaatgatgagtatagcaatacatgcgttcaatgtgagtgtgttattaattaattagtaaaaatgaatggattacgtactaaaatgatgataaggttttacgtgatacattcttggtctttaacgtaacatcttatgctctcatcagttatatataactttattaaatataaagtgtgtaaaaaaattaatgcaaaagattaaacccaaaaaaacaggtgcttctttaagaataaattaaaaaagaaaggataaataaataaacaagtgctaataacgccataatgcaaaaattcaggcttttcacaaattaattaattcttgcacgaaatcaatgaaactttgctttcttcttaagatacgtacgtactgaaatatcaaaa

SEQ ID NO: 7547 - DNA, 640 bp, Cannabis sativa
gcttgtttttctcttaatattcactttagttcatgtcttttccaacttatttggttggacgggaaagcaaccaagattcatgaaactctcaatattcagtgccacaaagctttggtgggagaagcaactgtgtgaagttttcaaagtcaacacgagggatattttgtattacaagcattattactattatgtactaatagtgcctaacatttgataatagactcctaaattttacttcataaaatgttgcaaaggatatttatagccactttaaagtaaactcatcataattactctaattaaatttatttaatttgtcgagacttttatattatttttcagtaaaatagtcttctaggtaagtcaattattgtcaacactctaacactactatgagttagacattatactagtgattatcaactttttaaagtaattataaaattaaaagatgtgaaatttgatattaaattatatagtacgacaccattaagtagttttggacacaccacttacatcgttaaacaattctttaaagtcgcatgttagattatttgggaataaaagttatttatcattgacttgacaccaaatgtttttactcaaatttcttatctttttctttttatgtatatatata

SEQ ID NO: 7548 - DNA, 1340 bp, Cannabis sativa
aagcttcaatgaatgaacatatatgagaaatgaaaaacaagacctgcgtctttttttattattgaataacagcaaggcttagcttcatatgccttgttcttattcttgattaatattgtttgtatgactttctatcaacaaaacactctaagtaatacacaagtaatgttgcattgagcactaatcactactcactaaccacaagtaatgtagattttaaaaatcaatcgctaattactattcaccaatccctaatcactatagtagtagtagagtcttactatattgttgccattgctattgctattgctagacttaagtattatgttttgtcttatcgttatagatatgacgaaagtatcacctataaaaaaagcgcaaagagcttcatcaagttgtcgcgataataaaaaaaaacgtaatatctcttcatcaagtcatcgtggtgaaaaaaataatgtcgtctttcaggtatttttttttaaaaaaaaaaatattttattatagttaatgtattttatgtgctccaagaaatattgatttatttttgcttgctttgtatatgtgcactaaaacttagatgcatatacattagtatgtttttgtgatactaattacgtacaaacaaattgctctacccacataatttgactttattttttgcatttgtatttattaagctgatacataaacctttaaaattgttatagtaattggtaggtgtagtttctaatgtatgttctaattgatgctaatagttctttaaaaaaaaaatttcccttttttgaccttaaaaatttacttcttgatgatttttgcatccatgttacatgtcattggttgattctataaaaaagtttctaagagattgacaactacaaaagttgaaagagtcatgtttcatatatcttgtaaatttggatgaatctcttaaaatagcaaaaatgattatgcactctctcttacttgatcaagagtgcaaattctaatggaaataagctttaattaagtttttatagcaacaaagtgaagttcaatattactgagtttggcatcattataggattgaattgtaatgaatttctactagattctaatatcattgagcgcccaaattgattactcaacaagtacttttctgacaatgaatctattagcagaaaagagttggcagaatgtcttatgaaaactcaaattgatgatgatgatgatttagtaaaattgacaaaggttttcattgtgtagaatattttacaaagtatgtccaatgtcatgtagacaattttgttatgaagttggttgatgatgaaaaaatatttgaaaactatccttggggtcgt

SEQ ID NO: 7549 - DNA, 733 bp, Cannabis sativa
  modified_base (299)..(299): a, c, t, g, unknown or other
tggccatgtatgacttgggttttctaattcccgattgtgacctggtgcacatgttatgagtcctaagattggctgcagttgggactggttcagtgccaactgagggtgcagggggtaggacagtaggtatgttttgagaatggtgtgtagtgtttagttgtggtgatttagaagggatagcatctagggagggtgatctgagaggaatagaaggtggaatagaggtgtctgctggtgtaggctgtatatgtgggtttgtaggggttaaggtgtttgttgtaggtgaaaggatagtagtntggggttgtggtatagggacagtggtctcattggcacccgaaccagtagccattgttgaattaacacaagaattagttgcaacaccagtagaaaagttagcagtaggaaaatgagatggattaggagaatttacctgctgctgtgagtgctgaacagatgttgcaggaaaagagttctcattaaagaccacatgtcgacttataaacaacctgcccgaggaattttcacaaagatatcctttgtgcatggaagaatacccaagaaagatgcactcttgtgatctgaactccattttatgattgttgtaagaccttaaatgggaaaaacaagagcaaccaaatggttttaaaatattgtaatcaggaggttgaccaaataggtactcagatggagatttattgtgtaaaatcggggttggtaggcgattgatgag

SEQ ID NO: 7550 - DNA, 785 bp, Cannabis sativa
tcaatgatgtgtatctcaaaaactaaggttggtaggactaccaagtcccattggaggctagctgttgctattggaaaagaattgttcaagtcaaggaaaggataaaattaatcttctctcaagaggactaaatatcaatttttcatagctggtttgtgttaaaaaatgtctcaaggagacgtagttagatggcattatggtggcatttaggatagattttgtgctccaaaatataggttcataagctggttagatttgaagagcagactttcgacatatgacaaactttgttagtttggttataccaaatctttatcgtgtttattgtgtggaattagagtggagagtcattctcacctcttctttggatgtgtgtatagatatatagtggttcaacatgtttggttttgaactaaaatttctactcaaaaaagagatctttatgaagtctttgagtgagtggattcgacaattaaaagctttgagggttaggagaagagttcttttgagtgccataacaactatgatttattacatttggcatgtacttttggatcaaaagttacttactgttaagattactacacgtattgttcataatgtttattctagaatacattggttgaatactacgaaaatgagtagaaatgatagaaaatgggtggaaagctttgaataaagctttgtaactaactttaactctttgtaactaataaattattctaacctaccaaaaaaaattaaaaaaagtgttaaaataacacatacaatagatgaactattat

SEQ ID NO: 7551 - DNA, 721 bp, Cannabis sativa
ggcataaaacccaacagcatcgaccacagcactttctttacttcttactccgagggaacggcacataataaattgttctcctcatccgaaatagaccgaggaataagatcatccaagccatcatcaatgaagggatttgaagaggtaaagacttcttgaaagttagctctgaaatagtgcacaatattatctctgccctcaatcaaagtcccatcatcacaagaaatttcccaaataaaattccttttccggcgcacttccacagaagcatgaaagaatttggagtttctatcaccctccttaagccaaccatccctggatttttgtttccaaatagactccaaacaaagctccgcttcctccaattccgacataatagttccttccaactccacattctcatttgaaggaggccgcttttgaacctctcctaacagtttttcaagagctttaattttggtttggaaatgaccaaatacattggcattccacactttcaaggctttagcagtgagagacaatttttgacaaagaatgaagctatgaaaaccgccaatagcttccttccaagcttcctcaatcacccttctacaatccggatctcgactccaagcgtccaaacatctaaaaggcgtcaccacattctccatttccatataagtatcaagaataatagctccatgatccgaataccggataggcaggttcctcaccccagcct

SEQ ID NO: 7552 - DNA, 542 bp, Cannabis sativa
tttaaagtagtaaaaataaaataaaaagttcttcaacgaagaccagctttggttgaagatgaagtgttgaagccattaaagtagtaataataacataaaaggaatcagcgaaaaggaggccaaaaaattagcgaattgggttttgtatgggtgagagacctgaaacacggtttcgtttcggcttctacttcacgagagcccagaatctcatttgcttcgtaaggtgatttttggtcgataaattgatctgggtctggttcaagttaagaaatttcggtgacccagaataagctgaatttttctgaattaaaaaaaatggcttctctgtcaagcacaggggtagctcctctaattatacccagtgattctctccggtctgttctgttcggaagaacaatgctttatagcggttctaggcagaagaaagtgcacgataagatcatttgttcttgcatggcgcctccccagaacttgaggaatgatgggtcctttgctaccaaattcaatgtaaatactttgcccctattttaatatagcttttg

SEQ ID NO: 7553 - DNA, 933 bp, Cannabis sativa
actacaaaatgcacttttggtctcagtttaaaactgagactacttatacctttagtgtcggttcataaaaccgacacttatactacagtgacaaaaagttaaaattttggtgtcggatataaactaagactaaagagcttttaatgtcattttaaaaccgagactaaaagtgtatatatatattcctttagtgtaggtttaaaatcgagactaaaaggggtatttccaaaaaaaataattattaaaatagattttagtaattccaaaatacaaaatatgaaatattatacaattaaaataaattatacagataaattaataaatataaaaatacattaaattttaataatgcatttaaagattattattacacaacaaattacatatcacaaaatatccattacaataaataataaatataaaataatatataaattataacaaatattatattacatatgattttatttaaaataaataacataatttaataaaaaacctaaatcctccagaatttgtacaatcggtctggaacagtctcgaacagatgccggagctcgcgtacctagtaccccaaacaacctatctccacaacttccatggctgatgctacccaaaccccacaccgccgactccatcgccccgcctttttcaatctctcaaccttcctgaagctttaccacacgacatgcgtcgttgcgatggttggctcgtaatcctcgacgaaaccccctctgccctccttctcaaccctctaaccagatccaacgtcctccgcttctcttactcggaaatcgaccgagaatacgccctctgatccccctccggcgagccatacaccctgaatatgatgcaaatccgtgactctttcgtgaagaaagtggtcctatcatttctagcccaaaacaatccaaggatttcgtgaggcagaga

SEQ ID NO: 7554 - DNA, 882 bp, Cannabis sativa
taactgtgatgttgtcattcttttgaatctgattttatttataatttttttatcaaataacctagaaattaggcgactgattatttggttcgttattctaaccctaatcctagttgtgtctctaacatgagagagatgtatcgattgaattgcaaactactatttttattgattgatgttgcatgatttattaaaaaaaaatacaagatacacattaaacccacaacctatactttatttcttaacaaagaaattctaattaagaaaattgcatatttattaattaaatatgcaataatttgattttgaaagacttttcaatataagaataaaaatattaattttgaaaataataaaataaaaaaatcacataatcaattttcataatttttttttttgtcaattttttcaaatatattaattaaaaaaattatattacgacgtgactttattttatgattttttttttttgaaaaaaaaaatgtaaaatataacagttacagctaactaatcttgatcatttttttattgtggtggaccttattagttattacaatgaggtgagatgagacatttataaacaatcaagtacatcttaaatccctctcaaaaaaatttaaaaaaaaaaaaaaaaaaatacatgttaaatcatttattgtgatggaccttacctttaccttccatgataaaatacatcttttataaacaatcaagatgtgtctgtcatgtgtgcccataatacaataacaaatattaaatttcaaacctactaatatgtatatagaaactccccattagtctacacaagatttcttatgatgactaaattagctttatcaacaattataaatacagtttaaatgacctaccttgatatcattt

SEQ ID NO: 7555 - DNA, 860 bp, Cannabis sativa
attattaaaaaaaaattatatacaccatatttacaaaattatacaaccacaaaataattatatcatacctataagattatatatcacttttatatataataaacttaaaaactaaacatgcatgctctaaaaaaaataatatagtataccatataacaaaaaatataaaccttacaatagaaatatatatataataacaacaaataaaaataaaagtgtggagaaccaaaaactaaattaaattttcaagtttgatatggaaaattttgttgaattgagtattttattataagagtattggcagcgaagatacgtgaactatacagtttgtgacacttatcccaataaactgatttttaggggtaaaactctcccaacctttcttctattttgctatttactattctatccaacaattctgttaagtgtcatgttggatatgccacaatatacataaatatatatgtgacagatttttagcagctatataatgttaattatttaaatataataaaaattattttgaaattgtaaaaccattttaaaaaaaaataaaaataaataaataattacatttttgtccctttgaaccatcgacaacatcatggttcattgttctccttcttcctcctttcctttttctttctctacacaccctaaccctctcaagaaccatctaatccgtgaagagcttagttaaattcaaagcttcaagatccacagcttacttgaggaaggttgggtcctcgtcttcgagaactatctgaattggtgacgagccaaagttgtcagctatggcgagaaagatcttcttcatctcgaagctgagctcttcttgtcagaaggaatgaaaaagatgt

SEQ ID NO: 7556 - DNA, 609 bp, Cannabis sativa
atagtggatcatataaaggagaagcacagctggggcgaacccctttaccatgttgatgggctcggttgacttgcccagtttgatctaaaatgttaaaactccactaccacaagtgtggttggtgcataattaggtggactcatttgatactaaaatccaccacatgcatgtatattattaaaaaattaggattattacattacattagaactagcaattggaaaacgcagcaaagccaactaaaagaaaaatgactttactcatcattataactaactagtgatagtggagcagggtagtgagtagtgagaatcactgcagcaatagctatagtgcctctgagaaagaatgtttctagttttgtaaaggtctgcttctatgcatgctctcacattgtcacatcccttttcaaacactgtaacggtatcgtttttagcttccttccatttacaaaacaacaaaaactaaagtcactttaaattttattttgttcatttttgtggatgaccctattcaattaaattaccattttcttgttgtccctttttctttatggcttttcctaaaatattagctttgtgtatgagtccctctctctctctctctctc

SEQ ID NO: 7557 - DNA, 1735 bp, Cannabis sativa
gcagatttttaacacacatttgcttacgagggattacttacaacagattttagtcattccgagcaatctctgcccagtgtgtgactcggctttggaaactcatgatcacttgttttttacttgcagctatgcaattcaggtgtttgcagctgtcaacaaatggatgggaaatttccaatggcctcggtcgattgaagaaatggttcgtggctgctgtaacttaaagaagaacttgactgaccgaattatcaatacagtcctggctgctgcactgtactttctctggaagagtaggaacaaatgcatatttgatcttagttgtttgactcctagttgcttgagtttggggattaaagacactgttaggtggaggcttattagcaagggtccttttaaggattgtaaaagaaacaagtatttacttaatgtaataaataagtggtaggtgttttttctttgggctgtagctgctggtttctgcagcagcagccgctggttctgtaggcttttgccttgtgtttgtattgtttgtcttttgaataaagcattccctttttttaaaaaagaaaaaaaaaacgaaggtaaccattccaagggtagtagtaatggtcaaagaccaggatcgagttccaacacaaattcaaaggtaggaaaatagtgctaccattgtaagaaggagggtcatttcatagatgagtgcagagctctcaaagaaaagcttagcaaagaaaagaagaaggattctagagatgcaggttgtgttcttgatggatatgagtctgcttatgccctggttgcatcaagtcaagccattggtgatgactggattctggatttaagttgttcttttcatatgactcctaacaaacacttcttttgcagctttcaagaacaagacagtggcccattcttgttaggtgataacaaagcctgcaagattgcaggaattggttcagtattgatcaaaatgcacaatggatcagaaagaaccattagagatgtgaggtatgtccttaacctcaaaagaaattcgttatatattggtgcactaactcttaaaggccgcaacatcaagattgatagtttacttagagttctaaaagactctacagttgtgatgaaaggaaatctcagaaatgggatttattacttagttggtacaacagtaattggtagggctgcaacatcagtcaaaatgaagcaatagattagacaaagctttggcctatgaggtttggacatgtcagagagagaagtctacatgagcttgagaaacaaggcatacttaaagataaacttggtatgaaattagacttttgtgaaaactgtatttatggtaaaagctacagattaaaattcacaaaagtcaggaacacaacaaaaggaaaactagactaccttcattttgatctctgggttgcatccagaacaaaaacaattagtggagcaagctattgtctaagtatagttgatgactatacaagaaaagtttgggttttcttactcaataacaaaaatgactcatttaacacctttgtcaattggaaaactttgatagaaaactagacaaacaagaaaattaaaatattgagagctgacaatggattggaattttgttctgatgagttcaatatgtactatcaagaaattggaataagaaggcacaaaactgttatcaagacacctcagcaaaatggaatagctgagataatggactttattttccattctcgac

SEQ ID NO: 7558 - DNA, 850 bp, Cannabis sativa
aatttggtctttttattaagttctatccaattattctgtttaaatattgacttgtctttataaattaataactttaccccttaaattttgacaactatcaaatattacccctcaaaataaaaataaaaaagattcaatattttttttagtaaatcttaaaaaaataatttagatcttaaaaaaatatcattgttgacggtaagaactcgtcaactaaccttgtggcctgaaaaccaaaatttaaacaaactcaaaaacaaaataaggataaagtgaaatgcaagttttaatagctaatagattttttgagtaagtgagagtttcttttctattgcatccaatatatgtgttacaagattgattttctaaccccctctcacacatgagaatggggtatttatatgcactaatgacctgagttacattgtggtcccaaagagacaagttgttgctttccatatccaaagcgcaggtacaggagctggtcttggacctcgtactcttgtttggtgtcaggtggtcccaggtcgcagaggtggtggctgcagcataccccttgctttcagagcttgaagaaggcgtggtcgtatgcttttccaagggaattctcttcaccacgtattcaaattccatcactgtttcacttcgcacacacactacacagggattcgcatgcaggcccctcacacaccatgggctcgcatgccaccccttccccacacacacacacacacgaatgggctcgcatgcgatcccccacacacacatgcatgcatgcagatgtatcgcacacggctctcgcacgaacgtcacaactgctcgcacagatgctcccccacttgcataaagg

SEQ ID NO: 7559 - DNA, 546 bp, Cannabis sativa
ctgttccacaacaacccttctttgactctttaaatcctgtacattgataattatatatcataatcatgcatgtacttaattaatcaataataataattaatatataaaagaaaaagcatatatataaaaaaaatttaagtgagagctagcattacttttgtttttattctaggcgcacatttcttatttttgatatagagagaaattgtaagctaatttttttatatgactatatacattatagttttagtacgtatcttgtttgttttggagaaattcaaaataatttaatatgctgaaaatatgattcaaatagttagttgcatatacttattttattttaaacgtgtgcaactaactataatcaacattattttttattatgtaaattatatataaaatttctcggaaacattatattgtatactgtcataataaaataaaattgaatataatatttctagatgttaaaaagagaaaatgctcctacagtaaaagcaaaagtaatgtcctaccaaaaaagttatatataccttgttgtttagg

SEQ ID NO: 7560 - DNA, 962 bp, Cannabis sativa
acttgaagaggaaaaggagatggagtctatgtttggttctaaatcccaaaaatttaaccctttaatttttgaaaattaacatacgtaaaagaatgtaattgtacatatttacttaaaaatttgacccgatgatatagacaatacttttagcatgtggcaagaaggaaataaccctggaccctacctcccaagactagggtggtcaacttaggcattggaaatcgtatcgatgtcctagttgacattagggggcacctaagtatcaaggtatagcaaagtcgtttttgggtgctaaccttcaacaatgctcaagcaaacaggtcctagtgaccctaaaacgatgaaagataaagctaaggatgtcacgtggacatcccatggctcaacttgggtccagtacaagtgctggcccccaagttaacatcatgtgcggcgtctcgcaccagttttggttccaagcaacttcttatgggcaatctccttagccattgtgctagaatacatgagaaacataccctagccaagtttcagactttagagataagtctacgagaaacgagacctgggcactatgaagccctaaagggcacccaagttgacctctagttagtctagacacaccacaactagggcttaggtttctggggacattcttggaccccaattcctcaaatccatcaaggaaaaacatcaggacatgatattttgtaaacgacatcttaaaggagcccatccccaacaatgggcgcccaggttgacatttcaacctgggcacaaattttgttttaccgagtgatgcttgtgcaaatttgactaaatttgtggagtacttttcactgaaaagagattgaacatcaatgagatgaaattcagagatgttggcccccacataggcgcccagtgcatgccccaagccactatggtggcctaggttgacgtatttaaacttacagcattctgaa

SEQ ID NO: 7561 - DNA, 533 bp, Cannabis sativa
atatatatatatatatgatagaaagcttatacttccacttctttatggagttgataaaaagaaatcttaaagccaaaattaaaaagatgaataagcgagatttagctattttagatttttataataacttgtaatgggtttttgttgtcctcactgattattaagtttttttttatcaaataaataaataaaagccaaatttttacaatagaaaaaaaattataggtaggtttggagtgttttaatttgttggacaagaaaagaaaatacacagcattttcaattaaagcactcaaaattgcctttatcaataatcaaaaataattttcaatttaagggtttggttatcatagaaaaatgtggatatgtagattcacaattgaaagtaaaacattatattttattgaaattaaatttaagtaaggcttaaaattaattcacaatgtctataaataatttatactcatacatgttacttgacattcttgtatttatttgatatgggacattctaatataaatgtgttaacttct

SEQ ID NO: 7562 - DNA, 1092 bp, Cannabis sativa
gtttgaaactaattccactaactattttttttttttaattcaatatcattaatttcaatatccattcaaattaaatatcattaattttcatttattaaaaaaaatcattaattttcatattttttctataaaaaaaaaaatatcttttatgaaatgggcctggtttttttcttacactaataataataaggcccataaaaggcccaaatgacattcatcttactttcccagtggaagaagttgaacgacttcggtactgaacattctgagaaagatttgaaatgttgttgtcggaaactaattcgttcatttgcagaaatattaataattaataattaataataataataaagagagtatttggtctattcgattctattactgttactttgggtctctctctctctgtgagaagatggagagcttgccgacgacgaaatcagagagacgatggaggtcaaagcctcttcacacgtcaaaaccttctctactcatggctttgttttcatgcattgcttggctctatgtagctggaaggtccgattctaccttttctcctctctctcatatttttttttatttctgttcagttttctttatttccttgtttggctcgcgagaaagtttaggaaattttgtattgttgaacaagttgaaactaaacagataacaaatgtagatttcggaaattttctatttcttaactgtgaagttatatatgctgatttttggctataatataaaatcaggtcaatttcgaggttcttaatacacatatatggatgccttgaggaaatttaatttcattggtattttgttgttatactactaaactcaatactttgttttataatgcttcaggctgtggcaggacgcggaaaacagaatgttactagctgatcttcttaagaaaaatgctggacaggtttgtctggggatctatgtggtgtgatctgattagtactaaaatgatgagaatttgttgtaaatggttttcctttttaaattactgaaaaagagtttggactagttactagtgaagatcaactgtgtaataagatttctttgtgtcttctttatcttcaatataaa

SEQ ID NO: 7563 - DNA, 1606 bp, Cannabis sativa
tgtttccaatatgtcatttttatctcatcttaacacagagaacatattttaatgatcatgtttcttgttgttgtcagaaatctatattttacttatacatctatgaattttttatgaaaccttatatgtttgatttgtaataacagtattaagatacaactttcacggtctattttctaatttttttggtgtttatgttattttagagtttaagttttgtgttcttcataattgcattttattgttttggtcctatattcaaagttagtattttaaacatatattgacatatatgtatattgatttgttatgtatgtagatggagatagagaaagatgattgtgtaaatgtatcaaaacaaattggaattctatcttcaattgagtccattaatgaaagtccgcctctagttctcaaattaacaaaattggagctacaaacaattggaattccttactatatgtgtttactttttgtgtttgtattatgggttatttaatttagattttagaatatggaacttgtttttttataattgttatgatttattttatggaaatgtaatgtgttgttgaaaaagaaacaatagttttttttagtgtttgttaaacttaaattttagacctggttgtgctacctactgttgtgtgtaggttttttttcatttaaatttttaatgaaatattaaataagttttaacattaaaaaaaaagtaaccgatccaatccgtactattgcggattggattttaaactgttatgcagattggattgatctaaaatttaggatccgcacttagtgcagattggatgttgtttgaccaaaaaagtacgaattggatcggatgaacaaccctataacatgcccagcaaaagagagattttgagaactcaaaatcctaattctctgtgtcatcttttcaactaaaatctcactctcagttgccaagagtatcttggaacatattggtatacctaattattttaaaggtaaattgctcctcacaaagcaagatgagtccaccaaccattgaacctcctcttcttgcatatcataacaatagatggaaaaattatcttcacttggaaaaaggcaagaagtctaagagaaaagcttgagcccttgaaacaaaagatacactgatctgtaatcaccatgactaaagagcagtacattatctacaaattacatgtgatttaattgtagtttttcacattgtttatgaaacttaatgtcacttttttgcttaacatttttcattatccttgacaaatactagccaagaataaacaaaagtggggatatgggatctcttgtcgaagacctctctttactataaattatccatgcattgtgccatttaacatcaagataagtcgaggagtagtgatacacaccataactagtcgaatgaactcttgaggaaaagccaaagcttctaacatttcttcaataaaaccacattctattgtgtcatacaccttccacaaatccagcttaatcatacaatttgctatcgcatttttcttgccctagtgcctaactagaccttgacacatcatgattttaaatgcaataaatcttccttggacaaacccacttttga

SEQ ID NO: 7564 - DNA, 505 bp, Cannabis sativa
tttactagttaaaaaataaggtaaagagctaaataactttatattcaaaaagttattaatatgcatatcctcataaatcttccttcatttttcgcgaaaaatacaagtgttgtaacttttttttattattatgttgcaatagggagcaacttggtcaaatagtctttcagtacttgcaactgaacatatagcccctttaatttagccgtgtcgctcatactggagcccttgagatgggagttttacttgggcaagctcaatccaatcaatacctccccattctgaaggaatctccaaaaactcctttgaaaaatattagaatagttgcacgttatcattacatcctttggttgtactttgctctttgagcttcaaaccaaaatgttggagaggaatctgatgcactcgtttgtctaatattttttttgcctttaatgttgttaccattggccacctgacctcctctacatatatattaattatttggtaataattttcaatcaaa

SEQ ID NO: 7565 - DNA, 542 bp, Cannabis sativa
tttttctatttattcatttaattgattatttcttattaccctttttagttgtcaaatattgtacttctaattttataaggactcactactttgttagagttttacaatatcattcaaacagaaatatagtatagttttcatatagtattgattgtttaatattgttttatttttctcattattttgtagaatttgattgtttaactttgacttatgcttttttaaagtgtaattaatctttcttgtgataatgaattaaatttttttattagataatattgttagttaattttttagaattttccaagtcgtctttagtttatatttgacttacaacactacaatcaataagattgctttgtgcatgaactcaaagtagatggtaaactaattttttttttattttacacaaaatggtgaactaatttagatttatgagatattaaattatgatttttcacatcaaaagctataatataaatagacatacacatgaaaaaatatttcatattgattatatattagtacagtagaacttttat

SEQ ID NO: 7566 - DNA, 1384 bp, Cannabis sativa
aactcaattcaattcatattacttgacaagcatataaaccacttcttacaactcttatatacataaatacataatattataggcatattaccttcatatcaccagctcttcgtccaaatttctgagtcaacaaagccaatgaatcaattgtacccttcggttctggtgctggtctaccaatgtcagcgtatgcctcacgaattcgagcacaatcaaatctcagtatattgtgacctgcccatatccgtcctatacacaatccaaccgaaaaaaaaaaagtccttaagcatcctcagagctcaaacaaaacaaaacccttttttggagaaaataatacattcggaaaaccaacatgacactgagcttaagaaaagaccaatattataatatgaaaggaaaaaccaaccatggagaatgtcgtagaccctatcagcaatgtctctgaaagatggggcagcggtgacagcctcacgggtaatgccattgcagcgtacagacaaagaagaaatgagggaaaggtcgataggtctgaccaatgtggagtaattctccaactcctctagcctccttggacaaaccaaaatcgaaccgaattccaaaatggcaaatttcactccagctctggttggaacagttgtttccacatcgaaaaatgcaatctcataccgatcttcactcgaacccattttcaaaatacgaatctagatatagtgtgtaacaataacaactgatatagaattcaagtagccaagcataaaaacataaagatcagattttttgatcaagtgcaactaagttcactgctttggcataagctgtttctctatgggatgcaattgtagagatgacaatggaagtaacagtgcctgcagaacaataagaatgtataaatttatattgaagaaaaataaaaaacacagctttacgatatacaagagtgtaacttgcttcgaaaaatgaataatttacaagagtaaatgactaaatatcattcaatcactcttgaattgcctttaaaagataaaatcttcaaactcatcaatgttagtgacattgtcaaaattcatgcttacctcattaaatctttaactaaattaaaatttattacaagtttaaaacttggaaaatgggccatattgagaatctgcatacttgaggctatcccaattgtaacaatctcaataataaggccataaactctccaatgaaaaatttaatctttttccaatgagctactttgtaattttcaaaactccaataaagggtgcatgttctaataatataaataaaataagaattcaatttgagctttccctgtagattgattcctttggaagttttggtatcagtagtactcaagcaaggaatataaactaacacaaaa

SEQ ID NO: 7567 - DNA, 832 bp, Cannabis sativa
tatatcagttgggcaaacaataaatcataaaattttagtaactcaatataatatatacttttttttttgctaactcaatataatatatacttgcaaagtagattatgaaagaatttctcatcacccaattaaataaaagaaaaataaataaatatgtaaatatttgatatttcttaataatggacactgcagatagagcattatcttcaggtcgttaaaacagaagtcataacaagaggttcccataaattagttgaggagtatgaatacacggcccacagcagtgttgctcaaagtgtatacatacctactgcaaaattccatttcgagctctcaccgatgcaggtagtgttttgtagtattgtgtttgtacttagtgatgtttattttatttagtttttttacctcaccattttctttaccttctaaaccaggttttgataacagaaaatccgaagtccttttcacattttatcaccaatgtgtgtgccattattggaggtgtcttcacggttagtacttcatatctgttgtttcctccctttattcttaggaatgcctctaaatattctcgtctttgggtttcaggtagctggaatattggattcaattctgcacaacacttttagaattattaaaaaagttgaattagggaaaaacttttgagaggcaagtaaagtttcttgagtgttatcttccagtaccaagtttagtgcgaaagttttgttagatggtgggggcaaggtattttattcattgtcacaacagttctattttacattctgcatttaacatgcaatgacaattattgtgttatattgcatgaaaatca

SEQ ID NO: 7568 - DNA, 695 bp, Cannabis sativa
ttgattcggttagagagtggtgagcatcgctttctgtcgagttcaaacttagacaactttggggtcattattccttttattagggctgctaggttgccaaactctatactgttgactccatggatgatggtttgtgtcccaattggaacttctgttacccaatcagggtctcctctagacgctcctacttccattaactgttttctggatagagtgtcacataggtccttcaatcttccaagtcgatcgtgtactttagtcgacttaggtctaactgttttctcctaaccacagaatcgtgaaggcaacactggtgatgtttctgaaatgatttttagaacgtcttgggtcaatacgttgttggagcggtcattcagagtattgtagtggctacttccatcaaagtagtcttcaactggatcacaagtatggagagaaataagatggttgctcaagttcagctcctttccatttactcgtgggaagtactcatattgttggccatcagggccacgagcaatgtaatggcacaactcacctctttcatcttggaaatactttcgagtatgaagcagctcattagtccttgctcgccagatctcataacctccgattttaaaatagagtcttcaattttctccttcgatatgagtagtagttctctttccctttgtagggtctcgagacttggtgtc

SEQ ID NO: 7569 - DNA, 1344 bp, Cannabis sativa
taacaataatataggtcaatccaaaaaaatcaaagtgtgaccgtacaactacaacctaatgaaaagtcaaaatttattaaaatgggaaataccattccattatactagaatagcatagaaataatatctcaaacccttaagtaaactttctttaacataagtaaactttttttttttaagtaataagatatgtaaacttaaaagaatgagaataaaattaggaataaaatgaaataaaatttaatatttatataaaaatatatgtttctttgaaataatttttctttttacatattttaaaatatattatttggttcttttatttcattctttttcaatattcccgactaaagtacaacttaacaaagtttagattggcaaaaaaaaaaaataagaataaaaatataaatagaataaaataacataaaatttgatatatatatatatatataaaaatattttttaatcttgcatgagaattttttttattattatttttaaatggaatagttaatttaacaaaattataaaataaactagctatattatttaataaagcgtctaatttattacagaaagtgaagcatttgaataagttaagattaaaattaaataataaaactcaattaaatgaataagaagcctcaacataagtcactaatctagctgtattatcaaactacttcttttgtttttgttttttttttttttttttgttatgtttatgcttgaatgactgcaaatctgcaaaactcattcatttatatatgttattaatttatcttgtaacatcaagtatactaactataagaattcttaataagaaaaattaaaaaacaaactaataaaattatctaataaagctcctaattcagtaaagaaagtgaaacatatgaataagtcgaaattaaagttaaaaattcagacttaataaaatgaataaaaaatcttagcattagagactaatctagcactaccatcaaaactgatgcatgtgcttaaatttcttaaaacctccctataataacaaccaagttaagaatgaggtctttataaacatcaagcatactaactatataggaaaacaatcaaaaaatgataaaagaaaaataatcaacttagtatagatctcaaagggatatatgtgtctccctttggcaacacaaactctattaaagaacctctcaaaatgtgatgtgggactatagtagacaactttagacttgtcaactattagagtattttttttaaagagaattgctaaaaagtactactggtgcctatgacccttctcggtgttatactgcttagggatgtcaattatacctgcgggttcaggtaccc

SEQ ID NO: 7570 - DNA, 779 bp, Cannabis sativa
tggtgctttcgttgagagctgagaaaagagatatgcatggcggcaatcggtgcacacccatcaagaagaaggtctatgcaagaaatgaaggtagacctcctaatgattcatcaaggtttgtccaaaggccaaaaacacgtagattcaaggtgttgcccagaaaaagaattgatgcctcaatttactcaggatttgtggcaaaaatgggtgcgtgcgaccctaacacgcctgttccaccgatgtgtgtccttagaagctcaaatctggcaagccaactcttgatggcaagatcaactgccgatacccttaggctaagatcccccaccgtctcaccatgcagaaatagagcacggcgagatgtacaggggccagacaaaagagctatgacccgacacggttacgacgactaactcagccagggtcatcagatgcaacaactctatccaactagagactccggtgtcagcaccgacaagagggttggatctatcttccgacaactactttccttgcctttcctacagttggtgaagttcctcaaaaacagatcctgcaatggcggctgctaagaggagacaataagtaccatcggcggctgttgggttaccagtgatgcattttatggtactattcgtagaagcaggaaactttttgcaaagtttgctccacgccgttctcgtcgcctggtgtaacctcaatcccagagctacatctaaaaggaagcaaatcaagacattataagccaataatgtagcccttgcgaaatgcttatcccgttg

SEQ ID NO: 7571 - DNA, 1937 bp, Cannabis sativa
tgttttttgtcgttttgtgatctttccaaggatgttttaaaataagtgaattagaatttttgccccttcaactttgacttgtaccaatttatgttcttgaacttttaagatcgttaaaaatacttctgaactattaaaattgttgaatttaaggacttttttctaattttaataaaaaggtatgcatgaaagttcatgtcaaaattcgaggagtatgatttgatagatatcaaaatatgaagagcatggtttagtacataaataattactgaaattgtaaatttaaataaaattagacaaaagtctttaaatccaacaatctcaatagttcaagagcatttttaacgaccttaaaaattctgaaggcataatttaatacatgtcaaaattttgaaggagacaattctaatgagcgatgaaaatataaacacattatatgaacattgatcttttgagcaatccatggttggttcctttcttttcatcctactagttctcattttcatatatcataatcaattgattaaatgaatatgaatatatatcgtcatggctcacgtctatcagtttataaatgccatgtgtttttgttttgtcagtttattaattcaccttcattttctcaacaataaaaaccaccaaacaccactaaacatggtacgaattttgtgtcttatttttttttataataattttttttttgtttttttcaatgatttataataattatttaattattagaagaattacaaacttttgttttataaattaaaagaattactttatatattattttttaatttttttttaaatttacagtttgggttttcccttggttgctcaagtagtttctatgtgggctgcaatatgaattttaattgcaatttaaattgcttcgttaattgttatgtagattgctatgtgaatttccgtaaaaatacaaaaaaaaaatattttagagtgtaaaatgaaaaaattcctataaattagttaaacatatttttttttaaaaaaaaaaatccataaaaattgtaattattattacaaatatgccttttcaatttgtcttttgtttatttttgttgtgaaaattaaaagcatgtaagtgcacacaatcgtaatttataaatttagtatgatcaagtatcgttctacaaaaactgattatcaatcaattaccaatcaatcaatcttttgtttttatttcattaaataatttttcaaaattttagaaagaaaataacaacaaataacaataaaaatttaagcaaatcataagagaatttaattagaataattatattcatcaactatcctctcttttactttccaatgcagttgacccaattttttttttttcatattcaattaacaagttgacttagtagttcagttaagatttataaactcaatctaaatgataacttcttctatttctatgggaaagttaaatcataaagaaaacaataaacatgacaactcatataattatacaaataatcttgatactttcattctaaattaattttccatccagaataatcatagcatattgaataataaaagagaaatttgaacttttctcttattcctaagaagctaccctaaaaatgtgcgtaatttttgacctatctcttgttgcaatgttctttataaggcttcaactaaggtcttatgttcaagatcgaaaaaagtgatcatgaatttaatagctgaaaactaaggaggattcgtacatggttgatacatagctcataatataatggtttaccaagatcgcttgagattgtatagaatgaaaaattgcaagtctagttgcatgatcaaaattaacctaaggaaggcctacgatactattaagtggaactttattaagaagatgctcattgcttatggattccctaagaaattcataactctttatcatggtatgtatt

SEQ ID NO: 7572 - DNA, 604 bp, Cannabis sativa
aggtgtttttggaaccctagcaaattcggaggaagccctaggttggagtattgggctcggcccagcaacccctataagcccagcccattgggcttttttttactccttagagaaatgctaaaaattagtgggataaattgaagaatacttgtatctattaaacaataataccctcgtattatattatattaaaatgtacctgcttttgtgactgagttgccaatatactctcaccctctacttaagtttagcacataatttgtattagcctaaagagtataatggggcatcatctataaaagtggatatatcttaaataatataaaaacaaaggtaaaaattaaaatagataaagtaaagtgggtatacaatgtaattttctcattctcttaaagcttgagtctagatgacaaaatgagctttcagacttacaacaaccatcttcgaaagacgccatctacaaaaagtgccatgtctgaaagatatgttcagaacgtattctcaccagagataagacctctaaggagagtaatatacttcactctgctcgcgaagtgaagggctccatagatccattaccagattggactatcactagaagtct

SEQ ID NO: 7573 - DNA, 999 bp, Cannabis sativa
atacatcatgataaaatttctattataggttgctgctaaaaaaaataagttgttacaaattaaataaataactgcaggtttcttgaatacaacaacatttgtttttaattccaatttatgaaaactagaataaaaatcaaacaacaagaccttctcttctagccccactgaatactacactaataaaaaaacaaaaaaattatttcttgaggtaacgaatgatgaagaagacataacctatagtgagatagaatgctgcgagtgcataatttccaggaacactaaaaaacaaagcaccttttttagttataagcagactattcagctctttcttctcgtacaacaatgcgtttgtacctatgataaaggcaaacacaaaataaaaaatggaaagaaagatgaacaatattgtcaccatagtaggatacctgaatttccttttcgagatcatggaaaacattgcaaatatgaagtggattaacaaagagcccgccgagaaaccaaaagccaaagaatccatttccatgaagtctttgaaagctttaaggccttttttagttttgtattgtgcagcaccaggcatggttatggctgcttgaaatgttatacctgcaatgagtgtggacaccaccaaattcatgttttgcatgtgttgtacatcttgaccattatcttctttaattggtacacaggattgtgtcatttctatttgggtttctccacttgtttcttcgttttttccatggtttttcaccatcccatatccagtgtcttgtaaacttagaagagggtctttattcttggccagccgcaattctaatctaacaataaactgccaaatgaaaaagttagcaaacgagtgttgaatagggtgtgtgtatgaaaagatgcatgagattctatttcaaaattaatgtgggactcttcgacaagaattggaggacatacctttccaataaaaccagcaaaatttgatgatttgagaagaatctcaaacgc

SEQ ID NO: 7574 - DNA, 1716 bp, Cannabis sativa
tattatggataaagacaaaataactaatccccaactccaaattaattatcatattattattgttgttataaagcaaggcatctataatattttgtgatttgtaattaagaagagaataaagctaactatagtttattgttacatttactaaatatagttagaaactctataataattattttaaacctaactaaaaacaaaagaataatactattttagatctattatttgactaaacatacccatttggattctatttcaagagatatattttgctggattttaatttttttttgttggttaatggttaaaaatagtcattacaagaaaagaaagattttactttgcttttaaatttagtccattgatgttgaattcagataaaatagttttttcttagcgcattttcttaaaaagggatgtattgatgtacattttacttgtttcggcatccagaataattttttagtctaattttttttatattcatgtatgttataactatttatgattttctataaaattttgagaaatttggaattaataatttacaatatagaaaataatattgaaacagtttattttatacgagtataaaataaaatagtcacgcgtctattacactgtttgaacgcattttttgacaattttatagaatgtcttaaataactataatttatatgaccataaaaaaaattgactaaaaaaatatttcggatactcaaacaaataaagatgtatcggtacatcttttttaagggagtacattatagaattttctaattttatttaggcggttattgattgagaagcatatggattggtgtagataggttatgatctatttattatatttttaatcaaaattaattaggctcaatagaattttttaaaaagataaatagaatttttttcttttgaactatggtcctaagtgtgaagttttactctctttgcgaaattttttcctaaaccataaaaattactataaataatccttgtagttatattctactcatttttaaacaatttattaatgtaacattaacatgattaatttaactcaatttaagagttcatttttttttaataataaatagagtctatatgatgaattataatattatgtatatgtatttttagagttaatatttgtaattttaatgtcaataaactaaatttcgataattttaagttgttataataaacacttatactatacatgcacacctatttaaacaaattgttttaggaaataaataagcataatgtaacttaaggagaatatttgcaacaatttatttagttcgagttaagggtaatttttgcaacaaattaaaatcgttcattatttgtttttttacaaattaatctacaaagtatattggttcctaattaaaatataagggataaaatagcattaattattctttttatttaaagtaacaaatttagtatattgtttttttcccttataatgaaataaaagaaaaagaatatataaaaatattttttgttttaaaatatagtattattacttgtagggtttgtgatggatttggaagaagcatatataaaaaataaaggtaaggtatcattaattgggagaaagaaaaaagggtcatgggtgacctacatatataagaccttgcatgtgacctaatcaagagtaaacttagactatataaaattatatataatgactttttatcaaaa

SEQ ID NO: 7575 - DNA, 623 bp, Cannabis sativa
tattataaagcttgattgaagctaatttaatattatatttttacatatataatagatttgaggacataaattgtgagaggctaagggaagaagtgaaggagatgatgagtagtggaagttcctggaaatattatggaaatattggatccaaagtgcattgattgggaagactatattatcaatactcacattcctggtcttcaaaatcatgtcattattaaataaattataatttcatgtctacctacgtaaattatatgtacaaaaataaattaaataagatgcatcatcatcaaatattgattaatgcccttaattatatatagtagtctagtacaaattagtaccactacatcaatattaataatattattaagggcttgaaaacatgttgttcatatattaagtgtttgaaatgaaatatatatcccaaagaaacatgatagtaattgttattcaaagatataattaagttattctgattaattgtatctaactatattattaggaacaggttacgtactcttaattaaaatggtaacatgttaacttatagtaactagttactcatactaatgttaactggttctgaagatgatggcaacggattatttccatagcag

SEQ ID NO: 7576 - DNA, 719 bp, Cannabis sativa
tattattattattatcttttttgatattgaaagaagagattctaattttagactttctctatgagaaattctaatatttcaattataacattcaaattataattattttttaaataagaaagtgaaaaatagcataaaagaagtcaatccccatcctcaatcaccatataaactttttttttatatacatataactaaaagagattacgtggtgcagatctttttctcactctttcggttattttgacaattttggagaccacgtgtcagttatatgagtctgataccttaaactcttttaattgggtcatcgataattatctaaagaatttttatcacacagatgatactacctatattagataattattaagctttttttaatcccttcaaaagaaattatggtaaatttagaacttttcatctaaataaagaataaagaaagatgttagtaaaaacaatctttatcattacaccactcaacatggttcttttactataagcttaaaacaccaaacccaaccactaaactaacataatgtcaaaataagtatttaacaagaacataaaatcaaaatgagattatatcataaaagtcatccaaataaataatgtgatatattgattaagtagatctaataagaggcatacatgacatagtgtgctgagaaagtccaataaaaacattattattatttatttattatgttttttttttt

SEQ ID NO: 7577 - DNA, 2043 bp, Cannabis sativa
ctcatttttctctgatctcttcattgaatgaattcgacaagatatactttgcacgactatttctttcatgccattgcgaaaatacgttcctggctacgtgacctgattgttcaggtacttctagccatgaatcttgttcggctacaagatcatataagttctctttgagaagtagaagttttattctactatccaatcagatatgaaattaccatcaaattcagttaccatgttgtagggataattgtccatgttagattgttagtgtgtcattttattattattagaccaaaataaaattaaataaagcgagacataaacaataggatataaatacaatataagtattataaataaaaaaaaaaaataaacatcaagtttgtaatctaaatatgatgcatgagcacatttaggaaaaacacataagataatttagaaatttcacgataagattatccaaagattaaagttccgccttagggtcgatccaatctgtaattttgggccaaagttcccaaaaccagtgggaaataaaactagatggttttaagtttattaacttccaacaaatctcatacaaaaattccttgtagacattgagttataaatttttcagaactatacttaaaactatcaaaataaaagattttatattttatggttttcttgcaaaaatcacaactctaaatatactaagagtttcgttctaaaaatgaacagtcaaacatataaatatttaaaatttatccacaatttttcccaaattttttagctcactaaaatatagggttagaaaatcgtgttatcatgtcgtgttcgtatcgacacgtttatggtgaacacggacacaattattaatcgtgtctagacctcaaacacgaacaatacatgattatttagcaagtcacacgacacgacacggtaacacatttaacacacaattaaacatgttctgacatgacacgaatgtgacacgattaacataattatgtatataaagacaaatattactcataaaatttgtagttttaatttattattatttttttaataaagaaaattaaaaaaaaaaagcatttctatgagtttttttaaagagttatatttcattttacataatagaaattttttaaaatacttatatatgcttatacgtgttatagtcgtgtcatttttcgggctaagcctattgacccgaaaaagacacatttaataaacatgtagactcaattttgacacggaaattaaatgtgtcacccaaacccatttgtttcgtattattttcgggtcgtgtcatcgtgttgtgacacaaattgtcagtcctactaaaacatgctcaaatagtgacaaaattttagatatcctaatttgtccaaaattttctcagattgcacaccaaactttgaacactcatatcttgagttttacagaagcttttagaataatttcaaagctaaaactcaagtactcttcgagtaattttcaaccatataatttttaaggcagtccagaatagttttctaagatctgacccatttgaagtcagatcacacccaaaaatttttacaatttcaataatacaacatattacatcaaaaataaaataacaaaagatatgaaaccgtatgaatgcatgataaaatttaacttacattacaaacactatatgcagtgtaggaaaattgttacaccataaatatatacatgaatcatcaagaaagttataaaaataactttgacctcttttttctagggatttttgagtcctaacttaacacaagcttgatattcttctcgccttcgcactatacccaaaaccaagttcctcaagaccccaagcacaatatacaaaagtttagagtttgtttgagatgaagagaaaatatttaaggaagtataaacccaacgaaaaaaatgactttgctagtttgctagcttccttgaagtttacttcccaactagaagatgatgatggagatgaggcttgaaggttaaggtttgatgaacaaggaaagaagtttgaaaattgagagagagagagag

SEQ ID NO: 7578 - DNA, 640 bp, Cannabis sativa
ctaggaagccaaggttaaagagctagcaggagagaaagctaccttgcaggaaactcttgatgttgagcaggtaccttttgatgctgagcagaaagtagggctgtacatcgttcggttttaggggagagagaaatagtggttatggtgagagtagttttggagagagagggagttacgaagagagagaagaaaaaaaataattatgtaaatttttaaaatttttaattttaatatgatttatttttatttttttcattttaaaatattatattttattttttcagataatttaattacatggactaataaaattgtgtaacgtgtatattgtatacacgtggataatctagcatgacagttaataataaaaattagataaaagtggtaaactactaacaaaatacgaatattcgtggttctgctactaaaatttaagttttaagagtttaatttgagcaaaatgaaagaatttaaaattttaccgcaattaaatctataatagaaataataaaaagttgtgctaaaggaataataaaaaaaaagttgttactattattcatattttgaaattgaagatagatagaactaccctttcattaaattttttgttttttttgaaatctcattaatttaggtatct

SEQ ID NO: 7579 - DNA, 1843 bp, Cannabis sativa
gttgttcataggcatgttatatgtccaaaattgactgtgagtcgaagtagagttaaaaacatgttttatttatttatttattattttcatcaccatttttctcgtttttttattatgagttttttataaattaatttaactatttttttttttttcatttgcacttaacctttcaaaaatttaaattttgtaagtgaaaaattgtttccatatatgtgattggttgtagtgtgatttaatgtttttaagttttaaagaattgaatatgtaattggttaagaatctcaaaataaaaaaagtacataagaaaataattagagagtttttaaattttatgatttgaaaacataaaaatagtattttcatttattagcctaaattaactcaaaataatattcaaatattatttttaaaaacactcaaccaatcaagaattcttatgtggaccccattatttgaattttcaaaaacataaaacagtttaatcttttattcttttttttttttaaaaaaaaggatttaatattttattctttattattattttcttaaatttcctcccaaatatttttatttaaaaaaaaattaacagtttaatcttttagtataaaaactcattaaaatgtgtagtttccccttgatattaatatagctatattgtgtggcagatattgagatataccaacaagatctcactattattttttgaattatatatcaaatcataatgttcatacaattggaaattttttttacattaaaacattaaacatttacatttttcacatgttccatggatagccacgagagccagtttttcctcagtatatctttctatcatattaaaaaatacaccttacttaattaccaattacatacttctttcttgtccaatatataacaaatttgctaattattaaaattccttaaaagggttgtcttgaccactactgaatttcggggtagaagctggtgattctaccaatgccattttagtgtaacgcttctcaaagttagccacacaacaatctccatcaactttgggaagaaaacttggcttaatttctctgcactccaatttcttccaattgattgtcttgaaccacttgtgcctttttatgtcattacccccatttggtccacttccaagacgcattcttggatcttttttgagaagctgatatagaaaacaaaaaaaatacccacaatacaaaataaatataagtaacatcaattattgtcatatcaaaagtcacatgtataaatttatataattgtatatagtttgagtttacttgatataatttacttactcctttcaataatgaatgtgcttcacttgacaaaaatgcaggcagcttgatcttctctttcactattttttggtggattttatatttgtttccaccagtaaatggaggctgcaacaacaaattaattaattaagattagataagtgagtagaataacatgttttaaacttattggtaaaattaacaaaacagtattagatttggacgtaattaattacacagtaatttccaaacacgaaatagaagaaagttaggtacctgtccagtgagcatttcaaaaaggagaattccgacactccaccaatctgcagccttgtcatgatctcgtccctgaacaatctccggcgccatgtattcgtcggttccacaaaaagtatttgatcttcctgtgttctcatcaaattgttttgccatgccaaaatcagtcaccattacctaaaaacagaacacatatataaatgtaaagtaattagtaattagaatatataaccaaaagtagtaacagaggatcacacaatattaatattaat

SEQ ID NO: 7580 - DNA, 833 bp, Cannabis sativa
agagagagagagagagagactgatgatttgaaaattttcagatctgaaaatgcgttataatagagcgacgtaaaatgtgttatttgaaaattgtgaaatttgaactaattgccgacggttaaaaactgtggcctataaagtactatatgccacggtttaaagtagtcagtcattcttgttttaaaaaaatttaatttttaaggcacacataaaaactgttggaatacctcgcgagtgtttgaaactatcaggaatacccaattttcgtaacagttttaaacactcaattttttagcggcggtctctcaaaaaaagtatttttaggaccgtcaagaatagtaattttgtagtagtgatgttagataaagcaggtttgcctagtcagctcccatagtagctaagttagttaactactcgggtacacctcatgttgagatgcctatatgcactactgcaaaaagggatatttgcaacaatattaaaaatactgttttgggattcgtcgctaaaaaaattaagcaattatttaaacttgtcgagaaaaaataaggtattcttgacggttttaaactgttgggatgtataggtgactatttttaagtgggaaacccgtattttcttagtgggaattactgacggtttaaaaccatcaagcaatgtataggtgacggttttaaattaacaggtttcagatctaaaatttcatttcccccgcatcttaaattttaaattttcatttcccgcatcataaattttattttctacctcttaagatatcaaacccccaaaaaccaagaaaaaaaatagatttcatttcttcaaagtcatttaaa

SEQ ID NO: 7581 - DNA, 1337 bp, Cannabis sativa
tgaatcacgagtgctagggaccccttttatagaggctcgggggagatctctaactccttgagttagttttaattatgttgtttgttgtagctcatatttagttgaaaatttattgttgttctattaagaaattaattagttaaagactgatttaagttgtagtggtttggcttataatattagaaactgcgatagtcagtaatcctgtgatccgtaaggaaaaatatcgagtaagttatgcaatcctacaccgtttgggaaaggtcaagtggaataattttgaaactatgtaggtatgcgactacaaagttgaagaggacttaagtggattgattgatactacttatatcaacaaggtgcatcttattttttagtagcccatcacgaaaaaacggtgacctaggaagttttgtcaagaagcatgcgagtgaggacaaaacacgctggaaacactcgtgttagtttgtactgtcagtcgttattctaggaagcaaccaaaatggcatacttgtgtataaaagccatgattctgtgggtgcaaaggcccaatagaagcttccagagaggacactacaaatggtatcagaactgtgacccagctggaaatgtggtcgacgaggacgttggatctcgtaagggggtgattgtgtcaatcagtaatcctgtgatccgtaatccataagggaaaatactaggtaagttgtgcaatctcacatcacctggagaaggtcaagtgggatgattatgagactgtgtaggtatgagactacacagttgaaaatagcttaaataaattgattggaaccacctatatcaacaaggtgcaccttgttttttggtagcccatcatgaaagaactccataattaagggcgtatgatttgagataatttcaagatggttgactgacctcttgagaaattttttcaagaaacgtgcgagtgagaacaaagcacgctaaaaatattcgagatggtttgtagaaccaatcgtcattccaagaaatagtcagagtgacgtaactatttataaaagccatgattccataaatataagggcccaataaaaacttgaaacggtgatactatagaaacttatttttgttgcaacaatttggcgtttagggaatttaaatcaacattaaaatttggtttagtttgaagtttaggttgaaatttatttttatttattatattttaaatcagtttttgtttttattttttttaaaaccttattatgcataatgaaattatatattattaatttttacattataattaaaaaagaagttcctttttagtgtaggttgagaataagattaatcgagacaatgaagaa

SEQ ID NO: 7582 - DNA, 792 bp, Cannabis sativa
gggggggggttgtcaatgtttcggggaggctctgaggaattaaccatgttgacatttacattcaaagcatctttataataatgcaaaagacttgtatcaaactcttccatctaaaagaaattagcaagtggtttattgaaaatagtactattccggatattccaaatatgccatataaaagcaacaagcaaaatgaaatcttttttctgcaacttagaaagaccctataggtaaaagttcttgatatcatagtgccggtgagtgatgtagaaagatttaaggggagtgttcttccaaatgcatttggccctagagcaatttaaaagtgcatgcgaaacagtctccacttgacttctgcaaacattgcggtaggggttttggaaagatttcttattaaaaagattgagagcacaagggagaatgtgattgaaagctttccaagtgaaatgcttaatttttttttgggatttggagtgtccaaaaggtcttccaccaatgatgggacgaggaaggatttgttttcttagccaagtgtattatatatatttctttcaaaaaactgtattatatatttctttcttaaaaagataaaaataaaaataacaacccagatagagtaaaatatagtacctcgatcacctagcaaatcacatctccctaagttgagagaaaaaaaaaaaagtccaaaattaatttgaccccactagttctaattgttttttttttttaattttaatttgaatttgaccccactaattttaatcgtcgatgaccagggcagcaacaataatc

SEQ ID NO: 7583 - DNA, 535 bp, Cannabis sativa
ctagtaagatgatcaaattcgaatctgaaccatagatcaaaaaagaggtgtctgatctggaagcatgaaagccccactgtagcaatatatttcttagtttttcattttaagccctaagagcttgcttcaatccatagagagccttgtgaagatgacacacatgattgggtttatttggatcctcaaaaacttttggttgcctcatatatactgtctcatgcaaatcaccattcaaaaagccattactaacatccaactattttataggccaatctaaagtgacaacaagagaaagaattattctaatagtgataggttttaccacagggctaaaggtctcctcataatcaatcctaggtatttgtaaataccctttagcaactaatctggacttgtaattattcagggacccatatgcattaagcttaattctgtacacccatttgttgtcgataacatgcatatcaggatcatatggaacaagagtctaggtcttagactcggtgttttccctttgcatagactgaaaccattt

SEQ ID NO: 7584 - DNA, 651 bp, Cannabis sativa
tttgtactttaggacctgtcccatatttattttaatagttatgatatatattcatatcatcaaaatgtaatatactctaattgtttatgatacataaaatgtattatatatataaatttataattatatatatatgaagataaagaagactagcagtgggatctaactatatgttattattattggtgatgaacaattgatataaatattgatacaaacatgtatggagggaggccacaaagaggaaatttgagattagatgtatgaaatcacttagaggaaacaatatgtcatctcatatagtaatgatttttcttattcttaatggctattgagcagtttcgttgactaacggtggtggatattatcaaagattccactaaatttaggactgaaaaatatacaggaataatataaatatatatatatatttgctggtaagaggtaatagtatatacatatacattcaattaaaataggatatttatacttttataataattttttctttcaaaaatattcttatattttaaaaaaatctctctctaactctcttattctctcactctaagtctcctcatctccaatccaaaaccttgaaatccacaaacaagctcaaccacccgaaactcccaaaatccccacccatca

SEQ ID NO: 7585 - DNA, 557 bp, Cannabis sativa
tcttctaaatccaagacccccacagctcttaggctgacatagaccactccaacttctcagcgcataatagtgcttcttatccacactcccagcccaccaaaacttagccaccacccgatccaactcctcacacaaggtactaggaacttgcacagtagacatgaaataattaggaatgctttggaggaccaaacttaccaaagttgtcctcctcgcttggcaaatgtatttagccttccacccttccaattttccgagaattttgtctttcaagaacaagaaatccttcctcttattagccgagaagaaaaagggattgccaagatacttctccttcgggttcagattattaaaacccaaaatccctttgacttcctctctacaaagacgcctagtgttaggagaaaacaccactccactcttggcattgctaagaagttgacccgaccaactttcatacttatggagacaattcagcagcgaacttgcatttttgatagtagcactacaaaaaaagatagaatcgtctgcataaagaagatgagttatgggagaag

SEQ ID NO: 7586 - DNA, 786 bp, Cannabis sativa
gagagagagagagatttgatttaataataattacaagtaatgggctcagtgacaatggaggaatggtgatgtgaatgataacgagagtagagatagtggtgatgaagagctctgtgtagccaatagtatagaaattccacaacaaagacatgaagcagaaccgtcatgataactccatctgttctccatataggtacgttcgtacaatttgaaaatatatgggttgccaagtagaacgataatccagtgaataatatttggtcatccctaataataatatacatatattcaaacaaattaaaataaagaactagacaatagacaccatataattcaaatttggaaaagaaaagattaatagatacgtaaggaaataactatctatagtaaacttaataaatttttgttcggttgaaaaaagaatccaagagtacagtatgttccttacaaaaaaaaatagtacagtttgtttctcacacccggtacaaattaataactatgtatatatattttttttgaattaaaaatttaaaagttggagtagtacgtaccaatttctttctctgtcgacttgctcaaactctagactcttgtctatgattcggttgttacctttacctgatctgtaacgagaaagagagatccaaatctggttgtgaaacattcttagcaacagatatgggaaaaccagaaaagatgacaagtctctctctcttggatcctccttcgttacaaatacataagtactcctaatcacccatggtgccaatatcaaatactgccaaa

SEQ ID NO: 7587 - DNA, 505 bp, Cannabis sativa
acccatcaacgactaaaaaattgttttgcatttttcaacgaaaactcgaaataaaattattgtctcgggtacatatatacttgtataaatatataaacgcaaacatacatacatacgtatacgtaatgtgtctatataataaggaaataccttctctagtttctcgtatgaatcggctcggagaggtacccaaccatgaatagcttctccggcgacggcgctgagccaagccggccaaccagcagcaacctgttctccttccacgtacttatgaaggtttcccaatctaaagctcaaagactcaacactcccacacccacccccaccgtttgaactcgccctcccagactcacccaactcgctcccactcagtcccaccaactcacttcccccactctttttcttcgtcctctttccccccaccgccgctgccgtactagttttcttctcaagctctccggccccaacccggctccggcctgaattcccggcattgtcccttaaa

SEQ ID NO: 7588 - DNA, 585 bp, Cannabis sativa
aacttctaatgatactctcggaactcgatatttaattaaatcaatagtgatattgacacgtaaaatgatgcttagtactactggtgtattttagcattttactaaaattaataaacaagagcattgttataagttactagggatatttagtactatataagtgacgtattatgattagttagcgataatttttttaaattaattaagatatactattaaagaaaaccctagaagttagtaatagattttaacaattctcaataaaaaaataataggaagagttcgtactatatttttaagagtaactaaggagttcgtactgatattttcaaaacaagagttcgtacagatattgttaacgccagggaaggcataataagattgagcaaaagaaagtaaagcttaagattcccatcgccagtaccatactcagttcgacacgtatacagcagcccttaaaggcaggaatgtaaacgactacaactgcgtgtatttaaaaaagttaattatttttattattattattattgtatactgacattatttttgaattgatcaaaggattgaaactgcttttcttgtggt

SEQ ID NO: 7589 - DNA, 734 bp, Cannabis sativa
atatgataaagggcctacctggcccaaaactatcaaaccttgagctagataggtcaagggtatctccattcttggcatatattaacgccttacccttcgctaagtttaagaggccgatatagaagacatataccgaaagagaagaccctcttgcacatatcaagtactttgagatgcaaacagatctcccaaaagctactggtgatgtgcagtgtcagatttttcttgtaactttttcagaaacatcccaataatggtatttcaaactggctctaggaagattcaatgattggaatgagttttcacgagaattctacacataattctcatcctcaaggcaaataccatcatagttggaagaccttgtcaaggtaaagcaaatatagggtggaccattgaaggattacattcaaatgtttatggttgaggccaccaaggtcaaaggcctaacaaaataaggtcactatacgaccatacttggggggcatccttctgttgagtgacttctggaaagatattaagagaatgtcaaccaacaatatgaaggagttccttgaacaagcagacaacttcataaaattagaagaagtattcgacaagcccagattggagggcaagtcagtagtaggcggtcttagggtgctatgtagtcccaagacctaccaaacatacatgccaatataagcagtgccagccaaccttcagcatcaagaatattggaggcaagtgcaaca

SEQ ID NO: 7590 - DNA, 645 bp, Cannabis sativa
gggtcaactgagttagaaggggctagaggatcattagtttgagcaaaaggcacttcaacactatgatcagtgggagaggtggaagttgtcgcctcggattcctcgtaggccgctgagcaacacagtagtcgagaaacatgtctttggaatcgcctagataatcaaagtttgccttgggattggccttctaaaagtcagaaaaaatctcgaaaccagttgtctctagggcattcaccttccctccgagcctcacaacttcggacatctgtttctcgacctccaacttctgtttctcaacatcggccccaagctcctcctccttgactttcttttcatcctccagcctacaaaaaaggatctagaggccctctctttcgtgtcagagactggtcacttcttgagataaagaagcaatattagcctcgagctgctcggtggatggcatgtcctgcagatccttggtcagttcgaccactttgatctcagcagcaaggagcttcttcttgacctctcccacctctatctgcacagccccaagttgaacccggcttcctcggcgtctttcttggccaagtccactttcgtccacattgtgctgcaaatggcaaggttcttagttggagccgacttagctcgggaataggc

SEQ ID NO: 7591 - DNA, 546 bp, Cannabis sativa
tgtgtaggcttactacccggaacggctggcaaagtgcttcattttaaacatgccttggttctttgtaagcgtttggaggttgatttcgcgatttcttgataaagctactctagaaaaggtatatttattaacttcacttattactaattgattttgaaatgaaacccgacgattcttgtcaaagcccatgaactggtacattgcaagtacacgtgcctcgaatttaatgtgttcaatgctaaaagtcatatgagaatctaactataacgattcatagttggagagcttgattgacaatttacttcaacattcgacattagttattgccaattttcttaggacacaccatattatgaacaagtttctctatgaaaaccctaaactattaattatggtaagttaagaattctccattttctttgtgaataagatatgcaagcctttttatgctccatttcccattggttctcaagtctcacttctgttatatttgaaaaaagataagggttgtttattcaaaatgaagtttcatagtatttggcgggg

SEQ ID NO: 7592 - DNA, 576 bp, Cannabis sativa
ataagtctggtgtgatagacaatataaccacgagttgagcctttgccagcatttcttgaagagttctcagggtaatttcctcgagcaggtggtgggatgtactttcctaggttgaatttattgttacacacagtgaggttggtctgaagcttcatggacatgtctgtgatagagctgtgatgctctaatcgactctcatgagacatgagtaatgcttgaacctcatcaagtgtcaaggaatcacttcttgaagtgatgcccgagacaacaggatcaaattcagcacctaatccattcaagatttgaagcacaatatcctgttcgtttatgttagaaccagcaattattaaagaattagcaagagactgaactttatcaacataatcaaatatggacagatttcctttgttgacattggaaagctgacctttcaattgaagcaatctggcactagattaactagcgaatctttgttcaagtgctctccaaactgcagaggaggtatggtgattagccacagaggcaagaacaccctcagtcatggatgaatgaatccaatatagaagcaactgatca

SEQ ID NO: 7593 - DNA, 1950 bp, Cannabis sativa
atcaacaaattatttagaagtataaataaaatgcatatgaacaagagaataaaatgaattatttacaattattttgtagtttagaattattttttttaaaagaaaaaaagaaacagatagcaaaactctacaaaatcatagttcatatgttaaaaatacaatgtattctaataacaatttattcatctggttcgtttatgaacaagagaatttgtacaaacattgtgggcttaggcccgaaataaaaagccattacaaagtctttggtagttctatttaggggtgtgcataaatcgatgcaatctaatgacatccaatcaattcaataataatcgaccgctaaatattagatattttttttgtgacgcggtgatcaaaatcacacaagattatcaaagcaacaatccacaatcggcaacggcacctcctcgaaccaggatagctcatcgtctaaccgaagggcatgctttgccaaaccatgcgctgcagaattctcatcccgagccacatgggacaaaactgcccccgaaaatttagacaataaagctataacgtcttcaaacagcaccacatcacattgaaaaaacaccttcctattattaactagttgttttcagagcaaagcaaaactggaaaaattgcaacaccaaaaccaaaaatacacttattagaatgacaatcttcaaaataacaataatatacaaatttaaaaattatcacacacttcataacactagctctcagcattactaaaaaactaataaatcaacaaaatttctaagaataactagccaaaagtattaccctttggctagtaacaacaaactagcactctaatataaaaatgctgaaaaataataacaaacaaattatgtttaaaattaaaattatgtttacctaatttagtaccaaaattgcaaaacaatcaataccattaaaccggataccattaaattaacaccaatgaagaaactttcctacaaaaattttattctaattaatctctaaatcaccttcaaaatctaccaatatcacttatattcaaaataaaagaatatcatactctaaaagaagttaaactttccacaaatagctagacaaattacatgcctcttttaacgctataccataaatataaatacatacaaacatataattatataatatttaatgggacaccaatctaattaaattgtaaaaaccattctataaatacattagggatctttttaacaattgaaaactaaaatatttaaaccaattcataactatcaaaaccattaataccaaaatcataattatcaattcccttaatactaattaaacttctttcttcaaatcactaagaatgaaattaaaactgattttataaaattccacaaatctttccaactaaagccttaatacatttatacatattacctaaacccattaataatttacaagacgcttcaacatcttacctaatttaatttcctcataaattcattcttaccaaataattccattgaaatcctacaaaatttggtaatacaaattaaatcatcctactagataaggtcaaaaccacaataaatgaaaagaaaattaaaatggtcaaaaaccctaattgtaatagatacttgatacaaattacatcaaaataccttaaacaacaacaaaaaccctttttcatatcagaaaagccacctaaaatggcacaaagaaaccccaacaaaggcacaatttaaccacaaaaggcacaaaatttccactatccgtggcactaaacccctcccacctttccgcatttccaataacttaatgtatcgctttccccagcaaattccataacaatcctaaaactagatcaaatcagagtcatttacctaattacactaacacacataaaaccaacaagccaattatcaagtaaaatacaaatcaagagaaaacctaagaaagactaaa

SEQ ID NO: 7594 - DNA, 1125 bp, Cannabis sativa
cgtctagatccatctcttcgtcccgacgaccttgctagcaactagttacctcttgggggtcttcaggacctctagctctagcactagggctagtataacaaaggcagattgggttctggtgagggccatgatcacgtgtacgtaatcaaaagatggtattcactgctttcttcgattctctctatgaaagtaccaaaatatttctcgagagttttagaaacggtataaaaataataacataagactaaataatcagaaaataaagtattaaaagagacaaatagtttttttacgtggttggggcattaattagtcttagtccacgagtcaattttattcagtgatctgtttacttgtaaatgctctgagaaatacacactgcgtatcttcgtatgtttgcatgagcaaaagtacgtaaaagagttcaacacctaatccataagattaatgggatacttatagtagttggagaattacattaaggtttcccttttcccctttactagggagtttacagctaaacaatccctttgggctttctcatgaagtccagcccatgaagaatacaatctgctgactaggcaaattagaattagattgatcgggtcaaaaccgcatgcactaatcgtgggtagttattctggaataactacactgtgctaactatgagagttagaacttggtctatctattgttgtgtcatgagggatttggagagtgattaattgttcttgctctgtagcaagaaggttacattgatcaaatttggtgaattcgacatattctttgaaagtttttgggttttattcaatgagagtttttattgatctagtaaaaaggcaacgtggtttgaagaaagtttgatatggttttcttacgggaatgtttgataatatgattttctgtcattagaaaatacaaacttcatacaaagcatcgaatttactagcagaaaatcgtcgcaatgttgggcttgttgcaagaggcatggatactggtgtggaatgtgttgagtgttggctagaagacacaataatatcaaaatatattgtcatggtgtatgagactaggatttctcagaatcaaggaaaatgttatcatggctctaataccattatttttttt

SEQ ID NO: 7595 - DNA, 779 bp, Cannabis sativa
tggttcgcggggcactataatagtcataagctttttgattttacttacttgtttccttctaagcttttgttccattttatttgcttgctagacaatttaagggttgttatcttagattgttcagaggttttcgattccaacggccgaaaccccaaactttaaaatttgattaagttttaatccgttgcctgatttaggaagtatttgggggccaaacacctatttcctattttcaagtaggattattcttattaagaccctttttggtagttacaaatttaagctaattaaatatcttgacaacgtaaattggcttttaaactgttcttgtaccatcgagtggtcgtggagtcttagtgcattttcagtgccttgagtattcaactacttactttgaatgttttacaaaggatgctagcaagggatggttttctcacaaaagggaaatcttttacgatccaaacgttccctgaccaccgctctttatcaagttgggctccaagacaggtggtcgaggatgttacaaatttcaggcattatcccttattcagggcttgagctaaaccgtgataacactcaagcaaattttcttggcctagactttatcgacaagaatcttttgccactagggccatacttaaatttgggggtaggctactttccctatggattttaggcagtatccttcgatcaagatcgagctaaaaatgcataggagttcaggtgaggcttccccattcataccttgcaaaaaatccaacagattaaactttaggaaa

SEQ ID NO: 7596 - DNA, 697 bp, Cannabis sativa
ttttttttttaattttaactaaaataatcttatgtttttttttttaagttaagacaattttatctttttaattaaagacaatattaaggcgctatagttgattattattgtttgatgaatgaaattaatttatgttaaaattatttattttgtaaaatataattataaaaaataattatttaaaattaataataattttaaattataaaaataattttgtaaaacattattatattataaattttattttattttattttaaaacttaatactggcggactattaagggtggggtccgctgatattaatggatccgccggtattaatgctttagtttcataattgacgaaatctaatattggcagggtccgtccctaataatccgccaataataagttaatagcggcgaactttatttttagttgttatttctatgaattagcgatcgtttattaatagtgggccttaactgtctggacctgtcgataataatcaataccgacagtttcactctttaatattggcaggtgttctcgcccctagtaccatcatttgttgtagtataatagttttttttttttaaaaaaaatacctagtattagtggcgggatccgaatttcgccactaatactacccatattagcagtagattttgcccaccgctattgatgaatgttattgtagtgatatgtggcac

SEQ ID NO: 7597 - DNA, 679 bp, Cannabis sativa
aactttcatgtatatcactgtctccattttctactgtattttgtaaattaaattttacacaaaaaaatatattaatgtttattcggctcactgtttgtaataattttgcaaaattgcatacacaagatacaaattaagtcaaaaaaaattaattattaataatagctttcagtattttgttgagaatgtacactttttgtttattattatttttaattattctaattactatagaaaatttatataatgtacttaaaattataatgttttatatatttttactgttttttatgaattatgttttttttttaaaaaaaaaatattcttttcatgttatttttccgtaataacacgtgaaaataatatttttgtaaaaaagaaataataaaataaaattcataaaaaatgtaatattgtttattttgcataattattagtggttactatctttattttgttaaataattttgcaattcctaattaataatattattacaaacaagaaactctttgtcttcttttctcttgaagaatttagataaactaagcttgaattgaagaagatttttgtggttaattttcagagatttgtgaagagatctcttacaattttcacggttgtatatattgatagaaactggggggtttttaccataatgaaagattgaaagataatata

SEQ ID NO: 7598 - DNA, 1679 bp, Cannabis sativa
acattagaagcgaagatgatcaagcgtaagtaatccataaagaaattagagatttgagtactaatctttccgaaaaagaccacgagagaattgaaaacagtagaatcttcgagctttttgccatcatctctcatcaaatcgttcaaattaaaacactcattttctctgtttttcttggattcttctctccatgtcattttcataaactcttgtaatcattctttgtaatcccccaaatgttgtttttgaccattttgataacgttttgggatattaaacattttgaacctctcttcttaatggtccaacttctcattttctgtctttaatgcttcaatatcttacatttcaccgaggaattcagaaatatccatcttattcttgtttttgttcttcttataactcgggtaaagagtttttggatcataatcttctaattcttgtataattcttgaagtgtttcattgtataaattcttgaagaatttcactgactcttttcgatttgtccttgaaaacattacgtttaagattttctgcatatgaataaaacacttatcaattgaggactagaaaagctcacctcgaaacaaagaactttaataattatatgatgaactaattcgtctttgatttcataattcaaattaaacattgtcttcttcctttacttcttattattcttattgtgccaaaatagtctagccaactccattgcatgcgcatttttgaaaaatcatagaaaagtatcaaaaccatacattaccaaagagttcttattctcttccacaggccatcattagaatacagttttaagctcataaagactcaatgtcaccctttcatgattacatgcattggaagcaaatatgataaagtagaagtaatacacgaacaccatttcatacaagttcatctttctctcattcttgttcttgttcctcttcttacctggatgattagtttttggttcatgatcttccaattcatttatgaattcttgatgagtcttaatcacaccttcttttgttgaaccactatggtaaagaaaaactatattcactaagtaccataattttggatcatgttccatatttcttgaatcccagcacccaacacttgccaaaacaaattcaaatgagaaacaaaatcttatcgataagcatcatcattattttcttggactgaatgttgaacattaaaatgattccaatgttctttcattttatcaataacttttttcaatttatccttaaaaatattgcttttaagatctcattcctttgaatataacacttcattaaagttgttgtttcctgtagggatagattaaacagtagaaaaactcacatcgaaatgaagaacttcaatgatcatataatgaactaattcgtctccaatttcatcatccaaataaaatattgtcttcttcttttccttcttattattcttattgtaccaaaatagtccaacaaactccattgaattttcaaaaaatcgtagtaaagtatcaaaaccgtttattaccaaaaagttcttacaatgatcttcaacatttaaacatttaaatatatagttataacctcatcaagaattaatcaccatgtgatgattacttgcattagaagcaaaaatgatcaagcgtaagtactaattcctaaacaagatgaagagatttaa

SEQ ID NO: 7599 - DNA, 570 bp, Cannabis sativa
acacaactcgcccaatccgcatcggaatagctttgaagtgtcaaatctgttgttggccgaagtactaatccctcagaaattgtacctttgagatatcgcagtaaccttttacaagcctcccaatgacaagaagtaggagctttgataaattggctgagcttgttgatgatgtatgccacatcaggtctggttagagaaaggtaatgtagagctccaatagtactcctatacagagtaacatctgaaaatggttcgccatcggtgagggataatttggtggctgcactggaaggattgggagagcttttagcaccttccatgttgagtttcttgagcaaatcagtaatatatttcgtctgagagagatacatgccagaggagtccctgaaaatctcaacgcctagaaagtaatgcacatcaccgaggtctttaagtaaaaattgtgtgttgagatcagttgtaagcttgtcaattagtgtaacattgggacctgtaactaatatatcgtcaacatagacaaggaggatgattagagagggacctgaacgatatacaaacaaggagttatcg

SEQ ID NO: 7600 - DNA, 634 bp, Cannabis sativa
tggagatctagagaaaagaagatctttgacttgttatgtcttcacaattggaggaggtggggttagttagaaatcaaacttgctacatgttgtttcactttccatccacttgagttgagtatattgctcttacagaagctattaaagaggctctatggctaaaaggaatcacgacagagttgatttgcacagaaggaagtgaattgggactcccaaagagaaatacacttatccaagaacactatttcatgaaaggacaaaacatatcgatatcaatcttcattttctaagagacattgtcaacaaaggacttatcaaagtggtgaagattcacattgacataaaccctgctaattttttgacaaaagtgatacgagttagtaagttcaatgctgcattttacttacttggtatcaagacatgattcctagagccctaagaaagtgcctaaatccactaagtgttacattaaagaaattaggaaccgaggtagagaattctgaagtctggttcctatttttccaagccaatcaaacacacactcggattgctgacatgataacaagtagttaaaacactaaggccaattgttttagttgcccgagactcgagataacaaagttaattagctaat

SEQ ID NO: 7601 - DNA, 1427 bp, Cannabis sativa
cttagtggccacttgggtttggtagtcgtagagtttgttaaagtagataagttggctaaaaacggtgccgtttactggtggatatgaagggtcctgtatggacttgcctgtgtaaatttttagcagaagcaaagaaaaacatagaatagtagtaagaaatgaaactgcgatgaaagtaacgatgagacataggatgtccattggtttgactttaagatgagtaatatatactaccaacttaccaagtcctctcctttatattgatgataattcaaagtctctttccattttacttattaaattatatttgtgacacacaatgcttgagcttctgttgtggtgtttaacaattcattaattaattatatgatcttgcttttaaaaaaagataattaattatgtgataggtacaataatctgtgtataaataataattaataaaaacaatagtaacttgtagtcaatttagttcgtatattaaattttaataagtgatcaaaatatgctttattttgccatcttgaaatgcgatgattactatttttaagcccaatatgcggaattatatttagaaatgttcaaagcttagtacaaatatttcctattattaatacaatttaatatcaaattatacttattttaatttaataaataatattaaaaattgctaactaattataagagatcattcatagaaatcaagatctcctcttaaaaaatagagtattgttatttggcaccatgcctagcaccttctcgatatgtcacgttgtgattggctagcgatactccctaaaaactattatattaaactatatgggatccgataattaattggaccaatagcgatattaacacataagagggtgctaggcaccactggtgccctttagtatttctctaaaaaataatatcccatactgtgttaaaccaatgtaaatttgacaagccaattaaggtgctagacagtttagtatcacatagcaatgtttttttttcctttttctttctctattttagtctctctttcttctttctatctcttctctttaaatttaaaaaataatttttgatcacttactcgattgaatctaaaaaaaaaaaagttattgtgaacgacatcatttttttttttgaatggaaaatgcatctttattaaccattaaaatccgctaccaaagtattgtgaacgacatcattaattacaagtgaaagataaatttatacaaatatgaaacatcttcattgatcatattcatattcatacatatacatatgtcactttcttgttcgttgttggagatactgtcaaattaagctatgactattattatgcatcacacgatgctcattttcttttatgaggctgcccttgaaattgcacagacggggagctcaccgtcgatgtgtagagtgaacatggttct

SEQ ID NO: 7602 - DNA, 938 bp, Cannabis sativa
aacttttcgttgcaacgctccaaaaaagctctggatttttgggctatgaatcatatttgagaaggctaagtaacttgtgtattgaatttgtaagactaaacaagaaactatgtcaggtaacattgttgagttatataagtgtgaactcaattataacttagaagattaatttttgtacttgttctttttctgtagacaggttctgggaagacactgacatatcttttgttgatattttccgttataaacactcaaagatcagctgttcaagcactcattgtggtgcccaccagggaacttggtatgcaagtaagaataccgttctggagttttttttttcttcctgtaattgaatacgtttagaggaaaactggaatttacatattcttctttaagatactatttaaggaggaaaacaaaaatgcaacttttattcttggttgcagtttttgagtacgtatagtgggtaggaagtaactatgtatagtttagtatgattagcctttctcacttttatttaggttaccaaagttgctcggactctggctgcaaagcccacggaaagtgatttggagcagcattcgtgtaccatcatggctcttttagatggtggatcattgaaaagacacaagacttggctaaaggtgctgttcttgttaccttgtaatgcattgtagtttgtacctctatgttggaaggcgacagcaaatagatacccactttcttaaatttcactggattagcattttatatttttttctttaatcggtctatttggttatcagggttgcaacttttgtgggaaagatgtcatttatgaataggatgactaattcatgcttgatcaactttgataaatttcaatcatcaaatgacctataatggtgtcactaatcaataaatgtttgaacctaattctagctgtaattttgtattga

SEQ ID NO: 7603 - DNA, 549 bp, Cannabis sativa
ttaatcatcagtaggcctcatgatcgccatgcatgcatgatgttaatatgttatggcaatttaatttataattagcacttattaggctcatgattcttaatgttccaataataaatttttgataaatagtaatcaatcaaaaaagatttttgtgcttacaaagttgtttgcatgtgattatgtcagcacagtattttcttctttttgtctctgcagacaaaattaattaatcactgaaacatgtatatgtaaagatttaattacaatggtaattaataattaagtgtaagtaactttttgagtgcataatcaattgccgattctatgtccattacttttcagctttttcatgttgcaaagtcttttcttttcttttctttttttattattaattcatctatatctatcctcaattaactagcttagatctcccaaaatccaggtctttcacgtcaagaaagtttacctttttataccaaaaattagaaaagaacccatccacctcatcccacacaaacgtcttttcattccttgtttgtcattccaatc

SEQ ID NO: 7604 - DNA, 564 bp, Cannabis sativa
tttctctttcatcaaaattcctttgagatccaactccaacttcttcaaaatctgatgtttaatataccaaaaaaattagattttatctgaagatcactccttgttatggccttctacattggtgaaaataccccaccactaaatatatagttggttaatatgcatttatcttccacatcacctatcatattatattgtattgtttttaggtctctaacaactatttaatgctcaaacatttggcttgaatttcaatgtaatttggttactgaaatcatatgtgaagattttaataagaatgaaattgttgatatgaaaaaaaaatcacaaaaaaaaaataaataaatctctaatcgatgtaccttttaacaaaaaaatttcataaaatatgtaaaagcaattatcaaacatgaaactgagattttaaattgattaagaatatatatgacaaatatgtatctcaaaatttttgggccaatttctctggtacatagtcgattcctctggtacaaaaatgaagtgttctgtacaatcactccatgagaaagagaaggaataacacag

SEQ ID NO: 7605 - DNA, 2385 bp, Cannabis sativa
gaggccgaaaaacttaagtgtagggcactttggggttaatgcccttgtggagagatgaaaatgatccttactccggctcctttattgtttgagaggctttgataacatagaccttccaggtgggcagttttgagactggctcctctagaaggtcattcatgctagatcattctactttaaaatcaacaagggcttggcctttgattgaaactcatagttggtattgaatgtcaaactggctgagttccatagcccatttcaatagccttcatgaagactttagcttctaaagcacctaacggaggggatggtttgttagtacatttatggcgcgagtttataagcaaggtctcagcatttgagacgcaatcataaaaaaatgtcaatttctcaatcattgggtatctagattctgcacccaataatcttttggttatgtagtagatcgggtactggacctttccttcctctcgtacgagtgcagcacttatggcatggtcagacactgcgaagtacaggtatgaatcctcccattccatgggcttcgacaaaattggagctttggtcagatcctcctttatcttttggaatgcttcctcacattctttggtccacattaaggaatgggatacacttattcattaattttgaaatgaacctattgagtgcagttttttgacctgtaacactttgcacatctttatgtttttggagagggcatgtaaaggaaagccttgattttctctagattcgcttcaattccgcgggagctaacaatgaagcccaagaattcccagaggaaaccttaaaggtacatttttttgggtttagcttcatcctctaattcctgagaaccacgaaggcttcttcaagacctgggccatgctcctcaacggttttggactaaaccaacatatcatccacgtaaacctccatgtttctccctaattggttcttgaacattctgctgaccagtcaatgataggtggctccaacgtttttaagtccaaacaacatcaccttataacactaaatgtctttgtcagtttggaagtttgtgtgttcctcgtccgcatcatgcatcttaatctggttatagccagagtagcttagcaacctgtacccggaagtggcacctaccatttgatctatctgttggagcagaaagcaatctgttgggcaagccttgttcaggtctgaaaagtcaatgcacatcctcaacttgccataggatttaggaaccaagatagggttcgcgatccatactgggtataatgcttctcagaggaagtgattggtagtcagcttgtcaactttttctttgactgcctctgcctttattgggtcaaagagcattcatttttagtggagtggcgtcggatcttcttgaatattgaaggaataggaaatagtattgtggttaattcccatcatgtcagaaaggctcgatgcaagcacatcctatttcttcttgactgtgttcacaatattctcttttacaaacagaggtaggtttcttcccacattgattgtttttgtggggtccacatcactgatgcttatctcttccacctcctccatttgttctaatgttcttttcatcccaactctgggatctaacttatcttcaaaaaatcttcttgaatggctttagtttccatgtgagtctccattctaggacaatgggtgcctcttctcaaacaatgaacatagttcgtgtcgagacattgtagcaattccttgcacttttttgatcaaccttaattgtgccaatacatccattatcacaaaggaacttcatgcacaggtgccttaaggaagtcaccgctccaaaaaccaccaacactagtcatcctactattgcattgcatgattttggccaatccacctccacaaaagtgtagtgcttaaaataacttgcagttttttctccttgagggtgattggtagctagattttccccttaggcattagggcatctccattgcaaccttatagttgaatggggaaaggagtcaaattagcttctgtgagccctattgcctagaacacaaatttgaaaaggatgttcactgagctttgactatccaccaagagtctagaaacccttttgatggcaatttgagcttcaataactaaagggtcattgtgggagatacaaacatttttggaatcatccttcgtgaaggtgatgggaaaattcatcatcttggggaattgtgctgtcgactgcaccaatgaacacatttccccttctttgtcaagctctctcaaatatctcttttgagaatttcctgtacttcccactatatgtggcttgtcggaaatcatggccacgtgtccatctactagaggcaaagcgagtaaggatatggggttctgggc

SEQ ID NO: 7606 - DNA, 750 bp, Cannabis sativa
ggtaataatgagagcaaaatatatcaaataaactaaagagtaaatatcaaaatagtaaaaaatgatactgttatttttatcaaaataagatttaataataacataaacttagaagttactacaaaaaatcttacttttactcctaataaattacttttgattaaaataaaaaagttgtgaccaattataaactgtcacttttacgttgtgactaaaaagtcggtggctaaaaatattagttacaaaaatcacaatttgttgtgactaaatatgtttttagtcataatacttgttgagactaaaattaaattagtgacaacttatatctaaatactatgtttaatcataagtgatttttttgttgtgactaaaagtcacatttagttacaaaattttttgttgtgaataaaaaattgtcactaaaggtggtctttttttgcagtgagtattataagcagactaattacatattttgcttatgtttgtgctagaaattagcttcaggttagttatattaaaaaaaataatcgacaaaaattgaagtcaatcagaatattattttgtaccattgtaaaaaatacaaaatttaactgaaaaaaaagattcatgatcactatatttttacaaatagaaagtctaagatagtatttacaatattgataaggattcaaaataaaaataaataagaattaataaatagaagaacaaatgcctcattatcacaaatagattacactcaaaacttaacaa

SEQ ID NO: 7607 - DNA, 580 bp, Cannabis sativa
attattttcaagttagatgtctcattcaaaatcacctaaactggtttaagaaaaatccaaactcatttattttgtactaattttgaatcgtattattatgtctgacctatttgtatcccctatttttatcaagattaatcgagcctcttttaatattttggacattcgatagtaaaaataaataaactttttcaaaaaaatattattataacataaatgaggttcccataatataatttgataaattatgttcacaaaaatatcatgtaccttatattcaattttaaactaaatgtaacaagctacaatattttaaggttttacttttagtgcattgttatagttttttattatctttacaatgtcttttgttgactattgagtataaaattagatgtatgtaatttttttttttttttgtttctttgtttgtttgagacataatctttcaaatataattttatcaccataattgtagctctggtacaaaaattagaaaatatatatatatttatatcaatgaaaatgaaaagtatcataattcgtctatagaaactagttgtaatctctctgagcaaat

SEQ ID NO: 7608 - DNA, 687 bp, Cannabis sativa
aaaaaaaaaaaaaaaaaaaaaaaatagaccatcaacatataaatcaaataaagctgaattgtataaaaaacttccaatttaactggaaaaaaatgtacccttttgactaattacaccaatccaacaaaaccaagttgtaatctctatctaaaacaataaacacaaaagtcgtggcatagctttcatatttcaaaattctatatcataatttcatttccctagttttcctttcaagattttgagaaaagatagtacggaatccactacaggaaaaccctaaagctcaacctctactacagcgtgatcaaatacaaatttaaattcaaaatacaataatagagataaaatgaaattctgaaatattttacaagattctcctaattacttcagtttctattctcagcaaccaaataaaaaacataagagaccgagcatcaagaacaaaattgaaattgaaagattcggaataacaatacaatctgcaacttttgatgaaaaacaattgtaagaataatacggtacagagagagagatccttaccggaaagtgtatacgacttccaagaatattggcaggagctcagacattggagtttagttggtactgatcaaagagataaaacttcgtcccattgatgctagcttgtaaaaatggagtcgctgtttatatttggcttttctttttttt

SEQ ID NO: 7609 - DNA, 743 bp, Cannabis sativa
ttggagtcccttaaaaccgctccaaaaccagatttctgatccattgtatttaacgcaacatcggtattgagtttcagccttcctgaaggaggacatacccactcagaaggaacaaaagtggggctttgattatgttgaatgtccatttgttctccattgttcatgttaccattcgcaactttgtattcggccatatagttcaaagcaaaatgtaacaaaatatcaaccaattttgattttttgccatgaaaatcattgtttctctcattccaaatactccagcatatgcaagtcacttgttccaattcgtatgtagataatatatctgagatatagaaaagaagtgacttacaagaagcatggtgattcatagaatttggtatgcgaataccagagtaaagccacatttatttagctcttttacatgcaaagagagcatgaaaggttgtttcttggtgatatgagcagagtgggcagcgacttgaatcaatgacatgttttctatgtagagtggctgcaactgggaggacatcttgaagaactcgccatagaaaaattttgatcttcgacgacatttttaatgaccaaaatttcttccaccattttgattcagaactggaagaagattcatcttccaaattatttaactgaagtgaaagctgataccccgatttgacattgtacattccatttgcaatatagtgctggattagttgatcgggatgaggaagaaaacttaaagg

SEQ ID NO: 7610 - DNA, 1268 bp, Cannabis sativa
aaaaaaaaaaaaaaaactatagtatatatgcataaatatatatacaaagtggcatggggagaattttaactaaacaaaaaaaattaatcaaacaaaatttcacccaaaatttttcttagaagatattccatgattcatcgttgcttttgcaatatctaaatacttagatttaatgtttttattttttttcttagtatcaaatatctttgggagttgtagatattcaatgttagaggaaccattttcaacctaggcagtagcaaattttaaataacattcttatgacttccacaaattatttatatattagtactctcttttgttatcagtgtagcaaagaaagaagcctatttttcttcatattgaaaacttgctctcattttgatttttgaataagacgtatgtgtctttttcttactgctttttgcattttcgggtgttaacagtaacaactctttaacaccatatacatgaacagttgaaaaaatttatgcaccaataaattcttctactcctttttaaaatttttatggtattattacataaaaaatagttctctattttggatgtgtttctcaaggaagtacgaattccttactcttgtgctctccatcacccaaattctgttttcttctaatataaaactcacaataactactatgtgagttttctttctctctctaaaataaaaagttcatattcattttcttacataaatcctaactaaactattgacactgatactcttgtgtacataaatcacgagaattcaatggctattattatgtaagttgtttattcatctagatttcaaatatattttgttggatgaatatttttgaattaagaaatttagatttaattgtttataaaatcatatcagtgttactattgctttttttttttaccaaggatttatcactgttatttgtttattaaaattctgaaggcccgaatttgtttttattataatttctcgattatgaataacgaattttatgtacacacaatatacatggcaaattttgcaatcataactactttttaacatagtgcatatcttgacaatagatttgctttcatgtatatatgatttcattttgtgtaattttgtattatatatttagtttctatgctttgatgagtatatatgtgtatgttaggtagatttatttgttatttctctttcttatgggttaccttattcaaaaaagaaatttaaaagtatggacggggtataaaagataaattacagatttgatttcttg

SEQ ID NO: 7611 - DNA, 700 bp, Cannabis sativa
ccccccctctctctctctctctagcatattttctacaatgcaatcatgttctttgtcattgttgactgagtttatgctttttgatttcttaatgattgttttctttattgatatgaacaatcaatagtaaagttatgttgatggagattcttgtcaaagacatttatgggaccaaatgtttgaatgttgggcagtctctagcctcttaattgaaaaataaaattaaattcaagtaagttttcaaacagttcatctagcaaaaaaatttggggagccatatggactaatgttaaaaaaaaaaaatcttaaagaaaaagaggatgggaggcctcttgggctgaggcgccttgggcaacagccccagtcgccccaccctaaaggcgaccctatttgaatgttaaatcttctcacttggatcaatgaccctcgatatgcttttgttaggatgcacctaaatatgcccaaagaaaagttgtagaagattttatcttgactgaataaaaattgaaatcacgaaactatcgatgatcagaagcagaacttctttatccatcttcttaactttttcgtgtttaggtttttcgtgaagagattcttctacctaatgtttccaagttattaaagttcacattgtaatgtataatgctcaatatgtatggttctgtgttgagctactctctgtatttttactgtaaatggg

SEQ ID NO: 7612 - DNA, 1663 bp, Cannabis sativa
tgactggaggtaaaaaatagaatatcaagttaattttgagattcaggccaagcaacttctcgcaaaaaacgacatttacccttgattatttcttacaagaatcgcctatagcaaccagagattttatcttgactggttttaatgagatgattcctagttttggtatcatttacctcaagtatggttttgggaatatgaattttgggtctaaactttaaggcagaaatttgaggataaaccgattctaaatattctgggattgtgatttatggaacaaattgggacatgtttatgattaataatatcctaatttctaaaataatagagcacaagtgaaacctataaatttacaaatcgtaaagcctaaaattttctagccctagagattatttagataaataagatcaaaattacccaaacatcaaaacaatgcagataaggaaaagaaattatgacgacagaaagaaaaatcaatataaaaaagagagtgtaccacttactgttttgatgaaaatttctagacatagggaaatttgacgatttaagttttgaaggttgtaaaactacatttcgatggcttcaagaacaataaatgaaatcaattgaaattcgcaggaagtatgtaagagataataagggcatacaagttcgaaaaagaacaattagagttttttgcaagaaggcttgaaggtttgaaaaaacaaaaatggtgaaatgggatgttcagtcttgaatttatattcgataagtgatcactgttcgatcaaagaaaatctaatctaacagatgggaactttacaaaatgggaacagttagggcattaaatgctcaatgatgtgcctcaaagttttgaaccaccaaaactcaaaacatataatttttcaaaagggttaaatacaattatacccctatcatcatttaaaaagttctttgtaaattaaaaagtattttttagggggcaattgttatacccaatgttcggctatgcaccagaagctgacatgtatcctatagaaggaatatgaatcaactcaaagaatgtaataatgaaattgtatcatttaatgcgatttaaataattcgttccaattaagtacaagtttgatagaaatgttctaactcgctgactacttagtcttatgcgagataagaatagtaactattaaactaattgacgaaacatatgtcagcctcgagataaagtagtaaaaatatataagacaaaatatctaaaggctctgtaaatcgttggctcaccaacaccagcagggtgaaaataataatactcaaccgcctcgcgttttacacaacgtagtagtcatctcgcatcatcaagacaatataggggaataacgagatgaaatatttctacacttagtattttttcctaacaagacggataagaaggataacttatatttgacgagatacaactttcttagtcaggaaaaccatctaaaggataaaaataaggatcgattgggtagttattagatattatcccatgtgtaaaaaatgaaatgtggggaatgtccacgtttcattagcagttgtaaatgaatcaatcccaataaaaataactgtcaaaatatatacctataaatagaggcaaaatctatgggaaaggggacagaagaaaaaaaagagaaaattttattatttt

SEQ ID NO: 7613 - DNA, 508 bp, Cannabis sativa
ttacatccttttgaatttttggttgggttttatcccaaacatataccatatatttctcattttgtatgtatagtgaggtcttgtctttcactctccaaacctaattttattgcaaagttaaatgaagtttattatgatgtatatgtgtagagttaggttagtctatattttttgttattactcaagaagtggattatacggcttttgttggttttgatgattattgtgggtagattagatttcgatatcacttgctatgtattttgaagccttgcatgaaatttgttgctaatattggtatggactttgttgctttttggttggtcttaattaaaccaaatgataagaagaaacacaaattataaaaatgaaagataaataaggtgaagaagaaaacataaatagctcaagcattataaaatatttgcatgaatttcagattgtatactttataataaaatttacacctccacacgatatatttatacttttattttactttccttta

SEQ ID NO: 7614 - DNA, 1680 bp, Cannabis sativa
gacgacggaatggagaaaaaagagcataaccagagtgatcaggacagggagagaaagagtttgcactggagaaaacgtccctgtaggttgacgacgtagataaccacgacccaaacagagggaaagggatcccattgtcactggtcaccaactccggtgaagtaagagtacatcctcttctttgatgtcctaatcgtccacaaaaatagcagaagatgcctacttgttcatatttgaactggagccatctcttgactcccgaatccaagtcgaaaaaacaacccgaaaacaaaggtgaagtgaagtccttttcgatcaaaatcttgaggtatttcccccaagaggcagggttgttctctttcaaatccacatagatgactttccctgctttaccacctagtaataaaccgttaggcattgaaaaaaattcatgaggaatattgtgtacctgaacccaaatacacatcgtgtcgctgagaacaggggattccgtggttgaagaccaaacttggagaaaaaaggtgtagccacggatacaccaagggccatggtccaatgcccagctcctatcttcctcgcgagcaaaacttagctcgaaacagttggtatgtttaggaccctcagctagagccaccacagtcacaggaaacttccaagctttggccacaaactccataacattggcctcactcacagacatgggggccatgacttttcccagcagacaaaaggtggatagagcttttcgagaagattcgcaaggaaccaacttaaccaacgcgtcattaacagaaagacatttgcctttaagagagggagtcaaagaagcatttactacctccataaatgccgacagcaaacgacaaaccaagtcaaaccaccagagacaacaacaaggaaggaataaaagcaaacacacacaaactcacacaacaaaaacctcagagaaaaacaaacacgcagcaacacaccagaagctaggacaaaacccaaccacaacccctcaaggagacacaggcaaacgaaaagagacttagacaacaaaagcaaacaaagcgaacagtcccaaatagaataacacacacatcacaaggtacaaaaccaacaaaccggacacacgaaacaacaagaatcataacacgagagacccccagaccaggaagaaatgaaataagacacgacgagggatagagagagaatcacagtagatgaccatgttctcttcaaccatagaaacttttttttttatatacatatcttaatattaatactcttcaccgctttatatctatggcatttttttttatttttttattatatttttaaatcctttcccattctctccctatatatagaatgaagtatgaactcacattttatacgaacttttagactcatattttataatattaaacaaaattattacctaataaagaatatactttgactaaactcaattagtgatcaattaccctagagagattaattaaaaagatgaagatgatatgtgaggctttcttatggtccaaaggaccatcttttaggagaagacgcacacttcgttggctcaactcaacaaattattggagtagttgacggagtgggtggttgggccaaaaaaggcattgatgctggtactacgctcgccaactcatgctcaactcaattcatgaagttgtc

SEQ ID NO: 7615 - DNA, 833 bp, Cannabis sativa
gctttgtcataaagtcaaatgataaaccatgcacttgcacccaattgtcaaatgtattcaactgcacaaacttgggatcaccaccttgaggaaccctctcaaacaagaacaacaacctactgaaaattcaaagactcccattaattactcgctttatatcaatcttattgtaaaattaaaatagataaaaattaagccccaatttttttacatacaaatctttacccaagttttcagagaccaacaatagtgtgtcttatagtattaaaatctaaagatcgagcattcaaaaatcgtcctaccaaacaccaacgatcatcgataaaaatttcctctaaaatgtttcaatgtaatcaaactccacccccaccttcctcatcttctaattctattttattgatatcaaacttaatatccattttatcaaactccaaccttactcctcaatgttatctaacttaatatccatcttattcatttttgttgtaaacatcttccacgtgtcaactcaattgcatagttgtgagtgataaacccttttagaaagaaaccccaaaaagccctttaccacaaacaaaccatcgaccagagaccagagagagctaccatggcttcgttatcagcggaccttggcttagccaccgccataatcgccctcacttctcggactccgtcaccggcctcactttaccggcttcgaaccgcagtccatttccctctcctatgcaaacccgcggtaagcttctccacttcgtcttttcgctcaggactccttgccctcgacttcgccaagccgaggctcggctctagaagccgcactgtggcttcttctg

SEQ ID NO: 7616 - DNA, 936 bp, Cannabis sativa
atttgaatttgttgatcaccttggaagtcatgtgtgtaggaaagattgtgtgcattggcagtcaagtggtgagtagcacctatatctagataccagctggtgtccccaatggtttctggtgaagcgtacaattgagaagcttcaacaatgttggcactgccagcaaatgcttgcaaggtttttggtccttgaaatgatttatcaaatctataaaagcatttggccactgtatcaccaagtttatgacacagctgacattgaaccttttgtccccatggtgattattggtcgctgccatatgtaaaagctccttttgaaggtggatgtgatccacgagattgacttcctctggttgtaatttgagtaggttgttggccaaagccaggaggaggaggatgagctgagtatagcacatttgctattctgcatttgatgacctcgagacacaaaatgagagccacgattagtcgaattaggaaaatagggagaagaaaaggtacctttgccaccagtgaatggtttcgtgtgagtaagatttgcttcaggctttgagaaatccaattcttgagctgacttttcaaaacgaacttcgtaagccatgactaaaccttaaatttcagggacagtatattggttattagttcgtatattcacagaggtgatgaacacattgtagtcactagtgagttcattgaagattgcttcaatgtgttcagctggagagatctcatgaccaatggaaaagactgatgtgtgagaatttggaaggtgactctcattctagggatagctttgaaattcacaacattggaggacattttttgacatttggtacaagcactttatggatgcaagaggtagattgtatcccagttgaattttgtgagaggaaaccagtatccggctatatatgatgttaatgttggaatttatttt

SEQ ID NO: 7617 - DNA, 823 bp, Cannabis sativa
tttaatgacttggactaattagaatttgacacgtggcaattcacttaacatttaacagccaaatacctacaaaagtaaaattatatcttaggtattattactgataaaaattaaacttaggtatttatttgctaaacttgagtatttataccacaaattactctaaaataaacattaaaattactattttattatttttaatacaatcatatattatttttttaaagggtaaaaaatacattaatatggttttttttttttttttttggctattttttagattcttccatgggattgaaagttgtttttatttgctccctctccatatctcctcttcctcttgccaaacaaagaaatttattgatccctccatacaaacatatatagtaaaatggggaaggtttgagtgttagattgaacagatgatacaagcatgtatgtgggcgcctggtgcttttgaagttttttttagcttgtgctttatcactatcattcatcaaaccaattctcaatttagattgtattatcattctttacatacgtacttaatttggtgatttaaagagtatcaaaattttgttaccagattttatatataccctctaaaattttacaaatatattgactatttaaattaacattatatacaaatctagctcaaattaatttttctaaaaccaatatattattttgtacacttttttattaatttacattataaagaatataagagcaagtacatgcatggtgaaatataagttggagacatttatgtctaccctaattataatatgcaattaaaagaaaacacaatagtagtgat

SEQ ID NO: 7618 - DNA, 1672 bp, Cannabis sativa
ccccccctccccctcggcgtgaagagagaaaactagagaacttgagtcttgtattcttgaaagatcattatccaaaattacaacaaagattatctcaagatggattaaaattattagtatttatggattagggtacgcttccgctatttgaattcttctctttgaatcaacaaagatattttttagatttatgtttatgcgcttataataatatatgtatatctataaaatttagtcatgttcttgcatattttatgagagataaataattagaacaagtggtaccagagccacctttgattgattctttgagatgttaggttcatatttaagaaatttgggaactttctaaaaacttggtgtttacgataactattaataataggaaggtatttttttaatgtgatgtggtgctatttgaaaatattatagctttatctactgtttgggggcaattttgtctcatgtagcttgtgataagaattatgtagctcatggtttggcaaaacatgccctttggttagacgatgagctatcctggttcgatgggttctaccgctgattgtaatttgctgcattgttaatcatgtgtgattttgttcaccacgtcaaaaaaaacataatcataagtaagatattaaaaagaaaaaagtgtaaaaataattagaacgatgtctattaaactatcaatactattattgggaaaaataattcctaaaagagtaatttgcagcataaatacctaagttttacaccgagtagcagataaatacctaagtcctatttttggcggtaaaaataccttctgttagggtcttagaacttccgtaggtatctggacgttaagtgccaggtcacgatccacttgtcactcgttcattggtccatatcattaattttttatttattatttaaataattatttaaatgtttaaacattataaaaaaataataaaaaactaaatataattaattttattttttaacatttatttctttttttattgttttttctttgaattaaaaaataaactcaaattgagaaattgaaagcaattaaacaaaataaattcagatttttaacaaacccaaattcttcaacaaatattcataaactatacaaaatttgtttaacacatacaataaacttaagcaaacccagaatttgacaagaacaaaatttcatattaggatcccaaatcaaaactaaatattacaaacaaaatacaaattaaacaatcagatctaagcaaaactttaattttgaaacccttaaatgaggtagattaactccacgatcaagccaaaaccacaaatctataaacatatataaaaactcaaaatccaaaaataaaagcacaaactaccttgtattttcatgctcaactgagtcaaagacgatggtgaaatatggctgtggtgaaatagggctgctccgatggtgaggaggaagaaggcgtcgatgaggagtgttcgcaggccaacgccgatgagggagaagaacaatgaccccatggttggttcctgggcagatctaggtgtgcgacttgatggggtccaaaaatccagacgaagaagaagaagaagaagaatagggtatcgatacagaagaagaagaacacgggtgtgcgaagaagaagaagaatgaggtccaaaaatccaggcgagaggg

SEQ ID NO: 7619 - DNA, 572 bp, Cannabis sativa
atctccaccttggttggaattctgttaaaactagtacaaatcatagacaatagacataaaaagagaacattaaactagattactgacactgataaggattactatgattcatttgtaatcctgagaagattcagacaatgtctgaattttgcagttggaagggctttagttagcatgtctgaggctctcttcagttgacactttcaccaatttgaccttcctttcagctagaacatcactgatgaaatgtaatctcacctcaatatgtctgatttttgcttaagtgcaaagcactttgactgtcccactatatcatgatggttgtttgatttatacccaattctctagtgattcctttgagcaaaatggcgtctttaactgcctctattataaagatatactttgcctcagtttttgagagtgccactatggtctgaagattagctttccaacttacagtatagttgttgactataaaaacccagcctgattgagatcttcatgtgtcaatatcaccagcatagtcagagtcgacaatgccattaacatctggttcatttccatcagggcta

SEQ ID NO: 7620 - DNA, 1269 bp, Cannabis sativa
gagagggcccccaatataatgtataaaaatatttagaggtgtataatatttataaaattttaaattatccatagaaaaaaaaaattaactaaaagtaattaatttctataattttcaaaactcaaaaacttaactcccccaaaatgaaaaatctaaaggaccaaaccaaacctagtcgatctacttaattattatatgtccattgatgtttgttaggtgatctaattagggaccctacttaaaagtaaaatatattttgttggttattaataataagggaccaacaagtggtatgtgggcaccaaataatacaagttgcaccacatttaaatagtgtttagtctattatttataatatcaatacaatccaaaatgaaatgaagtaacatggttacacatttgttagagcattattattggatatcagtgtgcccagtatcttttataagcggcgtcttatgattagttaaggatattttttaagaattattttttaagttatatgagatctaatacttaattatactaatagtagtatgacaccgaagagagtgctaggcactaatggtgtctttagtatttttatcttttttatatgagcattactattgggcacctgtggtgcctagcactttctacatgtgtcactttgtaattgactaatgatattttctaaaatctattacattaaattatataagactcgatacttagttaagacaataacgatatcaacacgtaagatggtactggatactattggtattttttaatttttttcttattacattaaattatatgagtcagatccttagttaagtcaataacaatatcaatacgtaaaatagtattggacactattggtgccttttaatatttttctttttatataattacaaatcatagcttggatagagctcaaaccaataatgtaggactatacttaaggatataatgtatgtactctacttcttaaatatcactattaatgaatattaatgaattcaacctactttttactattaaattaattaattaattaaattaagtggtattatttagaattgttagtattcatcacatataaaaatgttactaattaagcactaagatattatatgtgatgagttagtattttctttttctttccttcttttaagtgggaccaagagactttaataggtaattattaagaatttcacatatgaatgtataaatttgaatggtatcaatttggtcttgaatttaggaaaataaatagtatgtgta

SEQ ID NO: 7621 - DNA, 801 bp, Cannabis sativa
aaaaaaatctaaaaaattaattattgagccacttaatttttgaattaaaaagattgaaacttctaacaattaaaataaataaataaataaataaaatctcgatagaatcaaaatacaataaatatttgtattgattatgaatattgaatgtgtgaaagaatacaataattgatacaacatatatacttaccaaaaatataacacaatcaattattaataccttgtatacaaaaaaaatgaaataaaagattgttcaaatattattttcagaaaaacatgataaaatatataaataaatggtattaatatagtaagattaaagataaatgtaatataaatttcccttttttatattcttggatctaaaattcgactcctctctttttcataagtgaaactgtaaaagcaactttcccttaagcttaggtcaaactattcaactggtagtctagtactatatgaagtgcttccctacttttcacatttctgaccaaatttctttagtaaataactttattaaataaagctaattaatcgagtcctctagtttcattaaataataatgtctattaaaaatattattaaattccaaagaaatcctcatacaagattgaggacttattatactaaataaattaaataaattagggtattattggtattaaaaatataaaatccaaaattttgactgtagaatgtggatacattttccttcttattgattgtacatacattttttgttggcccacttttgacaagcatagtaagcatcattccttagagaatccacaaagctagaaa

SEQ ID NO: 7622 - DNA, 869 bp, Cannabis sativa
gttttacattaaacttttacatttcaccaacgaatacagagatgaagaagtgaaaatgatgaaaaaggcagtgaaaatgatgaaaaaggctcactcaaaagagatgagcttagccacttatatattgatcaagaaaggggagagttagttacaatatacagtagatacaactgacaagtagttagttagagcaactaacaaaacagagcctaactacttttataacttgcacaatatttttaaaaaatattctgcctcacagtgtaaaaataagaaaattgaaaatttcagttaatctaataaaaaaattgtagttttgttaaataagcccaatagtttccaaacccaggcattacccaaggccatttccgtactttagatacagcataaaacaaaaaaaaaatctaaagctcataaattgttattcattaaatatttattgaaaaataataaaaacataggaggatttttttttttataaagtaggttatattttccagatgctcttgaataacttaaagagatggaaaatagtgtccaaaaaaatattaagcataaatggtggtactaaagaagtagaacctaatctttcatttatttttcacttttttatgaaagtagaagtttttttttatatcttaagaaatttacaaaaaaatgcaggatgttcactacgaccatatatggtagtgcataaaataatatgcactattatgtgcccaatataatttagtttcataatatttcgtctttagtatttgttaataaatattgtatatattattctagtacgtaattagttttactttttatccttaattaatattaattattgttacataattatatcattattgtagaaggaatat

SEQ ID NO: 7623 - DNA, 690 bp, Cannabis sativa
tatatatatattgatgctttttttaatggtgatctattgttaaaatatagctctatcttgtaaaagtttgctctagaggtctgcaaaagttgattttaatttgtaaaagttcatctaaatatggattaaaatatggcattttgcatgtttatctgaatttgtaaaagttgacgtattgttttttatatttatttttaatattttattattaaattataaactcttacatttattgttgattgctttatatgataaaattatgtttttatatttttaataaaaatattaaccaaactttaaatttttgcatcaatttttgtaattgtgtaatgtagcttaatattaaaaattattgtaaatatatcacaaattatcttttgtgtgaaatatatcataatatttatatttatcattgaagatgtcttagtggctcaattataaaaaatagtgcgactttttggggtattcatacttccacatttgtttctaccaatgattcttttagtatagcattaccttttttttggtgccacattattttatcatcaagtttgcaatccctactagaaattttaataattattagcattattgtgattaaaagctcttttaattatattattttaattatattatctgttagaatttttcttcctaaatctttaatcacttaggttattttttcctcaa

SEQ ID NO: 7624 - DNA, 1049 bp, Cannabis sativa
gtttgaccaacatcaactttgcagtcagttcgcatacactggccagagcaaatgcgactagaatatatcttcagagctactttccataaatattcaagcattcaaatctcgatcacattcctgattcagtgggaataagggtaaaacttcctagtttccattttagtttgatctattttaggaaagtaaacaagttttccatttatctcttatttgttttgggaaacctaacgaatgtttctataaatagtggagttatttcactatttaaggatctgaaatcagttattcaagagcgtaaagagagctcttatgctaattttataagctttcaagagagagatcaataactttttgtttcgtttcttacaagtaatacaataaaaagggaagtagactattactataattatagggtcaaatttctataaatctctgtgttcttattgcttaattttatttaacaattatcattcgtttttcccagtttaattatctaagagcaaggtcaacaattattgtcattttaaccctaactttgcacaccaaggagaatttgaatcttaattatttggtaaaacaaaaggttatatttggattgaaacactataaaaatgttggatttttttttctttctttaatttggttgccaccattcgaagcatgtacaacaagtgtatattgaagacccaacatgacagtgtttgagagggacagaagcatgtggcagttgtgatccaaaattataaactataaattatcattattattactattattattatgtgctcatttaatttctattctatagctccctatattttgttctaaatatacacattacatgtacatttttactgtatatatgtacatattactctcttttttaacaactcttgttttgtttactttagaatgccaatctaattaatatatttttctactttccatcctattcaatatttttttttcattaaaaacattataaatgcttcctacccctccttttacagaggtcaaaatatcaacaaatcctcaaaatgtttttt

SEQ ID NO: 7625 - DNA, 1082 bp, Cannabis sativa
catgctagaacactttttaattatgtgaatatttccttcaagtttttgtttattattatgaaaaaatgcttaattcaacaaacccaccttttgataaactgggactttttcttcagttactcgtaggagagtagacagggtttgctgtctgtgaaatgaactgaagaacccaaaaatggcaccctatttataaagaaaactccaaaagaaccactaaagccaaagccaccattcaaatttaatacaatttcacttaaatgttttgctacttattattattattgtgtgtaaaagtccacagagaaacacctagaaaagttgaaaggacaagtgaaatctcatgggattatatattggcaaataaaaatgataagatgaaaacgaattaaatagaaagaaaagcatggaatcacaagaaaaatgttgaaaacaaaagtggtgtcattcaaaaaaataaaatttctaattagtgtgacacatgtacatcctgcaagtgcaaatatcatacctattcaatctttctattccaacctctcttttcttgtcctttttattttgtctttttaatttatttttggtattgactactcatacatatccaccagtcttcatccaaccaaactattgttatgtcattatagttgttgcataatatgaacagatatattatatatagcatttaaaaatctgaatattctagtaattcttatatcattttgtgttagattccggtcccccccaccttaactgattttgttttatgtttcacttctattttttcagaaagatacaaagtggtccaacttgaatacttgataatactttaattttcttttaagttctcatgttgtggaacaggaaaacagtacattttctgagacaagattacaaaagtcgtcgtcgttatatagttgtatatggaatcatcatcatcatcatcatcattctcaaccactttggagttcatacacttaattaattaaagacctcagaaacatttgtctacatgtattataaatttatatgtactaattttttgatacgtaccaaccacctgtttctccttatctatttaaatatat

SEQ ID NO: 7626 - DNA, 559 bp, Cannabis sativa
tctgatatgatattcacacaaagaaaattgataaaaatgtgagaaaaataacattgttgaaatttagcagctttacaatggattataaaaacatatatcatatgttatgtattgtattaactataaatcaatatgtacaaaaccagagagcacagaagcaaagaatgatttcacacaattcagtatgtctaaaattaaaaaatatatatttagtgataaaaaaagttgaaaatgcaatagatgacaatatacacatgtcaatacaataactctactattagtcttaaaaaaaaaatctactctaattttttgagtattattttttaaaaatttggcaagtttgggaattatttgcatttaacctgagttaataagtgaccacagtaagaattttaaccatagatgaaaagaaaatgtgtgaaaaaaaaagagggttaaggaaactttattattttttcttaataaatatttttaataattaaaataaatattttccagccaatttttccttttttctttatttgtttggggctctggaatatattcaatttcacacaca

SEQ ID NO: 7627 - DNA, 824 bp, Cannabis sativa
ataattaattaaatggtcggaggcaaagcaaattaagcagcggcctcagggggctgtgacaatggcatatgcaactatgaatggcccccacagcacccaaccccaatgcactagagtcacatatttatatgtatatcagaagcctgatcgatgaagctgcacaaaaaaaatgcacatccaatgcgtgaaccatataattgtgtggaagccaaaatcatccctttactaagcttactccttcacttggcttggcccctgcaaatattatctcttctcttaattacttaccaacacttgtatgtagtacaattgatactatacccaattggcatccaatgtgtctatatattattattgttattatgttattttcctttatctctctcactggtcacaatcttgtcaaaatgccaaaaacccaaacccatatatcagctcgatcggactccctgtcctcttcctgggcccaacctcatatatatatataatcacttgactgtatctacatatatatatatatatatatatatatattttcatatggaaaaacacttttgagttatgtttgtatacattacaacctgtaatgttttttccatcagtacaagtcgctggggtgtgataaataataatgtaataatgcatgtacgtacgtgtctctctcaatgtgtgtaggccatattatatataattctatcaaatctaaattaattatatgatttattttacaataatattaacaacatatatttacatattgcggacatatagttattgctgtatatatatatgagctagaggccgtacacttacaaaatatgtga

SEQ ID NO: 7628 - DNA, 872 bp, Cannabis sativa
gcgataagatcgggaacacaaaatggaaattgaaagggttaaaagtataagccatccaacatcgtaagggtcttagacagaaaaatcagtcacaataatactctcataaaccttgatagatctcttaagcgtaatgataatgtcgaataggaagttagtgttcatagaattcaaattttcctaagtcagacaaagattcttaaattgttggcctctactagttcctaatttttcgatgagacaatgaaccgagtaccgcactatttggtggagcagacaaccaaaatccacctaaaaccccaaaatacatggcaagtatcttagagttcctactcaaaactcgactatcccagataacgattaaaacacaaatctaagattgggaaatttacttgatgagttagaagttgggtgtgtcgagacgaggattgggggtgttggactttctggtagcgaccataacttctcctgaaaactctaaagatggctttgtcaattcatcaatgttcctcttgaaggttgacaactcaaatactggatgtacaaatcactggaactgggggtgcttgtggatacaaccttgaatgcaatcggagaaggatatcgagaatttctgtggttgtatcgcacattcactgcaaagatttttctaggattgcttttggtattttaagtttttggtttcggtttctctctcaaaaatttgaaatcagaagccagcgtgaaaaaagtggtgtatgtttgacctttgctctatttatatgcaaactggaaatctgtgttctctcaatccaatggctcagatctatcttagaaaacacaataaaattcaatagtttgggaatataaaagggtgccatttaatgccatgt

SEQ ID NO: 7629 - DNA, 1296 bp, Cannabis sativa
acaagaactgtgttagcaaaaaatgtaccaaagaagatgctaaacatccaccaattgaagaaggaaagcttttgcttcttctcctttggatggaaatcgtcgaattggtcggccccaatcgtcgaaatgttcggtttggtgccgccagttcctagggctagtgtgtagagcgcgccgtaaaacactgctagttgtaaggtagaagccttcttgcaattgttcaagttagggtctaggcaaggagggggttttagcgatggaattgaaactgatagagttagaatcaccattccctgtcaattaattttaagattttaagattatataaatattaatgacttccaaataattatatcgtaaattcatgtgtaattcttatcactactgtaaaaaaaaaaaagtattaatgacaacaataatacaaatataaccaaactattaattttgtttgaccacattaatattgaattaataattaacgttttctagtcctctaagaactcactaggtgttcatcaaattgtctagagcgtataaattactcgcattgcattatactgcattaaaaatgtaattgaaaattctttatagtgggattatagtttgctattttactaaacttcacgatgcagtgcgatttaaagttttaaatttaataattgtggtttaaactgtaccacattaatataattttaaaaattttctatataagaacaaatatttataatttatgtgtatagtgtattattttttagatacaattcaatataataacttgatgattaattagtatatttgttattatattaaaattttaataatatttttttgtattgttaaaattttattggattgatttttaaatttttattaaaatgtttgataatgatgatagtgtaaactattaaaattgcactgtacatgcactatactttcgcagtgtgaattttgcagtcttaagatcttgcggtgcagtttgaataattataaaaaccgcatatataacctaatttgaaaaattagtacaatccgtaccactcgcaatacgaacaccttttactatatcttatccttataaaagcaagagaacaatgttgacttttgagcaaaaaaaaaaaatgaagagtgttgactcaaaaagtacaagaaatgcctcactagcttataatgcatgtaggaccacaagacaaattattagctcaacttgcaatgttatataaacaagttaacggtccaattaaatttactcatccttccaataattttttctatattaattaatcatatataattcaa

SEQ ID NO: 7630 - DNA, 716 bp, Cannabis sativa
atattgaggtagatagctcaggcaaagctctctaaatttacgaagtaagttttgcagtggcatctatgggcatgcccaaataaactaattaaagaatctctagctacagttcaagtgttaccaaagagaattaaacaagatgttaaaaaatagagttataggccatgttcttttggtgctgtatagaatgtacataattgtttaagaaaaattttaaaccgtctcaaaagtttagaaaacaaagttcaataaatgtcaagggagcaaaaatatcctaacacaaagaaatcacagcatcttttgatatggatttttcaatggcttttgacgagtaataataggtagaatataatttgcaaatacatacatgcaatttagtgatgacttaattaagttttcctttttcttttttcgttttcaaaggtctctccagtgttaatggtggagaatgaatctatatagttttgttgggttgggaagtaagaagaaaaaatgtcaatattctcttgatgctttccttaggttttcattaaaatatttaattggaatcgttgatagtgatcaatatttatatataaatatacaatttttctttagtttattatgccatggctactatacactagtcaattatatatgtcctcaccaatatctttgtacactttgcgtgtactttaaatatttgtgccatcaatttctttttctccatgccaaaa

SEQ ID NO: 7631 - DNA, 1532 bp, Cannabis sativa
caacaaattccatctacagtcttctctataataaagcaaaattgttacaaactactctgtgttacaaagttagagctttctcaaaactaagcaaatcagacataataatgaaaaataatcaatggattttatgacagaagaatcttacaccatctagagaggcaaaagaaaactcaagagaaatatgaaaaggcataccaatttttcagctgtttttgctgtgtccttccgagaatgaacaaataccattgcttgatgaccttgcctcaatgactcaacaacctagaaaaaaagagcatataacagttgaaatatgctccaagatctaaattacatgaaagagaatttcagtagaaggataaacctttttataacatatctcattcaataactcattccgagctgcaaagttctgctcactaataccaatatactgttgtgcaagaggcacaggacgatagctagagtcaaagaaaaagagtcctgtatctggattcactctaagaaattgtgcaacctaggtgttaaaaaaaggagaaccgaaaaactaagtaaaaaaaatgatggctttagaatcttcaaattgaggctcacaaagaaaacaaaaattgtcaacatgggaaagcttggacctccaaataattaggtagagtggctgaaagtcccacaattctgatcattgactgtgttgactccacctataatcaaaacaaaaaatgcatattatcaaaatcggtcaatcataaatataagatgccacaaatttatattagattaaatcagaaaccataagcattttcttgaaaaagtgacaaaagtcatatttctaagactgacccacccaagtttattactaaccctcgcttaaggtggaggaaaaccttagttacaaacttggggaagagaacaaaaggaaagtcacaacacaagaaaaaacagaaaaataaaacaatggaaatttaatagaaatacctgacgcaaagttcgagcaacaagtgcctctattacagggcctctatcgtcattcaataaatgcacttcatcaataattaagagcttcaccagcattgacagtgacatgtcactactcttgcgagtaatgacatcccatttctctggtgttgtaactatcatctaagtgacaaaaaaagcattaggtcttgcatgttcattgcagtagcaaaaactatatataacttcactgccaacaacctgagtttcttcaagttcattcttagaaagttgcatatctccagttagttctttcactgtcatgttcaatggagataaacgatgactaaatgttgatgtaacctcagctgctaatgcctgaagaataaaagaaaatagcagttaccaaaaacattgatacttcatgcccacagagtgaagaaagcacacaaaattaaagaaatgtgaaacaataatcaataagtctaccttcattggagcaacataaactatcttaaattcatttttgtgcaagtagccatccttgaaatgctgcccaatctgcattcaaacacataact

SEQ ID NO: 7632 - DNA, 1352 bp, Cannabis sativa
acattaataccggcggaccacaattagtattctgccgctattaatatttttttatataccgacggtttgactccgccggtattgaagcaaaatattgtagtgtgttaagagaaccgagtatggatggtgtactatacaattagaagatttaaacaatatgtttataatagaattccttatacaagtcttaatagagtcattgtaaatgatttactatggttctatagtttgtttgagatgtaatttggttgagatgagttttgtagtgtaaggtggatgctaatctgtaattatctgtgatccttttaaagtgcaatacaatttaatgattcaccaaaaaaaattatggagaaggtacaagttaaaactaaagttggtagtgaaacccaaccttcaagaaataaaaaattgttttgataaatttgactaaagcattgtgataaatttatttctcgtgaaatatatctacttattaattacatattattaaaaataaaaatattcaaataaattaatattataataaaataaataacattttaattttttattattttttttgttttgaatcatttttatgtttattggatatttttgtagtttaataatatgttaacaaacgatgtgaatctttagtgtttacaatggttttttatatgcgataaaataaaggatttttaaattatttttattaaatgtatataaattcatataaaataataataaaaattacaaattttgtataacctaaattttgatatatttgtgattaataataaataataagaaaaattgtgacaaaagtctataaaaatttatgtttaatgcagataagtccccaacctcaaaaattagcggtaatatagtctccaatataacattttctgtaagtctattagtttctctttctaattgaaatatcatgtgtccactttttattggtccaaatactaattttaattaaaagttttaaaataaaataaaaaaactaaaaaatatattttaaactcataaatttcttttctttttattttgttcttttttttttcttgttcatcttcttcatgaacccagccatgagagctccaccggagcaccaccacgagagctccactggagcaccaccacgtgctccattttggccagtggtgaccggagctggcactatcatgcatatccgagaaggagacagggagaaagacagaaagccaaggggctcaagggtggaaggtcagggttcgggtttcaattttttggggtttgttttgagcttggagggccgagaatggtcgacatcgaacctgaccgtggctgctcgacgagaagacaaaaatacaagagagagagagaga

SEQ ID NO: 7633 - DNA, 1303 bp, Cannabis sativa
taaccttcccacattgcgatagtagcagcgaactttgtccaatcgaaactctgctgcatactttcactacatgttggtgttgcacgacgaaaaaccgtctctgctaggtgattatccttcaaaaacaaagtcttaaggctactaattctgtgttgctggaattctgataatagtaacaccttgctggtttctacttcaacctttgttgcttccacttcggaggctttccagcagtagtattgcacaacctgttaatcataatttaaagggaaatttacaagatggaaaatggtgtccaagttcaacactaagccaccctcagattacaagctgtggaagaaaaaaaaaaacatgcatatctttcatctgaagggatatccaaaagaaaatccaattactcaaaaaagaacttatttgtgttataatgacttatttaattcttctgccatttcaattctttttaagtagatcatagatgccatcagtcaagataacaaaaaatgaaacaaagaaaacatccaagtgatttaaaaggctaattagaatttttatcccccaaattttgacatctaccaaattatgttctcaaattttttaaaccgtaaaaagttccttcctaactattgagattgttagattaaaagacttttgtccaattccattcaattttactaacaggacgattgttcatgtattaaatcgtgcttcctaaaatttcatccacatcaggcttccatttgtaaaattagacaaaagtctttgaatccaataatctcaaaagttcaggaaaaaattttaacgttccaaaaaattcaaaaaatttgatttggtacatgtaaaagttcggagacagatttcttaattaactgaattaaaattgtctttccatgttaccaattctgctttgataaacactaaagaggtcaaaggagcaacactaaactgcagctcaaagcttctagctaggactcaactttagagaactaagcagacaattaggaagaataagtgtttcaaatgaaaatagttttaatctctgtaacaccaattaatggcaacatcagctttactttaatacctgaagtgcatgcaagatattgataaattccttgtcaaacaactcatttcctcttgctaattgaactggctccattaataactctgagatatcagagcagcagctcttatcttcagcatatagtatgtcaaatccgattacatgcaatcttgcccagcatatatcaaaacccaagtgatcctcagaagattggtccagtgaaaaccaatacatatcactggatgc

SEQ ID NO: 7634 - DNA, 953 bp, Cannabis sativa
caataccattcgtgatgagctgtaaagaacaataaaacgacagtgaatcatcaattcaaatttataaaggaaacaaccatatcaaaaaagagcaaaatgctcaaagcaagaaacaaataacagaaactgatatgtgcattgttcacgtggaaacgtggtccaaacaaattaaacaaagaacagagttgttaaaaaaaactattggagaaaactaccaaaatttaccaatgatttaccaagactgtatagccaaataaataacaatcaacttttaacacaaccttgaacagtaaaaattgactaataataactgaatttggaattgatggctgtgctctttttattaaaatccacaaaactggttccaaagggctgtagcagtactccacttgacatattaggacgtaactttgattcccaaataaccactactcaagcaatattatcttccttaagtaggactcctaataaactgctatactcaaaaatatgtagatgactttgttaatgaggctagtgcaaaggaaagacctcttgataaactacagtggctcccacaggctaagcacttcaataacatagattattctcaaatacatgctgacgtgtttggtagggcaaagtgataccaaagcagagaaatggaaactgaagagaaaataaatttgtgtgttactgaaccacggtaagcaaacagatatagagtatttgaaagactcccacaacaaagctcggttacaacttagatcagtcataccctctcttcggattcgtgcctcttttaatacacacagaaactttcataaaaaactacctggtcagtgcccaaacctgccagctaagctaataagacatcactcgttagttttcttacaacgagtacaagtaatacaaatagaagggttatcagtgttcacctaatatcacgaagcattcaagttccaacagatcgg

SEQ ID NO: 7635 - DNA, 791 bp, Cannabis sativa
tagaaatagtagctcctatagaatttttgggttgaaataaggtcatatccatatctatatagcttaaactagctactacagtagttgaaattattattgagagaaagagagagagagagaggaagtgaatgtttggtttttaatttggattagtttattgctatttcagttggaaactttaccgagtagtactcttagctatatatatctcattgaaaaattaagatgagtgttaaggaggcaaagaatagatcttgaataaatataccaaatctattctttattatattctgccattacgtaaagcaaggaaggaataataatataacagatatgcataattttcctttattagaagaaaaatttatgtatgtatgtatatacagcactttaaatttatttatatttatatgagtgattaaatacctacttttcccacatctagaattttgccttgggaacattttttgttcgtgtaaccaaaatttccctccaactttttcctgtattggaccaaaatctgtaacatttatacattacaaccctaattactcttagatcaacctcggccctcagataaaataactcccgcatctaacgatttccgtacatcacggaatacattctccatgaaagtacgggacaaaatcctgtccctacaaacataacctacatttagtccacaattcacttaaaaacaatttttttttacagtttcacagatttttctttttacatttttacggattttcatagaaccaaaaagaaaactacataaaagaaaaatgaaa

SEQ ID NO: 7636 - DNA, 1594 bp, Cannabis sativa
tagctttcgaatgtgatattggccgtataaatatttcatttttaattcttgttacaacttttactttttttttattattttatatgtaaaaaaataataaatttagttatttacgtcattaacattcacaattaaaaattatttattacagtaaagatttaaatgttacacataaatagtgataatatcgttttatacaagaatagtatttgttatttttcatcattcttaaaatttttctttttggtaacgtttgttctcttaatctttattactaagcaattgtaatttgtatgaaatgaagtttccctttgaagcttaaacttagggcatatgtccttcaaaacaaggtcacttatcccacttttaagtgttggggtccctcttcttttgacggctatagttcttagaagctaccaactttaaaggtgggggttgctctatgctatatacaatactattactattcctcatctatcttcctatagagatattaatgtgaattttggacttgggaaattgatgagcttctcccctctcaaagggtacctttaatctctctctctctctctttactttggtaggtaaatcttattataccccaaaagaaaaaaataatgttgttccattccaatttcaagttcctagtttgatgtgccccgccgtccacgccggctcaaccatgcccaccctcctcctctagtgtccaacaaaatccccacattttggttttaaggctctcttaagtcaagtaggaatttaatgctttaagttgactggtcttaattaataaccccatataagggactgccttattctattttggactattccttgtcacactactcatcattgtatagggctagctttagatttagaaagccactgcatagagccgaaactttatattattatataataaatatataaattatagaaatatatatatttatattattagagaggtaacggcggaaacatttgctagttgggttatcatcaaatcttttccacgttattcttaatgggaatgcttaacacttcattagctcccacctctccactaaccaaaccaagtgtggttttaaccagcatcataacaaattggtccctactataatatatagtaatgaggtcttgttgtcccacataaaatgtcatcaaatcttatcatttctttctttattataatataatctcaatcaatatataatatatgtcccatcactttaatcatccctgtaaatttcttcaaattccccttatgttcaaaaacaacaacaacaacaacaacactaaccctattcttgtttttggcttcttaattttgttatggaagtgttgttgtaaggaaaaaaaaaaaaaaattgaatcttaatcaaagatatcttaattttcttttttttgttgagatttttaatgaatggagagtacaagtacaagaagttgaagtgcatttatttaaggaagatatgtttggcatattggactatttttatattaataacaattataattaaagtggagggaattatgatgcataaaaagctcaaaagatatgctggaccaattagaaggcctagtctataaatat

SEQ ID NO: 7637 - DNA, 1205 bp, Cannabis sativa
actgaatccaggtgatactgccaacaagattggaacctatagtcttgcattgattgcaaaacatcacaacgttccattctttgtggctgcaccactcacttccatcgacttgtctctttcgtctggaaaagaaattgagatagaagaaagatccccaaaagaagtactgaactcacgaggagggcttggagaacaagttgctgcatctggaatatctgtatggaaccctgcttttgatgttacgcctgctaatctgatatctggcatcataacagaaaaggtgaaccctctttctttaacttcaattcacttttgtatatacaaaaccagcaacatgaggtctcagttgtgtttcagcatctaacggttttagtctctccaagcagggtgtcataacaaaagcaggtgatgatggttttgacatattggggttttcactaaagatagccgggtagtcttgcgcgcagaggaatcctcttctggtgaaaagtataacctttttttatgccaagcagctatgttctgctggtccaaataattgttaaattctccattgctttctttgtaatagggggcaaggttaatggaaattttaaaatattgatgtatcctgttcctgtcctgtgcttcaattctcagagttctagaatatacattgttcacatttttttcttgataataaagtatacaaatctttggctgggtcaaggatgctgttaattttgagcaacccaactcaaccaataactctggttgagagttgagtacaaaactatctacaaattttaacgttcaaatgtataatcaaaaggtagctaccaaatcttccattaaatgtataatcaaacagctgtaatatctccaaatagggtaatgtacttggtgatcctcacattggacaagtgcaagcaagcaaaatgtcaaatttaagaaaaggcaagcaactgagataagtcatttccatcaaggagaacacagtgctaataagtgataactatcaaagcaataaatgaaaattgaaagatggttgtaatttgtaaacttgtccaatgtagcatccactacatgcagctttacactttcttttttcttttcttttgagaatgagaggcatgcagcttcatgcctcgaaatcttaacatttgcattttatcaccctgatttcatagactcatagtttcagtaaagagaataattacatcgga

SEQ ID NO: 7638 - DNA, 1126 bp, Cannabis sativa
gaagaagatggcaatctgatagccaatttatttggatccattgggaaaatatggaaagctgatgaaaaattgtttgatgctgttactggcttaaggtacatggtttgtcaattatggtgcaaatatattatcgacattcatgtgatcaaaatgcataattttcttttcctattgaaataatacagtggtagtggccctgcatacgtatttttggccattgaagctttggcagatgggggagttgctgcagggttaccacgagacttagctttgggcctggcttctcaaacagtaagtcacttttgtaatccagattattccaatttgatgatcctttatcatcatcaaatgtactaaaaaagtacttggagcatccataatcttttcctgcttacaaatttcactttgttgtaaatagatgaagcaaaccacaagttattcattccaaacattaatctacaaaataataaaaactctacttttgcatatttactaccaggatgaaccctatatacccatttgtcagtgtgcatatgcaaagcatccgtcttgtctttgatttctatttagtgggaactatcaattatttgtttcttttgaaggttcttggagcagcatctatggccacaaaatctggaaagcatcctggccagcttaaagatgacgttgcatcacctggtgggactactattactggtgttcacgagttggagaagggtggactccgtggcctgttcatgaatgctgttgttgctgctgcaaagcgcagccgcgaactgtcttagagttttcttctactcacgaaatcatcaacccatgctgctgactcgggcaatcagcttcagacataatcttctagatcagtagtaagcttctagagtagtcggtgaagacacttttcattttattttcgatatttcgacaggattttctcttcctttaacaataaagaaattttcaaatttatgatatatatgattatgcagcagcaaattaaattaaaaatttagaaagatgcagtttaggtccatctgaaaaaagaagaaactgtttctaagttgtgatctttagaaaacggtgggggacagatcaagaaacataatttttagtgtgaacagtaagtggg

SEQ ID NO: 7639 - DNA, 641 bp, Cannabis sativa
taacctaggtgttgttacctacttgggtgcctcttatgtaggatttgtctcagaatttgttacaggattcagggcttgattatgacatgtcttcatgttatttatcgtagttgttgagctgattacttagactataaaaggatgaagcttaaaaataactttgtaggatctaagcctcttcctgggtgcccccaacatggtgacactgcctatcttgggaaatgaggctcgagttgttttcttcgtgccacgtgtcaaaaagagtgtctatcatcaagctaaatatttttggcaaatagttatcttgctttagctctcttattctttgattgacgtttcttatcaaacgatacaatgttgacatattcaatgtcaataatttcttttaaaattattttaaaagagttagttttaaaattggatataaatttttaaaattaaaattaaaattaacaattcatatattaggtgcgattactttatgtagattttaacaatattaaaaataaatttaggaaacattatatcgaatatatatctataatgttttcatcaaccttaagatcagacgagttaggtgtgtaccttgggccccaaattcttacgtctccataatatgtagtattttagtgtagaaagtg

SEQ ID NO: 7640 - DNA, 851 bp, Cannabis sativa
gatttgaatcaggcaaaatgaattcttgagtgaatgctaggtccagttttcttctgcttgcctatttggagttgttaggactccaaagcagtctcatttttggaacttgtttgaatctaatctagtaattttccattgggttcctgacctatcattttgagataccattttatgaaggtaggtctctgtaagtgatgggtccgataaggacctctccgagtaattttaagggagtccccgatacccataaagtcctttgggtgttaggtatataattgcttggttatttctttctatccattttctagtgatggatctaaatgaggaattcagtctcgaggtggtaaacattgaggaaatgtcagcagtgaccctcactgaggaggtgaatgttaaggaagttctagctgctgctctagaagaggaacttcaacaagagcctgtcttggaaactgctccatttaggaaggcagtaaagtccaaggtgaaggagaaagctaaagcttcatcccccacaactgtcgtctataattactttatctagaaaatggaccaaaaacctaacaattgcaacttgatggagctctatgttgctgaagccggagtgcgtaacattttgagattgatctggaataggttgtttgtggcggaggagtaggcctccgttagtactgatcggtttagcgtctagagctgggcccacatagcgagcggagcaaatctcccttttcaaatgtactttgcaaaattttgtgcaaggatagggataactctttttcagttgatacctcctgcttacaagcttctagccgaatagtatattttctgcaaaataatctaggattatctcc

SEQ ID NO: 7641 - DNA, 509 bp, Cannabis sativa
aatgaaacattgaagtatgaagagtcctatgatcatgcaacgttgatgtttgacctatgatcatgaaaagaaatgtattattagatgcatacctacgaaatattaagagtcctatgatcatgcaacaatttagttatatcatgtaaggaaagtgactgtttcaatgctaataaatgtattattagattgtcaatgcaacattgaaatatgaagaatcctataatcatgcaacaattacgttatatcgttgtaagggagctaattgttccattactaataaagagccctatgaccatgccctatatacattgaattgattttctcattatacactaccttgtacgtctagtagtttttctgtaagcatccatcatgtttggcaaagcctactttgtgttcttaaaagcgaaggagctggtgtgtaaaaatcatatcataaaacagtcatggagtgcaccaaggtttgtgataacataatccttggctataattgtagggaggttgcgaag

SEQ ID NO: 7642 - DNA, 625 bp, Cannabis sativa
aattttttataataattattaagtgaaaatattattatgatgtggatgtttttatgttgtagcttgttggccattctataatagctattgagtaacataatgtgaatggattgagttctaattattgggttttatttataatttgagtttaattgtttagcggttgttaatatttgtctttttaagcgtaattcatttttttgatgatcttgaatctttgttaaaagaactgtaaatttgttgtctagttttctatgattcttagttcaaactcgtcgttcaactaataataatggagatagactagttcaaaatgctcttaaaatgaatagagaacttgtgtgcttagttgatatcctttcttttctcatggatttataattttcgaggttgtatataaaatcaatttatcacaggcacaaaaagtaaatatgaatactgtcattaaattatttcaataataatataacattttaagtggtattagagcaactcgagtggctgtaatcaatttctggtgtctactataaaacaaaatattttatgaccttatttgactctacttcgccaataaaatttaataaaattcactaatatcattcatgacataaaaaacaaatgtgaa

SEQ ID NO: 7643 - DNA, 1155 bp, Cannabis sativa
ttcttctctgtcctccatatttctcccattatcaagaatagctcatatgttgagagccctagtatacacaccatttccatcaagactaaggttgatcctgaaagtttctacagacaggaagagagtattcctcctctttcaaccactactacatatatacagaattaatttcataaaaatataccttttacttaaaaggactcccaactaatttattgttagttcttagcaattcatataaagattaccaaattaaaaaaattaaatcaaattctgcaaaactataattaacaaaataaaatattaataagacatttagaaaatattattaaaatctacatgatgagatttaactccaaatatcaaaaaaacctcaaataaaaagtctcaattccaaattttctcaggtaatgaaaatattgaaaataaaaagaagagttagttgaaaaattatatcaattatactcgtgattaggtaaatttatttttaagatcaataataatttaaacaattattgaccaatagataagttaaccaagaattttttaaaattaaaatgatggacacatctagagccgaaaagataaagaaataatttatgcttaactatttatacctaactataacaaggcttatgtgattcacttttacttttctattattttttattattatttttattttaacaaaagataatatatgtggagaaatagagaatgtagcaaagttttcattaatttacatgtaatcaagctgcatggatagaaatgttttcgttttttttttttttttttgtaactttttttagcaagagacgacatgaatgataacaagattaaaaacaaaattatataaattgactcttttctaacaaatagcatccctctagtatgtcatatttttaattttcaaatatttcgattttaccaactcaaattattaatatatgttcaaaaggtctttttctcaattctcactcctcatagaaaaatgaaaagctttaaacttatttctctcaattaacaagtgtttaaaataaccatgtcatatgtttggttcgtgtataaaatatatctaaaattacttcatattagatgttgacggtgaaaacccgtcaactaacttaaaatcaaaaaatcaaaactcaaacacaa

SEQ ID NO: 7644 - DNA, 628 bp, Cannabis sativa
taataataataataattttccttgaataagaactggatgacaccattcagctaattaatttctcctacaaaaatattccttgagctcaattgtactcaaatttattctccatatcaccatcataattttattttaattacataatatactaaaacaaatcttgaatatggtacttacttttgcaaaaataaaatcttaattagcagaaaaaaaggggtgaaagtgggaaaagcaaaaattggggagatgaaaccaataagtaataacacttcgcgccattgagcttggttaagctctgcaactctgtgtgcgtagaacaatccaacccaacccaacccaacccactgtccgaatcttccctctagggttcaccaccgaatcactctctcatttcaggtatgattatgctattttccttctcattgctttaatatatatattaaaaaattatatactatttgatattgttccctagggtttttgaattttgcgaaatgaggcaatatttttgctccagctttggttttctatggagttttcagttcttttgtttttgttttttcatgtatcagttgaaatttgaaagttttgtatggctggttattttctcaacattgtatacgttttt

SEQ ID NO: 7645 - DNA, 2224 bp, Cannabis sativa
atcacgcattgattggcttcagctaggggaccgaaacactaagtttttccattcaaaggcttttgcaaggaaagctaataataaaattaaatttctccaaaatgcagcaggagttcgggttacatctaagcatgatatggctgctgcaattcaagactactttgaagaaatttttcacactcaatctgttgatgaagatgctctcacagccaccataaactcgatccctacaaccattacatcagctatggacagggagcttatcaaaccttttactccctctgaggttgaagctgctttattctctatgggttcggataaaagccctggcattgatggtatgtcggccatgttttaccaaaaacattgggatattgtgggtgactccgtttgttctgctgttcttaatgtcttgaaccatgtgctgacccaacacccttaaattccacaattatcactttaatcccaaagatgaaaaagccacaaattgtcaaagattaccggccaattgctctatgtaatgttatctccaaactcatcacgaaggtcctggtaagccgcttcaagcctgttttgccacttgttatcttggagacccaaagtgcttttttgccaaatcgtcttatcaccgacaacatattggtggcttttgaattaatccatggcattaagttgagaacatctggtcgcaaaggcgttgcagctatgaaacttgatatgtcaaaggcctttgatagggttgaatggcggtttattcagagggttatggaaaaaatggggttctgcgatcaatgggtagctcccatcatgaaatgcttgactacaacccacttcacctttctacttaatggtgaaactacaagctccctcacaccaacccgtggactgagacaaggctgtccactatcaccatacctcttcttaatttgttcagagggtttctctcagctgttgcaacatgaggaaatctctggtcatctccatggttacaaactcacaaggcatgctgaactaatttcacatttgctttttgccgacgacagcctactcttctgttatgccaatgaaagttcatgcctctctatcaagcgtgtccttgacatttaccatcgtgcttcaggccaaaccaccaatgctgaaaagtcaaatatgtcattctcaccaaacacaactctggatgcccaagtttttttccacagaacactctccatgccaattactgattgccatgaaacttaccttggactgccagcttactctgggcgtgacaagcagcatatgtttagtgatgtaaaggagaaagtttggaggttgatgaacacttggaatgaaaaaagcttctcattcgggggcaaagaaatccttcttaaggcagttgttcaatccatcccaacttatgctatgaattgctttcacttacctactacggtatgtaataagttggaatccatgatgtccaatttttggtggggccgaactgaaaatggctcacgcattcattggagaaattggaagttgatttgcaaaacaaaagccgatgggggaatggggttcagatcttttgagcaattcaaccaagctctcctagctaaacaagcttggaggcttattgatcaccctacgtcaatacttagccgattgcttaagagccgatattttcctctaaactcctttcaagaagcctcacatggtcattctccctccttgtcttggcaggggatcctctatggtagagagttacttttagaaggattaaggtggaagtaggggaaggaaggcatatacaatgtggaacagacccttggatccctagaaacaactattttttgccttttctctataaggggccagataatgttgtggtagctactctcattaccgatgatcgacaatggaatgttgatctcttaaatcaatatttcattccagctgatgttgagcgcattctcaccattccgctaagctatttccctagcaatgactgtttgatttggcaccataccaacaacggcatctacacagtctactcgggttaccatttggcctcatccttagctgaacaacctcattcctcaagctccaattcagattcaatttggtggagatccttctggtccttacagctacccgaaaaggtaaaaatatttgcttggtgtgtcatccatgatgccttgctagtggctacttctcttgttaaaaggaaagcaacaaccatgtacaaagg

SEQ ID NO: 7646 - DNA, 680 bp, Cannabis sativa
actgtattgtatattatatagatacctgtctgcagtagggagaactgcagctgctacattttctggggaatgatgtgatgattcttccatcaacagagaacccaaagctagcatgctatttttcattataaccaaaaatacattattaataaaatactaataataaattgaggatcttcttgttcactatattaatatactcaatgcacctctttctcattattaaacatcatatcttattaactatggaacaagattctaatgataaggctttatctaagaagaacaatttttcttttttgttttgagaaatgaaattcattcatggttaaaagagggacaatgtactacaagtaaagaagaaacaaagtcgcacaaatttcacaaaaaaataactcaaatgtcagccaatcacactgagaaataaaggatcaataagctcatagctcacgtaggagcatctaaagagacgaaccccataaaaaaggcttaaagccaacgttactaagaacaaaaagtccacaacaccgaaaatactaaataaactaaaaaatacaaacaagcaaataatgttcattctaagaagaacatctttagaatgaatgtagttaaaaagaatcatgtcaagtggacaatattaacatgaaattaatggcttcctattcttttttttttttttt

SEQ ID NO: 7647 - DNA, 773 bp, Cannabis sativa
atagggaagaagaagaagaataaggtgaagaggaagtcagaaatggtgaagaatgggttgcagtagttaccaccatgaccatccttctcttagttttgtagatcaatttgcaagtgtagctctttaacttatttagctgcgaaactaactattttatgttttaacttttgggtggcttcccaaaatggcctaattttataggtcaatttggagtggcctactctcaaaattatttagttaccaatggtttatctctttaatgaatttatgttaatgaaataaaaaataaataaataaaacctaattttatcatcttcttcctcattttattctacaaatatttatcatcctcacccacactcagtaagattatccttattaagaataaattgttaataaattatccatttaagagcattataattagtgactacaataatactcttagaaaataaatcaagatctaagtatttatttataccatctaaaaatataataaacacacttaccttctattaccttctattgatgatctatttatgtgagtcattttaattccaataatcttcaattaggattaatacaaacacaagattagagtgatatagagagaagtacaatgtggagctatcccttcttttcttcatgattaccattaacccaaacccttttcacttaagacatatatatatatatatgtcacacccttctaaccctaatgggttatacattaaggtttaagtggttcaattaacccaaacccttttcactta

SEQ ID NO: 7648 - DNA, 1013 bp, Cannabis sativa
ataattaaccttataaaattgtgaaatgtcgtgaaaaactagctcgattaagggcatatagtaggtgacatcacaccataatacatgtcactctttttctttttctttttctttttgaaacagtaataatacatgccagtactcttcagtcttataaaattcaagacaaacatctcaccgaccaatttcatcgaaatttccctttcgctgtgttattggcacaagtcgaagcattttcaagtagaaccattggtttcaacggaaagtcatgtatttaaatatgaagagtaagtcttgtcttgtcttgtcttccatgtgctttaaattttccaatcataaagtagggtgactcacaactaccccaactaaaaaggtgactttgtacacaaaatttatacccagccaattatatttgcttagagcatctcagacattaaactttgttacatttatcacaaaatttagttttaaaaaatatttttactttaattatgataccaaatttcatactaaaaaaaatattttttattattatattaatttttaaataaatagcggtataaatatttaaaattttaagtttgtaagtggtataaacttaataatttttttagtggcataagtacttaatgtttgtaaaactgtaattttgctctactttcgtcagtacaggctccgtttagaagtaaccgatactacatatttatgtctagattaaataatttagaatttaggtcttatatatgccctatttaagataataatagagtctgtactgataaaactgaaaaaaaaaaattacagttttataaacattgggtacttatgtcgctaaaaaaaatattgggtttatgccacttacaaactcaaaactgtaggtacttataccactatttacttttaattttttaataaaataaaaaaaattaataccatattaattaacgacagtagaaatatattagtgcactacttttaaaaaaatatattattttcggtgtgttaattttttt

SEQ ID NO: 7649 - DNA, 817 bp, Cannabis sativa
tgttaaaccagaaacaattagagttgttttaactctagctgtcacaaaaggttggaaaataagacaagttgatatcaacaatgcctttttaaatggagatcttgaagaggaagtttatatggttcaacctcctggttttgttgatcctcagtttccaaacaaagtttgcaaacttaagaaggctttatatggtttgaagcaagcacctcgggcctggttttccaagctttccaaagccttaactcagtttggatttcagtcatcaaaaacagatacttctctgttcatcaaagttgacccgcacaatgttatctacatacttgtttatgtagatgacattataataattggtagcagtgacactcaagtatctcatctgatctccaatcttcactcaacctttgccttaaaagaccttggagaacttggttactttcttggaattcaagtaactcactcggattctggtctgcatttatgtcaaaagaaatatcttcaagatctgttatgtcgaaccaaaatgcagtgtgccaaaaccagcacaacaccaatgaccagtggcctaaaactgtctcaatttggcagtgatccagttcttgacccttctctctacagatctgtagttggggcactacaatatgcaacaattactcggccagataatgcatattcagtcaataaagtgtctcaatttatgcaatcccctcttgagtctcattggattgctgtaaagaggatacttcggtatttagcagggactcttgatcatggtatacacatatccaaatgcaccagttttgacatccaagccttttgt

SEQ ID NO: 7650 - DNA, 674 bp, Cannabis sativa
tgtgacatgatattgaacattacgttaataacaataccatacaatttaggtagagtaaggtatcatttgtaaatctactatactaggaatatcaaattatcaatgaatctgtttgttgtaattgcttaatttactcttttgttggttcaaaatctttttttactaattggaattaaataattagtagatttgttaccaaaatctatctagttctgaatattcttgaaactgtccttttaaaattcagttataagactcatcaagagactctttattctttttcttttcacctaatcgatacttttatattgtgtcactttaactagtatccattaacatttctttaatctaaaacaccaaacaaattatcctctctataacactagattacactactatctatgaaatgtgacaaaccttgtttcatcacaagttgataaactaatagataagataaatatgagagtacaaaaattgaacatagtaaaataataaattgaaagatttcgttaaaattggatgtttaaaaattttccgaaaagttaattataggttcatttctttattggaacaatgcagtttataacacttattactaaataaatttgttgaaaagataaaatattagtatacctttttttatcaaagattaaatcgatcatcagaagaataat

SEQ ID NO: 7651 - DNA, 774 bp, Cannabis sativa
tttttaagtttaataaaagaaattgaaaatagatatattaggccacttaaataaaaataattatgcaattaaattttatttaaaaaattgtgtattcacatttactacttttagatgaaagccttttattctgttaagccatagagcagtcttacaataccattaaaagagtatcaaatcttcatcacagatcctcaagttagctctttaatgcctcaaaatcggtaatgtcttttagtccaaaaactactctagccctctaagtcttttttcataaaagactaaacatgcctcttaatgaatgtcatgagcgttacttgagattgccatcgtacttatggacgaaacaaaatggaattattcagcaatatcaaagagaagatttagaaatcgatacactcttggcatgataaactgttctctattagcagtcgggaagtactactcaaagtagttgtccaatcgattcttacatatgccatgtcatgtttttagctacagaaagaaatttgtactcaattagaattaacgatggcaaacttttggtgggactctaacaaagatagctcaaaaatacattggaagcattggaactacatgtgcaaaactaaattgtctggaggaataggattcagattattttttattacaatcaatctctcttagtaaaataagcttggtgtcttcacgaaatgccaatttcgctccttagccgacaattatgtactagatactttttagaatcatcttttttagaagcttctcttaggcatc

SEQ ID NO: 7652 - DNA, 787 bp, Cannabis sativa
tgttgttgttgtagctcatcatttggcttctcaatgttggttgagccgaaactcggttgggtggtgatggctgtgttcaggtcttgtaaggctttgttgaggttgtcagtgagcctctcggacgagcaatgggagcggtttcttatgctgttggctagttctttgagtatttttgagacttctccagataattgaatgcaggggtcctttagtagaactcgaattggtcttggggtctgaaaaaccagattgtattttaatattgttagtattattatgtgattatgattaggatggaatgaaaatcatgctaggaattacaagatgaagaaaaggtttattaggatttgtctcccgaactttagcatgttctaaattgtgttcttccaaaattttcagacagttaaaaattttctttaaactattgagattgttagattcaataatttttgttcaattttatttacgggtgcctaacatagactgaagtttggggtatttaggggtacaatttggtacatagacaatcactgcattaggcacccgttagtaaaattgaacagaattgaacaaaaattcttgaatctaacaatttcaacagtttaggagaattttgaacggtttgaaaaattcaggaagcacgatttgatacatgtcaaagtttaagaaataaaatcccaattaaaaaaaaaaaaagacaaaaaggtcaataaaatacaaagaaaattattctctaaatattatggtatgtgtgagaagggatggatggccttattcatctgaatat

SEQ ID NO: 7653 - DNA, 807 bp, Cannabis sativa
atattaatattattaattgttgttaattaaatatcagtgtcttataacattaaatataaataaataattacatcataattaattttaaatattgatttagagcatctcaatgataacttaaggtactaaaactcttctatcatccaaaattatattaatttaatttatatttttttatatcatttttcacactcttaaatttaaaaaataaatttccaaaataattttcaagaatgatattgcagaccttctcatttagaggaactataccacaactaatacaatacaatccaactcaatattatataacacaatacaatacaacacgattaatgatacgacaacttcaacataaggcagtagtgatgtcgcgaccaacatcagggagcagccttgacctccatgattcatataatctcacaacaagaattaactacatcataacttgtctttacaaattataaagtacccaaaatagaagacataaccacccaacaaatgaaaatataatgcacaaaagcaaaatggcagccagagctccaaacaagataggctgattctttcaatacaagaattagtagtctttgtggcccgtgccaaaacataggtaaccaaagctagtacaaatgctgccattatccaaattgggtctcaaatgggaaaagctttctgattgaaatttcacttggatattaaggttgccaatgtggagatgctgaacccaataatctcatgcaacacaccataatttttgattatgaataatatcacatgatggagaacatgatgtgtatatataaagtgatg

SEQ ID NO: 7654 - DNA, 696 bp, Cannabis sativa
catttccacataatattgtcacaacccaaaacacgtttcagcacgtcggttatatttatctgttttaatagtaattaatattatacgtacatatattgatatttagttataatttgtttacttataagtaattgaccaaaattaatgtactatatacaatttaattttagcacattagcgtttattttgttataattaagcacacaaatagctgtaaagagaaggatagggatgtttatggattgatttgattttgatttttttaaaaaaaaaaaaaaattaacactaaccaaatcaattaaatgttcaaaccaaacgagattaaggtttgtaattcataaatgttctaattttttttactaatttttttttactttaagcttataacaggtaaataacaataaaattagatattcttaaaacaatattaatatttaattaaaaaacatcttaaggcggtttggttttgtttaaactacggaaaagaattgtaaaaccatgatcgaaccaaaaagttataaacggtcctaatttactaaaccattgatattgaattcatttcgtccgatctcaaatgatttggtgttggttgaggtttgaaaccacaaatcacaaattatataaacaaccctattcaccatctactaattaagaaattgtgtttaatgtaagagaatttattgatgcaaaaattta

SEQ ID NO: 7655 - DNA, 989 bp, Cannabis sativa
tcactgagttttgttttaaataaaatttgtttgtttcacaaagttgcaagtcagaatttgggatataatttatgtttttccctttctaaaaagatgcctctgggcttggttcaattgcaatacctcaatctggcattgagctgaagctcttggattaaaaattaagtagcaacttttagtgttgatcatcattccatctttgtttttttagttcaaatggacatcactttatattactgattaatcttctccggcaatgactcttttatcagagaaaactgccttccccaggatttcaggttgagattgttctagtcgattataacgggactgttttagcgacccctaaggctgaatctaccgcaaaaacacaagacgaaagctctcaatctagtcctgcgacagcaactggtgacgaagttgcccccactccaaacccaaagcaaactaaagattcaggaaatcaagacgatgtgttttcagacggcgaggctgaggaaactggctcttcaaagaatcggcaagcagagacagctcctgcaggcagtggaaatgtggtcactaccaccttcacttcggaaaacaagtccaagcccgatcagattgccagtttgacaaaagctactgaacaaatctctataggaaatgctggttctacccaggttcatgcttcaagtgagcaaaaacctgatgttgcaggggctagtgtgcccggcattgaaaatcccaacccggaaagtgagttcaaggcaatggctgctgatgcctctgtgtttacatttggggatgaagatgattacgaaagtgagtgatggtagaagtgagaaatttgggaaaatccatctgtacataaatagacttacgtgcaatccgttccttcaatttgtaatttcaaaggttctggtcattggatttggttaaaacgaagatcatttgaatatgcaaaataagtctgggaatttctgactgaatttcatggaattcatttt

SEQ ID NO: 7656 - DNA, 2539 bp, Cannabis sativa
  modified_base (1247)..(1252): a, c, t, g, unknown or other
ataaaacatcagtagagaacattccaaaacaatcccaactcgaacagaagtaaaaccctaaaaattcatgcatgaaacctcactttctactaaagaaaacaaagggaaaaggcttactttggcttaacaatcaaacccttggattttttaagctcaattcacctcaaatctggtctaaattgatggaaaaaaaatctaatttcccccttggttattgttaggtttatctttatgtcttttttatagtctaagttaggatgtgttttagtatttttattatttttttgtaaagaactatgcttggttttgtttttatttgttctttaggaaaaatgtttggaaatcctccattttgataattttggtgttctacaagcctttttgagtaaaaataagaaaatgtaatgaagaaaggaaacttttttttaacttggagtaatttcctatttcttaaaatgggtcaaagattgcctttttagctctaaaattcatgttctagagtcaagaatgatcacttttcaaaaataaattgaaaaattctaagtttttggtgttcagcattctttgtttgtgactcaaaataaagtctgaagcttcataccaattttttactatgattctttcacttttagaaaaaactttctgaattaaaattctaaatctctctttcatctttccaaaatatcttgaatttcccaatttcgatttatattgagagagttatgcccaaaatcttatcagttgttgcagcaggaaactaaaaacgggagactacgaagaaaagaggaatcgtttgtaaggccgcgaccttagtagaaaaaaataggaaacttattttttggctctatttaaagggggctgatggcaaagctttgtcaccatttaaatattgagaagaattctgagtgtagaaggagagcaaggagcaggactccaaaccatgttctttctcttccatttctatcttttatgtttttcattcaatttttttttagaatgtcttctagtagctaagttcttttaaaaattattatgtgaaccacttgagaagattattttatatggattaatgtgatgatacaattttttcttcttctctttattcaatttccattcaatttattttagttttgcaattttttactgaccatctataatttttatttatgaattcaaatcaaaattcttaaaggtgagatttgaatatgctctgattgatatagatgtaaattaatttaggacgaaannnnnnaggttgtttgtatgattttattagttgccatgtttaatgatatttgtgtgattaaatttaccatagaagtataggaagtttttacatagattgggtttataagtcttaactagattgtaaacttcttaactcaacttattaattgaattgaaagaaaagaaattgaataactacattatgaagtaaaataaaagatagctggggatcataataattcttatttttattaatattatttttctaaattttaattattgtgttattttatttactctttatccaaaagttattattcatcaaataaaactaaagaattaattaattggtacttgataatcaatcctcgtgggaacgatactttacttatcattatattacttgtttcgattacgtatacttgcgtattaaaatttaccgaacaagtttttggcaccattcccggggattaaaattatcaatattagtttaattaatttttattctaattttattatccttttgttttgctaatatttttattgtatgagtttgtcttgcaaggtacataaaaaattctatataaaggttaccttgtgaattattttcaacaacacaataagttattctacgctgcttgggggaggtttaatgaattggcagagagatgtcatcacaacttttccaggggctgtctcactttattctttcacagtggattgattgatgaaataaaaagttgggtaaattatagagcaaaggtaactggggagctattgttaaaaagaagtcatgaagacataatgtatttattgaatgatatggttgattttgactaccactgacattgggatccttcacttcaaagttggagtcacaaataccctttatcttgcccgtactcatcccaactaattgaagaggatgaccatacaccataactttcagaaaaaataatacaattagtatggtaagatctctaactgataatttaatggttcataatgtggagtgctttaagaaaaatgactcaaataactaaggttatgagagttgtttgaataaagtagaagcacaactagttgagtcaaaagaggggcaaatattatcctaattttttcccacttgatgtggcatgtctacgtggccaacatcagtgccacgtggtagtacaacttgtcaacaagaaggacaagtcatctacacaacacttcaaccaacgaggagtctgagtactcaagtgggacgaagaatgatgtaccaaccacctcaagggggttggccggtcacccctagttggccttatggcca

SEQ ID NO: 7657 - DNA, 881 bp, Cannabis sativa
atagctagaataaaaataacattttaatctgaacaaaaaaatggaacaaaagttgttttctctccaatctattttaatttattatctctaaccagacgatatctaaaaagtatcggtatatttttcattgtccaacaacaatataagatatataggtactcttataaatgttcaaaattattataagtaatttgcactcttttataattattaaattaaaatatataattcaatattaaatattttttgacacgacctttctctaaaaaatttggccgacctcctatcaaagaaaaaatggccgaccatagctgacttatagtatacgccgcaactcaatgggatcatgaccacaaaaccccagacacaccacactctaaaccaaatccaatccaaatgtaattctaacttttatcatataattattaacactccatctctaatagcggcataaatattgaaaattttaagtttttaatatttatttttagtgacataaatacttaatatttgtaaaactgtaatttccctccagttttgttaatacagactccgttttgaatttattaaaagaacattagaaagtaactgatactatatgtttctgtttagacccaatgatcaagaatctgaaccttatatgtagcctgtttaaaaaaaataatagagtttgtactgacgaaattagaaaaaaattacagttttacaaaacattggtacttatgccgctaaaataaacattgagattatgccacttacaaacttaaaactttaagtacttataccactattcacccctttcatatcatttatttattattttcaaataaaatttattaatttatatcaatatatattttatttatttatgtcatgtatat

SEQ ID NO: 7658 - DNA, 1463 bp, Cannabis sativa
gttccatactaggaaaaatagtagaccgtttggtgaaaatggcaagccatttttctgagttttctgccatgaaaaatggtagaccgttttcccaaaaatggtatgttgttttctgtaggaagcaaaaaccctaagttgtacatctccaacctttccaaacttcaaccaaactctctcaaacctcacagaacaattcaaaaacatcaatacaacataacccaactaacagaaattaaaatcaaagtacaatccaaaacttgtcattaaagaccaagctttgagtccaagaactcaagcttgcttcacctaacaaaaccaactgctctacaatctttaaaaccttaaaacaactctaatactaacctagaaacatattctaactcacacttaaactcacagcagctaaaccaagcaaacaaccattgaaaccaaactttctcttaaagaaaacaaagagaaatgaggaggagagggttaccttgacaattctaattattaatccttccttctagatgaattttgaagtgaaagtgatgagaaattggctctaaaatccttggtttagggttggttccctttggtgtgttctaaccgagcaaagagagagagaaagagaaagagaatgttaaactgaaaacttttcctagtgaagtggacataaatgtttaatatgtggaaagaaggatggcgtcacagagttgagtagacccgagtcatagcagttgacttgggaggggacactagccctgcgcccaggttgacttttggatctctggtatggaagtttggacttaattaacttgaatccaactcactatcttttagtattttataccattaaggcatggagaaacctaatccaaatctcaagagctgaaagtacacgaacttacaacccagaagccaacctaggcacctagggtttcattaggtgcccaggttgacatgtccaactaaggttttaatttttgggactgtcttagtgcaaaagggtcaaaacttgcattgttacatcaacataccacagaaattcttgaggtataaaaattagaatcagagcaagttcatttttgagcacccggggtcccgagcacccagagcccacattgacaatctgtcaatctaggcgcctttcaagtatttgatcaaagacctgactttgcatcttcttcttcttcttcttcttcaaaaatagggaaataggtcctttcagagaaaaaacaacacttcttgggtgccaaaaaagagcccagtgcccaggttgacgcctggggctggccttgcgcacaggttgacattttgtcaacttgagccattttcaatggagtttttttaaaacactttcaagaatattctttgttttaaaaaaaatattgaaattcaactatttttggggaccaaacagaatttttggagggccagaactaggacccagcgcctattgtcaacctgggctatttccg

SEQ ID NO: 7659 - DNA, 1435 bp, Cannabis sativa
actcagtcattaccctcaacccgcataaagtcttaaatagaggtaatcatacttatccactgctctgccttcagtagatctgggccaccctcaaacataggagggttttgcttcctgaacagctcataaattagttccatacaatctcccacattctgctgtattaccataggtgctagagctatcagaacaggtgcagggcaagcctggtgctctctcaagtctcgaatatgttccccttgctgcctaattgtatcttgcatagcagtaaatactcgttccaagttctgaggcagtagaggattctgttcctcaccacctgcctcgagcctcaactcgctattcaatcggttcgattgtcgtggtgtcataacctaatgcacatgcgttccacaacatccaaccatttagaactcaacgagatattaatgctaataagcatatcccacacacataaacacatcacaattattactatgttacttttctagcatacttcatagcaagtaaatagttaatcaaatagcaaataaacacataacacttactataccacgagtcgacctgtctccacagtaaatgtacatatctgaccaatcttcaagacctttaaaaccatgacttctcttataccaagtagtaacgacctagctcctagggacgccacgtgtgtacttttgaaacataattttgtagtagtagatttacaatttaataaaatatgtgataatagtaaaaacttcactaaaataaaactatactaatgaacaagattacatcgctaaaaatttattttggggatttcctattacaaaagttttacaaaagagctatataccaaagcaagtcaagatacacatcaggtgcaacataaaatatctcatgacaactcaaccatacaagttggataagttgatatgtacatttgtcggagaagactgtcatctcgtggctatcctagtttttatttacccttatctgcaccacaaagtacccgtgagtcacaaagactcggtaagaaatgtaaacataaatacatatgaaatagataaccaaatcataataatataattaaacagtaatgcacaagtacttgtctaataagacaagccatatttgttactttgaaagtaatcatttcttttgttgtctaataagataaccttgatgccctaactcggtatctacacatcacttgttacctaataagaaaacctgtattccctatcccgacatccacatacctttatcattgtctataagacaatcgacaagtatgaagcctaacaatggtttcaattgacgtctggactttctcttgcttaacagtaatcaccgtatctttacctcaatcataatcgagtcataaacgatattaatcgcatctatacattctatgtggtacatatgtattttcttacctcaagttccaatt

SEQ ID NO: 7660 - DNA, 736 bp, Cannabis sativa
actatttatttaagtttaatattttgtaaaaatattattattataagtgtaatgtaactaaaaatttaaaataaccaaaataacaataataccaactaataaaataaaacaaaacattatcaaaataaaaaataaatatataaaacaattaattgttaccaattcaatggacaaaaaaaactactaaaatataaataatatgtattttttattacttttattatataaatcaatataaataattttttaatgtaatataaatataattaaattgtatcaatttttaattagattttgaaattgatatgcgataaccaatttagaatctaacttttatcctttaatcaatttaattgtaatttatctaattttttgtaattaaatgtctccatcaattgctagcaaagcctataaccatgtgtagaattatttacccttagcacaattttattgatacatacaaataaattaattatttaaatatagtgaaaatttattgaataataaaaaattatttatctaaaaaaaaagaacctttctattttcatctactctctcttctcgatctcttagttcttcatcttcttccccagcacacacataaagttaaataataataataataaaattaaagataaaattaattttttttatatatatatatatatttttaataaaagtatcaactaatatgaaattttacacaactattgtgtattgattcaaagttatgaaa

SEQ ID NO: 7661 - DNA, 1062 bp, Cannabis sativa
tcaaaatgtatatgactgaattatattaattaagtcatattaaacacagtgttaattagtcctgtggtataattccttcaaataataaggtctctgaaagatatttgtcttcatgaaaaattagttgtctcctgaaagagttttctcgaaaggttatcttgtccatcaagaagaagtttccaagaaaagctagcctttctccagaaaggagttctggatggacaactgctccctcttggaaaggattctcggatagtcgactccagctgacacctttccaatcagagaaatcctttagtgtgcgcttcgatccttagtctcggaagagtatatctcatccgaaaaaactttgacttatgctgacatgatcgatctcgaccagagaagtttgttaagtcctaactaacttaacaataaattagcacttgcatcaactgactttatcggatctatatcctgaacttatatatatataccaccaactcttatcattttgagcataatgaataaatcaagtttcaagaggagatttcgagattaaaagagagaaagattgagaggtacaaaaaaagagaggtacagaaaaaaataaataaaaataagagaaattgagtttgggtagaaagattgagaggtactgagaaaaaataaagattgagagtttgagttttgtatgaagaatcttctgtagatgaagaaaattcttgagtaagagtgtgaaagataaatagttccaacagagaatcaatctcgatcgactatattgtaccttgttcttgcttaatcaatcaagaagatttcggtggtgttccaaaattagagtagaattatatattacatcgatctattaaacttgaaccagtatatatcttggagttaattttattactttattgttttttattttaaatactctgtttatttttgtttttttccgattacttgtgaattgttaatcttgttattctaatagtttgttggttaaatttttagttgatttagttctacactaatttaattgtaattttcccagaagtcggaattaatacaagtagttttaat

SEQ ID NO: 7662 - DNA, 1236 bp, Cannabis sativa
aaatttaaatattaacattaattattattgtcattatagtttatatattaatattaattattattgttattagatactaacggtgtttaatatctaatattattttgagaaaattctttataaatattaaattaaaatataaaatctaatacaattaattatactaataacttatataattaaatttcgtgacctaatatttctttaatcttaatcttactaacaatagaattacatgttagcaacctaacctaattaaattgaataattaacatgagaagactttgattgaatgcaattaaagcttttttatttttttcactactagccatagccctaccctagaacaagtactcctataaatttattgtatggtataattttattgttactatttatatatataatattaaatggtctcaatctctcaacaataaaataatacattaagtgatcaagctttttctatagggatgatatgaatagttgggggctgcaaaaagtttttaatttgaatattaattttaaatacacttttttttaaactaagatcctccactaatatttctataatggttaggacccatgtggcttttaagtctattttgaaaaaaaaataaaaaaattattaatggttgaaataggattttgcttatttaaccatttcttcttttttcccccttaatttagtaaatattaaaattgatatattatactattaattatgtgagagttccattaattctctccacctcatcttattccctattagttaaaatttatttactaataatactatacaatttatatcacactagacaattatatatataccatagttaaagataatagtttattttattttttatttatttcaacttttctataaatatatatttattttttagctttctatttatttagaggaaattacattatactcattttactttttttatttaaatttttatttttatttttatattttttaagatatacctacttttatagatgatgtccccattataacctttagaataaaatgaagggtgaggatatattaagcaacctactaataaaagtgggtacatttcaataaaatttaatatgaaagtatttttagttaatagatacaaaaaatagttatttctcaacttctcccatttatttatccaaatatatgatatttttctatttttttttaattttaacgataaaatgaacattcattttatg

SEQ ID NO: 7663 - DNA, 992 bp, Cannabis sativa
tttacttacaagttgttagttgtataattttatatttatatatatagagttaaataaaaataaattaattaataaatttgtgtttgttctcaacaaatggtgcaccccaaaaaataatgaaccgatgcatttttttgtgttttcaattaatcttaattttttaacttttgttatgtgagagtgtatattataattattaattaagatattctctaaattttttaaaaactcaaaataatttaattaagccactaattaaaaattatatttattaaataatttattgcacatatatctttttaattttatttacatgcatataaaataaattttttaaattctgttttctatattctaattctaaaatcttaaataaattaaacgtagaccatcatatagaaaatgaagatgtagtatatccatgcaatatttatttttgagttgcacgaacaaaattttttttagtaacttttaaaaacaaaaattagccgtaaaatgtatacattttacgtaactacaaagtaaacttttttttttatcaaacaactacaagtaaacttgtacgaaaaaagcttaccaaattaaaataggtatttgttttcgaaaactatttttactgtttagggttgttttctatttttgtttttttttcactaacatatttttttgtttaaaattataggttgacttgcaagaatcatttcaaaggatgatcacctttgacaatgcaattttattgagtttggggttgaatccagcttcacactcacacttgtttcaactacctcaacttgagtatcagaaagcttttgaagacatacataaggctgtgtttcaaagacacatacttccccaaactctttggaagttacaaaggtggctcaaaatcggagcagagagaaagctagctcaaggtcgagaaatgtttgaccaattcatgttaagatgcatctcactaaaacaacaacaacaactcatgatcactaataata

SEQ ID NO: 7664 - DNA, 813 bp, Cannabis sativa
cctatctcaatccaacagactttccaactaattgccaaaaagataacaaaatggctttgattaagaacttttcagcacaatttaatacctttccacatccctcgtaatgacagacatattgtctctctccatggatgtgggaatgcttcttcaaagcaccggcatcaataaaggtctttccgcaactttcatagctgcaaagaaaaagtacttctgtagttggttctggttctggttccggtacctctggttcttttgctttctcttccaacgactttaatgtatcctctgagaaagtgagtacaaaacgtacaagcacaatcatagtcttgatcaagaaacacaacacatgaatttgaatacgagataaaatggcaaaaaatgtagcaaggaagagatacctgttacccatttatagagaaagcatttcccaccagtggccacaacatcttggggaaccctaaaaagaagacacactagttagctaaagtcacaaaaggagcacaatatccatctacatattaaggttcccaaatcactacattacttggccacttcaaatttaatattttgaaactcagctaaccctacaatatttgagaaacataaaactatagaatcttctatctaagtacttagggagtgactcaaagaggcacgcaccataggtgcctaacactaccttaagtatttattggtccaattcaatatcggatcggatctcacatgttttaatttaataactaataaagaaaattgctaacgcttcacctcaaggtggtgtggttttgggcacagtgtctaatagcaatg

SEQ ID NO: 7665 - DNA, 690 bp, Cannabis sativa
caatttgaaatggttgtaaatgattcttgcaaaaaactaatccctagaagagggtgtgccttacaacctcatgccaagcaatgaactcaactaacaaaaactgtgtcctggttgtaatataaacaatgcaatcatatgatacacaaaaatgataaatcaccataccttgcatcaaagcttctttctcctgagcccacgacagcacatatactgctgataatccatggtggtatatacgcatccttaatttccacactagagcggaaaacagaagacaagtgttccatggattcatctttcacattagagccattgtctgaaatcgaaatatgttctgctcctttcaactccatgcattttatctgagcaaagaggatgtaaaatttcacataataaaaggcaaaaaataaaatattaaaagtaaagaaacaatctgcaatctgcataactaaatatgccattaatgggaaaagataattggaaagccatatcccaagaagagtgttctccacactaaggcaaaaataatggtttcaacaggtcaatagaataagaaagtaaaaacgcatatattacacccacctcaggagcagaaaatgcagcattttgaaatggcgcaggtgaacacagtaaaggaacatccattcctgccaaggctgtcacaaaagatctgcatagagccaaattggc

SEQ ID NO: 7666 - DNA, 680 bp, Cannabis sativa
taatcaaacttcattaaggaataataacacatttatcatcactatttgttacagtgtgttagctcctaacacattcaaaaagtaaaaataaaaatagaaaatgtagaaaaatagtaaccagttacccttaaccagttaccttaccatatttttcttatactttttaaacttttttttgttttaaataccccataaattcacttttcactttcagtatacgttgctctgttaaagttttttatcttcagaactttatcttcattaacataaggcaaatgtccaaacaaaacttatagaaatcaatacatacattttccaatagagaaatgctaaaaggaaactagtagttgttagttggcattttatttaatgtgtaatattattatggtgtaattaagtatcgagttcatataatttaatatatatacttttattgaataatgaacacaactgattttagaacacaatctatcataatttcaaaaaacaaaaaaaaaaagatataaccaaataatattaatgaactaaaatttccacaacaaaagatataatattgtctctattgttgcaaatctaaaaaatgagtcgaaatgacaaaccctaaaactatcacaaatgaacaaaaaaacaaaaaaactcacttacgttattgaaaaggtggtacggaggagctgcggtgg

SEQ ID NO: 7667 - DNA, 734 bp, Cannabis sativa
ctgcttacttgaaggaatccaccatcgttctgccggttcagattaatggcaagacacgaggtaccatccaggttgaagaaaaatgttcagaagaagatgctttccagttggcatcacaagatgaaaagctatccaagtatttgaatggaaaatcaatcaagaagagaatttttgtccctggcaagatcttgaatcttatcttggatcgcgaaaatgtgaaagttggtgtcagccaatagtttccaggatcatataggtgtttgttcaagactaagagtagctgtcctgtaggtaaggaactgtaaattgttagaggtgacaaggtccatcctagatcttagtgtgctgctgctccaaatccaatgaggtaggcaagtggaagtggtcttatattaaaaaggggcaattttaggtttcattcaatgggtttaaaatgacattgtgtcccgaaaaggttgtaaggatgccaatttttctgtgtttgaaatgggcagggtaccaatattgcttatttgttattcttttcaagatatacatacatataatatatacatacataatatataacaggtcaatgaattagctttcaaagcttttatgatttaacgtgtacatttaaaatcttgaactgtgctgatttattaatacgcaatttgcgggggtattgtttggagggactttagtaggtgaaaagtttcatttcatatacgaaatttatgagaggttggccattt

SEQ ID NO: 7668 - DNA, 785 bp, Cannabis sativa
ttatcccccgttcttggcactatttgtactgggaacgaaaaataggtttctattgatccacacacctttttaatacaaaaaacactgaagaaaacaaacgaagacctaaattgatagacccatgtttcttaagaacaattatgctagaagatttgagacattaaaattttttccttttaaatgtaaatctttgataaacattatgctagatatgtaatagtacttttaacgtagtaaatagtatattacatacaccccacactagatattacaatatccccactaaaaaacaagatgcattaactcagctttccctctacgaggaaaaaatacaaaaattgtatcattaattgctctgatgcggattacccatttgataataaattaaaggactttttctcttaagtcaaacgtcacaacccttaaaaagttgtcaatgaaagcagttataaaagaaaaagtctcagaaatgatgtggcattaacaggcaattcaactcatcaaatgaaagcgataacacatgaacaaagaacatagacaaaaccaaatcaaagatcaaaaacacctcaaagaaatcttattttttaataataattaaaaaaaccaacaacaacaacattctcatccagaaaacatgacacagatggcactataatttcacgtctgtatctataatagccgaaaaatatgcgttaaatgtaagactgtagagtacttgcactgcatgaattattaattaccagaaaacaatgaataaagtatgcgcattacatgacagtcttcaa

SEQ ID NO: 7669 - DNA, 936 bp, Cannabis sativa
actttcgaaagagtttttctataacttctggtttttattagtcttttacttgaacaaaatttaaatttgattgatttaaacgtgcatgtgacgatttattcctcctaacattattatgaagtgtacccacatggaaaatggtttgggtaatgagaacaaattaacaatgatccatttataagaatatgctaactgattatattcttagcaatagtattagagccaagttttcagttgcggtcttagttttgatattatttaactacaagctcttctatagtactactctttttttttttttctgtcagactcttaaccttatattcctgaaagttaataatagactgctagtttttttctttagttgttatttttgccaattgttttattttgtagaatcagtgctttgacttgggtgatgaaaataaaactcccatatagctgagatttttatttggttagttcttaaagagaggaatatattttccaattattacttttccattttggatttatacatttttttttcatacaatacaacaaatgatgaaatgttttgagctatgcacaggtgaacaatgcagccattggtggaacagaagaagacgtacatgcaattatagcttctttaaatgctaaggtaagattttgaatttttaaaataggtgatttattgtgtgctatgatccttttggtgaacaacatactatctttatttatttattgttgtttggttaataatatgtactgatatgattgtctgtaaatacttcttagtatcacaatatgagtaaaatacaatttatcactattaagtttccagtaaatgtttaaagagttataatcaattaatcatattctatagtatggtaattattataaaatatattttagatcataaaatatatacttgcgtatttcttttaatgcagaccc

SEQ ID NO: 7670 - DNA, 598 bp, Cannabis sativa
gagccactgtgggtggaattcgataatggagagcttgagccatggcgtgccaatcgtggggtggccactgggagcggaacaggtgtacaattccaagatgctgcgggaggagatgggagtgagtgtggagctggcgagtggtgttgagagtattgtttacgaggaggaagtgataaaggttattgatatagccatggatggaaatggtaagggcggagagatgaggaagaacgctagtttgattaaagaacaaataatagatgccaacaatattagagaggatgggaaagtgagaggatcctctgtgaaggcgttggaggattttctaactcatgtcctaacaatgactagtaaagaggagattcagtaacctttttggctttactactgtgttagagaaagaattgctcttaacaaatttagtattattcttagtattatatgtcattgtcagccagcctcatgatctcctaaggagtaaggcaaataatttattaattatcagatcaacgttgcatgtgtacgtgtgaagaaaatggctgcatttgagcaagtattactttcaataccacatttcacattgatgatgctttttttg

SEQ ID NO: 7671 - DNA, 1102 bp, Cannabis sativa
taacttttttttatgaatcagttgctatgacacatgttgatacttgttcaaaaaaaaaatgatcttggtgactcaattttttttttcttttttttgttaggatcacactaattgatttaaattacaaaacaacaatcataagatgaggaaattttagtttaagactaacataaaaaatagatctctcaaaaaactaaagaacaaaacttaaaagaactctccaaactaaattgaaccaaatttcgtcccacttgatttttaaatctgaaaataaaataaatgtaagtaatatgctagttttgaggatcaaatattaaataaatataaagatttgtatattagtaaacaaaatattcttaaataatattattttaaaaagcaagaacttatcaaatctaagggtgactcaaattggattcactagtatgaaacttttattacaatgcaaaaaatgtgatctttattttgatgaaaaaataaaatgaaatatatgtaataagcaaatcctctacaaatcactagtgacctcctttaattaactaaataaaaaatataagaaagaaaatcatgtcattgccaatatatattagaaaaattctaataaaacctttattaaataaacttatacataggcaacttgggttcaactcaaaccaaccaatgggatcaaacttcaccaaatctctacttgtcaatttttgattctttatttgtttatgaaaagatatcattttgattagctcaactatattacaaactccctattttattaaagttaaatcaaaatattttcttgcttatcaacttttttaaatcttttttcaccaaagtgataagaatttatgatatagataatagtaatcggggtaagtattttttttttaaaaatttaaacaataaaattacaatgttactaaacattattcttaactcattaaaatcttctctttatttatagtcgccacaaatgataaatttacaaaaacttttactcataaacatataaatatttaaaactattttgatcaaaattgaatttagatttatttacgaaaaaataagataatatttttgccttatttttttttttttctataataat

SEQ ID NO: 7672 - DNA, 1216 bp, Cannabis sativa
ttcaattttttgaataaacacttacgcttattagttattggaaaatgtattttaaaaaaacttaataaaattgtaattaaatgtgatattacgtataaagactatatttatattataattgttaatatttattaaataataatttaatatatttattattaaaatatttgtaataatgttgtcgatataatatgttgatgagaaattttcatttttatggtttttaagttataagtttgtaaaaatatagctttttcttataaaagttattttacaagaaaatattagaaaaaagttaaaagaaatacaaaaaaacagtatcctcttagtgtatctggttactgggtacctagttacctttacatagttttctcatattttttaactttttcttgaattttttctataaaataatttttgtgaaaaaaagtcatatttttacatagatagtataaaaagaacccataagatttgtaattttcttttaatgtagaaattacaatttattaaaatttattatacaatttaataaataaaaatatgtatgtttattatttattttattatatatgtttgatttatacattggttgatggtgagaactcgtcaaccaattagtggtcggaaaactaacttatgcttcaagctcagaaatgagataaagaggaagatgaaatatgaacttaaatttctctcttggaatggagagaataatggagaaatttatattaatctcaatatggccttttcagtataattttccaaccccctcacatctaggctctaatagccttgtgtacaaagtggttccatggggacacaatatcactttctcgctacaggctgcaggtgctagaggtagtgtggcactttgcacctttgtctggtgtcaggtggtccccagttgcaggttgtaggagggtgtttgcagtgtgtggcctttgggtacacgcctgtggtcctcggttgcatgcggggtggtccccaggtacaggctataggagggtggtttcagcgtacccttggtcgggtcatcaggcctcgcaagtgcgttgtcaccactacttgtacctccatgctctcagtcttcagaaagcgtggttgtacgctcttcccttgcccgccttctcctttgattcctctcccaatcccattcttttcatcatgcattcacctctctccttatgctcacacaccacccccccccccccccccc

SEQ ID NO: 7673 - DNA, 926 bp, Cannabis sativa
tgcatgcacacatagcgcccttttgtcccacttattaaccacaatgtgatgtgagcctatatttagttctttgggtgtctttgtctcaagcattcatggggttttaaggctattacaggccggctctgggcataagcagattaggcctgtgcttaggacccgcctagcttaagggtctaaaaataatttttttcctatgactcactaaatttcaaggccggtcctgggctatttacttgccttttgttttgacactggaagaggggagattcgaattcggaatctcttctttgtggggagagatgtagtaccactagggtatatgactacaagcatgactattctttgcccttttgttgcacttattatttggcttttgtgtttcatggagttttaaggatattcactcgcctttcgttttgacactgaaagaggagagctttgaactcaggacctcctttttgtggagagaggtgtagtactattaggctatgactacaagtaggctattctctagtttttggtgattcaatgggaaataattcaactataatattatttcatttttgtggtgagaaaatgaaaatgagcatgaaagctgtatgtttgcacttcatttggggttttaaggctattctcttgatttttgttttgatatttcgggaggggtattcgaactcaggacctcctctttgttgggattcaatctatgcctatgaccacgattattctctagctttcggtgattcaatgggatacaattcaactatattttttttttacatttttgtggtgagaatgaaaatcagcatggtttactatataagatcagaataaaaattcagcaagagaaaaaaaaaccagcttattttcatgtattgaaatacaatggtttcatcaaacatagaaagctaataatgatagtg

SEQ ID NO: 7674 - DNA, 702 bp, Cannabis sativa
tatatgatgatgatgatggtatgtattatgtgatttgacatatagaagtttttggaagccaacaaactactgtaactgtcattataattctttttgtatacatatctttgttgaataatgacaaaattatttggcctataaccattttgaaaagactttttcatttcattacatctttaattaaaaaagaaaaaacgtatcacaatgtgttttcttatttgtataaacatcttagtcactaaagtaaatacaaaatattgattatcatcaatcactctataacattattcatcatgaacagagctccacagattttttaatttttttaattaattgtaaattttatttgactaaatttgtagttaaaaaaatacatgtttagtattcataaaaaatttgttatgttttattaaattaaaattattccttagattctctctagcactcacaacagtttttttttctatcttttaaaatacatcatcaaaattttactttatctatttcacaagaaacttttacacaacaccatctataagcttctctattcctttctttatgttttaatttttaatatatcttattcattttaaatatataatattaacatacacatataacataatatttatttacaaacttaaaaatttaagtacttatttcactatttactcaactaaaaaaattaataaaataaattta

SEQ ID NO: 7675 - DNA, 616 bp, Cannabis sativa
  modified_base (160)..(172): a, c, t, g, unknown or other
cttttgtcacgtgtgtacgtagtaggcaactaatcaaataattaattaatatgtattttttaatggattaatgtaaaagaacgtaatatgtaattatgcattattgcaatggtaatggttaaaaaaatatttgagctacataataataataataataatnnnnnnnnnnnnnataataataataatacatacagctttatatttatgttgtcaattcacaaaaaatatataaatcttatatagtgacaattcacataaattaaggggggcttctctctcttcaataatgatgagcttttggcctgcttattattattattaaaacctttaaaatgatgctcttggatcggtattctgtagtcactatatagtaaagtgacagtgtctgaggatgaacttctgtttttttaagaaaaaaaaatataataaataaacaattgataagatatataagatggattttatataattaagaaaaacttaattatgggtgttgcctagctctttataagtgttgttaacttgcaatttttggattttgtttgaaagacggatttttcgaataaaaaattgtaagattttttttctcaacaaaattataatattttctttgaat

SEQ ID NO: 7676 - DNA, 1048 bp, Cannabis sativa
cgctcttctcaaagactttggtgtttccatttctactccaccaaagatgtattgtgacaacacagctgcaattcatataagtgaaaaccctatctaccacaagcgcactaaacatgtggaaattgattgtcacttcataagagaaaaggtccaacaaggctccctccaactaatgcatgtctcatctcacaacaatataactgatatttttacaaagcctctcctaccttcccaattcaataacattgtatccaagatgggagtaattaacatttacactccatcttgaggggggctattaaagttagttattattgttaattagtgattaattagttggtaaagttagttagtctttcttcctaactaactaagctccactggctatatatatagactgctctgtattcattttttcaattaatgagaaataacagatttcaattcttttcttctctctgtttctgtctctcatattaaccaatcataaaataccatttatagaaggtgttagatactattgtgcccaatagcaatgctctttatttttttttttatgtttaaacctttaaaatcacttagttttccttctaattttctaatttaattattatgttagacttttcacgtattcattcatatatacgtggcacttatacattgatttaaatcatttgaaaaatttcaaaattaaaaaattatttttaaaattttaaataataaaataaatctttaatgagatttatcagtatatatttatctacattactcatgtgtgaataatatgtagtattcattataattagttactatcacgccataattcataattttaataatttgatcaatgttataattagtgtgatttattaaataataataataataaaaataaatcattttaaaatttaaaaatatatactttttgaaactatttttttgaataagtatcttaaaactaattaatgaagtaaaaatatgtttttaacttttcttcttctcttttttctctagatcctttgcacaacacatcttttttttttgtttg

SEQ ID NO: 7677 - DNA, 510 bp, Cannabis sativa
aaaaaaaaattataaataatgaaaaatatttagtcaactaaattatggaaaagaaaattgcacaaatgtcgcacatatatagcctaacaatcgcaaaaattataaatcgtgaaaattatcaggtagtcacgcaaatgtcgcacaaaattacttttttacgtttgatatcataaaaagtcgctcatcatcctagaaaatgtcgcacaatattggaaaaacattttaaaaaaaaatacataactactattaaaaaattaacatggtttacacaatcctgttaaacagcaaccaactatacaacacatacatccgatctaaaaaaatgttcattacaataaatatagataactaagaaactattacaagaaaggttcaaacacgagctttgcatgtagctctgttgtgccctaaaccgacacaaatcgaacaatgacgaggttccactaccacatgaccattagatgaccgatgcttcatcgatcttccacctgcattgctcttcctaggccg

SEQ ID NO: 7678 - DNA, 699 bp, Cannabis sativa
gagaacaaggctttgtggtattttaggtatggcaagggccaatgaacatagcacttatttgggattgccatgtactatggggaggaacaaggatgcaattttaggctttcttaaggataaaatgcagcagcggattcaaagttgggagggaaagcttttgtctaaagctgggcgtgaaatattgctgaagacggtagctcaagctctccctagttatgcaatgtctgtcttccttctgcctaagaaaacttgctcttacttggagggtctaatgtccaagtattggtggggttcgtcgtcaaataattctaatgggattacttggatgagttggcggcgtatatcacggcataaacacactggtggtcttggctttcgcaaccttagagactataacttgtctcttcttggaaaacagggctggagactgttgttgaaagagaattctctggttagtcgtgtatataaagcccgttacttccctcgagattccttcttgacagcttctttgggatcgaacccaagttttatttggaggagtattcatgagtctcaagatttggttaaagcgggagctagaattcgtatcgctgatggtactgcaacaaacgtcctcaacatgccttggttaccttctggtgataatccgtgtgtgttatcctctcaccctgctttagttaattgtaatgtgcaccagtt

SEQ ID NO: 7679 - DNA, 881 bp, Cannabis sativa
cttataaatatataatggtgtaattattagtagatatgaaatgagaaattaaaactttgggatcaattgaaaaattagcattgtctcaaaaatacattttggagatttatgctatctcgaaattacctatcaataaaagcaccaataataggtaacgagtcctcttcgaaacgggacaaatctctaaatgcattcttcgagacagtaccaattaatctctcaattgaaccaaaattctgagttggagacccacatggtgatgggtaatgattgtttttcaaccatgtaaaaattaacatatgcacatatttaattatatatatatttaatggaagcttgattttttgtgtcttgttcatacatttaaagaggcatataaataaagttttatccctttcgtttgctcatctcatcacaactatcacaagttattccaagagtgaagagtgagactcttgagaaaaaaatagagaaaatatctcttagtaagagaaatctcttagagagagaaagaaaaaaatagagttcctaaattgtgagaaacattttgtatagaaatggtgcgattaccacattagtgagtccaagtatttgtcaaaacttaagaatgtaatattgtgtacccattattattgttatagtgtggaaggtttaccgtaattttttatttgctacgagataattcttttgcgtgcattgctttgattattattcataaaaaaatatttacattagaagatattcaaaaattcgtaatatgttcagtgattgtagctgtgattgatcttttaaataagaaaagaattttagagtctccattgtactttctcgcaaatattaatcctcgaggggaattggaatattatccattatcctcaaca

SEQ ID NO: 7680 - DNA, 1134 bp, Cannabis sativa
atgcccaatgatcattaacaaagcaccagtctaatcgttcctttatcgtatccaatgcacggcgtcctttaatccatgtgaaaggatccccttgaaaagagcattcatttaaatgacagttcgcaattgtatttcggaagtgctccatttgagattcattacggagagccccacccaatttgttatcattggaaagaatttcattgaaatcaccaatgaccagccatggtgataaaggagaaacatccttaagccgttccaatagagtccaagttagaacttgatgttgagcagaaggagccccatagaaagccgtaaaatgccattttggttgattatgaaaagcaatataacaatcaaaaacatttgtattataagtaagaatagatacatcaacatcatccttccaaagcaacatcaaccctccccccaaacctattctaggtacatcaagaccattactaaaatgtaaactattacgaaaacgagaaagaacattagaccctaacttagtttccattaaaaaaagtacatgaggagtttgctctttgacaagcaaacgaagatgacgaaatgcgctaggattccccaagccacgcgcattccagctaaggattttcatggctcatggcggggctgaaattcagcctccgctgcaaagtctttagaaccagaacaatccaataaatcattggaaacatgctggtttcgatccctcccaacagactcattaggagtaagatttggccgtggtaatcccctgcatctcttaagtgtttcacgcattgactctctgtcatggtgcctcttaaaactaatgtttggagtttgattttccttcccagcagccccagaatttgttgatgtaatgattgacggagaggatgtaatatcagttagaggaagagtcatgtagttgctggtttgactagtcacagtgcaaggtaatggtgggtaagttgcaaccacattatgatgattattagcagcagtaggtggagtgtatatagtggttaaatcatcatcggaatccggtttagaaagacttttgccacgattaacatcagaaataagtcccttttgaggtgtgttgtgagagttcatagtaggattcatgtgggaggcatttggcac

SEQ ID NO: 7681 - DNA, 838 bp, Cannabis sativa
tagggacgagactctcgtccctgtagggtcttacaattacggccccagataatttttatttttcgaatatgtaatatatatttttgggtaattattgatttacttttaattttgtgtttaattagatggatggatatgtggtggcaccatcaaatatttcagagtgggaaggatatgagcgtggaagttggcttcatttcttaaacgttaatggtctcattgttactggaaatggcatttttgatggttatggagatatttggtggaacattgccaaacatgtatagtatataacaattctatacattttttttttatagatttaatattatatattatgataagctaatttttttttgtagggaggtggtgtccaagcacctgcggtacgtgttaaatttcctaaatagttattaataaatatacgactataatttataaactatataatatagtaccaaaattataactcatatttatttataaatgtacgtgtataatagacaaagaaaagaaatacatacatacgtaagtgtgcatataaattgatggattgcatatataaaaagtaatagaaatgctaaataatgtctaaattttttttaccaaatggtgcaattaaatatcagattttatataattttattaataacttttagaaagtatcgttaactgattgtaaagtgacatacactactagtgtctaatatcaatgctcaaaaaagtaaaattaagtcatataattttttttacgataaatgctaaaagacacaagtaatacttaattaggcccgatcttagtataggtaggccaggcctgcacctagggcccacctaa

SEQ ID NO: 7682 - DNA, 1287 bp, Cannabis sativa
  modified_base (1176)..(1176): a, c, t, g, unknown or other
tgtaggaagtctattaattgtgaacacggcacattgaaacgcataccaccaataagataaagagagaccaaactgagcaagtaaaaccaaaccagtttcagtaatatgtctatgctttctctcagctcttccattttgctcatgatcatgaggacaaggatgttgaaagtgaattccttgatcatgtagaaactttgcaaatggtatgtattccccaccccaatcagactgaacacttttaataggcaaattaaattgtttctctaccatgcttttaaattttaaaaaaatatcaaaggcttgggatttgagagtcaaaggataaatccaagtgtacctagtgtgatcatctataaaatgcatataatattgatatccttctcgagatgagacatgagaagggccccataaatcagtgtgaattaattgaaggggttgagaagcatgactagaggacaaagagtagggttgcttgtgactcttgcctttttgacatgcaatacaaaattgcaaatcttttacactgccagaatgttgtatattgtgtaaaattctgcttaaaatagcaggtgaaggatgccccaatttttgatgccaagtattgatatcttgtttaaaatttgtgaaagaaacagaaggggaaaattgagaagaatgctgataatgagtttctttattgatatatgagtcattacaaggctgcactgtgtcaacagtgagtttattacaagaacaatgataagatttacattctggtacagtgataggctgagaaaaattggtaagattacactgaagtgtgggagaatgttgacttgagtcaccaagcacatagaggccatccttaagtggtcctttgagaagaacagctctagtgagtttgcccttgacaaaacaacaatttttgtgaaattcaagatacacatgattgtcatgagtgagcttagacacactaattaaattctttttcatagcaggcacatttaaaacagaatttaagtttaaagcatgagaatgaggggcagacaaggaagtggaccctatgtgagttatgagaagagtcttaccatctcctacagaaagtgtctcagtaccagtatagggagtgggggattcaagagattctgagccatttgtaacatgaacatttgcccctgtatcaacaaaccatagatngtcatctccaaaatcaggtaaaatagttggttgatgtacctgggagtcattttcagcttcaagttcagtgagatatgctcggggaggggcagatttaggagggacaaagtt

SEQ ID NO: 7683 - DNA, 909 bp, Cannabis sativa
gtcaatattatccattaaaaataggaggctttccccctcctttcttcatctcattaatttcctcctatagtgagtattagacattatcttccaacacttagaaatcatttgtagccataattgacatagccacttttttccttggaaattcccttcttcttggcctgttgaatgccatcatcatcaactactttccctttcttattttatatagccctttcgtctttgttcttctccacccacacttgcttaggcttaacaccttttttctcttctttcttcctacaaacttcagttttgtgtccaaaggctttgcactcgtgacataccaccagtttttattcatacttaaccataacttcaagatcctgctaattaattaatttcattgcaaaagaaaatagtgtcaggaaagtcttgatacatctttacctccaccaagacccataggaaattgagtctctatttattcttggttgtagaatctaacatatatttggagttcctacttgcccaataatcttgaataagatttctcactcaatatttcagctctaatccatggagtggaatccatattggaactaaatacacatcctctttgttaagttctgtgtaagggtcccaagacttcatgataattgattttttatcaaaaaacaaatcttccttccaaaatctcatctcgggtattcatatcttggcaccaaactatgaagatacctggtttcataatccaaccttgccctcacctttttctatccatattctccttgcaaaactatcaaaaactccaacaggtggattagctcccaggacatgatttgccatagttgatttcaaatataatacctcttcctctatgtcatccatgtttatcataacaactagactcttcctaggaggccc

SEQ ID NO: 7684 - DNA, 1307 bp, Cannabis sativa
  modified_base (229)..(243): a, c, t, g, unknown or other
ggtttagccgccaatatccattttcttaatcaggccatatataaggtccagatttttaattattgggtttagtaaaaaatatatagtatcagttacttataaatgttaattttataaattcaaaacagagtctgtactgacaaaactagaagaaaattacatttttacaaacattcggtacttctaccgctaaaaataaacattaggtttatgccgcttacaaacttannnnnnnnnnnnnnnatgccgctatttacccttatttatattatatataataattaatttcagaaattaattaataattaattgtgtagtgaaatagtttaaaatatttctatttaaataattaagtaaatttgaattatttaattatttaattacaattaatgaaaacacaagataaatggattgaaattaattcattaaaataaatttataattagaaaaagtacttctagttatatgctggtggattattgaggatggtatgaaatttctaaagctacattgaggaacaacaagaagagttcttaatgagagatattgttctagtgtagtttatttttttttttatttcaaaggttgtaattttagaaatacctaatttttagtcggttcatatttcatttagtgtttgattaattgtttgctaataatttattagtgcatgcatattaattgttatacataaaatcttacacaattttcttttttctccataatcacgcatctcatactagtgacatgattatttaagattgtcttgtatgttttatgtgcattgcattttaggaaatcaataacataaaatgttaagttgatttaaatagtttaataatctagtagttcacaccaattgactttctcctaaagctaatcacataaataactaatattttctaaaaagtttttttttttttttttttttttcagaagtaagagtaatatggaattaattaaattagttttaagcatatatcatattaatttaattaatgtattacatgtggttaatttttgaagattaaaatctatatttcaaaataattttaataatgaagaacacatttaaaatagtgagtagaaagggttgtcctctgttatgaaaaactcatggactccattatttgtccagcacagagggtatgggaagggcctcgagatggcttaattttcgttcccctaaggaaggtgttgaaccatacattgtcaaggctgacttcctctttaggataggataaattgatgtattttagtacggtatcaaccctaaggtaagactactaagttaagtcatgaaattt

SEQ ID NO: 7685 - DNA, 936 bp, Cannabis sativa
tttgtttcttcttacagtttcagtaatttattcatggcacgtattttattttttccaacttgtatattttgactcatcaatataagtgtctcgtattaataaataattagcatgggatggcatgatatattggagatgaaccttaaactcattgcttcattatatttgtgagtaaaaaatacctagaaattttgatttaggttcagctgctatatttttctgtctatattgtgtatcacagtgttccataaattatttgataaggcaatgtacctatttagttacaatatcattttatgagagattttcaaaattatccaataatttggctaatgcttcgtatttctatgagagtttagcaagaagaaaataaaataaatacggggaacttaaaggtttattagctacggtgaatggaaggttattaggtacctttcatattaccccgtaaaatgaacaagtcaatggaagtcacctttcagttccacatgctttattccacaaaggaatgctttattactcaatggtgacttccattgaccagagataatcttgtcttattgtatttctttttatctgcttgcaaaaatcatctatattttctccttttttgacatacattgtttcaaggtctgaggttgcattttgttcaggtcacttctgatcctggaaatgaacagttgaaagatgcaccggaaacgaactctaaaactccaagagaaactaggacaagtagtccgcctgttggtagcggtgaagttctcaaagacattgcgcctgctccagagactgatcctatggcccttgatccaggtatgattaatctaaaagtttttgaataatttccacgtctatagtacaatgctttgttgacgaagttgccaccgtaaaccactggcatctggcagtttcttccatacattgatttggccatgg

SEQ ID NO: 7686 - DNA, 643 bp, Cannabis sativa
tccaatttctttaagcaaaattatatcaatcctcaatttcacttcttgtttaattcggtgcactactactgctatggtactgaggttttatgcataattttgaagctgtgcttgcttgtttgttattagtaaaatatcattacttatattcttctccatagacaaaaatcaagtatatatataataatgggatttatgtagtcccagtacttgaaaatctgacaatttacacattacacacatgtatatatatatggattagaaatgattgttgtccgtaaaatcctactaggcgcgcgttggccttttttgcaacttaaaagaacttataccatagctaatataaaataattacaaaagttaaaaatagataagttaaaataactcaaaaaatactaagagttttagtattagtgttataattttttattatttttatatatatgtttgtaagtgtaaaaataaataaatattatgtatatataatattttattatttatgtatattataaatatattatttacatggtttaatgaggtatttcaaaaaataaaataaacaactgtttggaatgctcttcaaaatggttgctttgctattacaaaaaactatgaagaacatcttaaatctttagaatattct

SEQ ID NO: 7687 - DNA, 1934 bp, Cannabis sativa
  modified_base (154)..(159): a, c, t, g, unknown or other
cccataattagtttttaaggtcctaactccctctaggccccgtaatgtctcgaagtggaatattatttagcacccatgctccaatttgggtaacttttactgtcgctcccttccctagtgttgttcgtagttgttgtactcaacctctaacttnnnnnnctcgctaaccatttttgttatatcgtttcatttgcttctcccgcgatttttctgggttggttgttcaggagcaccactaccttcttccatggatggttgttcaggatcaacactagatccttctagtacggatggaccatcatcaccatcatactacaactatgcactccacttatcgtccccaccttgttccatgatataaaagcctacagaaatttaaaatcatatattcgaatatacaagaataggcaaattaatagctaattgcaaatatatcaaaaagattaaataccaatatgtgtttgatatatgaatcatgtgttgatagattcattcaaccataattcttcaccatcatcatgagatgatatgatatcgtccctaacggtgacatcaataggtggtggggtgatttgataaatttggtcactaagcatgagatcatcgccattagactcttgattatcataatcttttagttgcgttgtcaagacaactggccagcgtgaatctaatggatcgctcatgtaaaacagttgactggcttgggatgcaattataaacctattggacttgtgtccaattcgattcaagtacaccaacttgaatccaaattcatcgtctttaaccccattatcatttctaattcaatcacaaagaaaaataggtattcaaaaattattgtaatctaattcccaaatttcttgaattacaccgtaaaaagacatgtcacattcaataggatttttatcttttgaactagatatttggaaagtcttagcaacaattataacacctctattttgtgtttttctagatttatcacgggcttgagtgcaaaattgagtactatttatatagtgcgatgggtacttgagtacattacacgaaggacatcgtgatatgtaaagtagtgtgttggatacattacccggagattcacacatttgtaacgtcacttttctcacggcgaccttttcttttctttggattcgccttttgcttcccaaggtggaattgagctttattcaaattttctaacacttgctcccctagcaaaggtggcggtggcaattcaaattcttacttaccgtcaaatgcttttttccagtgcaaaacacatgttctttttgcaaaaacctttggtgtcgcatataacacaacttctttgagtgttttaaatacattgaacatgttatctcctcacaaataggacatgctttgtaccctttcacactgtatccagaaagattttagaaagctggaaaatcattaatggtccatagtaatatgactttaagattgaactcttctttcctaaaggcatcgtaagtagaaaaaccctcataccacaatcgactcaaatcatcaactagaggggttgagtacacaccaatgtaattactaagctgtgaagggcctgatatcaacagtgtaagcatagtgaacttcctcttcattaccaaccaagggggcaaattatacatcacaagcaaaactggcgagcaactttacttattgctaaggttggtatgtggattgattccgttcgaggaaagaccaagatggatattcctaggttcatcgccgaattcaagcaacctagcatcaattgatttccaagcgggtgagtcagctggatgtctcatcttaccatctaactttctatcgctggcatgccagattaatttttttgcatgattaacattttgaaataaccaaaccaaacgagatattggggttaagtactataatacttttgcagggacaccaac

SEQ ID NO: 7688 - DNA, 623 bp, Cannabis sativa
caaaaggtggcataaactaataaaatgaggtcagggctcactaatcatacttcatttacaccccacaactatcaaattttgtgtaagtatgataggccacggttaggtacatttatcttaggaagaaaataagggcgggggtagttactttaaaagaactatctcaatcaagtacacccttaattaactacctataactcaaataggatagactttgatatagagcattttgttgttttgtatttttggaaaagttactcttttgggagaaatcaagcctcttgaaagcttgggatgattttgtaacattgtgtagtctactactgtagagaaattccagcagttttgttcaagattagaccttgatagtgaactaagatcctgtcaaagttatattcacataaaactaacaaaccataaacccattcctgctccttcaacaatgaagatggatgaatacgaaaaatcaatctaaaagctgccaaaaacactattcctttaagctacaaacattctaggaagcaaatgagccataatgatgaaatgattgacgcctagaaatcattaatgaaaaaatatttcggggaaagggcacattctgttcttgatgacatgggcaccac

SEQ ID NO: 7689 - DNA, 2030 bp, Cannabis sativa
  modified_base (780)..(792): a, c, t, g, unknown or other
ctatctccgaaagtttacttttcatttgtacccacctcctcgagctgcctaataaatgcagttctccttcaatcgttgagctgagacggacgaaagcattggatgatcggatcggccaagatcaaagagggccagacaaccaagcaaaaaattattttattgtggcaactctaaagcgccaccttctctatccattattggagacaaaagcaactattcctaatgccttgtccctctacctctagttgggagctaatcttagagaatgagatagattgaatgactcgttagataatagtagattcaacctttatcaccgatggtctgtctcaaaagcaggatatgcttctcttaaggtaactattatggttacctacctttatctagttttcttcttgaatttttcctttacaagtattttttttttaaaaaaaatatatttttgtacaaataatataagagtttttggcgactaaactctctccgctactgtttcacttacatttaatcctccaagctcaaatttcgacgataaaatcctccaaactactgaactggtagcaaatttaaggtgtcatccggttaagtgtcactatagactacttatgtatacattcttgtatatgtgacacgtttatattggtacatttaatattattatttaagaattattttcaatattcattttgaaattaaataaaattataaaaataaaaaataaaatattttaaaaaatgaaaaatattataaattttaaaataatttttatattttttaaannnnnnnnnnnnntgtaccaatataaatgtgacacatgtacaaaagtatacacataagtagtctatattggcagttaattgtggaaaatagaagacaccttaaatttgatactagtttagtagtttagagaattttattgtctaaatttgagcttaaaaagttaagtgcaagtgaagtgataattgagagggtttagtcacaaaaaaaaaactcataatataaaaacctatgattatctttttgttaacattttgtttaagttttagattttttaagttccacataacatacaagtgtcaacatattattgagccacatgttttattttaatagggatatttacgacgaaattcctttaatatttttcagttgttacacatatgatcctaataaaaaaaaaagtggcggtaaaaatctccttcattactattttgttgcaactaaactattttagctgttaagtgccagctaaatttgtcaattctccttctgaattgttaaagattgtactggatgattttttgtaaaagaaattatatttttacgctaaagattttttttacaattttacaggtttctataaaaacaacaagaaaactacataaaaataacatcaaaacaacatcaaaataacatacaaataacaaaaaatcaataacattttaataagagtacaacatataaagaccatattctgtaaataatatcgtaaaaatatttaaaattctgtataaccgtatttcatatttattttttttgtgtatatgtgaaataatttcaataattattcatctattcgaaaacctatttatttaataaaaaaagaatttaaaaaaacatttgaaagaatatagtctacttattatgagcacgagtacttgatttacatttagagtcgaccctaaattaaagtgagataagcttgtacttagagtccactcattttaggggtcaaataaaaagaatatctttttaaaaaaatattattatttttataataaaagctccaattttttccgtaggcctcatttcaactcaagatcacgagtgctgcttacattaacttattacaatcatacaatcatgataatgtcattaatttttgaaattattctaatgtgtactgtccttttttatattattaaccattattttatgactatgttctccatttaatagcattgattttaattaggactaggatatcgagttgagtggagacacaccagactacatactttctcttttgc

SEQ ID NO: 7690 - DNA, 551 bp, Cannabis sativa
ttcttttggaggagagagagagcaagcgtgtgtagccgtcaccgtacaaagtcaagaactttcacgagagtcagtcaccatcaaatgaatgctcaactcactaaaaatggacgttcggaaattgcccatgccggatcccacccctctctctctctgtttctgtctcaatactttacgacaaacactggaccgcgtgcggcgcgtgaggtttattgctgttgtgttggggggacccaacaagatctcgtcaatggagtgtgtctaggcaaggcaaacttttaacttcatttgctcgactagtccagcttcgggaactaggtatctatatttcatcagctggaatcctcttcattatagactcttctagatttctctcttatcactcttcttcttattaaagattccttttttatttgagtaataatcataccaaccttgttgttgttgttgtactagtttttgtttttgtttctttaaaaagggaaagaaaaaaaaactcattttcagccaaaatccttgaaccccactacaaaatattatgatttgtcaat

SEQ ID NO: 7691 - DNA, 886 bp, Cannabis sativa
cgaacattttaaggagctcaaacattgtgataatattttggatgaactcttggcacaaaaagaggattattggaaacaaaggtcacgtatggattggctcaaatcaagtgactcaaatacaaagttttttcatcaaaaagctaatagtcgaaagaaaaacaatactattatcaaattgattgatgaacacggtgttgagcatacatcacaatctgttattgccaatgtagtacaaacctattttttgtgggatatacactactggaggtgtagatgccgaggctatgcaatatgtcatgtccaaagttccatgttcaatctctgttgcagataacagagctcttacacacatttatactgctgctgatgtttatgaagccttatctactatgaatttagagggtagtcctagacttgatggcatgtcagtcatgttctactccgattattggcacattgtaggtgatttggtcactagatctgtgctaaaagtactcaacgacggtggagatccttcaagtttcaatcagactttaataacactcattccaaaagttaagaagtcaatcaacatgtcacaattgagacctataagcctttgtaatgtcatgtataagcttgtctcaaaatcgattgtgttacgattgaagccgtatctcccacaagtcatttctaaatcacaaagtgcgttcttatcctcacagctcataactgataatgtattggtggaatttgagttaattcattctctaaaacatttgaagagaggtaaagaaggatatgcaactataaagcttgacatgagtaaagctttcgagagagtatagtggcactttattcaaggaattttgtctgctgtgggtttcgatcatgcaatcgtaacaca

SEQ ID NO: 7692 - DNA, 1302 bp, Cannabis sativa
atagtttttttgcttatcaaatcaaagctacttcctttgaattagaatatactttgcttgttttgtttgtaacaagtgaggaactttcataatctaatcttaatgaatctcattcttataaagaatagttctgttatgtttgctttcctatgatgatcaatatgaattacttgagaagttttgtagtattggattagtgtaagacttgagaagtataccctggttgttgggtaagcttgttttaaactgtttttttagtatttagaattgaaaaaagctgtgtaaaaaataaaaatacctttttcattagctgtcactttgcacagtagtcctgttttgataatttttgcaagataagatagcataagcattctagtatttagaaattaattactctaaattaattatttaataattaatggcagttaatgaactcagtacagtgattgtggaggagttgggctagaattttgattggcccattcagaagtgggctttttagttgagttgggacatttgcatgttgactttagcaactattgttagccttagtgacctccattgtcgcataataattctcaagaattgatctgtcatggtcttgttgttttgttcctataacttggtaggggtaaaatttgagaaaaaaattagagagaaaagatgcatgtttgacatgaaagaaaaagaaatgaattagaaaagaaaagggtggataaaagaaaagagaggagagagagagagtaaaagtaaaagtaaaagtaactaatgcaagtatataattactaagttaacctatactaatattattttaaaataataaaatagaaaaataataaaaaagtaattatttactaatctattttttaaaattaattaatctctactaaacatctatatattcaaaatacctttcattttctccttttttttttaattttttttattatgactaagtttttttacccaaataaaatggaaggtaaaaaaaaacaaaaagagaaagaagtaaagaaaagaaacgttttatttagaaaaatgctattttggaattttatactctaaatttttacaactattaaattgggcaactattaaatttaaaattacacatttgaaaatggcctgaccatatcacttcaatcactaaagaactacatcaataaattgtttaccacataagacaaaacataacaaaaattggaattcctcatttcaatattttaaataatttgaggagaatttttagccatcaaaagagtttaaagtaaggatgacaattcaagtcacgacacgcgagtt

SEQ ID NO: 7693 - DNA, 546 bp, Cannabis sativa
caagaatgtacattacaagatcttgatctattagagtgtggccagtagttgacagctctaagattcttcatctttaggatgtattcattcacgaacatagatcctttcttcaagctttgtatatgaagacgaagttgtagcagtctagctcttgattgtgtagcaaataggttggcgaagacactccatatctcagaagtagaattgcattagacaacatgtcccatcatcgactttgaataagagaattcatgagacaactcatgagaaagacatcgtgtggccagtacttgaactcccgattgatcatgacaacgtctagaagaaatcttggaggttgaggagtagttctgagaagaattcctttaaggttgtgtgcgcgcgcagctggtggaatgatggattgccagaatgaaaaattgttctgatcgagacgaattgtgatcggaagaagattgttgttgaatggatactaaagcatgattttgatcttaaggttgtgtcgtacaattattgttgaccgagaccagaccggcccgttctgcc

SEQ ID NO: 7694 - DNA, 1557 bp, Cannabis sativa
tctctctctctctctctatttatcattatcctccataaaaaggccttcaaagaaaagagcatgcgtcaccaaaaatagattaattgtaatggaagacataatttttatcacattgctttgcctcacactttaatgagactatatatattacatagccattaatattaactaagcccctctcatttcatttctcatttaagtaacaagttaaaatttagattattggagttgaagatcctaatcccatttggaattgatttggaccctttttggctcttgacctgtttgggaaaacttatatctcactcccatgtgctgatagcaccaactcgtccgaaggagggttcgacagttcacacttgagttagtcccacacaaataaacatatatataatagagcttcaactatacggcaaccaatattttattggtgtaattattaatttatttttcctcattaatgtgtttttgcagaagtaacattattacaaagaaatcattcaaaaaaaaaaacatggttcatggaagacctttttctgtatttgcattatttgtaagctgactcctttgaggctcattcccgatgagtggtttcttcttgttacgttagaacactttgctgattattctttatgttcatagaattcttttcgattatggagatttgttttcagagttttaattattgaaacttttttatgaaaacattaaactattaactcataatataatctcgttaatacaaatgagatttgataattaatgctcaaaattaaacaagaagtaaataattaataaataatatatatattttggtataaattataatgggaaagatatgaatttttatgtagttttataattaaaatctacgtactccatgtgctatattattttttaatttctaggttgagattacaatttggcaggatttatctaagttggaaatttgatcatcccttttacaatattttctttgctatttataggagtaattaagatagcatttattttttatataattcgtacaatagttatagaacgtggacattcttcacgtttcatatatatttgattaatattaataggcaagaatatacataattgtttgtatttaaaataaaaaagatatccgctagcattgactaagtcataacatgtatatcgatgatcatgttttgtggtgggaaaagtaataaacttcaagcacagcaaaataataaaaaaacaaagcaaagaaattttacttggcctagtaaaactaccaaacccacaaagagaaatatatttcacttatctatctcaatcttttcacccaaatctcaatacaacatttgcttcttcctcactctcaccaaaccgcaaactcactgtttactgagatttttcagaaaccaataatttaaatatcagaggcaaagaaatataattgaaagaaaataaaatacgaacactctaaggattttacgtggttggagcgttgacgagtcttagtccatgagtcaatattattgagagaggctagaaaattacaagggattacaataaagtatgagc

SEQ ID NO: 7695 - DNA, 652 bp, Cannabis sativa
tttctaggctgaattagaattattgttaggttagaatagcaaaaaaaataattagataattaaagttatattccaaaagagaaaaaaaatcaaatatcacatatcaagcttctccttttttcttccttcttcgacagtcgtacaaaccaactaaaccagaaatttttctctactaatcaagcaatctttggctgaagtagctaaccctaggtgcagctcaaagctttgaggtaactctttctagttctctttgattttaagaattttaggttaagttttggttgtattttatgtgtgatttggggttgtagtttagataggttttgggcttaatttctacgtttaattgagattgttggtatgagaattgagtgattccttggctgttaagatttgaattttggaaaattgagtttaagaacttaattttgattcaaacatggtgaattgagaattttaatgagtcgttgagtttatattgtttaattacattgattttatgttattggagtgttctgaaaagtttgagcaggattggaggagctcgggattggtttctgggtgaaaccaggatttcccaaacctgccgaaaccggtcaaccaaattttgaggttactagtaaactggtcaagcgtatggccaacaagggga

SEQ ID NO: 7696 - DNA, 669 bp, Cannabis sativa
atatatgtatattataatttacttattattttgttgagtttgagccttgatccaacgagatagttgatagagttgaacagtctcattagagaaatgacaagcaagaaggtggtaattacgtggatttaccatccatgaaaacctcataaacattgctgaatacacacacatcactgcatatatccacatatacatatcatagattctaatcataattaatagtgtttattgtaaataaatatataaataacagtacctgcagtcatgttgccagatataagttctggtggtttttttctgtccacaaacgcctgtgatgatcaattaatatagtataagatttctctttagtactaacatcatacatattttatgagatttttattttattgtgtgagattatataaatatatatttatattacttacagcaattggaatgctccaattcaaaagaggaccccaaaagtgagttgtcttaagaccaactggactgttccaaagggtttgaaagattttcattttgaaattaacttatcaactctgaaaataagagccccaattagtattttatcttaataaaacatgacatgttgatcaaaacgacaacaattaatgcaaaacgacatattctgaatctgattgatgatattctgaaacaaaaaattaa

SEQ ID NO: 7697 - DNA, 620 bp, Cannabis sativa
cgccgccgccgaagccgaagccgaagctgagggtttggttgaggcttcagaggtcggcctgccagaggaacccgatcgccggcgttgttgatagtggtggtggtggtcactttctcgatcgtgatagtcatagtctcggtcacggtcatggtcgcggtcccggtctcgttcacggtcgtggtgttggtcggactttctcttgggtgggcgtggaggttcgatatctctgggaggtctgtcaatggaagatctctcggaacggtggcggtgggtatttggtggtggtggtggtggtgatctatccactggtctctgcacctaacccaaataaatcacaataaacaaattaaataactttatttatttaacattttttttttaaaaaaaaaacattattaatataataaaaaaaatggttattaaataggtgggacccaaaaccaatagaagttttaagttttgcacaagcaagcagtcttttattttgatttactggtttgctttttttgatgatcagttttattggtttgttgtttgggttataagttaagaatcaaatttgtatttttttaatttcaaaagtttgtcatgtggcaaaacaaaatgtcaaaaaccttttt

SEQ ID NO: 7698 - DNA, 739 bp, Cannabis sativa
cgaattttattataaccgctcatatgagagtatgtttaactgattggaaagctagtttattattgtgttgttattattaatgagattaaaaccctcgaatcgaggtacataccgataattcaattcaaaaaaatgggtaaaactcttataatttacgagtgattcctaaaattatttaaattaccgaaagaataaaaaaaaaatccatatcatgatctattcttaaaataaaaaaagttgacttttgagaaaaaaaaaaaggtaaagaattaaataagagagttgattttttcaacaaatagatttaaattatgagaaatgctaaaagatatcagtatagtgccaaataccttttacgtatcaatattgttattagtctaactaaatatcgggtcttatatagtttaatataataatttttaaggaatatcgctagtcaatcacaaagcgacatgtcttaagaatgctaaacaccattagtgccaataacaatactcattattgatgataagtacgtaattagtagttagtacatacctcaaaattattttttttataaaattcaaaatatatataggatttgtatagtgtacatcacccacgtgaatcatgacaaatagagttgcgtttgactatgtacaatcaacaacatttaactcatcatgaaaacaaaggaaagcctcttcacttctagctataatctacacccactaacatcaataatcactactacaaaaaa

SEQ ID NO: 7699 - DNA, 780 bp, Cannabis sativa
acccatttgcagccaataaccttccttcctttaggaagtcgaaccaacacccatgtgttgtcttttcttcagaattgctagagacatctactcttcttaaaacagtgttcccatctaggaagtataaatttgcctttcgagtattcatcgctacaaatgtacctcgtacaactttcaaatttccatattctaatgttatcttgtaaccatcaaaatcaagagcacctaaggaaataagatttttcagtagattaggaatgtacctcacattcgtaagtcttcttattgtaccatcgtgcatctttagtcgtattgttccaatccattttgtttgacaggtattaccgtctcccattaagaaaactcctccatcaagttcttcaaaactcgagaactaatgtccgtttggacacatatggtaaaaacatgcggaatcaaggatccatttgtctaaatacaaatctaatgatgaaactctaaaggacgaatcttcttcgatgtcgactttctatgcaacatttgcattcgatttgtctttatttggacaatctttattcaatgtcctttctgatgataataaacacttttctttcgcaatattttttcttgatgactctcctctagactttgaactggatcgcccctattattcgatccacttgattttttgttgttcaatttgcctctggttgcaaccaatgcttctggcattgagtctttgtgatcatgaggtatttttaatcaattccaatgttataaatatttttttattagtttata

SEQ ID NO: 7700 - DNA, 765 bp, Cannabis sativa
aaaacattgatgaatgtaggggtagagaaatagcgctaaatctacccctgaattgaaattagttgaatgtcacacaagatatgtttgtggataaaagaaagaagtttttgctactgttaaacaccaagtttgaaataagcttaaagattggaaatatagaactacattataagtaaagtgttgtcatcaatttttttttgcaagtgtaaaaatctagtaatctactacataatttgtcaaaacttttgctataataaatgaaactaaataagtaatttatagctttttctttatcatttattattatcttctacttataattatttattgggagattcattattttgccattcataataataataatgataatgttaatgaagcggccaccgacggggcaatgtaaccatgctattagcactgtgtgcgtacgtcagaggtgatttggtttggttggtgggttgtgtcagaaaataataaaggtattgtagtaatataagtagtcgtacgccgtaaattttaggaggacatgcaccctgcgccggaacaatcgccaccaggggacgtggccctccctagcctctgccttcgtacgtggacacacctcacttgttgtcactgtcacttccacaactgatacaataccttttcttgtgctcggaccaaaaacaccctccacaggccacaacccccgtccccactaaataaatcactcatttcctattctttttctcttgattagtttgtcccccatatcatcatcat

SEQ ID NO: 7701 - DNA, 1113 bp, Cannabis sativa
ctacgtaaatatatcttataaaataataatgtttgttaattgatatttttttttttttttttatggaaaatctacgtaaatatatcttataaaatctttgatattctctcctggtacaaatcgacactaataaaagtggattcgtaattcaaagattatatatgccatgttttcgtacgtgtcaatatgcatcgtaaacctcaattaattagaatttaagtgtccatgaattttctttttctttcctttattaagaattattattctggttttaggggacataacataaggttgtggcaataactgattggagtgtgttttgagaaatgtgtagattaggtacgaaatttgatcctaattacaaatgttattacctacttacccttgtcggcatagcccaaacatttgatcttcataggttgctgtcaaatttgagaccatacatatatatactataatactaggtatgtattttttttattattattaattttgactgatgttaggtgtgttacttgttagtcaattttaggccgaatcaaatgagaaaaggaaaacattttatataataaagtgatacaatgttgggaaataatattggtatggtatccaactaatataaataaaacatttggtctaatttttgtgtttgtgctttcatgtataaaatgtaaattaactataaaaattaatgctactattaatattattaaaaatatacaaaacaattaattttatttatattattttaatatgttataaatattaattttttttcattaataaataatattaataagtgaaaaaaaaaataattaaaaaaatatagtatttattgtgaatttaacacaattttaactttagctaaacgtcatacattttatattattattaaattaaattttaataaaatattttaaaaaataacaatatactatattcataactctgcagtaaaaatgcgcaaagtacttaaaaaaaaaaaaaagaaaaaaaaaagaaagactagtacatatttattcatatgtaattatattctgaaatgttgttcaatactaattgtttttaatcattatctatataactacatataagttaaaacttttttttttt

SEQ ID NO: 7702 - DNA, 1571 bp, Cannabis sativa
  modified_base (249)..(250): a, c, t, g, unknown or other
ggctttatcaacttcaataccactctttgaaattttatgcctcaacactatgccttctttaaccatgaagtgacacttttcccagttcagcaccaaattagaatttttacaccttgttaaaaccatttccaaatttcttagacattgatcaaacgatgagccaaacatcgaaaaatcatccataaacacctcgatgcacttctctattagatctgaaaatatgaccatcatacacctctggaatgttgnnggtgcattacataatccaaagggcattctcctgaaagcaaaagtgtcatatggacatataaatgcagtcttctcttgatcctcaggtgctatggctatttgatgatacccaaaatagccatccaagaaacagtaatactcctgcccagccaaccggtctaacatctgatcaataaagggcaagggaaaatggtccttactggttgccttgttgagctttttgtagtctatgcagatcgtccacccagtaactgttttagtagggattaattcattcttatcattctttatcaccgtcatccttcctttctttggtaccacttgtactgagctgacccacttgctatttgaaattggataagccgcaccagcatctaatcactttaccacctcttttctggccacttctttcattggtagattaagtcttcgttgtgcatcaatagttggtttggcgccctcctccattaaaattcgatgcataactgtagagggactgattcccttaacgtcacccaatgtccatgcaatggctttattatgtgcccggagtactctaagcaacttgtcagtctccacatctgaaagtgaagctgacactatcactggaagcttcttgtcttctcccaaaaattcataccatagatgattaggaagtacctttagttctaactctggaggtttctctgtagatggtacaagttcctttggttcaaccctcaactcttcataatacttcttattcaatggcccataagaatcaagccatttggcatactccattgcctccatcccttcttgttcagtcaatccatattcaattaagcttgagacaataaggtgtatgttccacaaaagtaacatcgatagaaataagatatttgttaagattgagacaataacacctatactttttctaaagataagagtagccgaggaatacacacttcactggcttgggatctaatttggttacccgtggatgagcatcataaacaaagcgagtgctaccaaaaattcttggctcaataggaaatagtggcttatcgggaaaaagaattttgtagtagatttcaccatgaagaatagaagatggcatgcggttaatcaaaaaacatgcattagaaacaacatcggcccaaaatgacttaggaacatgcatttgaaataagagagctttagctgtttcaaggagatatttatttttttgttctgctatgtcattttgagatagagcatctacacaaaaactttcatgaagcatgccattttgattcatataagattgaaatataagattgaatagagattggagattgttg

SEQ ID NO: 7703 - DNA, 981 bp, Cannabis sativa
aacaaacctaagtagtctcataaggaacttaggtcgttcatacttgcgttttgcatattatgtatggggatgtatgctgaaagtattatcgacttatcatggagtttctattcttttttgtatgtggtcaattttgtgtccataattcaactgtattttgcattgtttttgggctaatatattttctatttgctacaaagttttgttttgggtctcattgctataattatcatttaccatttaattatgtttcttgcaggttgttacccctattgcgcctctcagccaacaggtagatttttttcacctagttctctgtccagtttgaataccattccatttaaatgggttttgagctatgtattgttagtgttagcttgttaggtactctctaaaatttgtcgtacagaaagcttatgtcctttttcaactttccccctttttcttttcattaatggaattctttttcaagattatttgattatggagatgatgaacgttcttcttttcagtatgaatcttcttcaataaacaaaatcatagattgttcctccactggcatagtaccaattaataattttataatcaaatatatacttgatattcctatatttgttgatctctaaaatatacaaagtactgctcatacgacttaccttctgacaacattgtttatcttaataatggagtacaagtgagactcaaaaagaattgttaaaaatgtgtaaatatcttgtgttgctacgattgtaattgtattactcttttttttttctttgtttgctgattatctctatctaaagttggcattttcttatcttaggttggtgacttttcagatgataaccggtcgggtattaacaattcattacatcgaataagtgctataagaaattataaactgcaaattattggcctcacttgccatgtgggtagaactgtctctggaagtgtcgggattttacgcgacttaattgaagg

SEQ ID NO: 7704 - DNA, 2103 bp, Cannabis sativa
ttaataatgaaagagtggctcattgtctttagcatttatgtaattcaagtaatggaagctttgtggttggtatttatggtttgtctgctattattattattgataagaagttgtataatcgtgttgcttctaggaccatctcgaattgatggtatataatttaagttaaatttggtttaaaaaataaatcaatacccaattttataatattactctaatatattagggtaaaattaacattttaataaaaaaaatatataaaaaatcaataaaaacattaaaattttattttatttttttgaaaattagcgtagtacaaacattgaatttttattgaagtatataaatattatattaaatattgttgcaaaaaatttcaatatgtaagtatacttattgttttctaaacaataatccatgtaagtgaggttaattccaaaggactataattaattactaattaatttaatttttaattttatttattaaacaaatacttgatattttaaattgctaacaatagctgaaattaatcaattaaacaaattaacaaataacaacgatttagaaaattaaggaattcaatttcaattacttccactttttaatattcaataatacaagtaatcttcttcttttaatttaatgtgttagtggatttataaattaatctatattcttattttaagatataaaaattttaaattttggtactatattatattttggaagtataatacacatataatcagtattaaataataatctaattactacaaaaatcacacaaatacttttattttgtgtcaaaacctatgactatttaattatagcataacaaatattcacgttttagattttatattagaatcataaatcatataaaagatgatcaatcaaatatatataaaaaaaatataaatatgaatagttcacacaatcaatagaataaaaaattgaataattaataaaaaaaaaaaagcttcaaacaatctccattgaaacccctaataatgagtttaactcataatcatcattctaaacaattgcaaataacaaattaaaaacataaaatcaaagatagaagaaaaaactctttgaagatcaatagttgtaatctccaagtctcatttttctctccaaatatgtgcctcaaaagttatctagaccccatttttgaattaggttaattaaacttaattagcttcagatttcgtatgcaggtcgtgtggcatgagtaaactaatgtcttggttcgtgtctttttttaaaaaggctcctggtaccactttgaggagatgggtcgtagcatggcttcctcaatattgcaattcgtgtcaatatttttgggcaagaaaggtttccatgtcataacatttcatccaaatatagtggtctgtgtccaagacaaaataccaaatcttctgcctttttgggccaccacatgacttttactaagtcatggctcaatcttaagcccttcaaaaatcttctttcaagtcccgagcttcaaccaagttttctcaagacctttaaagactctgctttaagcacacggacactaaaattaacatttttcttcaattttcaattaattttactcttacccctctaaatcttcctcattcacaaaatttaaaaacacgagcaaactaaagcataaaagtgtaccaaatgaaataaaactaattaaaagaacttaaaaacatgactcaaatataacgtcatataacacctaacaaatgtataaataacatgttaaaaaaataatatttattgtgaggtaaaatttgatctgtattatattttgtattaaaatttggcacaatttttaacatgtgctaaatttagacactattggagttcacttttatgaagattgactaaaatatttctatgcataatacttttagaattctattggagatgcttttaaatcacactactacgaattattattcaaaataatttattaaatttttttttattttagctcaaatttttacattacattatatatttataataattttataaatgatatttttgttaagttttatcacaattactaagtaaatattaatgtaattagtgttataaata

SEQ ID NO: 7705 - DNA, 1478 bp, Cannabis sativa
cattgcccattctaagactgtgtacgttgtatcggttcccgctgcaaacatgtcctgtacacaaaggtatttataaatgtataataccaatttgtttattatatttagaaattttattattttatttttattaaaaatgtttaattgtgatataatttttaaaataggaaataatttaatataaaataatgtattatttaataaacataatatattttatacctattatttttttttttgataagattcatctaatattttaaattcggtatttattggattgaattggatccatcaatctaataaaaaagaataaatatttaattttaattttcatatatatatatatatttttagtatgataatataaaatttaattattcatccaaactaaatgaaaatactaattaatttgatttgatgttggatatatatagatatataagatttggacacctaacctaatatattcaaaaataacattcaatccaatccgatcacaattaaatatctaatatttagttgttaattataattagatcaatcgattataattaactagattagataaatatgcacacacataaatataaccacaaataaatattaatatttatacatgtaattgattattaaaattttattgaaagtatgactaataagatagacataatttatatataataaataatatttctttagtgtaaaatgtatatttataaaatggataatataatatagtttctaattaattaaaaaatttgcctgaatagcctttccaaactttgtttatttctttttctttttaaaccataatatataagcacgcaatacataattatgtaatttatatacaagaaatagttaatatattaaatactctgtatatataaatatatatatatgtactaggagtatactatttgtttcacagaaatgtttaaggggtattataataaagttgtaagtaccccaagatgtactattttacattttaatatggggtactatatatttaattttataaataattaatatgaaaaattgtgaatcaattttggaatcggtagaaataccatttaatgattaccatttttgttaactaattatggctttcacgtatgtgataaatgaaggtatattaaatcatttttatgggtaatatcagtgatgtctaatattttttataagttgtggctcacgattagttagtaaaattttttaaaagccattttttaaaattatatagggctcgataattataccatgacactaaagagtatgctagacaataatagtataccttttagcaattctcattcaaatagtattaattaaataataagtcataaatgataaattagcaaggtgtatttttttcttagggctataataaggtgtattttgatgtatagtaatcatgaaaatgaaatgagatctagagagttgagtaattaccaaaattatagcctttatgg

SEQ ID NO: 7706 - DNA, 1328 bp, Cannabis sativa
tgggtaagcattagccttggaaaatcaaatcggtatctatcataacctgaatttgggagtttatcacccatcatttctggtccataagggagataaggatcaacaccattgttaataagttcaagaatctctcaaaagggtgtctaatgagaccacaccgatagcagaaaatatgaaggttttcataccaaaactcaagccaatgttcatcacgaaccttcagaagattgaccattttccccctcatcaatggttggttaacatcaatccaaacatgaatcccgataaaagggccccgactttcatgaagagagtcttcatgaacatcaatatactcgccaacccattcaccaactttcttagcaagagctcgtgacttactgaggaacgaaaggcgatgagtctgaacccaaaattgaactctgtttaaatcagatttggtaacattgtgcaacactgttggacagtggagtaaaaccaaattgttgttaaaatgccatggctccccaaaaagaactctatgaacatcccctgcacatccaagagtaagtaaaaagagatcagaatgcatctgtgaaacaacaactgcaaacctgtatttattagaccagaaatctcccattcgcttaatgaaagtcttaggattgaaagaagtagataggcaacagactacaaggaagaattttagtgtttggtgaggatcatggagattagcctcagtgaaagtatgagcagaccgttctttttcagacagagctaaagtggtattcatatctttaatgatagaatccataaagtgtatagaatcagaaaaagagaagagaaatcgtaggtatagcgcaaagaggctataaaattgagtatatatagaccagtcattgataggttaagccatttgagagtggagatcgtcgaagttggcctgagaagcgtggcagttggccagagaaacgagcagttgcaggcgattatagaaaaacagagtaaaaaagaaaaacagagaacgaaaaataagagaggagtctaattgctacagagaaaacttaacccaactcggacaagtatttaccaataacagttaatttagcatttttaaggatacatatttacacttacacgatttttccatatttttcgattttttttttttaattttttcacaaaataatctttatatttttttttcttttgcataaaaatcaataagatttgtaatttcttaaaaaaaataccgaaaataaagtcttcgctggcgcttccacgtgtcgagagactttcccgctccaaatcttatctgtctatgtgaccgtctagtgactttatctttc

SEQ ID NO: 7707 - DNA, 2127 bp, Cannabis sativa
attgataaaagaaattaattagttagttatcttattatatatgtcatggataatggtcaaggacaaacaaaccataatgagatatgttaataactaatacagtattatataagaaattactaactaattatgaaattgtttcgtttgcttagtgtggttgtttgaataaattcttgtaagaaaagaatgaaacttgaaaacaatgaaaaagatacactagaaaatccgggttactattttattatttactatattaggtacaaaatctcaacgaaaccactctatattataataccaaaatcctttaactctcaatataataccactcactaactaactagtaactactaactgactaactctttgctttgctttccccaaaaaacgagagaaagaaaagaaagcctttgatctgacggttctgatttatctatgtacatcagacacattactattatctaatatctatatactctgtaacggcaccgttttgaagctttgctttgaaacactcaaacatctcctaatctttctccgccatttgttatccatgggtgtcctgtaattaataaattaattaatgattaattaaatgttgatttaaaattaagatattctatttggctaaagtgaaattcacttactcagaacttgctctgctgataatcttctagaaacatctttacaaagcattcgcctaatcagatccttcgccgccggagaaaccgaccggaaaactttagtcggaaacctcaaattcgatctaagcacagcatcaaaagtctcaaccaccgattcaccataaaacggcggaaaaccagctaacaatatgtacaaaacgacaccagcgctccacatatcaactttctcattgtaatctctccctgctaaaacctccggagcaacataatacggcgttccgacgattccgctcatcaattcaccgtccataaaagtctcagccgatccaaaatcggcgagtttcaaccgattcctctgatcgaagagaatattctccggcttaatatcgcgatgagcaacaccgtgacgatgacaatgagacagagcttgaacgagctgagtcatcaccgaagcggcttccgactcgttaaagactcggcgagtaattaggctgtgtagatctgaagaatcgcagagatccataaccatatggagatgaaattcgtcttcgtaaaggttatgaagcttaacgatgttaggatgattaccgagatgatgaagaatcttcggctcagtgagtaaacactgagattcgagcgagtcaccggaaaccaaacgcttctcgattgatttcacagcaaagaaaccggaatcttgattattcgccgaagaacatctgtaaacagtaccgaatcttccttgaccgatctcctccaaaatctggtagtttctcttgagtgcttccgtcattgacgattggaattttcctattcactttctctctctagttcttgaggccttgtttttactttctctctctaaaagttctcgtctcctttcaaaattgtggtgatgagaaatctgtatttataatcgatttgtgtgataagcggagttagcgggggagttttttcaattttcgaatgttttagaggaatattcggttcaataccactaaccaatgaaatataaccacgtgtcgaatctaacggctgagaaatatactacggccaattagattacttttttaatgaaattactgaaataccctttgatctttccgtactagcgactcttgtcctattatgagtagtggtagtgagtatgaggcgtacatatttcgtacacagtttacaattttatcttttattttattttattttatttttctaattctaaatttttgaaaggtcaacctacaattattcctgatcagatttttttaattttaaataatcttatttttaaattcaaaatcaattttttaataaaaagtattcacaataacgaataatatctgagttttttttttttttttaattttcaatactccaaaaaaaaaaaaaaatttcacaaacaaatagcatcttctcaagaagatgccaacaaaaaaaatgtacaaattatgccctacaccccaataccccatcacctatgttaccaaat

SEQ ID NO: 7708 - DNA, 1087 bp, Cannabis sativa
atataccgcattacaagatcaaatatgggctttgcagactgaggtcgatggacggaccaggactcaacgtcatcctcgagtactaaccatccgctcagaccaccctcaggtcactaatactagatgacgaactaaccgcactcgcagggagcgcaagaccgagcaggaagggatcaacttgaatcagccaacgctgagacatcaagtcacacaaaactccaatcgcgaggtacagcaagaagaggacccagagcgatgcaacctgcggagtagggctcaggcgagaaatgaggtaaatgatgctgaatctagttcttcatcctcataaagtcacactcctagtgtttataccaggtcaggttttgttgaaacaccacgaggaggaaggtatcaagttcacaggggtgatctttgtgatcaccttaatgcaatttttagggctcggtccctgatgccccagaatcgcaaagagcctcgtgattctcagttgggagatcggcataaacaatggtaacaacccgacatatgttgccaacccgcctaacgcaccagctgcgactactagagtagttatctcggcaaacatagctgcagttgcaactgcacctgcgacgactcagaacaacgccattctgccaaggggtgttgatcagagcattttactacaagcgttgaagataatcgagcagcagagaaagcccatttacatgtttcacgggactactccttgtaccacggaactgcgacaagctcgattgcctaaaggcttcaaattgtcctagtcgctaaaatataaaggtaccactaatcccatagactatttagaaaatttttacatgattatggaagcagactaggtagctcagcttgcaaagtatcgtatcgttgcggcaaccttggaggataatgctcacgattggtttagccagttgcttgaggcatccatatcaacttgggaaacctttgtggacctcttcttaacacatttccaagccgcgatgacgtatagaccgccttatactactctagctaatatcaaacaagtggtcggtgagtcattgcaggattattctaaacgtttgaatgc

SEQ ID NO: 7709 - DNA, 510 bp, Cannabis sativa
ccgtaattcttctcgacctccaaacaataatcttccactgtgtcaagtttgcttgaaatttggacacacagctcctgcttgtcattatcattttaactgaaactgggttactccaaagccaaatttctctcaacttcaagcacatcttactgaataatagtttgattacgatccttaggttaatgtctcccaatctctccctgattttggggatgatgcaagttggttcgtggacactggagctaccaatcatgtcacctgcaatatggacaatcttcaatctacaaccacttactctggccatgaaaccgtggctattggagatggtaagagacttgttatctctcacattggtaaagctactctttctccaaattttttttctcacttgaattttttcttgcaagtcccaaccatgacaaaattagcttgattcagactttattttttatcaccaacaaagattgttgaggatccatacattttaaatttttcacccattgtttctta

SEQ ID NO: 7710 - DNA, 593 bp, Cannabis sativa
gagagagagagagagagaattctaagccttagtacttctaagttcttaagtacatgaagtgaattcaggttcaagttaagattttttagcgtggtcactttcacgtagggttttgacccttttatatagtgttagggtttataaatttgttgcatataacaagtagaaatatccctagaaagtaggaaagttacattctggtgttgaatccctaaaatcgcgagcagttagaactattccgaagttgtaggggcgcttggaggtcttctagaatgcccatggaagaaaacacaacccatttaggttgtccaaagcttggttcactctttggctagtttgccttatttgtaagctgtctggcacatgctgctatcattggttggcaagctagggtccgaccaagtcttgaagacctgcctggttcttcttatttgattccttcttgtgatcttaagagttgaggaatcgtacaacactaccctgttcggttagtgatgagttattctccacatcttctgtttttgaccatgtagacatgtcaagtcaagtagacaaaattaggataatacgtattttattatttttattttgca

SEQ ID NO: 7711 - DNA, 1641 bp, Cannabis sativa
gtcgaggcggttcctcaaaggaggtagggtgcttttagagctcggtgggtgtctcctccgtccattataacctaggcccagttgaggagtttagagagaatggatacctgggcagtgtcgaatactttttcccttctccaaatcactaggcaactaatccaagggagggatactgtgcctggttgagtgcccacaccaaggaaggtgcgatgctgcctctgcatccgtacttcaaaaggattacggactattacaacattttcctgactcagttcacacccaagggcatcaagtacttatctaccatgttcatcctctacaccactcaaggatggggtgagccgtcttcgtagttcgcacggtaccaactggctcttcgacttaaagtcgacccccaagcagagcaggtcggggtatttttacttctcctagctggacgataagtggttgaagggtatcgtagaccctgcagttagcaaaatagggtactttgtggatcagtactactttgtgacgggtatagagaacgtccacacccagttccaacagattccttcgtactgctgccctcctttcacgttgaaacttagggagagggcacaaaaaattctccaactaccagaggatgatcgaaacatcacttttttgaccactgaggccgaatttgtgaagtacaagctctatctgaaggattttatgccaaagcccatgaaggagaagaagaagaagtccagacctagccgagctgaggatgccgagcaggagaaggagcttattcaacttaaacatgaggctaagttaaatagaggtgttggagccaaacagtatgctcaagaatattcaaagcaagagcagtatgctcaagaatattcagagcaggagaggccgagcaagaagaagaaagctcccctaatcgagcaagcaccaatagaacatgctatcagcattagggaacctggtatgcctgctcggccatcaacccctgtagagggaaaaggaaaagtcgtccttgtggagtaagaagatttctcagatgataatgctccatcagtgattgttcgagaaaatgccccaaccagcatgcagagtacttcaacttgcattaatttccctatatttatgctttcacatattttatgtttgcctctaaatgtgttattttatctgtgcagagatgtcttagaagacgattcaagccttgaagaagagagtaggagacagctcgggcttgtccctccggccaagaggtctaagggtggtgaaactccgtctaaggaaaaggcaccagttgacgaggtcattgacttttccaaggagcgacccactgtggatcctccagctcagaaggtctcaaaatccaagagttccagaggagggagctcggacagatctgaacaggttagggccccttcaacaaccgtggtgctgtgcacggaggccaagagaggcaaagatatgcttcaatactacctgaccggtcacttcctgaagtgagcgatcaactttccggagcagacagcgagttatccttagagctggtcttgggaagagttttgaaggaagttactcgagtaaatcttttttttatttccttctctttttagtggctcagactttaacacatttgctgtgcaggccaag

SEQ ID NO: 7712 - DNA, 1172 bp, Cannabis sativa
atcactgaataattgtccaattaaatgcagacatatcaagagcaaaaataataattaataaataaaattagtacataacaaattatttatgaaattattgataatatacatgtaaagcttacttcaaaataatttaacccgcataattgtaaaagaatgactaaaatataaaatttatgtaaatcttactacattaaatgtaagagttaaatataaaaaatatgtaaatttacttagacacaatttatggatatgattgtaagttggtaagaaaagaataagggtgttcatccaatccaattcatactattttattcatagtgcatttcatttgtactaaagtagcgtttgattggaggtaataaaatgtattagaaaatattgttccacgtagattcaatgtaaaaatattgagtcatgcatatacatatataagaatatgggctactccactcatcaccaattagttttgcgatggaacctcatgattcttgtcatgatatcagagtcatatctctagcggactttcgatccacacctacccaaattggttaaccagccgcacaagatccagatggtgcaaagacgcttgagatccgaacaaaaaataagtgagcaaatagcatggcttgtgataaggtgattcaagattgatgagcaaaaatagccaccatcttgaaggggatattggagaacattataatcacatggattaaatataaaagtattaagccatatataagaatatgggttattccactcatcactaattggttttgagatggaacccatgattcttgtcaaaatgaaatgtaaatgaaacaatttttatttcattccttaatttgtttggttgcattttaaagtattggaatgttattttactcgaatgatttttctatcattttggtggattgattattctattttgagattgaaggaatgaccattccaataaaaaaagagaaaaaaatttataattgtttaatcaatttcttttatgcattttaattgaatttcatttcatttctattcatattcttatatttttattattctcaaccaagtgtcacctaagtgtgaatttcgtattttagatccaattcaatccgcattaaacttgaaatctaatccaaatcaattctcaaaaatacggattggatcgattattt

SEQ ID NO: 7713 - DNA, 977 bp, Cannabis sativa
ataattttgcttaaaaatatggtaccgatcagaagagtacagtaatttcttagtcgcttcagtatttataactatactgatctatatatttcattttacaaaaaatttattgatctatataacacatacaatttaaggtcatgttaattattaaatttttttttttttgaaatttttacactatatattaaaatttttaactttatttttttactgtagggagaatttttttttcaaaaatactattatttttttttaaaaatactctatattgtgttacatttttacggttaattagttttttaattgttccgtttaatttttttttttttcatgcaagttatacaggtggtcaggctgaattattataatgtttttgcatgggaattttggtagggacgggaggatgaattggagagaaaataaagggtaaattgaataaaaacctcaagtcaaaaatgaaaaggatatatcttgtggtaatgttgttaaaatgttagtcttccaatcttataatggtaaaaagcaacttggtgtgaaggtgtggcagtgctattgcctagaaaaataaactcatcaccttctggattgggacaaatacccaatgaatctatacttgtctataattaagttattagaatcgccttgcactacaacatcatacaccaaaacccaattctcctcctcaataatatcaaatggttcccaaactttcaaaacggtgtagatggacttcttgctaagtggatatgattttgccaacgcaggcgcccattaaccactctattgcaagcagttgaaacccccaattccaagaattgcgcaagctcgtattgattgcttccaaccacataaggtaatttaataaacaaaatttatctttaaaggatcaaaagccacaactcctctaacgcctctcacaattccaatcattgtctattacaatcttccatttgcagctacaggtggttcatcca

SEQ ID NO: 7714 - DNA, 825 bp, Cannabis sativa
cagtgagtggatgtgaaggttttcgaggatggttagtacaagggtccaactgatgaatgagctattcaatgatgaagtagtataacattaacagatattatgatattgatattggttattaattcatgtcttattccagaatcctataacttaaatttaagattgagactgggaatgatccattattttgagatatattatacagttttgatattggacagaatgagcttcattttggggttaaagccatgttgatcataatattcgtagtttggaaattgcaggttttgctaatccactcgaagaatgtacaaaattgttgaaaaatgtccctacaaaatttaacccacttgaccttcttgtccaaagtaagcaaatattaaatagtataaaaagaaaatattattttagtacaaaaacagtttgttaaggcaaaaagccgacttcactggggatcgaacccagaatctctggttccgtagaccagcgccttatccattgggccatgaagtctgatactcaataatattaaatcataatttactttacaaaacgacagcatataattggaaagatatattatcttctgaggaattgtcactgaagttagtaaaaaatttcagagatcgtgcttgctttggtagtatatagtatttgttataatttaactaaagaaaatctggtatgattttgtctgtgtcttcttcatctaaagttagttttgatttggtccgaatctcctatggtttgcatatatacaaaccccagggtcggatcccattaggcgccacgccagcctacaacccaagctcaaaggccaaaaaa

SEQ ID NO: 7715 - DNA, 1195 bp, Cannabis sativa
  modified_base (559)..(561): a, c, t, g, unknown or other
  modified_base (1024)..(1029): a, c, t, g, unknown or other
tgaatgccacaaactgatgcacacaatgtttagtcaaataagaaacaatattctgttttgactacttccaaacagtcttttcttgaatgaatatctttgatttcaacttaaatctctagctaattctacaccagaaagaagcaacttaaaatgcttgaatgaatatctttgaagtgtaccttccttgaattgaaagattaaaaatgcaaatgaaatttcttaactgaaagattgacaaagattaatcaaggaacactagtaattaatagtatgaattaacctttagataagtaatgatgatcaacagcagagtcaagtgattttcttcttataatacaagtaaaatctttccttatcaactagtgttgtaatatcttttgatcacctatacacagcacagcctaaaacagagaataaaatgaagactttagattcattacctaataatgacacaattcgaataaagcttttaaacaagcaggaccacagataaagagagagtaataccgcctagattttgttgcaattgagaattatatttgggatgtgagcaataatnnnccagtcctcccctgtctccctctgaactcgtggtgttagtagtggacagctagtgatatgaagatcagaaagcgaagtgggaagttcttttggcaagcatcggagtttaggacagtaacaatcctcagctcctcaagggaggtgaggtgctgaaaggccgcctcatctaattgcataatgttttcacaaaacttaaatacaatcctctttaaactgatcaaaggggcctgcatgagttgatctcttgggagtaataacaatggtattagtttctcactgccatgtactgaaagatgtctcaatgaaggaaaatagtctcctgacaatgtcacttttttgagtctcttgcagctatcaaaatggagattcttaagacgaggaaaaactccacctttgataaatgaccactctttcagcttagacaaattctcaaattccaaggtctccaaagatgtaaagaatnnnnnngtttgtattgcaacagaagaagaagagttaacactagaagaataataaaactttgaatctattctcaccacaccacaatgcgaaatcataaggtctttgagagaaggcagttgtcccaaggatggcaagaagctgcaattatcacaatgcccaatattcaagctta

SEQ ID NO: 7716 - DNA, 1278 bp, Cannabis sativa
attctgtagcagctctccacccgtggtcccctccagctccaaatgtcctcaaactcaacatagatgcagcagttcattcaccttctaatactactggtgttggggctgttctcagagataatcatggacatgttgttgctgctttagccatgccattcatcggcaacttcaaatcacatgaaatggaggccaaagcactttttcacagtctcaattgggctcttcaacaacaattacaagtcaaccacattgagacggatgcacttatggttgtgaatgctttgcaagctcccttcaatccaaactcttctttttcagatttaatattagatgttgttagtcttttatcctttttccctaacgttgttgtctctcatgtcaaacgttcggcaaatgaagcggctcatggtcttgctaaatttgctttaggggtggatgaggcttgtacttggttggagattatccctcctccgatttactctgttattgtaaacgaatctttatttgtttaataatagcaagtattttccctcaaaaaaaaaaaaagactgagattgttccattaattaaaaaaaaaatattttagcaaaaaaaataaataaataagtaaaagttgagttttacttaaatatttttatatatatatttttaatataatataaaaaaaatattttttcatattttttttattaagtagttaaactaagcaaaaaaaatttaaatttatgttttattattcgttattagatcaaaatttgatgatttaatatttttaaaattaacatttatagttaaatctgtttagtaatgatttgggtaatacctattaaaaaatgatccgtatatatatatatggataattaactacacatcaattttgtaaaaatgtttaaagtttttttttttatatttttataaaattttataaaaatacaataaaacaataaaaaatcacataaaattaataaaaaagcatcaaaacaacaataaagtaacataaaaaaaaatatacaataaccaaaaattaacaataaaataacaaaaatctaaaaaaccaaaaaactgtattttatataaataaaatttcaaaaacaataaaacattaaaatctaaaacagatagtatttttgtaatttttttttattgtttttgtattttttttagaattatcccacatagagcaatagaagaggcccaatatgagtagtgggtcgaaagatattgggctgtaaaatggtaaatccaaatagactatggtatttcttctgcaaattaaag

SEQ ID NO: 7717 - DNA, 709 bp, Cannabis sativa
ttgttttatatctcgattatttgcctgcctctctttctctccctccccctccttaggtggggtgatacgcccagctattgagaatttttattcactgtttttgctctaatcgctaatatgcaaaatttgctactatctaatttcattatgaagtattttgttctctttgctagtgttttcaaggaaaacatttgtttgagcttttgcctagtttttcatgaaatatgaatgttctataccctatttttgaggactaagaaaaggtgaaaggtcttataacttttaagcttccatgtgaaaatcattatggaagggtccctttttccgtaaatgttctagaagtctcaccctgaccgattaccataatttgtcactacattggataacagggaagcaaatgtgtgcttagacctcctaaaccagccttgaagcataaggtgttctctttgaaagcatctaattcattcgggaccaagatcattggcggtttgagcctgccaatattagatctgggtttcaggcactctatcccattatccaaaggtgtttgctttgtccgttgaagttgaaatcctggtgaccttcaaagccactctttactgaattcccttgcaatataatatatatttagcacaaaatggtggtgtcattgtcccatttttatcacaatttgacttttttttctttattttcataccgtactttaagt

SEQ ID NO: 7718 - DNA, 703 bp, Cannabis sativa
atgcctaataagcttgtttgtttttatgtctttttaaacatagcttttggacatttcgatgcctcgaaggttgaagctcccttcttgtaatatgtttttgctgtttgaataaattgattcccttcaaataatatagttaaattatatatatatatatgggtgcactttttattgggtaagaataattgcagtaaaagtccctaaaaacttaagattgatgcaaaatagtttccaacctcaaaaattcgctctaatagtctccaagatcatgttttcgataagtctgtttgtccttttctaactgatccgttaaaatgacacgtgtcaattttttattggtacaaataataattttattaattaaaaattttaaaataaaataaaaagtaaaaaatatattttaaaatcataaatttattttatattattttttattttttgcttcttcttgttcatcttctttatgaaaccaaccagccacgagagttcgacaggagcaccaccacgaatcgtggcctccattttcttagcctgcggtgatcgaagcaccaccactatcgtcattctttactaggatctcttagttctaaatttatcttgtttaggaggtgaatgatgtgtattaaactctcattttggatcatgaatattgttgattggcagtgaaaagtttgagtttgaattaatattgtgattgatttat

SEQ ID NO: 7719 - DNA, 775 bp, Cannabis sativa
agccgtcatgtaaggctttattggccagccaggaatgctccggccaggttttctaacttgtcatttttttcttgtttgatctagcttaatagtcttgaaatcatgcaattgatgaacaacgtaagattaccctgtccggttattgacaggttgtatttcatgtgtctttagtattgtctatgcggacataccacatcaggtggacaaaaattaggataacaggtagcctatcatgaaaaaactctaaatttaagtgtgcttgacctagggtaatttcggtatgggtgacctcctagaaagttttcttaggaagcgggtgagtgaggacaaaacacgttgaaaagaatcgtgttggtctgtagggtcagtcatcattccatgaagcagctaagagtgacgtacccgtgtataagagtcattagttcatgaagaaagacccaatgaagacttgaagcaggaatgttacactacgtgaggtacatctcttatttcttctgtgtgtaacttctaaccaaagttgaaggatatagggccatacatttctctttggtgaagtttcccctttaggttatggggtgttccatttgatgtgacctcatgagggaaagtcaacttaggctatcttaactgacccgtatggcacctgtctagtgacaggtgtttcctaagctaatcttgaggtgtataactagtagagagcatggagtttttttttttcgtttgaagctaatctttggcgtgtcctttttacagttgaagagagagagagagagag

SEQ ID NO: 7720 - DNA, 545 bp, Cannabis sativa
aaagcggctggcccagatggttttaacccaggtttttatcaaaaaagctggcatattgttgggcatgacattgtgatggaggttcaaaaattctttgcaacagggactcttgcttcgggcattaatgatacaaacttggttcttattcccaaaaagaaaagtccttcttctttgcgggatctaagacctattgctttgtgcaatgtcgtctacaagattgtgacaaaagtgattgctaataggctgaaacatatgctgaattctttaatctctgagacccaaagtgcgtttgttcccgggaggttaatttctgataatatcctagtctcttttgaagtgatgcattatttaaaaaggaaacgaaaagggaaggtaggcttcatggctattaaacttgatatgagtaaggcatacgatcgggtggagtggccgtttctaatggctattatgttgcgaatgggttttgattcaaggtttattagtctgatttatgaatgcatatctacggttaggtatactattgtttccagtgggagagaagtagg

SEQ ID NO: 7721 - DNA, 732 bp, Cannabis sativa
attcattatgtatgaacagataaaaaacttgactgtaaactatctatgtgaggaacaagtagtgattgcagcaaatggaagcttgccaggaccaaccataagagtccatgaaggtgacacccttgtcatcaaggttgtcaacctttcaccccacaacattagtattcattggtacataactattataaattaattaacattatgtatatatatatttatactaataatgcaataattatttgttaatttctactataaaataatgtaaatatagttttgtactcggtcctaatttctatagatgagttaagtagtctacgtacgtcttccaattaaatatttatagataaatatattattacatatataactttctaatcatgatacagttacaatcactaataatataatttaaagcacaaccaattatatgtaataatccttctcaaaaaaaaaaaattatttatctaataatcaatttgttttgattagtattttaatctctacataattaatgaggagaggaggggattcgaacttttgaaatccttttttgtatggagaaatgtagtaggaccacaaaatacattttttttagagaaaataccacaaaatacatttagttgatacaataacaatgtatatttttttaatatttaatttaaatatatgtttttttagtcacaagtttttcactgattgttgtccctaaattttttttaaaaaaatatt

SEQ ID NO: 7722 - DNA, 1112 bp, Cannabis sativa
ttcaagttggtatcagagccaatctttgatctctatcaatggctacaccccaggatcagcaacctatcgaagaaggttcccagaccccctcagctgtcagcacaaacaaaaatggtgcatttgcatcacagctcccaaacactctatctcagcaacctactacactaaatcagccgttctctctaaaattagacagaaacaatttcacactgtggaaaactatggtttccaccattgttcgcggccacagattgcatggctacctaaatggtaccaagctatgcccacctgagttcattccagtcactggagaagccaaatatgaaggagaaatggaaaccaaccctgagtatgaacactggatcatcaatgatcaactactcatgggttggctttatagttccatgaccgaagggattgccactgaagttatgggatccacttctgctgcaggactttggagagcattggagagtctttatggagcctactccaaatcaaaaatggacgacaccagaaccttaatacagatcgtgcgcaaaggttctactcctatgggagaatatttacgtcaaaagaaaaattggtctgacattcttgctcttgcaggtgacccgtatccagaggggcatcttgtagctaatgttctttcaggtctggatgctgaatatctctcaatcgtggttcaaattgaagccaggactagcacaacctggcaagaactgcaagacattctcttaagtttcgatagcaagattgaaagattgcagaatctcaacttaggcagcaagcctaacaatccaaccaaccctcaagcaaatgttgcagctaaaaataatcctggatctcatacaactggtcgtggtcgaggttcaaataatcacaacaacaacaatcaattccatggcagtggaggtcgtttttcaggcaatcgtggaagtcctgggaggtttcgtggaagaggacgcaccaacacaaatcgaccaacatgccaagtttgtggcaaatatggccactctgctgcagtgtgctacaatcggtttgatgaaagctttatgggaacagatccaaatcaaacaaatggagggaacaaaccaactcagaacaaccat

SEQ ID NO: 7723 - DNA, 1026 bp, Cannabis sativa
ttaaatcctatactactcagagccttaggaattcaattaattcacttaatatataataatttatcctatataatttttatttttcatttttaaatacttaaaaaaaaaaaacggcaacgtcaaaacatgacataaagcattggtattgacataaatagaaatattcataaacttaaattaaaaattcaaaatattccatcaagtatattattataatatattaaattgttgaaatgtgttgtctacaagttagtagtttttttttttttttttgagaaaaaatctacaagttagtagttaacaataactaaattatgatttctttttaaaaagaaaaactaatatattatttaaaatacataaaataaaacattttcctaaaagatgtagattgtttatagaattataataattttttataatagatatttcctttatttgtttttacaaagatttttctttttgatatcatgaaaattttgaagaatgttattttttgttccaattaaaaaacaaaataaaaaaaaaaaaatttatttaaaagaatataaaaattaaaaaatactacatccacatatacggtggaatcttaaaaaataaataaatatttaaaaaaatggatattataaattatgagtgtagtgtgggaagagatagatacccacccaaccaaaagccacgaaacggcccacgtacgaaacgggtttgcttaaatctcgacccacatttgactaaacgtgtcgtggcagtattttattggacactttcattacccgcattactccacaaaagcagcttaatcccagccatgctgccgacgcaacaccacgtcactagccccacaccaataaagtaagagagaataatcctctgtactcggctccacatgttctcacttccaatttccacactcacaatttacaatacccagtcattactcgccacgtatgttcctcgctaactgacggcgctgccaataaaataaaacaaacacgatatcactggcctttttcgtaatttcaagga

SEQ ID NO: 7724 - DNA, 1475 bp, Cannabis sativa
ttcttaaaatttatattatcttcattctctcatatcacaatataacacaatttttagctactttttgacaatattagttgataaaatatttttaatttattataaatattttatgagaataaaatattcattttattgtgtatatcacgatttcatggctctctatttctttcaagaaactttgcataaaagagaaaaaattctctttatagaaagtttatttaaattagtttatttttagtataattgactctaattatattgtgattgaaaaaattagttaattgatatgtatatagcagatttcctaacctttttacggattgatttttcaattttttgcaatatcttacgatattgatcaataataagccatatttgaggttagaaatgaattttaccaatgattagcgataatttgtatatttagcaatgtatttatgatatgagactaaaaatgcaaagaatatcactaatcatcatgaaaactttagtgtgatttcgcgacatttagtgatgttatgaattagagacatgcagtgatgtatcgtgatatagcaacatttaataatgtttcgtgatatcgtcaaaaactaaaagaaaaaaaacgcaaaacacgagcgagttcagaaatctagtgatgagtagggatttcggggattttaggatagttgagcttatggatcttagggttttggggtgaagactacaagtagatcagtgagagagttagaaagagagactttttttttttaaatgtgaatgtatttttgagggaaaaatattaaaagtataaatatcctattatttctagttaagtgatatattaaaagaccatattttacatctaaacatgctatgcaaatttgtcttggacaaagtcttctactaagattaattgagtgggacccactcaaaggttagtattttttttttttttttttgcttaatctcaaaggttagtgccaaaatgattatttctcatgtttttacaacatggtttgccaacacaatgctctctctcaccatgcaagattgagatgacttttggctttgctcgtttactactgttattatataagaaaaatttgactaattatggatgcattaagccaaaaataaaaattagaagaataggtagacattttgttctcccctcaaaatatatctctccgtacgctccaagttcatcctctttccattttctttctctcttcactctcttctctcttacatcatcttctcactttctctctagccaaacactactacaaaagacacttttggtatcagttcaagtttcacttatttaaaaaaactgacactatagaataccttttgttttatgtcagtttttaaactgacactaaaaaaaatcaatggtgtcagtcaataaaccgacactaaagcctaaactgaaatttaaaagagttaagaaaaaaactaaaacacctatatggtctcagtttataacc

SEQ ID NO: 7725 - DNA, 883 bp, Cannabis sativa
caagagggcagaaaattgcagtgaagagattatcgaagacgtcgaatcaaggagttgaggaatttgaaaatgaagttacacttactgcaagactacaacatgttaatctaacaagagtattgggatattgtattcagagagaagaaaagatgttgatctatgagtatatgccaaaacatagcttagacttctacatatttggtatgcatatacagttttttctttttattgttctaacagatttgacattttctttcaaggaatttgcttgcttatgaatgtagctatcatacagatcctattagaagacaccaactagattgggagaagagatttcacattattgaagggataactcaagggcttctatacctccaagagtactcaaacttcaccattatacaccgtgatttgaaagctagcaacgttttgttggataatgacatgaatcctaagatatcagattttggaatggctaagctcttcaaaaaagatgagattgaagcaaacacagacagaattgtgggaacatagtaagtatgaagatagatacttcttgagtgaaaaatctcacaagcttttgtttgtgttaaattctttttgtatgcatattgcagtggctatgttcctcctgaatatgtaaaaacaggaacatactccatgaagtatgatgtctacagctttggagtattacttttgcaaatcataagtggaaagaggagctcgcgttactatggaacaagcgaaaatttgcatcttttagactatgtaagcaaactgaagacctattgactactatactatgatccaaatatgatcaatttaataagaacatataatttctataggcttatcaaacgtgggaagttggcaaaggagtgga

SEQ ID NO: 7726 - DNA, 1422 bp, Cannabis sativa
tagcctgcctaccttcaggaacgaccctgtgtgcagataaaaaatatttatgaaatcaataataatttatagctcttgaagattaaatactaaatatgaaatgatatatgtttatcaatttaaaatttaatgctctaaaattaaatgtttaattttggataatatgagcatgagtttgtgttgataatggttgataatagcatgctcattatgtagtaattttaataaaactacctaagagcatgtttggaattattttttgttttttgtttttaaaaaagtatttttagaaatgagaacaaaaaatagttttcaaaacacaagttgcgtttaattagtgttttttaaaaacaatattgaccaaaagtgatttgttttttaaaacaaaaaaataatattttgttgttttcaaaattcgtattttttgtaactttattttttaaaaactatttttaaaaaataaaactaaataaatctaattattttcaaaaaataattttctatttttaaaagcaaaaaaacaattttttagttataatttcaaacatatatacattaaatttctggtgcaagttgcattaagcagcagccagcttggacttgcacagagatgaaatgagcaatctgcaatcatatctccattcaattatttttcccatttctagtcattaatatttcaacaattataatgccaattgatcattatatgggattaggcctgaatcattaaattatatatatccaaattattaatgagacgatgattaaattaagcaaattaattatagggaaattttcaagatttgttctcatgaaaacattttgaacaataatattggagaagagatcttatgtttgtacctacgtaaaaactagtgaatttggcatgaataatataatattataactttaagactctcatcatgactcatacatgtatattgctgcttcatatcatcctgagatttttccccctcaatcgaggtcgtaattatatatattatatatatatatttatttatatcaaaatttaatttttttttttcaaaataaataattacttacttttgtaacaaaagtgttggttcatgtatcctaataaattcaacaaaacataagatggcaacattaataatggtgaggtgaaaaatgggaacaaaacaacagtataagatcattaattcaatataatggtctaacttgcttggtgaaaaaactgataattttaacttgttaacaatactaacagttaataatatatatgtattcattttaagttaaaagtgtttatttttttaataaagattaattaatttaagagacaaacggctccttgattgacgttaatgtagtaattagtaaaatcacactttaattaaagaaacgagaaatcatgcaccgtttcattacagagttttgttt

SEQ ID NO: 7727 - DNA, 1124 bp, Cannabis sativa
ctttggtttcaatgacaagaaaccaataattcaatttgttatcttttatatatttcatcacttaattgttgcgcccaacatttttgtttgaaagtaatgtcatataaaaatagacacaaagccaaaagatcgaaccagtactactgaaaataaaaggtggacgatattaccgaatgaagtttttcaaattaagtcgcgaactaagtttttctctttaagaagtttgcaacactgttgagaaatgtgtaagcagttgaaaattgccagttgtctctagggtaaaacaacatggtagtttactgtatcgggtctccactgcactgtagaaaaccgttgaatacaccctcaaagtatgatatcgcaaatgaaatttttttagtgaaaattgtgtttgtaggtcaagtgtgtgttctcactcattacacaaaactaagtatcatttggacctctattccaagtgtcataattgcaagaactcacatcccatgtgagactatctctagggtaaaaattctttcacttttaaaaagttccaacaagtgtcaagtacacataagtacctcactcaaatgcaactaggaagccccgatcattaaacctggggagcttccattgttatagcaagttgagcaagagcatgagaggtgacattactagccttagaaatttgccaaaaagaattccaaacctgaaaagtatcacttagaaatacccatattcaaaataaataatttcagaagagcattggaccaaacttttttaataataaaaattgaaacttttttaatctaaacgtgctctagtgtaaaatccttcctattttggagcaattggaccaatttaattaaaaaattcttcttttagaaattggaatttaataagggcccttgaaagagaatgaaagggattacacgagttatttccatataaaaataaaaaacaaagctttgcctatacgattcactattcagagtgttcgaaatacttggctttgtttgtataactacaaaaagcttgcgcttttgggtatttgatcggttggggatggcggaaaccgaagtgggtcaaagctcaaactcctctttctctgatcaaacatgggctaagcttggtaagccactttc

SEQ ID NO: 7728 - DNA, 961 bp, Cannabis sativa
aactgatttaaatgatgtttctaatgagcctgcacaagaaacagtacctatagctccattccatcctatggtcacaagatccaaggcgggaattttcaaacctaaagtttatttggggcagtcccaatggaattgtgacaatgaagagcctactaatgttgaagaagctctcagacacaaaggttggaatagggccatgtcgactgagatgatagcactcaagagaaatggcacctggatcttagttccaagatcggaagggatgaacattattggaaacaaatgggtatacaaggtcaaattgaatgctgatagtacttttcagagatataaggcaagactagttgccaaggggtttaatcaaagaccaggaattgattttggtgagacctatagtcctgtggtgaaggcctcaactgttcgaattatactaacgattgctgttgctaaatcttgggatattagacagcttgacataaacaatgcattcctaaatggggagttgcaagaagatgtctacatggagcaacctcaagggtttgtagatgcttcaaaaccagatcatgtgtgtaagcttgttaagtctctctacggtttaaaacaagcaccaagggcttggtatgatagattgaaagcaactctcatcacttggaactttaaaaattccaaggccgattcatccttgttcttctacaaaattccagggttgattatcatggtgctaatctatgtggatgatattattgtgacagggaacaacactatcaaactcaatcagttcattaacaaacttcatgctgagttcgctttaaaagacctcgggcccttgcactatttccttgggatcgaggttcatagagatgagacaggtctctatctcaatcaaggaaagtatgttaaagagctcttgactagaactggaatgatgcatctgaagccgtgttcaactcctatgacagtc

SEQ ID NO: 7729 - DNA, 615 bp, Cannabis sativa
tacctagatttgccatccaagctcaataaataaatttattctagccttggcattagcctcggtctcttcgagtttcttgttggcttcatcaagcgcttcctgggtcttttagttagtttcaatgaggtcattggcctttttagggcagcctcgagcttagtcttgagagttttctcctattctttagccttcttttttaatcgagaaatctctgactgagagtcattccattgcttcacaatggctttgcgttgttcattagacctacgaagttttgtgcccaactggttgatactttgaaagccctttagttgagccacatgagacaaaaagatgtctgcaaaagaataaggtcagaagaggatatataaaagaagaatatatgaaagaagatgtataaactctatgtaaaagaaaaagaggctaactaactgaagtaaaagatcagcactcctcgctgtcagactttggaagtcacctctattgatcagatcccaattatcttgttgaaaagacttataatgatgccaacaggtttataacatactacgagcaaacttgcaaaccttcaatacctacaaaagttggtagggggcaagaaggatctaagagcac

SEQ ID NO: 7730 - DNA, 871 bp, Cannabis sativa
ttcttccttagggattaggagttgtgtgaaatcataggctatgcccattgccataacactgccttttttctctttctattttttttgttttgttttgtttggatgcaatccatttctgcatatttttattgggatgttcactctctccttaagaaaataggaggatagagttacttatatgagctgagctcaaatgcaactgaagcaaaatagattgccaaatgctactctgaacatttggatttgaaaaataaaaacttgggtctaaaagtaatttgatatttataaatacgataagaaagagtaaatgctctgtattttattaaaatataaacttgctaccttatacttttaataatcatcattacttggtaccctctaatagcaaatcactcttggtactctctagcaaatcttacacttataataggtgacgtttgataggtaataaaatgaaaataaaataatttttatttcattcttttatgctgttgcattttaaagtattaaaattttattccaataaaatgactatttcattttgaaagggaagaaaaaacttccaatgtaagatgagaaaaaatcaagaccgttctaatttgctatgaagtactcgaataagtttcaactaagcacgcaggtgagctatcacttgaatacaacaaaactgtcttgggcattatgcttctttagcatcaagaataagctagagaattggtgtagcagcatgtgcccatgtgatctcaggacgtcacttggtgcacaaccgagttttaatcaccatgagcaagtgactttctttacttgaatcaactaaaactaagtgttattcaatcatgctatttcaccaacatttgggaagtttagtatc

SEQ ID NO: 7731 - DNA, 919 bp, Cannabis sativa
ggggaacaagtgggtgtatagaattaagctgaattcttatggatcactttaaaggttcaaagcaagattagttgctaaaagcttcagtcaaatatcacctggtatagacctatggggaaacattcagtccagttgtgaaagcttgcaccatcggaatcattctgactatagatgttgcaaaatcttaggatgttagacaacttgatataaacaatgccttttaaatagaagtacaactgaagattacatggcacagttggctggttttgcagacaaaggtcaccttgattatatttgtaagctatctgaatctctatatggcccagaacaatccccaagggcatagtttgacaaactaaaacataccttgcttgagtagaagtttagcaactctaaggctgactcttccctattttcctttaaaaatgccactgatattgtatttgtgctcttctatatagatgacataattgttacaaggaccaattcgaaaaatctcaagcaattcactataagctgaacaaatttttttccttaaaggatcttggcctgctgcattattttctgggagtcgatgtatacagggatgatactggtatgtacttgtcacaaggagagtacataacagaattactcaagaaaaccaacatggcacaccttaaaccctgtcctactcccatgacagtagggaatgttttatctattcaagatggtacactatactagaaaatcccacaaagtacagaagcttaattggggctattcaatacctcacacacaccagacccaacattactttctctataaataaactaagtcagtttcttaaagctccaactaatttccactggtctgtagcaaagagaatcttaagaaatttgaagggcactcaagatcatggcttgaatattaaatataa

SEQ ID NO: 7732 - DNA, 804 bp, Cannabis sativa
  modified_base (144)..(151): a, c, t, g, unknown or other
agttaaatttaatttaaaatatatcatagagttatatttagcctattttttatatttgtgctctaatgtacaaggtacaaattaactataaaagttaatattaccattaatgttcattcaaaatatacaaaataattaattttnnnnnnnntattttaatatcttataaatatatcttattcaaagttatagtattaatagtgacaacgaggtaattaaaaaagtagtatttattgtaggctaaaatttagctcatactatcttttgttcaaaatttggcacaatttttaatttgggctacatttggaacacattagagttaagttttagcaaaatattctaaaaaatagcaatacaccatatttatatctttctataaaagatactcttagttatttatgtatatatgattcaatatttaattacacttataacaattgacaagtaaaaaagtaattagtacatttagcatttctcataatattatgctgactttgattaagtggtgacggtggccttgaattgtaattaatgattacttactttactttgacgtgccttcctcaccaaaaggaagttgggtttgggtctacacacaagaaaaaaaaaattatcccacatattaggtttagattactttagtgttattctaattagttgtaatataagttactattgtagattttttgtaaaattataaaaaatatatattttaaaatgtaaaaaaaaaaataagcatcaatttcatctaatattattctcctaataatattttttattagtacaactaattataaattaaat

SEQ ID NO: 7733 - DNA, 937 bp, Cannabis sativa
tcacaaataatactgtcgtataccactatcagatacttggtctagcaatttgaagcccaacattccctgtaacttaaccttcaaccctttttaactctgcaattatcatccaatacagaactttacatataggttttcctcctagcatcaattcaattcaaaatcaatcttccacttcggtagtaaccctagtagcttatgtagaacagtatccagaaactcttggatcataagattgtgtctcggtcgcactgatgttcctttcgtaatatccaccacactaactaagaagtcgttacatttattcaataacaaacttcttacattaattgttaaaattaatgggattcaggacccttgattctttcccataagcacaaatgggtctttaccttctgattcaaaagttaccatttttccttcacaaccgatagttgcactataccttgcaaaccaggtcaaccctagtataatatcaaaattctctaaattcagctcaactgaagcaaccaactattcccttgcccacacaactcgggaagggatttaactacatgctggagaataaccagttctctagtaggctaaaagatatcagaagtactcagtaacacaccattaaattacacaaactttcaatcatccttccattcccgttactgtaaacgtgagaagtttctttttaaatgttctactaccccacactagaagtaggctctcgtgtagcattcactttgccagcatctcttgcatctcgatcctgtagatagatttataaatcttcattctcaccacatcagaagtttggttaccttaaattctattactagaacacgtaactgataggttgttagtcattttccttgagttcattagggcctgcacccttatcagatctagcattggatgtttactttcatgaatctttcctcatcct

SEQ ID NO: 7734 - DNA, 854 bp, Cannabis sativa
agttaatttagtagtgagtctaacattaatttaaattcaaataaattgatatataactttagcttactttttataatttttatgtgtatatgccttatttggaggggagtttcatgtgacacaaaacagtagtcaatgactgtttttttcttttaattttcaactgtttttacatataaatatttaatttttatttatatatatatctttatttattttttatttttatttattattatgagctttcttaaattattcccacttccccaactccccaaactttctctttcctttaagtacatcttcacatcacatctctctctttcatttcaaagtaaaaaaacacaaaacacaatgaagcaaaactacttcacttatcaatatcttcttctctttctcttcatctttctcttcattatttcttcttccccaaaattaacttcagccactttcttggcaaccaaacatgatggtaaaatataataattaaacccacttttatttgtatacatatatattatgatgataatattttattaattattctagctaaatatttatattatttttatgcaggaatacaaaaggagcacaaactcaatattgaagagttgggaatgagaagtgaatcacttgatgtatgtctctttaatattatatatttatgaggctaatttttttatttgattatttaattattattattattattattttggtaatttttttaggagttaatgggattggaagattgtctaaaggaagaagatgaagaatgtttaaagagaaggattattgctgaggctcatttggactacatctacacccaaaaccacaagccttgaaataattat

SEQ ID NO: 7735 - DNA, 788 bp, Cannabis sativa
gatgacgacgaagacgaagacggccgccgtgacctcgacgaaagctccgtcatcggactcgatcagtgcgttatcaattcgtaccctaaatttccttacgagagggacgttgcgagcatcaaggagtccacgtgttcgatctgtctttgcgaatacaaggactccgagatgctccgaatgatgcccgagtgtcgccactacttccacctgtgctgcctcgacgcgtggctcaagctcaacggctcttgtcctgtctgtcgcaactcgccgttaccaacgccgttatctactcctttgcaggaggttgtccctctttcacagttcgctgctgaccgtcgacggagtaggtgatgatgattgtgccgttttgtgggttttctctactctttttttttttctctggttggattatttgggtctaactcggcggttgtttcactcgtttggtacgggaactgtatatctttttctttgttgggtttggtttgagattgaaatctggatatggctttgaaacaaatgagtgttattagttttattacatgaaatccaagttattaattttgctttcactgttacatatatgctttgtttattaagcagtttcttttatataatttactactttcactaaacttaacggtatctttttcaatatttaaattcatttttctttctttctggggttttcttcttcttggcctttactgcttgtgttcaacttattatattttaaaatatatatttatataatatttgttcgaaagtagtatatatatttgctactg

SEQ ID NO: 7736 - DNA, 545 bp, Cannabis sativa
ttttctccgccaagatcctcaaattgcagaggcagcaggcctttataccaagtttctgattcctagcatatttgcttatggttatattcaaaacatgttaaggtttcttcagacacaatcagttgttaggcctgcggttttgttgtcagcaatcccactggtcttgcacattggtattacatattgtttagtacatttaacacctcttggtttcgtaggagctccactagctacctcaatcacactctggttatccttttttatgttggttgcatatgtcatgttctccaaggaatttaatctcacttggcaaggattttcacttgaatccttcagttacattctcacaaacttgaaacttgctcttccctctgcaactatggtgtggtaagtgtactatttaacactcaacacgacaacatgacaccctataattgttaatgattccgcatattttctattaaatcaaaatgtgttaagacccaacattgaaatgcattaatggtgcttccacctttagatacatgccccttctcattttcttt

SEQ ID NO: 7737 - DNA, 737 bp, Cannabis sativa
atatatatatggccatttttctacacttacaagtctccataaatactatagactttttttcttaatgagataaatattaaatactatatagactttgataatatgtctatatagtctagaagaggagagagataactttcattttaaggcattagctattattattcttgtgtattttgtattggtggggaagagacttttgaggcttctcattttgactgaataaagctacgaagaggtgggaccgtggggttgggccttggggatatctagttgagtgggttgttaacttatccaaatccattcttatgagatttttttttctttctccgcctgataattgaaatcaacatctaacacagtatatatagttttacacatggctttttcatattcaacgtataaagtactaaaaaaatatcatttatttttaaaagcgacaatctttgctaaaagttaaaaaaaaaaaaaaaaaatttaaaagatcctcgtgtggaaccatttaatatttatatatagtacaatagcagtcatggttaaggaagaaatatgatattatatgtcttattggtaaaaatgctagacaagagatctcttctactaaaagtcacttttggagttgtataatagatatcaattattgcttatatatataaaatcccttaaagaaaatatttattaatattttactatgtttatcatattttcttagctagttgaaaagaaagaaaaaactt

SEQ ID NO: 7738 - DNA, 667 bp, Cannabis sativa
ataaaagtgagaaatgaaaggatacaactccttaacttgaaccatgtttttctattcccaactatcttcaatgctaatatagctttgaacactgaaaaatgaaaaagagaaactcaaacaaacccagttggtgtgagaatcaatggcttcttgggctgctggtgatttttttgatgatatttttgttctcactttgatgagatgattattagtgtaaatgacgtccacgttgatatttgcccattttgttacatgtgatcttcttctttctttctcttccatttgatgttttgactttgacttttcatggttcttaacggattgtattatacggttgagtttgactgctccttcggacgacgtcgtttgaaacagtacataacagacagagatagcttaaaacgcgttattggagaatgttctttgtaacggtaacggtaacggtaacgccgtaatggtgatggtgtgagtgtttgttttgtaattttgcaactgtggatagtatactccgtccctaatgatggacggtgctgattggctgacattttgtccataaggtgggtgggtgggcattgcattggcattgcattgaatgttcctgagattttttttttttttttttgaaaattgagatttttttatttaaatgataaagatattattatta

SEQ ID NO: 7739 - DNA, 695 bp, Cannabis sativa
cccacccacccttacatcttgtaaaagacatttaatatgagcaatgagaccatctatatttctacagccctcctcttcttgcagcaccaaattaactgcttgcaagcagtcggtctcgacagtgaaggaaggcagtcgtgtgtgtatgccagtttgaagcccagccgagattgcagctagtatatatatatatatataagtatgtgtcattttttttaaaaaaaaattacattctatattattttgatttttacttgtattttatattatttaagatatactcatttttatagataatgtcctaattagattctttaaattaatataaattatatgttagatttaaatagagaataaaagtatattaaacaactaatttataaaagtaaatatattttaataaaatataatataaaaatatttttcaataatgaatataaaaaaaaatatttatcaacttatcctttttgttttcttactactttaatatttattaaaacatcatcactactatccttcccttaaagattatcatatcatcacttgtaaaagcaatctaacaactataaattcctaacttatatatatatataaaagattataataatttttttcaatgaaaagtcattttattaactaaaaactttacccaccaaataaagtagcaaataagttaaaatactctccaaattaaa

SEQ ID NO: 7740 - DNA, 1010 bp, Cannabis sativa
ataagagagcttgccgccgcaagcggcctggttagcgccctttcctcccgcgagtgtctgccctgtctttgctgaaatggtctcaccctccgcgggaagtcggtcgatctccacgtagatatcggcattggccgaacccaccacaaccagaggcggtgagctcggaagtggggttagcggagaaggtgtttctgatcgatttatggctaaacaaggaaatggggttgttttatttaatgggatttggtgattgtagaagtgaaatcgagtattggcgttgaaagatgtttggttaattgaagatgggtttatcttgggttgggggcaccattgatttaatgttgaaaaggctattcctttcattctggggtttgttgttgggagttaggaagatgaagaagacccttattctggtcccaacttctttaactattcttaaattgaccaatagtttatagtcagactggactccaggtggaacctacctacattttgttcttatccgtttttattcttcccaagaatcacatttccagttactaatttcataatgtcgtttagcatactctccggaataatgtcgttgtagcgaaattatgtcgtttccctgaatgggtatcgtttcgtttttccaaaatcatggaaatagtaattctagtttgcatacccaggaaaaagaagtttctagttggcatttctttaataaattatttatttaattattgttttcatacccgaaactcacactgcaaattttgaatcaaaacaataaaataaaataaatgtaccataaatttaaaaaactggtatattttatattatgtgtgtgcaattcaattcgttttttaatgatttaaaactgtaaattgtactgtactgcatgatttaaaaaaatactaactataattatactgaatttcaaactgcaatttttatacagtgggaacaatttttacaatgtgatgctttgatgaccagccctaaattatcatctatatatctatataatt

SEQ ID NO: 7741 - DNA, 595 bp, Cannabis sativa
ttttttttttttaattttctgttttgtgttttaaatatatttctccgttttaggttgtgtccgattttgatttcgaggatgaagttcctgatttggatttgaagcctaaagtgaaatccaatgtttgtatattaattctttccaattttttgcttttttaaagttgtaatttttgatcctctattttttttttttatgttttttctgtttgtattcatggtgttaagtattttcaaatttttgtgtgtatttgtttaggtatttcactttaaattatttttattttgtttttaagtttttttttttgttctgtttttgttatttgcttgtttttgccttattgaaccaaataattaattattactgttttttattttaattttttttgattagttgtttcttaatttcaaatatattttttcagagcttttgttgttattgttttcatttttgggagtaggaaggttttgtggttcttatgatttttttttttttttgtaaatcgtttttagatttctgttttagtgttttattggtttttattttaatcagttatttttatgtatttttccagttgttttagtgttatttaagt

SEQ ID NO: 7742 - DNA, 1090 bp, Cannabis sativa
taaaatttacttgaaagacataatattcactacaagtatgaaaagtaggagaagtgaacctctaagctacatgtatacaagtagtaatttcttcttcatcaattctcaaaatttaagtgcaatttaaattaatatacctgctaccagtaatacacaaatacaaaatgctaaaaacattccactacaaaaataatataagggcttattagtaatttacatatggtgtaaaaacttataaatatgtaagtatgtagttattatgtaataatcaatagtcttgtgattcataagaagaaatactctgtaaattatgcaatcctacatcgctaagggaatgtaaagtaagataattctgagactatttagatatgagactacatagttgaagataacttaaatagattaattaatactacctacatataaaaacactcatataaaaaaaacacaatctctctaagaaaagcattatctttgaatttttcattatgtttgaatatttcatttggaatgatgatttgtttaactttaaatggaatctaatattatgatgatttgtttaactttaaatggaatctaatattgataatactataatagtgattgggtattcatattgctatcaaaatcaaaatatggcaagaagtttattgtattgttttcttttttaaaaatgaatccaaaatacaaatatatacacgtatctcatatccacctaccaaccaagatttaaacttaacaaaatcagagaagtgcaactaccgtcctcgacaaaaagaataaaaacatacagagagaagagaccttcgaagaagggcgagggtggttggtagaggcagttttaacaggtgctgttcgagataattttttttgcaactggtggttgttatcgactccgtaacactagtactataaattcgtgtttacgaaaactgtacagtcccttaggacccgtttggaacacaagattagactgaaaatgattagattagaatggactagactggacaagattgaattgtgctaaaagtaatcatgtgtttgtttaagaataaactggactaatttatttaatttattttttaaaaaa

SEQ ID NO: 7743 - DNA, 649 bp, Cannabis sativa
ggttgtttgttgctgttggtttggatatagcagcaatgtcagcatgtggaggttgagaatcaatgtgttggactgtgatatcagtttgaatattagagttgcattgtttggagttattgtcaaccgtatgagttgttgtaatgttggaaggattggtcgaaagtgtatcagcaacagcaaggtctggtgtagtttttggagcagcggagatgataccaggtgcttctttagcttgctgaattgttgctggtttagaaataatgccaggtacccgatggggtgtggatttaatgtgtgtattgagtgatgttttgggaaatataccagtggaatctggtatattttgtgtgtttacccgagagagaggttgagacattgggaggcacggttcttgaaaaaaactgtgaatgtgagaatgagagatgtggccaattagaggaaagattgtttcataaaagacaacatctctagagtgatatggttgttttgtctcaatgtcatgaagggtatatgctttcatcccttgggggtagccaatgaagattaaagcacggcttctagggaaaaatttgtgcctagaagatgggagagtagaggcataagctaggcatccaaagcacctcaggtggtcatattgaggaggtttgtt

SEQ ID NO: 7744 - DNA, 910 bp, Cannabis sativa
cactcgtggtgagtgtgtgtactgtcctaacccaggtaccctttggaggccctatcgcaaatgccaaaattgtaccttatataaccttatcaacaagatctcatatcttatgtggaactcattttatttcacacactaggacactctcattttgtcaaaaattcattaactttgtaaaaagttgcaacaataatacctcaaatatcccttttattattgaaaagcagaaaggacctcaaatcacaccacaaacacctttcctattcatggtcaattgataaatagtaggaatgaaaacattaatggagggctatgaattgttgaacatgaatgaaaataattaaatgaaactaagtggggtcagagttaagattagtgtaaacacattgacttatcaagtcaagaaaagccaaccaaatcttcccttgttgggttgggtatacataattcaatattggttaacaccgatgagtggtctagagctggtataaaagtagcagaagagattgagaaaagaaaaaacgaaacaccaaataacaaaattgttgaaaggctttgtatcttttcatttgtaatctaggcaacattgttacacccgacccgaaatttcaaatgaaaaaattacacgagtaacaaaagaagaagaaaaaggaggagaaaaaacatcgattcactaagctgaggaattaatagagcaatattactcatctgctactacagaacccaggacttgttacagagttttaaggtacacttgcagccttgtgaaatgctgcaaagaaccttgtaagaatccaaacaacaaaatgagaatgctaaacttcgtacttgcagaggttttcaaagcccatgtattcgtgctgtgaaatcttttcgatcatgtttgagattccaaccccacctagaaaag

SEQ ID NO: 7745 - DNA, 1243 bp, Cannabis sativa
  modified_base (253)..(254): a, c, t, g, unknown or other
aaattacattaaaatattttctaatttaataataaagtttagttatctttaatgacatttgcactattaattactcacatagcaatacagaattttttacttttagtcacagtaaaatttgtgactaaaaaattgtgactaattataaatcatcattcatatcatgttgtgactaatatgttagtcacaaaaattacactttattgtgactaaatgtgtttttagtcacaatatttattgtgactaaaattannttagtgacaacttatatctaaatactatattttagttagatataacctcctttgtgataaaaaaaattatctctaaaaataactgttttttgtaatatgtgtcttatgtctttcatcacaaatgtcactaaaacaataaatattactaaaactaaattatagggacattttaaagtgttagtaaattataagtttagtgtggagtgattcctaaaagaaatgaagacattttaattaaagatagagcttgtgatacaataaagagaaagtgcaaagaactgtgtttgtggatatatatgagagactaagacaacacttgaaaacaaaagagtcacaaacactacttaataaatatacagatctatataatattctctgcataacaaacagaaaagctcattttgatttaagaaagttttttcctaaattatttcatataatatatgttttttttttaattattatttcaaatggatccttaattaattcatgtatgatatatattgttattttttagagagtttttgataaatacataaaaacaacaaaaaaattacaataatataattgcatatattattttcatcttgtttttttattacttattttgagtagtttttttgttattttttatagaacaccgtagaaatataaaatataaagatatatatatttgaacgtacgtaaatatgtaaaaattttacaaaaaatataatattttgtataaatttctcttattttaatccaaacaattcgttgatcacttaaaatcacaaagataaatgatcatataaggtaattaataacctaaaagaaaaagtattgccaaaaaaaactgcaaagaataaagaatataacatttactttatatattagttttaattaaaaaaaaaatcataatttccattgatcgagtacgtgtaaaatgaacataaaaagaaaaggcatatacaaccaaattaaagattttttcttttctttttcttttt

SEQ ID NO: 7746 - DNA, 1782 bp, Cannabis sativa
ttatccattaatatggctgctgctatgacttttggtagctggtttgagtctttacataatgcaggggacaatgatgttgtttgtcgtgctgctatggtgtgttgggcggtgtggaaagctcgcaataatgtcgtttggagcaagcgaatttcaacagtgaatgatgttctagtttttgcatcagttactcttgaccattagagaaaagctcaggataaacatgctctattatcactctctttcgagaacaacgttgatggggctgagctttggactaaaccggtgttaaatcacatcaagattaatgttgatgctgctctattctatcaagacgctacacacggcttcggtattgttgcacgaaacaacctgggacacctaatcgaagctaaaacattcagctcgggtggtatttattcagctgaagtggtagaggctttggtgatcaaggaagctcttagttggattaagagcaaaaattggcataatgtagaggtcgaaaccgatagcttattgactgtccaagccatccgaagtaatcaagaaatgtcctccgtctttggattaataattcatgattgtcgatctttattatcttctctacatgatgtaagtttacattttattaaacgatcagcgaatcgagttgctcacgcagttgctaggcattctcgctttctttctggctgtagcattttcgaacataatgtttggtctgacttaaaggctctcttgtattcataatgcatttaattcaatgaagttgatatttcatccaaaaaaaaaggataagaatcctccaaaatccaataagagactttaaaacaataataccactgtccagtagcattagtccctcaaaatcaagtttaatacgattccatttgtctcattccaatttcaactatccctcacactctttgtccatttggtattcaaacactataatacttgaaatcaacaatgtaagctcatatatcaaccccaaagctaaaataaacaaatacaccatcaaatcaaaacaaagagacatacaaaattctcgattcttcgcaaaacacatatagtttacaaacttaacagacgtgtagccttaaaacaccctaattcacaagaaatgaaacctaaactgcaaaattcataaactgaaaaacatgagcatgtatacataattcaaataaataaaatcaaggagaaatggagagattacccacaaatcgcttttcgaagaaaaccttaccaaatatgattgagaggaggcatacaatagagaatcaatcacaaaaaattatggttcccaaccccgaatgccatagctgaaacaatgagataaaaagctagagagagacataaatattgaagcaaagctactgaatgagcattgagctcttgaaggagaaaggaaaggactcacgtcgagctattgaccgaagataaaatatcacagaacaattaatcctttcaaaaaaacaaattaaccagtcaacaaagggcaaattgaccaatcaacagaggacaaaattataaatacttaattttacaaaggacaaaaatgtcttcacaactatcatctcattaccacacttttataatagtaagttattttaaaatgaaaaaaaaaaattccttacaaaaagaaaaacacatgttgatggcatgggagtaattcctcacctaaaaagaggtcaaagttcaccaagtcaacgatataaatagaggtagaacctccttcttcttcttcctaatttcgtttcatattttctctgtaaaaattaaaattaa

SEQ ID NO: 7747 - DNA, 2077 bp, Cannabis sativa
gttaggcgcgatgtacggtccgattcctttccacaaatttctaacttccatttttttgtattttttttggtagtcttcagaaccaccataccttatacttctagtgtcagaccattacaccgagcgtgtcacttagcagggcagtagttgatattaccagaagataaaatcaaaatttaaggaattcgaattgttggaaagggtgaaggaatcccctttcaagtaattctttgagattgcgctataatagtttttgggagcacttatccatcagttgttcatgcacaagatcaagtcagataaggtagacgaagtgcacttttatatcgcaaagaaaagatacaaattcacccgagctgagttcaacctggtgactgggcagaacttgttacctagacctactaagtccaaaattcaagagaagacaagtttgaactgatcgatagtcgagtatttcaatagggatccatccatctccttgggtcaattgcgtagagtctttaagagttgcacggaaaaggatgatgtctacaagttggagatgaccttatttgtgatgggcgttctcattgggaaagaggagaaaaccatcgtttttccatttattactagaagggctgacgaccttgagttcttcagtacccgtgggggaagatttctttcaacatgctaaaaaaaacttggagtagagacttcgtagaaaagaagaagcatatggatgagaagattcaaaagggaatgacttataaggagtcgaagtactcagcctatggatatactataacattgcaatattgggcttacgagtctatcttggagcttggtaacaaatttgcaatcaaaaaatcacattgctttcccaggatggtcaactaggagagtaaggacgtgacactcgacaaggaggaagttattcaattgttttccgaaaacgtaagtttttaattctttgtatttggtcacatttattattttatttcatttcaatctcagtctaataattttttattcttatttgcagttgacagtgtactctattttatgtccatgacctaataaagaagagtttttcgtcactggaggtaaggcgcctttatttgtggatttggaagaactggtgttgggtagtgatggataacctactcaggatagtttacgtagccagtctgagaagcttgcacaaacattagaagagtgggcaaacgcaacgcaaatctttagcgaggatacacaccatctccaccattagaggctcgttctattcccacattaaaatttattcccccatcaacatctatgcccccgtcagcatccatgcccccgttagcatctattcccagcaccttagaggctcagtaatcagtatactctaccatcttggctagattgaagagtgttgagaggaaacatattgctttgaagcaaggccagaatgttattttgaaagggtagacggagattatgggttgcttgaataacctaatgacactcatggaagatcagagaaggtcagatgcaaaggtagagtcgtagccacaccacgagtctcctggagatgatttcattctcttaaatgactacagacctgatgatgcagatgatgttctccatacacctgagaacatgcacatcatgcttattgaagatacttaagactctgatgtccaagttttagacacagctccaccatcagtggagaagagaccaaagaagagaccgatgtggtttgatgagtacattgaaatgaagaagaagtcgaagccatcgattgtaaatttgaatgttgacccactttgaccagttgataaaaagttactgttgagtctctgaaactggtgtacaggtgtcattgggaacaagtgtccaagggagtgcttctctggtatacatgacccgagttggttccagaagctacttgctaataatgaatgactttctgataatgtaagtttcttaaactatgtactatttattactttttttttttcatttaatgtgcttatttctgacttatttgtatgaattgtgtagcatatggatgcaacatttcacatgatgagaaggcgacaacactttt

SEQ ID NO: 7748 - DNA, 864 bp, Cannabis sativa
ttcatttatatgatgccatcatcattacattgtaattctattacattatttttaaaagcaaatcaaacatatttttaaaagcaaatcaaacattgtaattgtaatcgtgttttcattacgattaccattacaacaaactaaacatgacctaagagtattgatattaggtattttaaggtgtccaacactagattgatttgacgcgttgtgaatggttaacaccactatcaggtagcaccttataattagttagcgaatttgtataatctttattaaagtaaaataattaggacttgatattaaattgtaccaataaaaatattacacttcacaaaaatactagacatcatggtgaggtttaatttgtgagagttgatatcaaattacactaataatagtatgtcgcctcttgtggtgcacaataacaatttcaattgatatttaaccagtgccttaaatttgtaaacaaaagtaaaattaaaggggtataactaaaaaaatctaagagttaagtgtataaaattaaaatattgatgggtttcgcgccaagatagcctattattaattaaatcaaaatatatagaatttcatgttagtgcttagcatacataagaatgcgtgggttactcttctcatttgtcagttaattttgagatagaattttatgcaccttaccatacattttcatattctaatatagtatcagagctaaattaaaattttatcgagtaactgagccaaagagccgcttgatgagctaaaagagccgtttgtgattcagagaattggttttgaaatgaaattttatacaccttactatacactttcatatattctaccaattttaaagaaataaatgtatag

SEQ ID NO: 7749 - DNA, 1277 bp, Cannabis sativa
agtgtgatatgactgttaacctcctttggggtagaagttaatacttggaatgacaccccccttcccaacgtgaagggggtgtcagtcgccatctcgtggtgataccccgagactccttccacatgaccttcgatgttgtgggtagccttggtgtcatgaagatgtgccatatacaccatgtcttatgtcgaagaacgagtttcttggaccatgtggatgtaagggtttagaagttcacccctagactaccttcatccctctttgagtatatcaatacatttgaggtaggggtagtggcacctactcttatgacttagtggtacagtgccgagaatacgatgcttatactagaattacatttcaaaatctaaaaaatatttttcccaatcatttcacttttcatattttaacaacatatcccaatgataattattcctttacaagcaaaaataattacaaggaagaaaaattaattgcctacaaaaaatcaattaattatttacaaagagaaataatctaattatttttacaaagataaaattaataaattacttgtagcattataattcttgtaagctttgaggtctctatcttcatagtgggtaagttctccctaacctccattgtattttcttacttgaaatttgagatttgtgacttttttgtagttcttcttgatagtttttgccatggccgaaaatgacatttaattatttttagtttttgatgaaatgtgagtgtttgatgattgagttttgtagcataggttgtgggtcatgtgtttttgcctctgatttgttgaaatttggtgaagaaacgattgattttgaaacttttggttgcacgtgttcttgagctttggaagaacatggagaatttcaattttccctctctctttttgcttagattctcataaaattgaaaaataggtatttgtgaagatagtgtgtaccttgaaaggaattgttgaacgatgtagttgtgacttcaagtcaccttgtcttttttcaccagagataaaactatagaggggtcggggtgcactaccccgagatgacattgtgaggtgtcagggtacataaccatgagctttgccatgtacacccaaagctaggcctttagtttttatcgccaacttggggttgaatactttcagatcaatgtgttttcttagcaaaattataagtattggaagcaccatatgttgctcaaatatggtccgttgatgaccaatttctactttagtttggggtgcatgaccttgagatgggtctccc

SEQ ID NO: 7750 - DNA, 929 bp, Cannabis sativa
accatgttattgttctataaaacctctcataaaccccatttctctatgacccaaatcaaaagcagtagtagtagtactaaagtcatgtatcaaaatcttatcaccatttggttccttgtgattattttctcattccaatgtataattacattggcctctgaccctgaccctgttcaagattactgcataccaaacccgaaatttggtgccataaaaaccatatctcaccttatgatactaccctgcaaaaactcaactgaggccaccactgatgactttgtattctctggcatgaagttgtctggaaacttcaccgatacaggtcttgcaacgatctccgtcaaccccaccatcttcccggggcttaacacactaggcatgtcatttgcaagagctgacctcaaagttggtgggataaatccaccacattttcaccctagagctacagagattgtctacatagttcaagggagtgtttattcaggctttgtggattcaactaatcgggttttcgcaagaattttagagcaaggagaggttatggtgtatcctagaggccttgtacacttccaaatgaatgttggtaaaaaacctgccaccatttttggaagtttcaatagccaaagtccaggtttgcagaaaatcccagctgcagttttcgggtctgggatcaatgaagaactcttggagaaggcttttggattgagtcctaaacagattggaaagatgagaagaaagtttaatcccgaaatatcaaattaaaatctagaccagcttaaggtttgatccctcatatgtcccattttgttgggctttttttctatgaaatcttgaagaaatatagttactgtaattctctcttcttttcaattccattgtttgatgtagcatcttcatagaaacagcagttaaatcatcaagcctttgct

SEQ ID NO: 7751 - DNA, 617 bp, Cannabis sativa
tcaggtctagtgtgtgttaggtactgcaaggctccgattacactcctataatcggttggattttcaagtggttctccatcagtaagtgaaagcacttttcccactgtcatgggagttgggcaaggctttaggtgcatcatattagtcttcaccagcaattcatgaacatattttgattggctaaagtagattccagtttcatctcgcactacttcaatgcccaagaagtagtgcaggtctccaagatctttaagagcaaaaacttgattaagtttgtctccaaattgttgaagtttagcagcattgtttcctgtaagtatgatatcatcaacgtagattagaacaattataatgtcagttggagttgagtaccagaacagtgaggaatcagcccgagaattcttgaatttccagttcacaagggtgcttttcagcttgtcgaaccaagcacgaggtgcttgtttgagaccgtaaagagacttgtttaagagacaaacatgatttggcttgctggagtctatgaaaccttcgggttgctgcatgaagaccttctcttctagctttccattaaggaaagcgttatttatattgagttgtttgatggcccaaccttttga

SEQ ID NO: 7752 - DNA, 622 bp, Cannabis sativa
gtaagtttggggttggaagagccaacgaagagaggagaggatgagaaggttggggtgaaggtgaagagggacactattaagagtgctttagaggaagtgttgaatgaagaagaagaaagcaagaagagaagggaaagagctagaaagcttggggagatggcaaagagagctgttgatgaaggtggatcttcacatcacaatatgacattgtttttagaagatattgcacaactagaaggaaagaatcaactgcaagagtaagaaaagagatggaggagagatgtactttcttgtttgttagcaacaatttgctttactgttctttgttgattcaaattttatattgttttatttatgtattgtttatttcactctgataaaagaattaattacaagaattacaataatactactaaaagaattacaagaattgaaaaaaaatcaatttaagataattaaatttaaaagaaaatataatagtggttgcatagaatatatttttgataaaattatgccaattaagaatatcttactattttggtgtacatttttgaccaatttagtaatgtaccaaaatggtgcagaatctattgctttcattgcaaccacttcaatgatttaa

SEQ ID NO: 7753 - DNA, 1807 bp, Cannabis sativa
acatccaaacccgatgctgaatctctatcgcaaactgaagaaaacaaaggaccatctcctaaggtggaatcgcaagtactttaagatgattcataaacaagttgcagatgcccaacaatccctgcaattaatcgaaagggagaactcccctgatgtgaatgttttggatgaggcaagagcaagactgaacgaagctttagcacgggaagagatcttttggagacaaaaatcgagagtagcatggcttaaggaaggggatcgctgtacaaaattcttcatggcctccactgtagttcgaaggcgcaagaattttatccaagccataaagaatgaaaataatgaatggataagggacccaactaccattgctggcctctttgttgacaagttcaacaacattttcaatggcaacaggccgtcatctcctccggatcttcattggatacggggaattagtgtgactcaagctgaaaatgaattcttaaactccatcccctccgatgaagaaatagaagcgagtttgagatccatgggaaacgacaaggcacccgggcctgatgggatgccagtgggcttctacactcaacattgggatacaactaaaagggatcttattgatatggtaaggcacttcttcctcacctctgatttgccaaactatattaataataccaacatagtcctaattccgaagaaggactgtcccagtggtgtcaacgactatagaccaattgctctatgcaatgttgcatataaatgtatatccaagatccttgccatgcgactgaagcctcttctacctaccataatatctccagcccaatcggcttttgtaaagggaaggcttatagccgagaacacggcggtggcgagggaaatagtccattcaatgatgaagaagaaagggaggaagggctatatgatgataaaactggatatggaaaaagcatatgacaaaatggattggggatttatttcttcagtccttggctgtttacaattccataatccattcataaactgggttcggaaatgtattgagattgataagatgggtctgctgataaatggaacggttcagggattcataaagccgcgatgcgggcttcgacaaggcgatcctctatcgcctgctctgttcatcttggcagctgacgtcctatcgagattactaatggccaaagcagaggaaggggcaattactgggttcaaaatatctaagaatgggccggcaattactcatctcatgttcgcggatgacatcattctcttcggaaaagctaccatcaaggaagcaagaggatttctcaagtgtcttgaagactattgctcttggtcgggacaagcggtcaactacaataaatcaacagttttcttctcgaaaggggtggcatcaaataccacatctgaaatatctcaacttcttgggatgaaacgaatgaagcgggatgcaatctatttgggtctaccactattccgttccttaaagaagacaaatgatctccaattcttagtcgaccgagtgctccaaagggtcaaaacctggaaaacacgactgctttcgaaggccggacgtgcctgccttgtgcaatcagtggggtcatctattgctacttatgttgctgcttctgagattatacccttaaccattacacggaaagtggacaaatgccttcgggatttctggtggggggacacagaggagaagaagacaatgcacaccattgcatggaattccttgtgtcagtctaagcttagaggtggtctcgggttcagatgtgtagaaacagttaataaagccttcatt

SEQ ID NO: 7754 - DNA, 1046 bp, Cannabis sativa
ttaaaaattatgtaggctactgctgttcatatagacaatattatttatagtggagcaaagggaacatcagcttctgaagtggcattgaatttgaattgtagtaaaacagtggcttgtactaatattaagttggaagatattcaaataacaccatcgaaacaacttaagagtgttgagtcaagttgcaacaatgctcatggtgtcactactggaattgtcaaaccagcttcttgcctttaagagaaatgataaagacattagtgttgtctatcaccttcctacgtgtattggatttcataatttaatgtaacaactttttagaagaattgttaatcgattacaagatgacacatttagaaggttctagacactattggtacctaatagtaatgctctgtttttagagatgatccaatattgtattctattcttatactaataaataattcgtacttcgcgacggttgtttaattctgtttaaatttattgatagagacataacacatttgaatcttacatgtttttttaattaattttagtgatattaattcataaatttggttatataaatatgataaagtaatttttaatattttttattatttatatactaatttatttatatgaatgtttgatctgttttttttttaccagttattcaaataatattaatacatgtttaaagtatatatgctcataagattatattggtttttgcactatttttttttttttgatagttttgatgtcttttaatatttttgtgtatttcatgactttgttgttatttattatagcttgttcctatttgtttaaagtaattttatagtatggtcaatggataagagaagtgatccattttgtgctcataatttttacttataaaataaaaataaaatatgttttaaatattaagacaaaaaattaaaataaaaaattatatgaaatttgatcaaaaaaatagtatgaaaaaaaatccaaaagatattaaaagtaatttttaaaaattaattaagttaattatttcttaatattagggtgcactt

SEQ ID NO: 7755 - DNA, 1000 bp, Cannabis sativa
tttatccttgaaaaggttagcaacgtgtatcacatgttttgagggaaaatgggtcatatccacatagtcattatatgccacattaaactcgttatcccccttttgagagacaacaccctccatgcccacctgttcaactctggttcgtccagctgggacatccgccacctcagcacatccagggtttccacgatctccagtagacttttcagggaactgaatcgccacacctcccaactgagcagctggtggagcagctgagggaccatttcctccggtcgagatgtcttctttctccaatctctggatatcttgaatctcctccacctccagtaaggcaaaaccattttccaatcgggaaccatccttcagccacgacccatacagggggagcgaacgaccattatgtgccgtcaccattctcttcaaaccagaacaatcatcctcaagatgtcctattactccacacttataacagaagatgggcagccgttcatatttaaagtaactccagattttcttctggtttatctcagggagagaaacacctgcaagcaggggccgactgaggtctaatctgacttggaatcggaggaagtcattgacaacaataccattccttctaaccttattagcactaagaaggagacccatgcgcttagccatttgggcgaggcagtcttccgttagataaggcaggggaactcctttggcctttacccaaatatccagcttcaagaggtcagcggactcccaacgtccgtcctcagggaggctcgtaaccagcagaaaccccccacagggattccaggggccgttttctaagacaaacttaacttcctgggggctgctcagacggaagacagatttttttatcaggggcttggaatctccacccaggccgaagtttccacattccagagagggtcttacgcagagtaccatgagaaatcatctttttggagtagagacgccccacaaccgtcttagcaatcgtctc

SEQ ID NO: 7756 - DNA, 755 bp, Cannabis sativa
tccaatatcaccacccaaatttttgatctcatacaaatctaacttcccaaagtgtttcaagtcataaagtaattcttcctgggctttaaaaaaatgagacaatgcctttttctcttcaaaattagtctctccctccttccaaatagaattggcacgatgaagacccttgccatccaaaggattgccattgtcccgagatggaccattaaattcgagagagcctcccatattgtccataataaagccttggatcgggcttgagataattcccccactatccaaaagctttggaccaatcacttctctcggcccactcttctccttatagttcaaatttaagttcacatcttttgaaatatgaggctcatgagaacacgtcggcccagattcattaaagtagaccggcccaattaatttatgcggcccagcacaagcactagaactttcaccaataattacttgcagcccattattatcctttaccaaatcgcccgacccaccagacccctggcccataacagttttccttttgtttaccccaacgcccaaaaggggcccaccagagcacgactcttcattaaccaacggattgaaattttgacccgttggaatcgatggcaaaataataggtaacggctcagaggactttcccccttcattcaaaaacgacttagcactattaccatttctagtaaagcttggaagactcccatcaggcgtgaccttgggcacccacgactgagccgaaccccgat

SEQ ID NO: 7757 - DNA, 652 bp, Cannabis sativa
aattttattgtgactttttataataaaagtaaattttaggaaaaatccaaagtataccctctaaaactggttatttattttggcatttcaaagagtttttttgtttaatttttgtataatagtgtaagttaggccacttgtaatttttttttttaaattttgaataatttatattgtcaaaaataattaaagggagaatggcttaaaatatatagattaattagataaatacaaaaatttagcaaaatgaataataaaacatattaaatatatattgtaggtataaaaaattttatttttaaataaataaagtggctaattttttgtcatcaatttatttatgttaaactgttaaattcaaatccattaattttatattcttttctaattacgttatcgtggacacctatattggtacccatttaaaaaactcgtccacatgtaaaaatttattaggagcattgctattaggtactttaaagtgtccaacactatattgatgtggtacgttgtatggttagcagtttcttatattatttattaaattaaaatatataaggctcaatattaaattgcatttataacgatttatcacttcttgcagtgtttccaccttaagctgcttcaacatttctccaaataatgtagagaa

SEQ ID NO: 7758 - DNA, 928 bp, Cannabis sativa
tataaaatatatttcagacccagtgcctgcttgatcagcttaatgatcttcaacacagggtatgtgtattttacgatcacatcaattcacattccataagatacaatatatatagcatgtaaaataactatttttatgcttcttatttggtgttgttattatcattttaacaggaacaattcctacttgaagctaacaaaacgttgagaaggaaggtactccaatttattcttccatcttttcaatcttacatatttaatattactctgaatatatttatgcacaaaacttctttttctaataatacattgattttaaaaatttgcttgctacaaaatctatatatggctactatagtcgttgttgatcgatgcttttcaaataaataatcatcaacttaattttgtttgcaaggcaatgtgattgttttgtggatgagtattagaaatgaaaaaaataaaataaaaaaccaagtatatataaatatatatttatatagtgggagtgaattttattacgtgtgagtatgcataccgttgatttaacagcttcaagcccaaatatatcaaacagagcttaacgtatgttacacgataatcaaagtacttaaaacaaaccttatcatgttatggtgcatctcaaatatactccgcttttttatatataaaatcaccaaatccatatatatttatataaaaaatgatatttttaaataatttttaattgtgaagtttgtgattattatttagttggaagaaaacagtactcaaaatccacttcgacttggatgggaagctgcagcggaggaacacaataacaatgcctacacccaccttccttctcaaacagatcaaggcttctatcagcctctcggaaacaattgtaccttgcaaactgggtaaaagaaaaaataaaactaacaaaatac

SEQ ID NO: 7759 - DNA, 1010 bp, Cannabis sativa
ataaaataaaaataaataaatcatgtggaagaaatactgaattgacattattattattttttttatatagatatatatttatttaaatttgtatttatactgaatcagatatatatttcatctctaacaaaactgataaggattaagtaagtgataatacagatatatattaatgtataataattaatatgtgggtgctttataaacaatactattatatgacaaattaatatatatatttatactgttatatacattgaacatttttataaatgagtgacgaatgtttcttttgtccttatattgtgagcgcatgctctctttaatatttattataacagcattagatttgtgatcaaatcgaagctattatattcatgacatatatataatattgtgtttaattattaattttcaaaagtgaatttgtaaaagttttttctttaattaaataatttcctgtacttaatattttattctttatagtgcctttgatttgacattaatttaataaaggtatttgttcagtgaacaacacaaagctagggctttttaacttttcatttttcatctttttttatattttacatttactaatttattaattagtttccaataaagggtcaacatatttatatgatcaatcaattaattgtagtggaatttcctaacacagaaaaataaataaaaacaaatcaatatcacagggtcttaatttctctgtagtaattaattaataaccgaatagtgttatattatatatgatgatcatgcatgcatggactgatcactaactttatatatatatatatatatatatctatttatatagctctccaagaacatagaatccatggtcatcagccttttattgacaatatttggagctagtaaaattataagaaattaagcaaatttacacaaagtaggtacttaagtaatacattttatagtttatatatattatatagactcgagaaacataaataattaagtatggttttattaaa

SEQ ID NO: 7760 - DNA, 1773 bp, Cannabis sativa
tatatttatggtcaatttttctatttcttgtttatcaagtgaggaagagggtttttggctatttaattgtctttattttgtgttgagattgatcactaccgtcgattctttatcatctaatggccagggttgtttacattctttttattttctattttagcttttttctttttttccctttttttttgttatacatttacattgaattttagtttttcatttatgggttttatttacaggtgtagttaagctcattcaagttctagaaatgaacattccgttactttatttttcgccttttatggttggtcaaagaagttcaataaactattcttcttctttagcattgagggggaaaataataaaaattaaaaattaaaaaaaaaaagagaaaataattgttttgaattagtttgaaatgcacttatatggctattgtaactagaaagaaattctatatttataaggaagaaaaaaatattattttcaattttacctttataattagtgaatactttcttaagacaatatatatttggtgtttttttgatcatatttttgtcaaatagttttgatacattttttatatctaaaataccaaacctttttataatttatttatttctttttattactttactttataaaataaaaagataataatgttttttgcttaacaaaaaggaataaattaattgtaattatatataatattaaatggaccaaaacaaagtgttttgaattatgatatcttttgtggattacaaatttaccgaggtataatccttaatataaaaattaatattcttatttttttatatgaccctttttctttttagtctttttacttctagtttcaataaaaacatgcatatataataaaacattttaattaaattttattgtaatgaaataagagtaaaatggtgttattaattttctttttgaccaacttttgcttcttttttttttttggtaaattaaaaaaaaaatattttggtatttagctaaaatacatattggtttttacacaagttgtgcaaatatgacctttttctttttaaagagtatttaattttaatatataattttaaaagggctagctagctactctaccggttgacgataaataagggcaacatgctacaatttcactttaaactaacacaaacgtaaatctactatattaatcaaatatacaattaataagacattaatttggtcgtatataataaaaacacaaatgtgaaaatttgtgttagaaattgttggagtaacggaaggcattcaaattggtctttaacaacattaatcaattaagagataagaagaatggattaaagtcctaataacactacaaaagaatgaatttaatacaaatttaattgaaagataatgataattaagattagatggtttgcaggcacagcctcaaacagaaaaatactttgcaaaagaaaaaactgacaagctactactgctagcattgatttacttccttgtaactgcatagttaattttgaaaagaaaaaaaaaagtccaaaataacattgaatatttacacttcaaaatatgacagttcatacagaagttgataaaaagttatgggaatttcatttgtgtgtactttttaggtgtaaaaattatggatatctctaacattactctaatatggaatcataatcaccaagaaccatacacccttattaaagaaaagtcaatagagttaataatttgactaaaaattgaaaaggaatcctataatatgattta

SEQ ID NO: 7761 - DNA, 734 bp, Cannabis sativa
actagaatagaaccaagctcattttaataatatcctagaatcatttgatattttttaaggtgtcaaatagtacaaagtgaagtatgctctgagtttattatttatttctttatttcaattagtttatttaattactattttctgtcttttccaattataccaggccatcctcggattattcacagggatattaagtcttcgaacattctcttagacagcaattttgaagctcgggtattcccaatgttctctcaaacattttagttcaaccctttctttagttaagggagcccaattttcacatgagctatttcttatactttacaggtttcagattttgggctagcaaaactagctctcgacgtagatacacatataagtacacgtgttatggggacctttgggtatgttggcgagttactcatatcctctaacaactaggacttatatgaatcttttgagacacctacttagttctgaagtttcaaagattacacccagaacaatattgactctatggtttattttcagatatgtggctcctgaatatgcatcaagtggaaaattgactgagaaatctgatgtatactcttttggggttgtgcttctggagctgattaccggacggaagcctgtggatgcatcgcaacccttgggtgatgagagtctagttgaatgggtaaacttcttgagcccagcataaactttcctattgccactaaagcataagttat

SEQ ID NO: 7762 - DNA, 1030 bp, Cannabis sativa
gatctactgaccatgtgtgttcttatttacagctgcttctacttgagacttgtgatacatctcccaacaggtcaaagctaaaagttgggaacaaaaagttgagaatcattccaagctagaagacaaagctcgctatttccaattctagaacaaattatttatgtttttagacgttatttattccattttatttgttagactctattttttggttttccgattacaatttgcaactaccactatgacattttggggtattaatttataaatttcagttttctcttaatgaatttcattgtgagttgcatgtatagattgaactttgtattatgtggcctattactcttgtcctttatccatcactttaatttttcttatgttatatcatctttttggaaaaatgactataatctatggtatttaatgttataatagttttaacaagatcattctttacaaagagaatcatgccacataatcacttggataatatgtatatttacaaaaatattaattaagtggtgatttgtcatattcttagacaattacttagatttgattcatgtcagaagtttgaattgtttaacaaaattcatgaatttctagcaaaaaataataaacatcaaagtcatttaagatcttacaaactaataggtgtagaaaattttttgttatgcagttcaaagattgtttaaacatcaaaactgcatttcaagcttacctcctcagatatatctatataagatgaatatataataagtttggaattaaagtgttctctcgcaacgtccataaaaaaaattaaagagatattttctctagtgtttctaaagtgattaggagtggactaagattatcaactttccaagtgttttctacgtttacaaacactacaaagccttggtagtagaattatcccgtaaatatttcatcatcttaaacaatcaaataagatgatcatactatctctattatgttaaatacaactaaagagattaatgtcatcaaaattctttgaaagaaagtcata

SEQ ID NO: 7763 - DNA, 510 bp, Cannabis sativa
aactactacaaaaactactattccaatcagtcctgaaattgctttttttgggagactgtcactaataaaattgagtgtttaaaactgtcagccatagtagactattcccaacggttttaaacactcgttaagaataggtgacggtttaaaacaattataaaattgtaatagtttcaatcttaaaaaggaataggcgatggttttacaatgtggccaattgtatagccgacagtttaaaacagttggatatacaattggccacattgtaaaatcgtcacttattgtgggatattttcaaacctaatttcagatctcatatttcttacactctcggctctctctctctcaccaaacaaaaagaaaccaccattcggagccctctctgtctctcactctctctcagttcgtttaagctccacaaccgggcacactttcctcttccctcagtccattcgagctccaccaccacggtcggcatctacctcgtggccgcccatcaacgattgttgt

SEQ ID NO: 7764 - DNA, 1903 bp, Cannabis sativa
ggggggggggggggagtagccagcaaccatagcgataagctttcctgatacggtgaaacatgttagctctttgctgctccagctcaactcgttggctctccatactttactagttctccacgaactagttttgaaactgttcatgttgtttttcgagagaatcttgtagttgttgttgcaggtcagccatagtttgggtaagctattcaacccaggattggcctccttagggtcttctagttccacacgtggttccccaggtggaattcgctctttggttttagtaccaaaagtagtaggtaaacttggggaacaaggtgtggagctagttccgagacctcgacctggcatctgagacgtaggtgtagtcccatcaccagctttagtgactggcgtgccacctgtctgctagccactttttgtggatcttctttcaacacttatggagcgtgttgcaactatcttgtaagtgattccttgagttgtggctcttaatgaaagtaccaaaatgttggcatagaaatctagacacatatatctagccacaccccctgctatattggcgagaatgaattataagttaattataaataagagagacacaacgatttatatcagttcactccctgtattgtgacaataatggagctacgtctacttcaagttttatttctcatgagatggactacaaaaaaaaaaaatggctaagtcaagatgctctaatttctaaagcgagaaactagagagagatgctctcaccttatgactactttttttaacttaaaaattgagctagtggaactctcctttcattgggaatgagatcctattaaaataataataaaatattccaaaaatgtggaaaaatacaaataagatatttttgaccatcgagattatctaatgatattgttattgactccagagatcgatcgtcaatttttgaagcctaagtcacgtctgcatgaaccgcttcgagtaagttgtaccttaaaatcataactcctttgagggtgaaatcgggagtctataattttagaattgtgattagagtgtgatacatgaattaatagagcattgaaatagcttcaaaatttaagtttaattgcatcaatcggatcaatattgagtgagtgatggttgttttactaaaggttattctgggcccaacactgaggttgatatcttagcgccaaggttgacatccagcacccaggttgacatccagcacccaggttgacatgtgacgtcaatctggacgctgcgtgagtaggaaaatatttcgaggatgtattttttgattcctaagtgatattttgacatcacttggccagttttcgtgttctagtgaaggtggtccctagttctcagcgatgttgctattttgcagaaacaggagactcgaaactctccaatttcaaagtaagtcactttgctggaaaagtgaaaatatgaagttgtgaatttgaatcttcttacaatatggcaactaattattatgaaaaactagacggacggtcaagacaaaatcagaactggataactagaacccaacgcatcacgccatatgtcaacctaggcgctgagtgctctttttagagcgtttaggatgtcgttttgacacttccaagtttcttaaacttgatgacaaggtctcctacccaattttcgaccattttagaaagaacgctcagagtaaaatttgcatttaagtgatcgaaattagcgcaccacgttgattgtcaacctgggcgctgggccgagcaccatgtcaacctgggtgctgtgctcagaacatttttttggaaacaggattggaaatagcccaggttgataatatgtgaacctgggcgctgagtccagtttaagacttcttggaagttccgtttgctccccaaaaata

SEQ ID NO: 7765 - DNA, 1197 bp, Cannabis sativa
tttcaagatgagttattgaagtcttgtgggagggctcatggtctcaaggaggtgtatgaggctattgagattgttggctcttgtggggttgagaattggagtatggatctcatctcttctcttcctcaccaaactccagaaatgtgggaggaaagtttaaggcttgccattgaagctcaaccctcacatgtgtcggtatacgatttgcaagtggagcaaggcacaaaatttggattgctgtaagtaatagagtggaaattgattttagaatagcttcattttgtatgcatatttggttctgaactttggatatttgcaggtataaaccaggagagttcccattaccttctgattcacagtcagctgaattttataaaatggcatcaagaatgctttctaatgctggctatgctcattatgagattagtagttacagcaaaagtggctttgagtgcaagcataatgtaacttattggaagaacatacctttctatggttttggccttggttcagctagctatgttggaggcctgaggttttctaggccaaaaagcatgaaagggtacaaggaatttgtggaaaattttgagaatgggatggtatattgccatacaaacaatcaaatcgatttcaaggacaatgctatggatgttgttatgctttctctaaggacagccaaaggcctggatttgaagtctttcggagaagcattcggtgactccctcgttgtttctctttgtaaagcttacaaaccttatatagaaagtgggcatgtagttggcttggatgtgaaaggaagagccttatctgcagaagaattcaactccttgctgcctaaagaggataaggagaacattcaaaaggagcttggttatattcggcttagcgatccagatggtttccttctatcaaatgaattaatatcccatgcatttggagtcatagctccatagtatccgatctttctaaaccgtcaagctcctgattaagaagttcagaaagaggaaaatgcatgtatgaccttgtgatatacagagattaagacacattgatgccaacttgtccatggcattaactcaggacaacctgattctttgttcccattctttgaagttagttggtggtgttgaaggaacaaaggaaagaaactaagacagctaagcatgatgagaaggaacacatacagactaataaaca

SEQ ID NO: 7766 - DNA, 932 bp, Cannabis sativa
tggattaaaaggcataaattcttttcattcttcgaacacacataatcaaatacatataatgaattggtttttgttattgtacgaatttaccgcctaaaaatacgagtccagtctcatgctaagttgacatgtgtactcatccttaaaggaaagtgatgacgtgtcaataatacagttctcatagaatcgacctcgaataattttacttgtaggaagatgcaatttaaacaatattccgatcgcatggttgacatgattaaagaataaacaggatcaagaaaagttagtagtggtcgcgcatatttggatatgcgatgaacgaatgcatctctcctgtgacaaataaagatgacttctttacatatgttgttgtccaattgactagtgtttttgatgatttcttaacagcatgctggctcttaattgtcaacacggaatgtctaaaaagtacgattaagtgtggtctctgacattcaaagtcctaagccctattatgcgagtgcaacaccataaagtcttgagagctcgcgtgtgggatacgaatgctcaaacggggcaaattgataaattacatacattgctgcaatcaaggaatagtcgaacagacaaaaccgttcgtatatttaatatctaaacgtttttcttatttaatgatgttattattgaagtaatgattctaattaattgattgtgtaatcttaacagacacttgctttatatataaaaaggtgacctgaaacaaatagactaagctggaaattattaccaaaagtgaattaagcaaacccagctttaactgaaccactttcatttttgtagtctcctttgtatttttgtttgtattttgtctatttcataacctaaattttgaataatcacaattttatatgagtacttacataatacgatgattgttcttgtctaaatttaaa

SEQ ID NO: 7767 - DNA, 782 bp, Cannabis sativa
tattttcctagttgatatgaatcaaggaggtagcccactgggtagctccattaatctagttttattttccctttttttaacattttaatgtagttaatgaaaaggccaccaagttaaccttctacattccctttcatttgtaaaggtgaattaatttaatgttacattggagttatattatcatatcttgttgcatattttaaattaacatcattttcttttttcgaagaaagaaagagattgagaacaaaactcaagtgtaaaacgctatgaataacgctacacagttaagggcaaagggagagaagtaaaaaaaatctaagtcaacaaggattagctacccttagacgacaaaaggaatatgctactcctcataaaaaaataaaagacggttaaaccgctcaaccaaaagagattttgagagacattcacggccttatgctaaaaaaaagaaggatgcttctcaagcataaatagatattcaaaagcgcgcacaacaatgaaaataaaaattgagaggttgaagcaatttcaaggaacaataagctcccttacaatctgaatataagaataagtaattaaaaaaaagaggttgagaccgctcaaagagtcaataccccctcaataaaaacctacttactctagtagggaccctatccccaaaagaggtacaacatcaaaggcacaggaaataaagttaagttctttatagtcattcaaagtaaaaacacatcataccataaagggtcgctctaacaaagccaatggacaccccccccccc

SEQ ID NO: 7768 - DNA, 1487 bp, Cannabis sativa
gacaaattctttccacagcacaatgatctagacaaccaagccttattgtggtggcgttggcatagtcaattagaaaatcgattttggaattgaaatccaagattgctacttcttttggtgaggtagtcgagatcattgaaggtggtgcacctgggaattttcaagctctaatttgaagatgaacgcaaaaatttatgtcgcgctcaataatggtttggtttgtgtccgatttgggttctggttttttactcttaaaaattatgggtttgagacaaaaaaaaatcaaaattttagttaaatgtggtaaaacgtagcatttgaaggtatttatacctataaggaacgatccgtgtaaagccaagatcaacgatcatgcttgatcttccaaaagcacaaaatagatctagcgtttgggaagtccacctgttcaacatttgatgccttatttggaaccgaggtgaaatcaaatgatgatgttctcttcgaagctcgcacaaaaataaatagccatcagtttgctcacttcgccacagacgcttcatcaagcgaaccaatgcttcgtgggccaataagataatgccatgtaagacatgaagtttaaaacaaagaaagttgtcttccattcatataaagcatttgagtttcataaaagtttcacctttagcctccacatgtctacctgtacagactgaagcaagcctccgcaatgcacatcattctggaagcttgggggtaaatgttatccgtatttttggtttaggacacgtgaattctaaatagaagtttaaggcccatcaatgggcccaaacgatatgaactgggtcaagccccttaccaacgtggcctttcgggaaagtaatcacacttctcactcaagcgagcttccgccaagactagtctgtattcggaaggatcctagttccgtgcattcggaagaaccctttagcatgtatctggaagctagatgtagtttctcatttactgttacgtgcagaataaggaaatcacttttctcagatctcaaacagagaataaatatcaagccaaaataggaaactacataattaaagatcaaataattaatattgcattaattatccaaaatcaggggacatagtacgaacaactatcatcataatcaaacctccacctcatcatacacgcatggtttcatggttgggcttcactagattagtccaaatctatgtattatttgtaaactccccattagtggaaaatagtaactaagcatgacatctatttctctataaatacatattgaatccttcatgcaaaggcttaaaatttcttaactcacaagctcgagaagagaatagagtgctcatatttattgtaatccctaagcttttccagcctatccacctatatatctatataaaggagaaaaataaggggtgacgtgacgtcttctatgagttctattctaatacatcttttatcttatttttttttaacatttttattaa

SEQ ID NO: 7769 - DNA, 604 bp, Cannabis sativa
ctgacactttggttaacatgaataggattacatctcacaatcaattgaaaaatgtgattatgtattttatatatggtattaaatttttacacagtggcactttctaataaataaataaatactcataaccttgcttgctatatttgctcttggagaagattctaatattgtttggagggctattatgcttgagcttatacatgctattgttgtaatcgaacttttcattaacatacaatagcggtttttctcaaccaaaaaaatacaaagaaaaaaaaaatagtttgattttatgtaattttttattaacaaaacagaaagcaggtaattttcacaattttaaaagtacacgacagctacattaaagatttatacataataaatattaacataaaaattaataatttacaagaaagtaccttatcacaaacaattcacaagtaacccaaaagacaaatgtaaaacaaaaaaatgcaacagtaaagttttagtgagtgcatgccggctgattgtcgcccaccaagaaattcctccaccacgtttggtcggtcatcctccaccacgtgcttcctctccttccattcctcatagttttttctttttt

SEQ ID NO: 7770 - DNA, 1700 bp, Cannabis sativa
caaaaaaggtgactgtgaagtcaaacactagttaagactgtaagatataaacagtgtctttttctgcagaaagaatgtgagaccatgtcctaccaatatatatgtcccactctctcctatctatccaaacttttttcagtcactcaaaaatcatattctctagtatcttcaatttttcatcattctctcacgaccccacctttttttttagactttcaccaacttggatggagagattggggatcattttcttcacatgttattaacattttttttaatgccacggcttcaattagattaggtactataattaaccatagctaaagttttgggaatgtttgatggtgtgttattactaagtagtaagtactaactctaactttccaacaaaacaaaactaactgcaacttgagcttgcagatagtactagtagtactattactacgtactatagctataactataactgtttagattcaaataatatatactttgttttgtggttgaaatgttctatatatttatctctgtgctgtgcacaactgtagaatgtgtcctgagacagagtacaagtaatattaatataaatatatataggtatttaaatgaagttttgggttcattggaaagggaagaaaaaatcattagagaacaaatagtttatactgtatggtattatacaatgccagaagtagaaaattcaatgtgaaaattcattgacccaccatcactgctgtcactattatgggaatattcaatgttaataatagaggtgtttctctataagtagacaaattcaatgtgagatagctccaacagcaagagctatagtcagtttcaattcaaaattaaaatgtttatatatataatggtgctatatttataaatatatattaaaggtaaaagaggtacaatagtcatattcatgcatggccatgacttctttctaaaattatatatttcaaagtaagatttatgggagtgacaagaaagagagagaaatgtctcaatctcatgtcctgtagattccattattataagattttatttttattttttaaaaaagaaactcatataaatattacaaagtgatatttcaaagttgatgatatatacttgacaaatgacattgcaaacttaaataatgttataacaacgaccttaaactctactctcttggattatgctaattggtgcatcttgacatattaaaattaaagctatctaaatatagaaaatacgaatacatcaaacactctgattttcaggggtgcctcataatttttttcaataaatatgtacatatatttatataattagcctagttaacaatagaaagcaatgatcacaaataatgtgttagaatcttcttcttatcgatctccaaaatgaatagaaattttttgtagagagtacaacagtgatcacctaactcattcactcactcatgagtcatgtaaatagcttttcatttttaccctaaaatatttaatttattatataccatgatgaatatcaaattatattatattgcccaaatcttgtagttaattaatatatctaatttttttttgtctcactttatattagaagctttttcaaagtacatgtaagctgcatgaaaaggatgaagaagtaaaatgagaattggcaaaaaaagaataatgaagaagaagtttgatgagaggaaatcacgcgtt

SEQ ID NO: 7771 - DNA, 1261 bp, Cannabis sativa
  modified_base (1061)..(1071): a, c, t, g, unknown or other
ataaaatgatcaaataataatttcattttccaaatgaaataaaataatttcatctataaattattgggttttaaaatactatcagcttgcatatttctatcaaaaaattcagacttcttctctaataaaatatatacttatatctataccctacttattatatttttctgctaaaataaacgaatcaattacatatatagatatatagatatatttatatatatgtgtgtgaacagataagataaagtctatattttaatatatctgtagttgaaataataaattaatggaattaatacactcgtggagataataaattaaaaaaaaattgtattaattaatatgagagataatttgaaatgattaattttgtattatatatgttctagtcattggtactgtatctctgtggctgctgagaattagtaaaatataaattaattttgttctctcacaaatattatatatatatatatatataaatatgggttggatatactatagtccaaaaaataaattagaaaaataaaaaatgaaaatttaaaaaaatcacaagttggaagttgtaacgaactgtataatgtgtatgtgtaatatgagactttaattaggagagagagaaaaagtagatcctggttggtttattctataacaaccaataaaaaaaagtcttactcaaatttcaattgaaatttgtttttatttttgaaattcattaaagaagacataacaatcggccaaaatcaaacgatccacccagctagggaagagatgataaaactcatttgagaaaaactcaacctgcacaaaataagtaatgtaatttgggaagttaaaaataaacacgtgtattaatatataagggtaaatactatgttgaatcttgtattttgtaaaaattatcgattggaccttgtgttttgttaaatgataaaatataagggtaaattttattttgacaaaaaatcaattcagggtcctatttgtaccattttagaaaatactgggtctattttgttatttaacaaaacagatgatccaattgataacttttgcaaaannnnnnnnnnnaaataatatttaccctatatataattaaagaaaattatatactccacttttttaaaaggaatgtatcgatatatctttatctaatttagtatccgaaataattttttagtcaaatttttttttatggtcatgtaaattatagctatttaagatatcccgtaaaatttcagatctcatataatttaatata

SEQ ID NO: 7772 - DNA, 553 bp, Cannabis sativa
gagagaaaggcaattacagaggagagggggaatgaagtgtttcgaaacaggactacagatcgggttgcaggaggtgatgagtgcaggaagacctttgaaggcatctccattggggaagtccagaagatcgatcaaattccgaacatcaccaatcggaactcgattaacacaaaggtatcgaattctaaactatctattccttttgattttagtaacttattgggcagttttaaggataaatgagtagagaaagactttgagaaaaatagtggctctggtttgaaaagacgggcggatttttgggagatgctgaacaaggaagaaggaatgggcagtgaacctggtaaacgattacatagagaaggtgttggggagattgtggattcggggctacacataactaaagagggggaagaatggattgacatcccgatcactatgggaaaggagttagggggtgaggtgttaaatcagaagggtggaaggaagaaaagggttgtggcaaagataaacaaaaaggtggataccaaactcaaagctcctataatagcaa

SEQ ID NO: 7773 - DNA, 629 bp, Cannabis sativa
tatagaatgagatgaagagatagaaccagagaacagtttaaaggagcttgtctggttgggagaaggagctcagcagtactattagctttaactacattctaattctaatctccatcacttatttgtaagcataaaatatcaaactatttccaaaaaaggaaaaaagtaaagagcaccacagtaatcacatgagtcaaattagtgtcggactctctttttttagtaatgatacgtatatacaaatatacaaaatatattacaaagtagggaattttttttttattttatttttaatcattacattttccgagagataaaaatacttttttctaatttttttatcaaaaaataataacaaattaaaactaagaattttaaagtaatattatttctttgtccatccaagtgtattttgacagctcatgtagtatctattggaaactagttagttttaaagttattaataacacgtcatattaattaattttaaggggaaaatagaaaaactttatgagttcttttgatggtttcctttccagtttccagatgtacctacaaaattgacaagcaaatatttttatttgtattcttgtgttcaaatgaaaaatctcctagttttttttttcttt

SEQ ID NO: 7774 - DNA, 1402 bp, Cannabis sativa
aaaaaaaaaaaaaaaaacacgaaatctgacaatgtatttcacacatgttccacctccttccttcttcttcatctcaccgctctcccaattttcccactgctcaataacacaggtgcatttgtatattcttaaatctttggatttttatctgatttttctttatttttacggagaaaggtagattttccttcctctctctcaaattatcaatatttatcacttgtatacaaaaaaaaaagaaggtatttttattttgtttagatacttatcttttttgatcttgatggtaaaattattgtgaagcgttatttatttatttatttatttttatgttggtttgataattggtgtcattgttactatgaaatgcaacttcaacgtgaatggagtattaactgaaagcatgtgtggttgaccttaaagggtttatggttgaatttcattccatttaagtttttgacattttgacatggtggggtcttttttgcaacctgatattttatttatttactttctaatatcaattttgatttataaaatgattgatttcttgatttttttaatactgctccttctattttgttcttttttttttatttacttctagatgcagttgtgggggatttatgtatattttatacttataaagtgtgttagttaaaataaagaaaggccttcttgacttcttgtttgaatgagataggaaggtcttttttgtttttccttcaaaagataatataaaataatgaactgaaatgaagtatttagtgttctgaaaatagaacctttaacaaaaaaaaaagcatttatgtgtgggggtgggcaatgggtatttgaatttgatgtggatttttgatgggcatgtcaaaagctttgtagtggatgtagccacaatgaaatcccttgatatactacttgatctactaatgtagtttgttaagattttttctttgcttaatcacaacattattatcattatattgggaagatttaaataacatgatggtgttgatagtatctagtgtagtatagtttgccactttagaaaattgtctccggttcatagaattgtaagatttggtcaaatgggaatattaagctaaaatcatacttgagggccatccatgatataaatgggctaaatatgcaaatttcctcaattatttttcttatgagcttctatcttggttagaataaaatgaatgcatatggggaatactgatgctagagatcatttcaggttcaattaatgattatgtcattattatttatgaagatgatttggttaatctttcttgaaaatatacttaattgacttagttctttaatttgtctatttacatataagtgagaaaggcttcaaacattatcctagagtaatataatgtttgcctggtttaaa

SEQ ID NO: 7775 - DNA, 709 bp, Cannabis sativa
aaactaggctttcttgtagtgtgtcttgttaagaagtttaaatccctagtcattgccaaatgaggaaagaaggaattgaagataatgcaaaaaggggaaaacgatctgattgcacaataatcatatgttcaacaatgagcacactataggaaaaataatagaaagtaactatcttcaagatggtgaatacaaccctatatatagaaactaaaaaaaatactgataaggatgtaaacgaacctcctaatgatcaagacgtctggaagttatttgtggacggttcttcaaatgattatggttcgggggtaggcataatgctagtttcactagaaaattttaggtttcttattatgcccaaaggtttcaaatgttttttgcctcaaacaacgaggctggatattattagaataatttcccatataagttgacctgttactttagcaaattaaaacagttagttcaatcagatcagagcctaactgacctaatcggttgcaatctaagattcaagatttggttagttattcctaactaacatactcagctacgtacatctactataaatagaatgaaattaaaaccaaaagacttatagctcaaaaatgactcctcaaaccagagaatgaagatcttagagatccagatccggtaagagatactctcgtgttcaaagaaaaagaatagaagaagagttagagagagagagaga

SEQ ID NO: 7776 - DNA, 915 bp, Cannabis sativa
gcaaattattgataaaggacatgaatctagaggcctctacattcttgatacaccaatacctaaatcagttgcttgttctggtgtacaacctcccttcgaggcacattgtaggttgggtcgccctcttcctctaaaaagttttgttcacaatatagtaagttgtcttcgttagattgtgaatcacgtcagtttgctaaatatcattgccttagttcaagtcctagagtcaataaacgtgccagtgctccttttgaattagtacattctgatgtttggggtccttctcctaccttgtctaaacttgattttcgttattttgttacttttgtggatggttattctcgtgtcacttggttgtttttgatgaagaactgttctgaattgctctctattttttgtgccttttgtgctgaaattcaaaatcaatttaatgtgttttttcgtacattgagaagtgataatgccaaagagtacaatctagtttatttcaatcttatatggttcaaaatggcatgatactccatctgaaaatggtgtagcagaacggaaaaatagacatctccttgaaaaaactcgagctgtcttatttgaaatgcttgttcctaaaccgttttggcccgatgctgtttatgttgcatatcttttgattcgccgcatgtgatctgatgtttttcaaggtagaatcccttacaaaattctttttcccaataagccaatcttcctattgagccacgaattttgggcagcacttactttgtcgtgatgttcgtccacatgtaaccaaattagatccaaagtcattgaactgggtattcctttgttattctcgtcttcatagaggatataggtgttactgtcccggtcttaacaaatatcttgtttttatcgatgtaacttttgtgtaaaatacaattt

SEQ ID NO: 7777 - DNA, 1307 bp, Cannabis sativa
gtctaaaatgacattaacttatttttttcccataaattttgaatttttaagaaattatgaatttggccactctcaatttttttttttttattttattatatcatttggcttctctaaatttcacttcagttatcattccttatactagacatttgaaaatgtttaatatatacctttgaaatatacttttaaattaaaaaaaattccaacaaccctaaaaagtaaaaacaccacaaaaacattaaaaattattaaagtatattattattattttttaaaaaatatctaaaatagaaaatggaagcattgagttgacagatttttgggcatttatataatttccaacctaaacaggaaagtgatgattccacattaggcaaatttcatcagtcaataaattgagatttagtcaaagattccaaatcccaattggaccatttatattcaaaactatttttattaaaataaaataaaataaatctaccatatttaaattaatttcaatgttgataagttattaaaataataaccatatatcctttaatgacatgcaaaaatttgatcctttgttagtgattttattaaattaattctttctcaaacaaagatatattataataataatattatgaaggcataaagtcaaatggcatatatataaatttatattgttctattattgttaattataaattaattactaattaaatatataacaacaaagatgagtgaatgatacacatttaaatttaatgccaccatttgggaattttttcttcaactggaaatatataggaattaatgcttctctaaatgacctcaattttaaatatttaataattgtcaacattatcttcaaaacatcattattttcaacacgaatatttccctttttatctaatgttgtattatatgattttttttattgttagataatttagaatattattaataagggttataatattttagatcttgtcctttataaaagttattgattagataatctctgtttggttaaatgataaaatagattttgtattttttaaaattgtacaaatataagacactaagctcaattttcgataatttttttttttaaagcaataactaaattcattgataatataatattgtaatacaaataactatatctcaaagaaagaatgaaataacgaaagtcatctagctgagtaagttttttttttttttttaatataacaaagatgcaggaaatataatcagttttatcataacacttttagattaggctattattaagtttttttgacaaataatcaattcat

SEQ ID NO: 7778 - DNA, 874 bp, Cannabis sativa
acaatagacatctctaattatatattatattactataactatagctaattacattaacatgtagcataattggcctcatctacattccacatgacatggccttaagttaagaccaccttgttggctttggtgttgccatctttatttacccaacccctctgtctctctctcatccccactctctgccgactaccatcagagcataattaaaaaatatataaataaatttaaaacacagtaagaattttgtatcaaccaccaatatatatataatattaaaaatctacaatctttattcatatatgtgtttctaatacactcttctaagactttcggtgctcctttttgttctttttctgggtccttctatttcttcatacgccttctctttatagagaacaaataattttctcctttttattttttatttttttttattcttctcaaatttgacttctgggtattgttcatttctgctggttctggactctgctgttctgggtttatgtattctggtgagaaatccaggatcttgtgaatgggattttgagttccttatctttgttgcctttggctttaattttgttcttgattatatttttctgttttgattattaaatgaacttataatttctcttttgcttcacattatttttcaatctatgaatttattcatctcttttcattttacattacaaattaatgtttaacatctgattgtgactgatacagtgaaggtttgattctttgcttcacaatgtaatgttaaattgtttttacacttataactgggatatgggattggagaaaggcttggactttgttggattttatatgatcagactaggagaaacttagatacactttgagatgc

SEQ ID NO: 7779 - DNA, 714 bp, Cannabis sativa
gtagtcaaagaaggaattcctgaatttataatagaaaatgttttggatggaaaacaagatttgagtattcattgcttcaaatctgattttgactttggtgtcaagtttcttccatacaaaaaatcttattttataaatgaagaaagaacaaaagcttataaccttctctattgtgggttccaatgggattttggaaaagaatttcatactgcttatattcattcttctagagatcccaaacaatgtagtgaacctcataaatgtatgtggcatatcattccttctggaccatgtttttctgatgcttccaactttcagtatcgttgcgaaccatggattcgtcataatcgtactgatacatcggttttgcaagccaagttttttccaccgctcgttgttaacgtaccatagaaatagggttcgaaatatatggagggaaagtaagatggatagtgaagaatgatgaagaatacgatcaaagtcggctctgggttaagacgggtcaaccctgtacttagggtcgcacatgctaagggcccttagaaaaattcctttttaaaaactatacaaaaaatattgaaaattttcaatgacatatcctatccttagaataagaatctaatggcccacaaaatctcaagaccgatataaagagtacgatttaattttaattttttttatgttgttttgtattaattttggaaatatatatgt

SEQ ID NO: 7780 - DNA, 1888 bp, Cannabis sativa
tgtcatttggagggttcattattggattagttgttcatttatgtatcaaaaagggcatcacgtgaagatgtcgtttgttgattggtttgcctaaatctaatgaatatgattctatgaacccaaaagccaagccattaagtaaggcatatgttgtgtgttgtgaacttgtgccaaccgaaacccattgccatgcacattaaatcaacaattaattaattaattgaagtgaattattcgtaacattatttccctcaatagaaaaaggaaaagaaaaaatattggttacattatagttagttaaataaatctttatagctatggcttaaccagctagaaacaatgttgtaaatttaatgaagttataatgatgagaacacgtaaaataaaacaggaacgttaattacatataaatacaagttgttttgtcattactttgtcttgacaactttaatttaacaataattaatgattaggatcataaattacaacattccaagaatggttttcttttttgggtgttaggagcattaatatgtatacaactaattaaatataattattaatttaagatagagaaagagttaaaaccttgttgttgtgttgattgtgtcaccaaacgatgttcttgagataattgaagaaaaatatatagttgaagatgcaaacttattacttattttttgatcaattaatgacaagttttgatggttcttcatggatcaccagcaaaaaaaaaaaacacaaacaacaacaataataatcataacaatggaatctctaataataagactaataaaggaatgagatatatagttcaaggattgagagaatagttagggattatatttttctttaatttcctcatatttagtattcatgttaattaacggtcttgtttaagaatgctagtttttattcctttgatttttgttctcaccttgattccctataaatatcaattcaattttcccaatttgtcaaatatagtcaatatagtaagagaggccttttccatttacttaattacaatcaactcatgattattattcatttaaattaacccattaatttaatatatgtaaaatttaattaatagttaactattgaatattattgttcattctaaatttgagaagaaaatgagaaatgagaacctttaaaaatgcaatgtgaattttcactttgcaagaagaaaattatgcaattttacaggaaagatggtgtggagcaggactttcatgacatgttaattacaccctttttgacttttgactttcgccttttcttttctgcttttcaatttttccaatggaaattagcaataatttatgtagagtttgaactgtgaagggcctactccactttctgttttatacttttcgaagaatcacttaaaaaaaaaagccaaataaaataagatgttaaatccatgaaccgttaaacattatcaaaggagtaattggaagcaaagcaatatgttttttaagttatgctatcttattataaataaagccctaatttggctaaactcagtagaattatatggtttttttttcattgagtataagacaagggaaaaaaaatactgatgcattaattagttgtattgttgtgtttgttagaagtgactagtttgttagagttggtaacccatcacccttaaaagtgctgatgaaaaaaatattaagtgtaccagcatgttgtacatcattattatatgattctacaaattagctcatcttagttatttaatgattacaaaacaatttaacattttagcaagaagtcaatcaatattttattttgagatccttttttgaacttgaagtggttcagcaattcagccaatatatattacttaaagtaaatacttttctttctcagtgct

SEQ ID NO: 7781 - DNA, 676 bp, Cannabis sativa
tatattattgtgtgtagattgatcattctgtgatcgaaagttttggagagaaaggaaaaacatgcatcacttctagagtttatccaagtttggctattgataataaggcacatttgtttgtgttcaataatggaagtgaggttgtgactgtggaaaatcttcaagcatggagtatgagacgacctcagtcaatgaactaatttagattgagcaatattagtttcttagttttttgttttagggtatttttgtttagatgtttatgtttaggagtgtttagtttcattttagacttttatttctagttctcttttggattttttttggttttaattgaatgaataaaaaactctagagtttggacaccgatttctatttattttcttattttcttattagtatgctaaaatgtttatccttattattctataccaacatttcaagttggaattgaagttggcttgtgaacaattcttatgttagaactttggatgtgaaaattaatagtattcactaacatagtcaatccgaatttgttgtccccaaataacaaatatttttttatagggactagtttgcaaattcaatgaaaaataaagggcatttaaaaaataaccaaaattctgactcttatgtaaatactcttaagcatttcttcttcttcgccgtcgccagt

SEQ ID NO: 7782 - DNA, 2061 bp, Cannabis sativa
aattccactgctaactcctgcatgaaataattaactcaatttaaggggaaaacataattttatgaagaaattgtatttttctagcatttgtcatagttttacaacttgggtcttggggacatgtatgttttggttattttcttaattgttttgttaagtgcataatgaaagcttacttggatcttggggacatgtatgtctttgttattttcttaatgttttgttaagtgcataatgaaagcttagtcttataacaacattttatattataaatatgatgggatgtttctacgatacatgctctttacttgtttcgatatattgatttttttttagtccaagcatgttatagttatataagatgttttataaaatttgaaaaatttaaaatattttacaatataaaaaataatgcttaaatagtctatttcacatgcatataaaataattttgtcatgcatgtaatacaatgtttgaactttgttttcggcttgttaatttattttgaatttcataaaattattttacaaataatatctaaataataactgcaacgtacatgaccataagaaaaaattgactaaaaaattatttcggatactaaaaatagataaagaaacatacatgaatataagaaaataattgactaaaaattatttagaatattaaaataaatagtatttgtatatcgtttttaagtggttagaattttccaatatcatgtgacgttccttaattttatttgtatttttgatgaagcttctcaataacaaagtgttactttttaattaaatgaatcttaatcttgttgtaaagcaatcacgatcgatctagtagtgtgggcctttatgtagaaaagtgttgtacaaagtccattttcaattcaaatttaaaatttatgttaaatatttaacataaaagaaaataagttgttatatttgacccactgtttttaattatactccaatgaagaataattaaaaaaaatattaatgattatttaatattttatcaaatatatacaaaatcattattttttatttttattattttttttgaataaatctttattattattattattatttaagaattttttttattatttaaatagtggttttttattatttaaataataataatatgataaataaaatatgtaataaagttttgtaaaagtcaaagattcataatagcacaataataaataataataaaaaaaaaatgatatttaatgttatattttgtgccaaatttaatacaatttttattttttaaaaatttgacacactttttagaatattattgaagtaatattactaaaatagaataatactaatacatcacattttttagcacttcattagagatgttctgagcattgctattagataccttcatgtgcctaatattataagtgattaacaatttctcatagtatttatttaaggggtttttataaaaatatatactatattttaaggaaataaaatttataattttactactatatacgaatttttttacaaaagtagtatacttttataaaacaaccgtaaaatactaaatagaataattaaaaacaataatggaataagtaaaaaacaaaagtgaaaaacagataaaacttaacagttaatacaatacacattataaaaaatacagtatcttttaaaaaaatttaccctacaaaaaaattaaaaatttcatgaaaattcttttatttaatcaaaaagcttatcataaaataccccctattatttcagaatctttaagccacgcacaataatatttataatattaaaagagccaaaacaaatacttttcccacttttctttcacttttgtataatctaatctgatgattaaagtaattacttttccacttgcattgcatggattatggaaagacagtgttccatccaaccaccgattaaaataaataaaagaattaattaattaagtcatcgactccggtcccgacaatataatatatacccttattaatcactccacaaacttttcctttatctactaaatcacgctccttaattatctcta

SEQ ID NO: 7783 - DNA, 688 bp, Cannabis sativa
taacatttatacaaagaatcacctgtctctccagttcttttttgctcaaaggttgagactagagtttgaaaacgattgttacttttgacacgatttctactgaccttcacatttgcaacatgacatatatgaaagcattatacaataaatatgatctcacatattagacacttgccaaatctgaaggaatgaggctttagagataacgaatgagctcaacagcaaactttcccttctttgtagaattgatttctcctatctgaatcaataaaaactagaacattatcacaagttttatggaaattggtgatgatacaaatacgatatagcggttatcaaaaacaaatacgaaagaatgattgcatgtcaccatagagaaattttgatgctacttctacacagactgaagtcattcccaacagaagttttgttgatgttgaaaattacctttagtcttcctttcccgcttactgagacaacgtcaccagtcttaagtgttgttccattttttgtaataggggaccagttgacacgcacatccccgttactacacagatagagaactgtactattatggcataagatgagcaagtattgttctaatttatttgactgtgttaagatggttgtgtataatgagatagaagggaagaaaaagactatcatcacttgttccttgttcatggtg

SEQ ID NO: 7784 - DNA, 722 bp, Cannabis sativa
ttagctcagccgctatatttatattaatcaagtatagttatagctcaacaattcagtataactgaccttaacaaacaaaactgaccattaactaacatgtaactaactttcctattcagttaatctaatatatcccccctcaagtaacattggtctaaaccaagtgttaacttatcgtaaaggaactgaaaagttgtagttgggagtggctttgtgaaaaggtctgcaagttgatattctgaggcaacataacgaacatcaaattgttgagcaatgactctgtctcgaacaaaaatgtcaacttctatgtgcttcgtgcgagcatggaatactagattaattggaggctaaagacactgcccgtagattgtcacaccacaagattggacactgggagagtgttatgcctaattcagtgagaatagactggatccaaatgagttcacaggtggccaaagccaatgcttggtattctaattcgatactggatcgagcaacaacagtttactttttagagcaccaactgattaaatttcttcccagaaagatgcaatatccagaagttgatctcttgtcatcatgacatccaacccagtctgcatctgtaaaaccttggatatcaaataagttggctggtttgaagaggagactagcatccaaagtaacagcaagataccttagcacgatcttgtgggcagacctgttgggaatattttaccagg

SEQ ID NO: 7785 - DNA, 1166 bp, Cannabis sativa
tgaatgctcaccttgaaataaaatggttggagatttgagtactaatatttcctaaacaaaccaacatatatttgaaattagtacaatcttgatttgagctttttttcatctctcccatcaaatcgttaaaatttaaaacaatatttttttcgatgtttttcttggagtctatgaaagctcgtctcgaaataaagaacttcaatgatcatatgatgaactaaattgtctttgattttgtcattcaaataaaacaagaaaagatgatggagtacgtactaaagtacagttttagctcataaggagtaagtgacaccagttcatgattacatgcatttgaagcaaagatgacaaagttgaagtaatcaataaacaccatttcatatacgttcttcttgctctcattttgttcttgttcttgttcttcttcatcctgttactcgatcggggatgagtttttgttcgtgatcttccaattcttttatgaattcttgatgagtctcaatctcaccttcttttgttgaaccactatggtaaagaagtactaggttcgctaaataccaaaatttggatcatgttcactccatatttcttaaatcccatcacccaacacttgccataaaagaaatcaactcagaaataaaatcttcttgataagcatcatcattaatttgttggactagatattgatcattacgacgattccaatgttctttcatattgtcactttgaaaatcttactttcaagattcatcattatcaactttaaacatatatctattttacatgaaacaagttttgttaatctatgataatatataaaagaccaatatatattatatatgtatatggtgtggtgtggtggcaatattttcaattttaatccattaattagattaaattaaataatttaattaagatatttattagtatttcatgaactaaatctcctattatagtgatattatcttttacttgattaattttttaaaatgttttaaatttaaaaattagttatcttgaaattaatattttcaacaaaattcctataattatgggattattttatatttgattaagatgttaaaattggtttggttgttttaatttaaatttctattagtatcctaaatattatatatatgcttaaccaaaccttattatttaaa

SEQ ID NO: 7786 - DNA, 1020 bp, Cannabis sativa
taaaacataaagttgagagaatcagattcaaaattaggtatactaagtaacaaataaatatataattatatcaattatgttctctaataattatgtattatttttcataaaaaaaattattatgttgtctaacatgtttatttacaataaggccttagaacggttgatctcagttctagttatcgattctaaccaaattatgcattgaatgcataatttttcaaatcaatatataaagcatgacatagcatttaaagatcaataatcactagggtaataatcataggccctataaccgctcactttagggtaataaccttaatccagttcttaattaatcacaattataatattcaacatgagtgccaccgtgctaaactctacgtgctaactactgtcttacctgttgtcccgagtacgtagagattccaaatctctgggtgctcctgaccaattaccggtagtcttagtcacaattttcgagattcacaaatagggttaatccttaaatctattctcacataattataaatttgcattcaaatccaaataaaagtatagagctccgaacgagctttccaacaatactcgaaacacccaaaatagagtccagatcacaaagttatgagcatttgaatagcacattcgaaactgcccagaccacaaggcgggccgcgacactcccccaagcgggccgcggcacctgggttgaaaacccaaaatttcacaagggtgggccacggcgcctgggttccaaacctagaaaaccccaaatagccacacgatttcagcccaacatgcacaaagatcccaaccaaaatatgcatacacctcaaattcatactccatagattataattatcatagcacaacattagaacacataaatcaagctttaatcctcaacaatatatgcatccaaaaatcaaatttaacagcaattaagatgagctcaaaacttgagcaaaactctacacaatttcatactcaaaagcctgaatacttaaatcatattttcag

SEQ ID NO: 7787 - DNA, 543 bp, Cannabis sativa
tttcttttttatgcaatgggtgaaagcacctttagtcatatcaaaacattcatatcctatagctatcaagggtcaaaatcatggaatttcaatactacacagctcattaacattgtaacttcatatcaggcaaagttcaaaccagtcaccaccgcatggaacaaataaacacaatcaatttctttttgtaatcgatctcaatatactctgttgccgatggtttgataaagggatttcagctgagtgttccatttatctatagcagcatacttcttcatgccctttgatctgtgcattgtaataagttgccaataatgagtaatgatatgacacttataacaagcaatcgagataattgatagtgtacagcaatgatccgaacacaaacctgtctccacgttctaatagccggttgacttgatcaatatgtccgtcgattcggttatccaaaatcagcgaaaccaatagctgctccacatccttctctggcacattgagttcctggaattcaacacagctcaggtaagtaaaattattaagaca

SEQ ID NO: 7788 - DNA, 933 bp, Cannabis sativa
  modified_base (400)..(402): a, c, t, g, unknown or other
gtggaggaaaacaatgaaggtgaaaacaatcatcttctcccattttaaaagtggaaaattttacaagatggcttaagaatgtgtataaattaatttaatttaattttaattgtacgctaaatatttagccaataacaattgaattaggttatatgtttttttttagtatctaattggattaatttgtatttttatttagtttgaataaataattaaatttaatgttattatacttacaatatatatgtatagatgaaaattaagattaattttttttaaaaaaaattgatggatctaatataatttaataatcgtatctcatataatttaaggtaattacttacgaatgattatcgatattctttaaaagttattatcttaagttatatgagactcgatnnntaattacactaatagtgatatgacactgatgaggatattggtacctttaacattttttttaaaaaaaattgttaaaaagtactattagtatctagtatctttttcagtatcatactactattaatataattaagtatcagatctcatataatttaaaaaaataatttttaaaaaatattattaattaattgtagaatgttatataccacaaatacacaataacaatattcttcttaaaatataaaagatgatgacaaatcatacttattagtagtaggttggtgttgttatgtcacgcgcaggaaaagcgcttggaccaattttatttttgtaatttaactttaaataataataagaataataatattttatatatatttgagatttgagagtgattttggtaagtttttagaagagaagcaagcaaggagggagttggtggccgcagttggtaaagacggggattggtatttggctctgtgggccccactcctcctacccctaatacattttttaattaattacatactt

SEQ ID NO: 7789 - DNA, 558 bp, Cannabis sativa
tgtattataaggtagttaaaattgagaatttaaaacttcattatctagttggttattttatttttatttcaaaatcccattaaacaatgatttaattagcacaaatcctcataccaattttgcctacattttggacaagaattgaaaatgaaatgcaaaattgttgtatgcctttattccaaatgcttctaagttctaactttccgtcattttataaagaagcgaaaatttcatttgtcactcatctattctttcttcaaaatgatttataccttatcaactttttaagccacttcctaatccatcaaatttcatgtttctttttggatctagtttcatgttttctaagcactataataaaacaggaatgatcaaatttattattaatgtatatttacgaccaagttaattaaatagtattttaggaaaaccataataaataacaaattactttaattcccaaagcacttaaacaaggttaataatgtttaagaaagaatcgattcacgtccttcgatgtgggacagagaaagaaagaaagaagtggttacttttcga

SEQ ID NO: 7790 - DNA, 1130 bp, Cannabis sativa
ataataaatattcatagcttaattgatgagagaagttgaaaaatacccattttttatacattaactaaatttacctctaaataaaatttaattcaaatatatatctttttatgagtattgtactcaaatcatcctcacacactcacataaataagatataatttcaaacaaaatagatttgtattctttgtagatggatgtataagtttgtgagaaagttggagcaaaattttaattagagaagaatgaaaattaaaaactatcgtaaaataataggaataaaattagtagaatgattaaataaaaggtaaacataatagatttcaaaagagatcataaaaattaaaaacatcaaatcaaattaaaagaagtacatcttataattttttcttaattaattgtagtatattgcatagtatattggatcccaaaatttaaatagccggtccatatattctcaggctcatcctgattaacgtgtaggttagttttacatcataattaaaactgaaatagaattttatcttctagtcaaacttcataaaagaggacgttgttagttacacaatcttctctgccaactcccaactttctagtcatgatttataaccttaacatcaataaatttaattaattttatgttttatttttaatgtcacacttgtcacagtgatccaatcttgatggtcaagttttgaatatatttttctttccaaaattatatttagatgatgtgagactaaagagcaaactagtggcccaatagggcaacaacttcttatagaagttagtggttttgattgggaacaatttatgggttaagatatatactgtttttctttatgttttctccactgaatatttaaaataccaattagataagcttttcaatttgtgcattatatactgttcttttcaactctctagctagtggcttaagatttgagtatcaagctagacaaattatatatattattaacaatactaattagttccaatataatctagaccattgtattaaatttataattttttcacagcttattttctgagcacttcacagttcacacccaaaaggtcaagcattcatatcttttagttgtatttttttccactaattaaacactaaa

SEQ ID NO: 7791 - DNA, 1409 bp, Cannabis sativa
ggtttgacattcataaaatttgaaggacaaaatatgataataatttagtttatcaaaaattaacaattataagttatttaatgaagtcttatattttattaacgattatagtctgtggcgatatttaacgttgataataatttaaggacatgattaaaaaaaaatagcaaaatacctatttattctattataaattttattgtcaaggtataaaaaaaagtggatactaaataatttgaaaaatattgatgattaaacatattacttataattttaaatatctataaaattcgaataattctatttatgtctaatgatctctcttcatgcaagtaagaagaatacttccctcaatcttttagaatttgttattaatttcattgtccatttcaaaaattcatttggtatgggatatgataattaaaatattatttattttcattttatttttaatgcaaattaataatttaatatctttaattatcaaaagaaattaatatctttacaaaacatataatattttatataaactatcaataattatgccattttatttaaagatatatagttgttcatttatggagttaatttttatctcattatttagatatgtgaatgaaaatattttaattttagataatgtatttatattaaacattgatattaattttttttttaaaaaaataatttaactttatatatttttttattaaggcccctcaaaagtatgaaacagccgtgagtaaggatactgatgttggagacaatccctatctcttcacaatctacacgtcgttccaagaacgagcaacattcatatcacaccgaaacacaggcaaactcgcgtacaaatacggtgacacaaagctcgcccaaatatgtggtgtagtagctagcgatgaaaaacgacacgaaactgcttacaccaaaatagcttcgaagctcttcgagctcgatccaaacgacatggttttggaatttgcacgaaacatgaagaaaaaaatcacaatgcctggtcacctaatgtatgatggaattaacccaaatctctttgatcacttcaccaacactgcctcacatattggggtttatactgtgactgagtatagagaaacattggaacatttggtggccaaatggaatgttgaaaagcttattgggctttctagtgaaggaagacaggcccaagactatctttgtgggctggcccaaaaggttaagaggattgaagaaatggtgaagagtaaggcccaaaaggattgttcttcttcaattggtgtaagttgggtttttgacccaaataaaacggttcaagtttaatgtgatggtaaaaatgtcaagatattatgttaatagaataataaacgtggcataataattggcatctttctaattttgtttgataataa

SEQ ID NO: 7792 - DNA, 656 bp, Cannabis sativa
aattagactgtgatgaaattaaagtgacatctttctggattctaggacttctcagatttagatttagaattgtatttctagtggtttgtgccatggacttcggggatctttagagtgaaaatcaaaatggtatttgtggtggtgggtaaggtggttttagaatctagaaccttagcagatttggaatcagaatagtattttagaattagaattggctctgtacagagccaatgagcttgtatagactatttgagaaagcatagattcttcaactgtcattatagaaattccatgacattctactagatgaattagatgatgtcaattctcccttctactgctccactcattctgttatcgctggcttttcttttaatttgactgaacagcacagtgaacaaggatggattcaaacctaatttagagactcatctaattccattacttgcatcaaaattggagacatctctggactcgacagataaaaattctacttcttctaaagatgctcatcattcaatgcttatgaaggtatgtcttgtgtttttaaacaggttactgggtttgtgttggtaacttctacaggatattgttaaaaagttaataaaaacatgtctatatttatcatccggctctaaatcaagtttctgttctgc

SEQ ID NO: 7793 - DNA, 664 bp, Cannabis sativa
  modified_base (339)..(340): a, c, t, g, unknown or other
taattatatattatgaaaaaataagaataaaaacgaaaacgagaataattaatttctttcaattacaaacaaaaaaaactgtacgttgtagatgatttttagtaattatttcaacatgcctaattaattatcttctagcattaatttgtatcagtattataattagtaagaaggttataagattttttttttctcatatatttaatcacactaaaataatatttttctaattattaaaacgctgttataaaattatggcttaacaactaggttataaaattattaaatacatcccatttgaagaacgtgataagtttgcaatatatatatatatatatnnatatatatatatatataggtatatttttaatgggtattacccatgaataggtattttaatattggccattagattaaatctaaaggctcacatatatacttattagttaatttttaaaaagtaatatttatcatttttaacatattacctgatgatatggcaatgcatttttttgtactttcctaaatgaatagaactataaaaggaaaaaacattatgaaaccgttaacaaagtaaaaaaacacatgaaaaaaattatacttcttgaaaaataagatttactcttttaacaatataaagtgtttcaacaaaaaaaaaaaaaaa

SEQ ID NO: 7794 - DNA, 770 bp, Cannabis sativa
ttagtgattcacaataaatccttggagaataccagacaaagggaataaaaatagccaaatatttagaaattttttgaaaaaacttggaaaaattcagctatttaaaattgaacaaatcccaagagaacagaatgttgatgcggattctttggctgaattggcgtcgcaatctgaatatagtgacctcaacttggctcccattgaaaaaattgaagaaccaaatatatgcgagatggagggagatgtggagatgatatatgccaatccaacttggatgacacccatcatcaattatctcgtaaatagcaaacttccttcagacaagaatgaggcaaggaagttcatgtacaaagtgtaggacctttttagaagtgatcttaagtaatggctcagtctcggtccatctggtgaaaaaatcagctacaaccactacgtattttgctcctccttgccctatgggtactgatccaatcaaatctattcctcaaatagcaaatgaataggacgaggtcatcatgcagagctctattggtgggatccttagaatgcgtcgcatttccgtacgaactcatgtgtgtctttattgattgttggccaataatatccttgacggataatcttctttgacagactctaccaactagtatggtctccatagaagttttcatgaatttatttgatgatgctctcacttttgttggcaatacacatcgaagtaatgacatttattaaccacttcggtataatttccctttgactatcatgtatct

SEQ ID NO: 7795 - DNA, 508 bp, Cannabis sativa
ccttagcttccatctcgtgagaggtaaaattaccaattagaggcatagagagagcagccacaacctgtcccactgaatttcgtacaacagcacccacaccaattttactgcaatgcttatccaaggcagcatctatgttcaatataagagatcccattggaggcggctgccaaggtgcgtgagcagcagaagatgaaggtggcacttgagatgaagttgcaggttgtctatatttcagctgagccgcacggtagttatccaggtactgagtggagaaggcagcaagagcagacggcaaccgtgacttcttaccatgaagaacttgattacgctcagaccatagacaccataaagtgcaaataattcagctttggagtgaattgaagctaaatacctcagataatcccctttgtacatggttgttgctttcttccactcaaaagaatgatgtgtcaaacgccaaacattccgtgcataatgacagccaaaaaatacatgtcctattgat

SEQ ID NO: 7796 - DNA, 941 bp, Cannabis sativa
  modified_base (395)..(424): a, c, t, g, unknown or other
ataataataatagagtgactattaattggattaaattaaaaatgtaactcttatagttatatttttgtaagacctctcataatatgttactaactcataaaaattttatttttaaacttaaaataattataattaattatatacttaaaattaattatttttttaattaaaatatttaataaaatattttcaaaactaatgtttataaatattttttatattttatttatttaaaaataaataaaattagattagtgttacaagtaatttattaataattttatttcatttttaaattaatcacaatcatttaataatgatccaaaaattaaaataaatgtaattatcttagttacatatttaatataaccattaaaatataataataataatannnnnnnnnnnnnnnnnnnnnnnnnnnnnnataataataataataataaacatgcaaattatgttagagaactcaaagtttgaaattatgttagagaactcaaagtttggaaccaaccgaaaatttaagcattatctatttgagtttgttgtcacatcttctcagagtgattagagtagtttttaaaataatgatttagagcaggtggaagggttgatccaaattcttaatattagtattagtatgataatgaagtgggatattatataatacatggtacaaatttaaaagctacaatggtatcatacttggattggattgccttaatgctatggaaggcaggtcatggtttggccaagttggctctaagataaggattctgattgtgttttgttgaaataaattcccacatacactgtctatatcagcacttaacaaagaaatacaaagcattaaacctatgtggcctttggcctctaataacctactgacagaaccagtagttatctgcaaagtttgttataactgttgcaactaactcccaact

SEQ ID NO: 7797 - DNA, 1681 bp, Cannabis sativa
  modified_base (683)..(692): a, c, t, g, unknown or other
ctatgagttgatcaatacctttgaccaaaatatcatctacatagaccaaaaccagtgttgttgactgctttgtgtgaagaagaaatagagagtggctagacttggaagatacgaatccaatctaaatttgaaattctccttgaagaatattgatcaactcatccttacgaaccgacacaaagagagctaatcactggaattaattttatcaatgggcactgcagtaaactcagtaaatataattctacaattactaagagttcaattccatatttaaagtggagtaatcatggaattaaaaaacacgattttttggttgatgagatttaataaattatctagtttattgaaacttagaattataggtccatggtcccctgatcgccaccttgaaatactgcaaagggagggataaaagtgcatacagaaatttgataaaatctattttaatttgtcaaaacagcaatcagttattttgtaataaataatttatatttcaaattacttaattaaataaattaggaatagaaaaaagttttcaagaaaataaacataacctttgtcttaactaagatagagagaggcgccacttacactgtgtcgagacataatgtaggcaaccctaatgtaaggtgtccccacaggatttatttttgggttaattaattcaaaagataaatatnnnnnnnnnnttaaatttaaaaagtagttgagatattctctcatatggctgagagattcctttaatcggttatagaaaataaatatctataacaaaatttgattatactatatattcaaataattaaatatgatttaataaataatttgaatttaaataattaattaaattaaatcttcataggcttttattttaatatattgtataagccaaaaagttacgtaactttcatgaaagcctaaaaaggattaatctgatatcttttctctccattaataccataaacttgttcttgctcatgtgttgagaaaaataagaacctcatatacactttttatcctactagcccacactagtccttgtgttgggggaagatctggaagatcaatgtatgagtttgacttcaccgttctaaggatacagcatacgaaaagattagaggataccctgataggcttcaagaggtcaataatattttcatgtttttactttcaggtttcatacatatggtgatccttgaaaatggtatgatgataatcaagaaaaatgtattccattgcagacgtgatttagtagcaaaataccaacaccttcctggctggaaaggtacaaggatccaggtgtggcttctctctaaagcaatgacctcatctgacattactcctctccagtggaccatttgaagggcttgagctagaaaagtaggtatttgaaaaatactataaacttctggtttgtgaatccctgacttaagatctggtttccatttaatgagtaattttcagctgaggagcgggaccaggagttgatagagctaagctgacactaaaagaccagtgtgttaagagatttgagtttgttgttcagtggggatattgtgagaagaggtagcaattgaggaagcaatgttctatattacaagctgaggttcaaaacctggtgggaattcatgagttgaattgtgtttattggtggagacatgagtctctaaagctgaac

SEQ ID NO: 7798 - DNA, 1185 bp, Cannabis sativa
cacatccaatgttccagatctggtttccccattgttgtcgtcgacaacactatcattcctcctcaacgatcgattgatcgttccattactaatgacctctcgagtcctttctttcttagtcccggtgatcatcctgggttggttctcgtctccaatgtcctcaacggaacaaactattaatcatggaaacgtggaattacgatggccttgactgccaagaacaagatcacattcatagatggatctttacctcggccttctactggtaatccctctctcaactcttggcttcgttgcaataatatggtcatgtcatggcttgtcaattctttttctactgagattgctcatagtataatgtattttgatattgccgctgatacgtggctcgacttggctaagaggttcaatgagggtaatggccctagaattttccaactacagacacaactcactcggttacaacatggtgagcaatctgtatcgatctacttatttcactaagctgaaatccctttgggatgagttgaaagaatttcaactgaatacaacttgcacctctggtgccatgaaaatctttcttgattactacaaccagaacaaagttctttaattcttgactggattgaatgagtcttactcatatgtacgggctcaaatcttgttaaatgaacctatccccaatctttcaagagtttttgccatgatcattcaagaagagcgtcaaaggactcttggatcttcagaagcatctcccctggcttctaccgttcatccattatccactaaccttccacgagctaagaagcctcgtccttcatgctctcactgtggaaaacaaggtaatttcgttgacaattgcttttttctccatggttttccaccaggctatgggaataaaaagaaacaagaaaaaggaaaagccaaggcaaatcatagcaatacttccactgatgaagctgctagttatcagtccctaccgatttatctactcagtgccaacagctgatatttcttctaagccagcaactcactcaacaaccccgtgctaatgctaccattccttttgctgcagccaatttggcaggatcattctcaaaatgtggtgattgggacagctaagagacatagaaaattgcacctgcttcatcaggactcacttccaattgcctcggccagccattt

SEQ ID NO: 7799 - DNA, 834 bp, Cannabis sativa
gatcaaatccagtctctcgtcctaaactgtccccaaaacagcggtatcccacgcccatccactaatctctattcccctcacaattacactaatcttaaacacaatgaaactacaaatactttttttttttcttttttttgttaaaagttatattattcttagtcagtaaccactaaccaccatatctaaagtgggtcccttctgattttcactgggcaccgaaatcccaaagatgcaatgtactgtcaccagagcatgctacgacatgtcgttcatcagccaccataacactgacctcaccaatctgctccgccagtctgtaaaggtggcgacccccctctatctcccacaccctaatcacagtcccggtgcacattagtgcgaacccacggttcatgcacccgatcaaccctctatccctgtgccatgccccacgtctcacactaaagttgcacaattcctctaacgtgctcgctcggcgcacactagcattcccctgtctgtctactataatgtacgtggagttactcacgtccatcgatgacaccatcaacccaccctcgtactcttcctcaccaatcaccaacccatgattccttagatctaacaccatcgtcatcgtatccgtgcaagccacggccgattcctgactcgtgactctaattcggcccaacacatcgttctcctcgatcaacatctgccaacctctgaccgaatccggattcgtcaatgcgccacccactgaaatgagttgctccgtgttgctatcccagatgtggaaggctctgtcgggtacgcccgcgtatagacccacccaccagcgaccgcagcccg

SEQ ID NO: 7800 - DNA, 639 bp, Cannabis sativa
tttctggctatggaggtgtgtctgatcaagtgggtaagggaaagaactctgaggctttacctattttaccttcatctaatttaaatttaaagagtacggctgttgtgactcccaatgcttcatttgggaatttgttgaccgttaataacaatgggccgtgtgctattgggccgcatgatgaagtgggtgagctggatgtgattaatgggtcttttggaaatgggccggcttttaataatttgagcaatgggcttcctttacttgagtctaatggtcttttgggtggcccgaaagttgataattgttcaaagggtggtttggtgggcccgtgtgctttgggaagttcctctattccttttgggccggcacctttatctaaagacaaaggaaaacaagtgggaaataactcttattttcctattgttcctcacggggcccaggagcatttaaatgagaaacaagccttaactcaattttttaatgctcaagaaggcttattgcatgaccttaaacattttgggaagcttgacttgtatgagattcggaacataggaggggacattagggtcccggcttcctcggaagtcaatgagcgtacaactccgttcaagaaatggaaatttgaagcgtctgcctctc

SEQ ID NO: 7801 - DNA, 982 bp, Cannabis sativa
ctaatcctaaattacaaaaataccgaggagcggaatcttaaatgagaaatttatttttcggtaaataaattttatgagttactaaaaaatatttttagtcattaaccaacttcataagttattaaaaagtattttattattttatatttacaagtatcaaatagtattttaaataaacatattttataaaggaataaccttacaaaaatagtgttttaagtacacatattttatagagcatttttgatagatttctaaaaaacttataggaaaccaaattatattgggtaaataccattttagatattgtgttttgtaaaagttacagatttgattctctattatgttaaatgtcaaattaaactttgtattttttaaaatagtacaaaataatatcatgaactgattttttgttaaaataaaaattaataataacctgatatagagttgttatgacaactatattttctgtatctgttcatgctacaaattatcttcaagttaattatattaaaaaaatggtcgaaaattaggctatggtacaattttaaaaaatacaagatacagtttgtcatcaaacaaaataaaaagtctgatcagtaatttttttaaaatataagatctaaagcagtattaactttttaatatattaatcatcatataattagttatatgaagaaaaaaaaaaagtaactatactatttttgttaataaattacatggtaatttcatgtattttattgtaacttatacattatttggtattactataaataaaacattttatgaaaaaggtaattaggctctattttaagttttgtaggtaaccaaaaggttaattttgaaataataatatggtatgtattattttcaaatccaatttataagttacaataaatagagcctcttaaaaaactaaggctttcaaatatattgaattgggcctcttaaaaaatattagattgggctactcaatgaactt

SEQ ID NO: 7802 - DNA, 1030 bp, Cannabis sativa
aataagagtttattctataaatatataatatgattttacaataaatatgtaataaaagaaaaattaactatataaaaaacatgagcttacttatattaaaaaataaaatttttgaaaattgaggtaaaagttctatttttataattttaaaaaatgtaaagtttattttgtcatttaaagtagtctaattaataatttttataaaatatgagatccaagatgatatttacctaaaaattttcaataattttcaagctcagcaacttttatgttatttttaaaaatggataaatttaacgattacccaacacatcaattgattctaacaaaaaacaatgttcatatatttatagttttatggactggtatctttaaaacaacattattttcatgtggccataatattatactatatttttaatatatgaaaacaacatatttttcagaacaacttaaaaccaacgggtctgtaaaaaaaatattgttccgtaaaatggtaaactttgtgttgttttttggtatttctgaaatactaaaagaaaaatggtgagagagaactcccatcttcagcgggccaatgggccatatctgaatttgagcccattgatccttccatgggccttaaacccaattttagcccaaaaactcctctcttcccttttccaccgcactaccagagtcgacacgcccgagtcaagcgagttcccgacgaaagccatcacttttcctcatttcgttttcaatctctctctctctctagaactggaaattgttcagaattcactctctctctagaaccaaatcaattcattcagatccccaaaatccctaagaatcgaaaatttcgaaaccctagaaaaaccaattcatatcagattcagatcccaaacctttgatctgaatttgaaagctctcaatgtcgtgcttagccctctctcttcaacccgccaatggctccgacatccttctccagacccgagagtggttccctccggcacgagcccttgtcgcactctccgcctttcgccag

SEQ ID NO: 7803 - DNA, 773 bp, Cannabis sativa
atattttattcaatttatataacaaaactatgaattaatatcaccaagattaattagagaacatataaaattcaaatgtctctgtatcaataaaatttaaatagaattaaataagatagataaaatcagaaattagttgaccacctaaaatgtaacattaatatcattttaaggattaaataaattaaaaattaatacccaaccatttaatatcctctcgcctaaaattataatcaaaaaaataaatcacacaactttcaccaaaaattgcaaataaaagtgtaagcttatttaaattaaataaaaataacaataacaaaaatcacattaaagtaacttttgggctattacttctaaaagaaattttctctaggtcaaatggattaacaatatctatttagagaatagcaacttttgggagtatgatctcaaacaaaatttgagctggtattgagagacaaatttccaagatgtgatattcaaaaagcaaggattggtggcaaatttaaaataaattggctatacaatagtcgattaccccagcatcaattcatatttagtaaagtcatatggaactctctaaacttactcaaatataggttcattttttggcaagtggttaactctcatattctaacccgagacaaaataatataatttaatattgtattagaatcaatggactgccctgtgtgtgagaaatggtaaccgacacacataaccatttattttttgaatgtgttttgtcaaacagagtggtggaaaaacttttt

SEQ ID NO: 7804 - DNA, 802 bp, Cannabis sativa
gcaatactcagtgctggtttagcttatgctctgaatgaactccaaaaaaattttgtgtttgttgattatgtacatgctgacattgattagagaatcactcaactcaaaagagtcttaatttctgtatacagttcaaattgataaaccatacaaaattaaggtatacgtgacgtgttaggaaggaaataaacaaatattctaactaaccatttctgagttgtagaaacatttaatcaggaaagagatacaaattctcttagcctgacaaagcaaattataatctttataaaatgaaaaaagaatcgaatttcacaaagtaaaaaaattgggcttaactgaatctctcgtgacaaattgggaatggatgaaaaaaaaaaagagtaacctttcattataatatatattttttttttgccttagtttgaacctaagattcttcaaaacagaaaacaaggaaattacaacatttacttaatcaattcagacaatttttatcctaacgtaatcaaagaaagattcaatttccataaagtaacagaattgggatacaacctgaatcttgtcatttcaaatggatctaaatctaaatccaagaattacaaaaagggactatcagaaatcaggagaagtatgatcatatacccatactagtctggcaaaaaggaattaactttacaactagaaaccctaatttccctcaccagacataaatatagaaattacaaccaggaacgaaatcatttcttcaataatctaagaacttgtgaacttagtaacggccttggtaccctcagacacggcg

SEQ ID NO: 7805 - DNA, 1031 bp, Cannabis sativa
atcaaatttccctttgagtatcaagaacaaatccctaatcatattactaaacttaataacttgagcttagctcaagtggtcatagagaggtgcgtgtgtgttggagatcctggattcgagttctaaattatacatagttgtaatatataaacgcttaaataaaaaaaaaatcatattactaaacttcatatttgcatcttggggacacatttactaaacttcatattgtcatcttgccaattagtagtagttgctattaagtagcggccacattaataactatgttagtagttgtatttgggtttgtaatttttcaaaaataacattgtaatcttgttgtggctaaatagagtttgttcgcaactttttgatatattgaagattttttaactactaaagaacatcttttggaatgaccaatatatcatattttatcatatgtaaaatggtctttttcaaaaaaaaaaaaaacaaacaatatttgcatcttgcagtcacattagattgtgattatgcagtgccatcccataagcgtagggcaacaatagaacgaagcctagtgtcacatactcacctttcaaacaacatagagtgacatcttgattgttttgagacaatgctattattttaattttgaatatttgtgatagtgtgatttttagtcaatttattgcccatagcttcagagaaaaaagaattcaaagaaagaaattggaagtaaagtacaattttttgaaaatatagctcaagaaaagcttggctttctcgcttgtttagtaaagtccagtttttggccttattttgcagagttcaaaaattaaggcattcaatttggaaagtcagctccaaaaaatcggcgaagctcaaaatttaatagctcgggataaaaggtcaacgagtgtggttaaaatataaaaattcaagtatttaaagaatccagagaatgctaatattaggggcaatgcccgaggcaaaatgattagaaggaaaaaagtgcactagaataaggagccaatccaaaaaaaaaaaaa

SEQ ID NO: 7806 - DNA, 1123 bp, Cannabis sativa
ctctccttaattctctcattttttgcgctgtagaatttctctaagtagcaagtagcaatgttaattcttaattctctctctctcattctcatttttcatttttttttttattttttattagatttttaaatattaatgattaatcaataaaaaacagtattaaatttataaaattgcatcgtatctacttacttattttctttaattttttatattttttaccatcattaattatattaaaaaataaaaaataataataaaatatctatataatacccaaaaataattaatagatttgaaaataaaactaacctataataataataataataataataataataataatatctcacccgcaatctatttctacatctatatatatttattataaccctataatatctcactcaaaactaacttctacatcgatgtaccctactgaatatactaattcatcctcttctcttttcccaccattcttttcttttctttcagtttataaccaaatgccgaaagactacatttggtgatggctcttgaatagaggtatgatagaatttcttttttaatttttattttgacatgttttgaagcaaaagaaaacgtgtcaatccaaaattatattattgtcaactcaaagtgtctacaattaatataattcatatatttttatttttagtatattatcattacttcagaaatattatgctttttgtgtgtgttataattacactattgtttttttttttttccatatacgggattaaatgatttatatatttaattttctaaaaatcataattactctcttatagattcttatttatttgcctacttatctattttcttttattattttattttcaaataattataataatttgtatttcaaattcataactaaatatgtatcttaattcaaattttgataagatttttattattaatattttttcacaaaatgaaagttctaatttaccaaagaaaaaaaataaaatttctaattattgcttatataatctgttacacataaacaaaaaaaaatgtataaaaatagtagatatagttaacagtatttttttctcctaaatttttaaaaattagagaagcaaaattaaaa

SEQ ID NO: 7807 - DNA, 769 bp, Cannabis sativa
atagttaattagcagtagtcttttataatagttatattaccttaaagaataaagagaaatgttatagttacactcaataataatatacatctaattatttcttctaactgaaattgtaaattgatcttattttgctttgcatgtctaatagagcttctttaaactagcaagctcacatttcaaataataataataacatggaaaatggaaggaagcctatatgtagtcaagcactgaaatctacaattcttacatgcaaaatagtgcattaattaatataagtaatgatacagaacagttattcctccaagtaaaaaataaatattttaaaattaaattggaaagatttaagattaattggtctatctatctccaataaattaattatgtatagtgtacgtagtccaatgaagatttaaatagatgtaataaatgtttttatatttttaattattattattggcattgaatgtgacataaatactgattgtcttctggtggcctggtcttcttgccctaatattattgcctgccacactgttcattgacaccaattgactgctgtacatatatatatacataaaataaatgtatgcatgcttatacataaaatgaatttaatttaataaattttcctagctatatagctatccatatggtttatttgtcttgtttggccacaatattaacataatatatattgagtagcaggaaactgacgaaaatcttatatgagagggggttggaccactttctccatataaatata

SEQ ID NO: 7808 - DNA, 730 bp, Cannabis sativa
gtgatccttttggacttattcgttcttgattttggagcatgagttgggtttttttggctgttcttaaataaaaataaaagtaacttcgaatgttttttagtgaaaatgaaacacagtaaatttcatagttggaatgtcattcaaatttgaatggtaaaaagtacttttacaaatgggaatatctatcgatataaatcaatattatccataattaatcataattttcatggtaatgaatggcaagttcagtaatttattccaaatattagtatagaaagtttcttgattattttgtggttttgtttttggggtctgaaaataagtaggaagcagtcatgaatatgacaaagaaaaaaggagatcttgaaagcacatttacaaagaagatgagtcagaggttgtagggatccaatggaacttcaagccatcaaacaaaaggaaataccagagtgtgatgccataatttattgggaaactaatgaattgaattgaatcattttctgaaattgaattggtgatcaacccggttatgccatgaagtatgtgaaaatataggtaagaaaacaacaatagtcaagaaattatttgaatcgagttacaattggaagatccaacactagatccttaatctatataatgagccattggactaagcaatatacaatcttgaatattttctagtgtcacctcacctgcatgtagtgcaaagatgacaactactaataataca

SEQ ID NO: 7809 - DNA, 1190 bp, Cannabis sativa
cctcagcgcaccaaaaacatgtcttgtcaatggccatacctggacgagcaagtgacaccttcgttggaatccatgaatgactgatcttccacacaaagtgcttcaccttaggaggcagcttcttcttccacagacatttccaccacccaaccattctactaatatcagactgcgagtcctccaacaaatcagaagctaatctatacccgctccaaaccgaatactcaccatttttactgtaatgccacataattttatctggaaggtcacaatcagtactaggaagacccaatattaactcagcatcatctctactgaacaccccattaataaacatagcatcccaagaaccatctgcattcttcaaatcagtgacatacaattgactagggagtgatggagtatcaaaaatcttgaaactgatcggtcgaggaagccattgatcttcaagcacccgaacattattcccatccccaatgcgccagcgataacccttctgaattatttccttaccccataccaagctcctccaaacaaatgatgcattagaaccacacttagcatctaacacctcaccatttggaaaataactctctttgaggaccctactacaaagtgaattgggaaatcgaatacatcgccaaacttgctttgctaggagagctttgttaaataatcccaaaacccaaaacccaatgccccttctctttaggcttacacaaataactccacttacaccagtgcatcttattattcttttcagaggacccccaccaaaatatagccgccatccaatggatactattaatcacactcttaggcagccgaaaacaactcattgtatacgttggaatcgcttgcaaaataactttaattaacacctccttaccagcaaccaaaaacaatgacgccttccaaccccttactttgttccaaactttattcttgatgaccgcaaagagctctttcttggttctaccaacgaatgaaggcaagccaagatacttcccatagttttccaccactcgaacccccattatagcagccaatcggtctcgcaccacacttggaaccctcttaccaaaacacatctctgacttatgaaaatttaccacctgacaagatgccttagcataattatccaatagagctttgaacccctcacactccttctcattagcctcaaaaaa

SEQ ID NO: 7810 - DNA, 540 bp, Cannabis sativa
tgcatgttttaagttaaaattagtaatgatagtagtatttctctctttgtcattatccattatcgaaaactctaataaattaaggacaactgagattctttcttctacaatacaagaagacttatttgtgaagacgtcattagatttatgattatgaatcagtttttaacttagttaaatgacaaacaaataataccattattactcacttatttaagggcttattggtttacaattaatattgataatttatttggagagatttgtaattgttccaaaacaatacaaacatataatgaccctttgtcctattgaatctgtgttctcttttattatttggtgaactgtcaaatacaaatggcaatatatatattttggacttgagtaacctaatggttcttcttgtgattatatatactttcaataattaatgaagatagctgtttttgtgtttgaagcttaattagtgctaatgatgactactgttgtaacttttgtttgattcaatattaatttggattgaatccaattttacttatg

SEQ ID NO: 7811 - DNA, 548 bp, Cannabis sativa
  modified_base (122)..(124): a, c, t, g, unknown or other
ataatcatgattatattctaccgtatcgacgatactataatcatgaacaaatatatacatatttatatatgatctggatttaatagaatttatacattaaatatatataatcatgaaataannnatgtgaaccatgcaacataaatgtgatttctgatctttattagttagtaaatctaattatatcaaaataaattttatttagggcacaaaatttaacatataactcaaagtaagattttctatacaattatatattaatattttaatattttgtcaataaactaaatactgatttttaattatatcaaattaataatattaatatcaataattccaatcactaattaattgatctacagaaaaataatagtagccacgtactagctagtaatgtgatctatatatacgaaatgaccatcgattttggcacctacataaatatactaagctcgtgtattgattagtaaccaaaaactaggcgtatatattgattttgggcagctcactaataatgtgggcgttttgtgagtggttaaggtggttaa

SEQ ID NO: 7812 - DNA, 571 bp, Cannabis sativa
gagaggggaagaaaagagaaaggacaaaaaatattattaaaaattacatgaagaagctttaaagcttctttacaattagagaagatttaattaaaggatctcaattttaaagaatgtgtttatataaagaaactaatggagcttgttgtatgttattttctttaaatttttaaagaagataagagtactctaatagtcacaaaacttctgccgcatatattttatttaaaattaaactaagattattatatatgttcttatagaaaaatataatgtccgattatttgataaattaaagaatccaactaatatcttttgcatataacacaaatctaaaatggcatttaatgagaaaatgtatatcaataaaaataaattatcccctccactttgagtattgggaaatgccatccatacaggaggcactaattattggataacgtagctagatgtacaagagcatctttaatgcagtttgtcggttgtcttgttaaatatggaatgtggtttaattttgaagattaattttacgtaaagtgttgtttataaataagagtattgttattgagta

SEQ ID NO: 7813 - DNA, 515 bp, Cannabis sativa
agtacctgtgacattagaccatgcacctgctcaacagttatttttgcactatcccgagtaatttttgctaattgtgattcttcctgctatcattaaggcattgaaattaataaacagtaaaaaaaaagtatgagagaggtggtgtggtgatgcaactgatggctggactattatttgaggaaaacacaatcatagtatacagatgcattcctgtggataacatcaaaacttcaaaaaagctaattgatgaactataaactaaaccaactaatattgagcacactatgttaagagctgtctctctcaatacaacctacaatacattatcttcctatcacataattccaatggaaactaatgtgggaaacaaagacatcacagaaacagatgaccaatcagcaaatgaaaataactttaaaaaaccaaccaaagacaagatctcaaattagggaatagctgcataaataactcctctggctgcaaaacagcaaataaaagtcatgaaacacattcag

SEQ ID NO: 7814 - DNA, 892 bp, Cannabis sativa
tgaagaagcaaatcagggtgttcccgccattaggcatgagctactagggggctatgccgaagtaattcaaaacctccacgtaagaagtgtgaagcaaccaagtaacacccaacttaagaatgtattcgctaaaagttaccatgccttgaggtggtaaatgagcgcaatcattggacaagggttcgtaaccctgtgttactgcatactggtaaaccatcctcctgactccaaaccgagtcatagtactcaccatcttgaacatcctaaagggaatagatcggttggggattggaagtggtgcttatttgagcagcatggtttatccatatctataaaatcataaaatgagttagaacaagaagcaacacacatcatgttctttatccagcgagttggaaccttccgaattaatttaggctaggccgtgggatcgtcgcttgggtgaccctgggcaacgacagatgttgaggggtagtaagaggaaccgctgccttcgctggctaacagacagctcgcctcacagccaaaggcatgggagtcgggtgaggaggagatgcctcaagagaaaaaatgtgctccaagggagaaagtttctttgttatgtcacgatatagctgtctaaggaggaaaaggtgggcatttgtattagcgtgctcctaatcctctaagaactcaatttcttccttaagccttgctagagtttcctaaaactcacaaatttcttctaagcatttcaaacgctcaaacattggctggtgataccatgcccaagggtcgacaacgtccccgtccaaatcagacaagacctcaatgggagagactccctcaagaatgaagggtggtctattgttctccgtaaaaaagagagaaaggaggataaggcgggggtatt

SEQ ID NO: 7815 - DNA, 858 bp, Cannabis sativa
taatttcatttgtgactaaggcttattctttcttctttgtgatgatcattagttaataagaaataaatattaccatatatataattgcaggaatatacatgggagatgaccgagttatccatttcacaagaacaaaaacaaagaaagtgagcctaatacgcaccgttttcgggagacaaccctgtgaaaaatgtgggtataacccaaatgaggagaatggagtagtgcagacctgtttgacgtgtttccttaaacaccacaggctatttcgatttgaatacaatgctggtttcagcgaacgtatcctcaaaaagtcagggacttgcagtgctgtttcttcagacatggctaagaaggtgactgaacgagccaaggatatgcttaacagtgataatcagtttggagagtatcatttgatcgataataactgcgaatgctttgctttctactgcaccactgggcttcgtaagaccatgcaaggaaatgcattcaaagatgcaattgagtctgtttataaaactcttatgagtggagaacaccattctctcaaagacatttctgaatctcttttaagaggtttcattgagaaaaagatccgcagggtcatagatgagcgtgatcgccctagatctgagataactaataatgatgatgatgatgatgatgggtcagaccaagatcgatcggattagatctacaccactacgtactgtttatttatttatttatttatttatttttttttctagttttatatttcggtcaattctttggagtatattatagtcttctctcgtacactgtatgaatgttgtaacatcctactactaagccatgttagggtgtttttttaagtac

SEQ ID NO: 7816 - DNA, 798 bp, Cannabis sativa
tctctgccatcagcaatgtcaaaagccaatcttacctttatcgagctcccatactgctgtcctcttacccggaatactctcagaatcttcataatacgtaacatacttggccctagggagctttgtcatgttgggaacaatgtctacatcatgaatatgttctacattcaattccacatgtacatcagacccatcatgctccgactggaaattcgatataaagaacaaaaagtaattaaatatgaaaaacatttcaatctaaacaaaaaaaggtcattaacattagacatatcgatacctgaggtgtccttgttatatttactttaggtccaagccaattcttacaccaggaaagagaatggtatggtacctgtgagcataaatgttttgtcaacaacacaaatccaatttttatcgaacaaaaacttctgtgcgtttaaaactgcttagcttactgtttcatccccactcgttgctcctggatttccttccacgtcattccctgacctagatgaaaattggaaaaatatgtttctcagtggtgaaggagggatgatgggatggggtaaggagatcccggtttgaacctgtgaccggtgttgtttctttttagagggtaccaactaccaagtgtgctcactgctcaaaccgtgtaaagaaataatgataggttgttcattgtgattaacaattcaattacctcgaggttagaaatccttccatttcataaatcacatctgtgatgatccaattgtcggggtaaggcttcccactaggcgcaaaatagtatccaacctg

SEQ ID NO: 7817 - DNA, 737 bp, Cannabis sativa
tttttctaacacaagttgattaacttgtgttgtttcaatcaaattttcagatattgacagtaggagaacaagtaatagaaaaagtaacctttttttttagaaaaatatatttgttatcataatttaaagaggtaaatcatttataataacaaaggatataagtgaaggtatattctccaactctagaggaaatttagccaaactgtgagtagttatattagtttgtaagcttgatataactcaaaaaaaatgataggaggccaaaaatatctataattatatcctgaaaaaaaaagaaattacaggtgaagaagctcccaaaatatttgaaactagcaaagcattaacctcaacttgtgtaattggcaattgcatctaaaggacccaattcaagctatgaaacattgcttttgtctccatctcataggatgcaaatttactaactatgggctttgagagagcaacacctacattgccaaacgcgtcgcaaatcacaacaccaactccaataatatttcgattagcatccaatgttgcgtccacattcaagttgagatcaccaacggctggtggtttccattgttcttgtataggggctgggggagagatcctcagagtggcactttgagcaagatgttatttaattttagctgcacaaaaattttgcaaaaaagtggcagtaaaggaagctaacacacgagctggtttagaaatattgtcatggaccactcgatttc

SEQ ID NO: 7818 - DNA, 720 bp, Cannabis sativa
aaaaaaaaaattccgttttcatgtattttttatagtttctttaaatttttaattagtctatgtaaatttttcaagattgaatccattttatttatctatttttagagataatccttttattttatatagaccccagttggcaaaaggtttttaaatgtaacgtgaaccaataaaaaaaatgaacattattttcattgataaagaaaaagaattaaaaaacacattgaaaagattgtacacaaaaaagatacatctcataccaaaaaaaaatgatacgtataagaaactcattagtaataactgggtcaaaactcggaatggtgtgaatttagtataatatctgcttgttgtttgaccacgttccaagcttcaatgacatgggattcctcagtaagactcgcaccaaccgcgaaacgcagaagaaaaattccaccaacaaccgaatgggtcatgtaaacccgacccgaacggttaatggagtccatcagcttgttgttgagttcattctctgttaccatttttttgggagaagtatcactaatccttctggagccattaatctcagaaagtatagcattgttattagttattgcagatggtgatattctgaaacataaagtggcgaaatttctaggaacgacaacttcaaatctttcgtcggcttccacgaaaccttggaatagtttggccatcttaacatggctacgaagaaagccacgt

SEQ ID NO: 7819 - DNA, 581 bp, Cannabis sativa
ttataaaattggtagctttaaatttgtgttttgggcttttattgtactttagcaggtgaataactttgtgaaagtaggtaaatactatagatttaagactctttttccttggtggagttaatatgggcaatcttatttccaatttgatggaaattttagacactttaaaaggattagtaaaactactaactaattttaaactaaaacatgatgagatagtttttttcttcttgaaaatatttaggcaacatctatttcagtatagcggctgttgacttacatcatcttttcaagtttggctgtcctgtctgtgtctaattatttgatatcattgttattttgtttactggactcagtgcaaccactacagtgattttctctatctcaattacacaagtgtgtcattgctaccattcattttgttgagggcacttcaaaagtcacttgtctaggagttctaatctccttgatttttgcttcaccactgttatttggagttttcataagtaatgctatgaccagtggttctggcactaacacaagatatctagtcttgtatcattgcaataattcctgaattc

SEQ ID NO: 7820 - DNA, 866 bp, Cannabis sativa
tatcatcaccatcaccttcatcagcttctgcttttgcatttctccattgctctaggagctgtaaattattaatagttaaacattatttgtgctcaaaaatatatttaccatatcgagagacatgtaattatatatcggttaattttttaagatatgtaaaaaagataattattattattaattgttaccgagtccaattgcttctgatcctttcattattcgcaagcgcttgcatgaatcaacaaacatcctgcatatacataaggccaagtaattattagaagagtaataaattaagttaattaataagtaataatatagtgattattaattatcattaaaaatgaatataatattaattaacttactcccatggaacatcaccaacgagcatccaatctccatccttgtcttcataggatggtacatactcagaactattcagtagatccatcaactttctctcattcatgaagtctatcattccttcggccccgtaattaccttcatcatcatatataattattaaaaaaaaaaacaataatacgttgcaagatctacacatattaattaccttttaatatcctataatacaataattaattattattttgcacctagctacctagttctaaaataactttagacctatcaaacttttgtctgctgttagcttctaaggattgaagtggttctttctgtattattctttctttaattaatatattactattataactaataaataagttattgaagataagaaacaagcactatattaaataaaattatttaactaatatatctttttagacaaaaatcagaaaacaatcttgcgttcagacctcgaattttaacacgattaa

SEQ ID NO: 7821 - DNA, 1704 bp, Cannabis sativa
gtactcagtgtgagaaactttaggaaaaggtagtttgtggattttacccaaacagcaagcaggacagacaaaatgagagtctttattgtcaacactgatattacatgatctaagtacagacttgacaacactcttggatggatggccaagtctattgtgccatacatcaaattcagaaagttgtttcttattacagtgagtacaggaagctaaagttgcagagtggacagtaggaaaagatgcagggtctgggaaggtattgtgccaatctttagaggtgctaggtgttggtgatgagactatgttaaggccttcaaaagtataaaggccattcttgtgtttcccctgtagaagaacctgcttggtaacctgatcctttacacaacacacatcaggatgaaactcaaagaaaactttgttatctttggcaaacttagacacactaagcaagtttttagttatagcaggtacatgcaacaaattattaagcacaagaggctgtgtagatagattagattctaaaaaggtttgacctatgtgttggatagacaaacctgatccatcaccaacaaagagctgttcttgaccagtgtattcagtgctttgagctatgtttgcaggatctggtgtgcaatgacttgtagcaccagaatctgggtaccaggtcatgtcccactcattggtggatgtaaggatattggcctgaggtgctgtagcattggaattagcagtgttgctactgctaggaggacctggaaaattcttatcaaaacgatagaaacagctttgaacagtatgtccaagcttaagacacaattggcactgaagtttgttatgagtaactggcactcgattccctctaccaaagctaacattgcctctgaatggagtaaactgaggagaatgaaaagcattgtagttattgaaattacctctaccaaatgattgatttccagggccaaagtgaccaaagtgatttgggaatcgactgaagggttgtgtcttgtatccacctcgaccatagttggcaagattggcttcaatagctggatctggttctgtggtagcaatatgagcactgtgatcaatgtcacgatcaagcttttcaattcgagattccgaagctagaagcagagcttcaatctcagcaactgaatattgttcaagtcttgtattagtggatatgacaaaggtgtcatattcactaggtaggcctttaaaaatagctcgaacatgatctcttggagagagaacatcacctacagatgccaaaagatccacagtttccttgactttgagcaggtattcattaagagacatagatcctttcctgagattctgcaatttagtttgaaactcgaggattttggcagagacttgtagggtgaagtacttctccagagtggcccagatttggcttgcagattcacatcccaccattcgagtcaagaggcttggagtcatcgatgacagaagccatgacacgagtagctgatcctgagcatcccaatcgagaaactctggattatagattttcctggttcgatcttcatcactgagaaactttgatggaggatcggaatcaaagataaatcgttgcaggcggttgcctcgaattgcagcaagcacttgctgcttccacagtaagaagttgtgatcgttcagcttgatcgagaggctgtgactgaagtaaattggagagga

SEQ ID NO: 7822 - DNA, 1053 bp, Cannabis sativa
ctgagttaataaataaaatacaaaatagctctggtttttttccaattaaagaaaccttattcttttcgcaacttggtatggtcaatacctagttggggtggcacgcaaaaaaattctaaatttagcaacaacaatctaaataaaacggaattctattgaaagtacatcaaagttaagaagtaacttagtccttaaaaaaaaaaaaagagagagagagaaaagttaagattacgaagtaagatcaacacgttaaggaaaacttatgctcaagaaacaaaaagaagatgtatgcgaatgagatatcgagtaaaaagagttttgtcgatcaagaaattcagcactagagtgcaaaatgcaatgtttccttgatccaccattttataagagtgagttattaaaattgattaaggaaactaaagaggggaaccgaaaaataagtggaaaaggcaaaggtcttttggctcgagtctatagtagtcgtggtagtaatgtcccgaaaattattttttcctaaaaaatatttagatacaagttttagtttaaagttatgactataaatatatttagtgataattaattgtaatttcacgtcaaaaaaaaattataatttttgtgacttaaatttgtaattaaaaataagattttttaggggaaactaattcgggtgcactaactaattattaatgtcgagatcaaactgttatttattaaccagaattaaagaattacatttataatttccgttatgtataaatcacagattttgtttaaccaaatccaattaaacttttaagtagtgtataataattctacggcagttgattataaatgaaacgaaaaaaaaatgcaaataaaataaactaaaaaaactaatatattaatataaaaaaagaaaaaacagtacgtaacaatattaattgagtaaaaaataaaagaaaaaaaaaaactaaaaaagctaatttgttcctaaattaatatatctaaataatggccacataaaagggttgaattgaattgaatgaattaattaaactctgtcagcggcagagagct

SEQ ID NO: 7823 - DNA, 1616 bp, Cannabis sativa
tgtgttggatgctctaatgcatggattatgttcattgtggtgtaattagcaggtctggaaggtttggtgtgatttggggtcgatttgaagttgtggtgtggttttgtgtgtttcctgcattgaaccggaattccaatttagggggacctgtagaaaccgatcgaccgatcgctcctctaatctagtgtccaaggttgttgagtccttatttttatttcttaatgtttctctcctaccaagattgtcgatttctctgatagaggtagacaattttcaattggttatgaagattaaacataaatgggaaaatggctcctcttatctagtgtccaaggttgttgagtccttatttttatttcctaatgtttctctctatcatgtaccaaggaatgaaaatgttttggcacacaatttacaagtggttcattaggtaagaatttggtttggagtacaaattctccattctagtcttatgtaatagtagctctgtactttattgttttacttttattttatttattttttttttttttgaggagattttattgttataattatatcaattaaagttacagttattcttattcctaaaaaaatgtgagaagttgaagaagtacgcctgaatctaccgctacaatctccatagtttaaaagatgacattactaagtggccaatttatccatttcacattagacggttttcttatattagggaaagggattcgaatttggcaacactaaaactagtttgagaaaaacaaaagaataaatatctcagaaacaaaaccgaaaatgacttgacgtgtaatatcacaattgaattacgaccataaacaagaaacttgtcatgttaacctttcccttaaaaactaaagcatttgctagtcagtataggatgattgagttagtctaggttccctctactcacagaatcgtcccccaaagtcacaactgagtaagttatcattcaactactagtaaataaaatcccaaaaccaaagtagttctacctacctcattagacaatggttattaattctatataggtctcaataaacaaatgaagaatccatataattcttaaaatatcaagaacacataatccagcaaatgggagaacaaaaacaaaattaccagacctcattaagttttatggtttacatgaaaataaactagtaaataaaaagaaaacttctactgacaaaattcaagggcgttttgggtgactttcactaatcacttcttggttttcttggaaaccctacaaaaatcgaaagtaaaagaccattgttagcttggcaccaaaatagataatataaccaaattcatatccaagaaaacttactctgtttgttggggtgcaggtgtgggtgcagcaggtgccttttctccaggtccctgtcgaatccaacacaaatttcgaatcaataaggtcaagagttagaacacaaacaataaggtcctaatgttaatttcattaacaagcagcaatacagcaattactactcctgtatacagagccaataggagcatcaaaatcaagttgatgaaacattaacaatagctagtaattggttttcaaaattggggtacctgtgcaaaccgctcctcacgac

SEQ ID NO: 7824 - DNA, 1923 bp, Cannabis sativa
aaaaaagtatgttaatgtgaagcttctggaaaatatcaagaaacttcgaaaactgcttgttaagtttcttcttttgaaatcgctgaggatataaaatcttgatgtggtgctcataactcatcagaggctaatttttctcaaggttctcaataaccctgtcttcctctagaccatcatgatctcaaccttaatctttggtgcatgaataggcttcttgactgactcttctagtctttaccactccttaaaatgattgtactgtacttttctttaggatttacctctatattacttggaaaattttcttgagatttgttatgaagcatcttagccagttgccccacttgtgttttaagatttctgatggatgcccttgtcttagtcatgaacggagtttgtatagtggattacaaattaattttaggagcaggtggagcttgtgaattttgctgctgagaagtagaagcttgattttaaaattgaggctgctgcccttgattattcatccatttattattaaatgaattgaagaaaagtttgttgaattacctctgaaagttaacaattgcttgcacttgagcaggagtcatcaccacgtcttcaattgattcacacctattagaagtgtgtggtccttcacaaatctcatacccaattaaagcttgtacaactttggcagcttcagttatcttttagagtagtaacatgagttgtcaaaacaataatagcatccaatttatgaataccagctatctttttcttcccatatgctctttcatcagaatattgatggttgctcataactatgtcttcaaataattcataagttccaggtgcacttttgctcatgaatgtgcctcaagatgcagcatcaataatggttctagtagtaggacatacaatagtataaaaattttgtaccagaatccaatgctccataccatggtgggggtactttctcaacagatatttaaaatgctcccaagcttcatacaaagagtcaccatcattctgataaaaattatttatttctcccctcagtttagcaacttttgaacaaatgaagaattgtgataagaacttttgagtcagatcttgtcaagtgacaataaaatttagttgtagagacttcaactagcttttttttttcttttctttaaggagaatggaaaaagctacagtttgatagcatcatcaatcactctattatatttgaaagtatcacataattaaaaaaaaattaaccaagtgagtgtgaggatcttcagaaggcaactcactaaattggagagtggactgcataatttgcaagatagctggcttaatctcaaaattattggcttctactgttggtggtctgatactgttttatacccctgacctccttgcatagctacatgaattagatctttccctttgttattcgctatcttctctgatttcttggcctctcttttgttctttctatttttcttacaagacttctcaatctcaggattcaaaggaactgggctatctgcacctcttctactatgcatataataaattcaactgagataagcaataatagcaactaaacaggttaaaaaaaatcaaattagaaaaaaaaattaattaaacttatattgataattttcaatccttgataatggcatcaaaaacttgttcggtaaattcagtacgcaagtatatgcattctgaactgatacatactgtaaggaccgtatggataccatctatttctctattggtatgatattgtccgctttgggcctaagccctcacgaatttgttttgagcaccttcccaaaaagtctcattccaatggagatagtgttcatccttatatttccaagatcttttctatttctaaccaatgtgggactttggtcaaaaggtgtcattccaatggagatagtgttc

SEQ ID NO: 7825 - DNA, 587 bp, Cannabis sativa
aaaaaaaaaaaaaacacattttttatgaatatctaagatgaacttagcgtggaaagtgatggagtaaaagcaataaaaaggcaccaacgtcatttgcttagcgtgcttattataacattacatatgtgcatatgttccttcatctctaacgttaacgttttttttttcctttctttctttctttcttaatgttttcctcaaaagcattcccatacgttaataattaatagcatttctaacacttatcaaaaattaggccacatacatacatacacacatatatatatcatgtttaaaatcaacacaaaaaatgtgaaatactagaatatcacatattatttgtgataaacatatatttttggaaaatgggttctgggaattattacaaattaagaagaattattcttgaattttttcatggtagtagtagtagtagtagtgtttggatgcagagaaaatccccagaaaggatgatcggtcggtatggctattcttaccaaggattgaagctgttcagctctactaatagagattggacaacgtttggtacaatgtacgtattatacacttcttaattaataatatat

SEQ ID NO: 7826 - DNA, 828 bp, Cannabis sativa
atgaattgattgttttttatttttcagggaagcgaaaggagaggtcggattcccaaatttcagtcaatcctcttactccggttaatgatgattttaggtagttctattgtaatggtttttctagttgctgtaaaatatttttattatatatattcgtatatagaataaccttctattgccacattgagttgactgtgtctgagaaagacgaagctgtcaagaaagagctaattttgttttagaatattggtaacaattaatgataatatctttgtgtttggttctcaaaaattgcactttcagcattacaggccgagacccagttagcaacaaacaaataaaaaaaaaagcccaacttcgcagtggtgcttcttcttaaaagttccattcatttagatctattttttttgtttttgtattgttcataccaatttttgggtttgtagtcatattttttttactgttattgtattttgtttatgtattttatttaaattatacttgtatttttttaattacttattatgtattactgctgttaattataatgttattatttttttgtatttttttggttattaacagatgtatttatattacttaaataaaatctagatgtatttatattacttaaataaaatctgaatatatataatttgcaatttaaattgataattataacaatttaaattcttaatacaatctgtactaaatcaaattaaatattttttttaaaaaaatatttaatgtagtgacattttgtgtgtgtcactatatctccataaatattaataaaaaagaaacaaaaaagatatagtgacgcttcat

SEQ ID NO: 7827 - DNA, 576 bp, Cannabis sativa
tgtcaaggccccaaataattactcttaccttttattttaaaaaaaaaaaaagttaaaaaaaatcatatagagtgattctacaatacactcccttagaagggatgtattgatgcacactttacttgtttcaccatttagttttagtctaattctttttattcatatttatgtatattatagctatttaagatattctataataatttaaaaaattcaaaataatttataatataaaaaataatgtttaaatagtttattttacatgtgtgtaaaataaaatagttacgcgtgcaatatactgtttgaatgcagttttcagcgtgttaaattttttcaaatttcttaaaattttataaaatatcttaaataattataatttaacgatcataaaaaaaaaattaactaaaaaattatttcacatactacaataaataatgatggatgtacaggtatattacaaaaatttccaatcatatatatcttccattcgatcctatcataaagataataaaaagtaaaccattgattaaattaaaacctcactatttaatctttttttggaataccataatgcta

SEQ ID NO: 7828 - DNA, 696 bp, Cannabis sativa
gaagaaggcaagcaactatccttgaatcagcaggtaaaacttatccgtcctttctcattacaggatattaagaatgttcttttcttaattcttggtataaaaagtcctagtctgaatggttttggatcgagattttttaagagtttgtggaaggaacttggtcaagatttctctactaccattttgagtttctttcaggagggtgtcttgccaaaacaactgaatgaaactcttctaacgctaattcctaaagtagagaatccttccaaagcaatagattaccgtccgataacctactgtaatacgatatataaatgtatctcgaagtttcgaagttgatttgtaacagaatttcagaggttcttccttggctagttagtgacaaccagggagcatttatcaaaaatcgctcccttgcgcacaatgtcttgatccttcaggatttaatcaaagggtaccacaaaaaacaaatccctcctcgatgcctaatgaaaatagacttgagcacagcctatgatacaattgaccgacattttttggaaagccttttaaaagcctataggttcccaagagtatttatggagtggataatggtttgtgttcggagctcctgctatttactggcaatgaaaggaagaatacaaggaaagtttgagggtgcaaaaggcttatgacaaggggatcctatgtcacccc

SEQ ID NO: 7829 - DNA, 622 bp, Cannabis sativa
atggttaaacccaattgctgagagaacattaccatccgttggtaggttgccccggcgttctcaagcccgaaaggcatcaccttataatagtatgtccctctctcggtaatggaagatgtcttttccctgtcaggagggtgcatcattatttggttgtaccctgagaaagcgtccatgaagctcatcaactcatgtctagcggtagcatcgattatcatgtcgatgtagggtaacaggatactatactttgggcaggctttatttaaattgacgaagtctatgcaaactctccatttcccattctttttgggtactactaccgggttggcgagccttatagggtattgtacctccataatagtatcattttttagcattttctcaatctcgtcattcacagctttgtttcaatctgctcccatcttcctcctctttgtttgacagggatatagtttgggttcacatttaatttgtgggttataattgctgggtctattactggtatgtccgaatgttcccatgtaaaaacctgaaaaatattcacttagtagtttcacgatctggtcttttcattttcccgtaagtcccatgccaatgtaggtagtcttggttgggtatgttg

SEQ ID NO: 7830 - DNA, 504 bp, Cannabis sativa
agagagagagagagagaaatcaatgaaaaaagaagttatttcaaagctgagaaaaaacagaaactataacaacaaagcgcagtcatagccccatccaaaaccaaccctaaatcaaccggaaatgctgcccgcaaaagaagaaagaaggaataaatacacggccaataaaataaaattaaaatagagttgaacattatgacaaaatagtattttagctgtccagtaaacattatggctaaaattaacctatttacaggtcataggagaccacatttaagtaaaattataacttgcaagcctataagctatacgtacaactttttcctatcaatcactgactgagttacaaatatgagatcaagccacttaccctaagcagccgaatttttccccacaagttagatgtgcttttgaaacacagataatatgttaaatcatctattataatccaaaatgaaatatcgccattaaaatcagaaactaaatgatggaaaggagaaagta

SEQ ID NO: 7831 - DNA, 640 bp, Cannabis sativa
agcctccacagccctaaatgtgtcccttacagccacaaaaacaacgtcggttatcatcaacaggttgtctaggacacgtggcttgagtcccatggaggttgcagctgttcaggactgcgtggaattgattggtgactcgttggaggagctggaaaagtcagtttgccaaatgggtcaactgggagactatgattttggggctcagattagtgatattcagacttggattagtgctgctttgactgatgatggcacttgtgttgatggtttttctgagggtgggaaatatggtaatggtaatggtaatgccaaggtcattgtacggaggcatgtgcttaaagtttctcatcttactagtaatgctctggctctgctcaataactatgcctcattagttcaagcatccttgttgcattaagtttaagttttctgtttggttctcgggaaagaaagaaagaaagaaaagttgggaaaagctaagctattattgattgagagaaaagattactcttttggtacgaacctttttcatttcggggaaaaaagctattatgacagatgaaagtttgttgtcatatatgttggatagtctagtgagaaatttgtaattaagtgtatgtatgtatacatgtgtttgttt

SEQ ID NO: 7832 - DNA, 1457 bp, Cannabis sativa
aaagcttagataataacgatcttatagtataaataattttgaaatagatattgaagaagctaccaaaataaatcaagcacccattttataaaaagtaacatacattagcactattatggactgtaaaacaagaatgccctccaacaaacatgtgagagaccatgagagatgggactgactgattcaacaaattattaattttttttttcttcttctcttcagctactcattttcgatggtgtcgaagaccaaggggaatctcaagactaactcacaagcttagacgtgctcacaagccagttttattacaatatggaacatgaacaaatatttttctttggggcctcatcaactttcttttctgttaaagtcaaataaaccatttcttagaagaattcctagccagcatagatataaaaaacacaagctcatcaagtacaggggtgatattgaggcgatgaatataaaaaattcagaaaaacttgtaatctgggagatgaaaactgcgtacctgttttcatttttgccaaagatggctgaacaacaacatgcatggtgattactcctcttggaagctctccgaatggcgctttacactgacccacagtcttgttgttttccaatatcttcccagcgttgatcaatttaatgtcatttgctccttttggtacaatctttttatctaagagaggcaaaataaataatgatataataaacagaagacaaatttaaacatcccaaaatgtagtagttagaaagggagaaagggaaagaggaattttacaaatgacaatcttgtagcatataattaagcctactccatagatactcgggatattgacagaagcagcgatgtaaagctatatggacatgaagcatgtccaagtccaacaacatagcttcactctgatgccaaactttagtcattatcatgttgacaaaaatgtaatttttgggtaaggaatgtaggtgacctatgtacggtgcttatatgtccacttccaaccaaatctattcagaattcttttcttaaaaaaaaaactaaaattccaaaaatccacaacagggtctttgagctaccactgaatcctataatctattctctgaaaataataaaactcagcagctcacagttaatcaaataggggacatggaggaacagaacaccagataatgtgaaagcaataccttaccttataagtgtcataataaaagtaaactaaacggcgacagttaatagattctttacgcaataattacagtaactcgcaattagaataataagaatcaaacatatcatgcagggaaacaaatatgaatataagaaagcaagttgaacaatttaatgcaccgtaatccatgaccgtttctttgtttccataactcaagtctcaagatcaatcaacacaagtaaacacaagtaaaagttacgatttccataattgttaaagaatttc

SEQ ID NO: 7833 - DNA, 1090 bp, Cannabis sativa
tcttttccccacacgaggctacgcaaaaccaacgaagccttaaaacctttctttgccttaagaatagaagaattcaagaagtaagaatctttgagcacttttgaacaaaggccattctgattttttataattctctaaacttgttttgcaatgagagttttattgaacatctcaatattcctgaaacctaaaccacctctctctttaggcttacaaacaaaactccatttgcaccaatgaattttttttttcacttgaaccccactagaaccgggcaaacatattgtggagactattaatggtttttttaagtctaaaacaagtcatacaatagttgggaatagcttgagccaccgctttaataagaattttcttgccaactgcagagataaaagatccattccaacctttaagtttgttccaaactgataaactcaaaacctctttctttttccttccaacaaatacagtaagcgcaagtaatgaccatggttatccacaatttcaacccccaaaaaactagctagcgatttcctagtagccattagaccattcttgccaaatgacatgtcagttttatgaaaattaataacatgtttagaagcttcagcatatttatgcagaatagtcttaaagcactgacattcctcttccactgcttcaaggaaaatcaagctatcatctgcaaagaagagatgagacacactaattccacttctaccaaactttgaccccttgaagttgccaactatttccttatattgaataaggctcgagaaagcctcgacacataataaaaacaaaaaaggagacaatgggtctccttacctcaaccccctttcaggtgacacttttcctttaacctccccattaataagaaaagaatatgacacaaaggatacacaactaagaatcttccttacccatctctcatcatacccaagtttacttttttaataaactgccactcaactctgtcgtatgtcttttccatgtctaactttaaggcaacttttgaaccatttttaaatctattcttcctcacagtatggaggtcctcaaagccaatgatcacattctcacgtatcta

SEQ ID NO: 7834 - DNA, 774 bp, Cannabis sativa
tccattctttattagaaggctttgctatatactgtatcgacctgtgttctgtatgtgatgaattcagtgatggcttcgagcccaaatcttaaatcccattcaatattgggctattcaaattgattaacaaacaggtaggcaagaacagtgtacctctagtttggagttcactaatcttcaaaactgaccaataacaatttataatgtagaaaactactattcaaaataaatttctcttctaactcaagaaaacctaaatgggtaaatttggatgacaggctttatattatttagtattcaaaatttactttaagaaatgaaaaataaaaaaagaaataggcctaacaaatgggaaataacagcaaaatataggggatcctatggtgcaatcacaattcattgaagtgtggaatccgaaagacgaatcagttaagctcataaaaaaggataagcaataacacgagcgaagcgaacaccatgcgtgtgcttatacaaaacagaaagaaattcaaagtattactaaatctccatgaattcactggtagagttaggattatttcaatgataggaatcataacgggttgaaaaatggactgttctttcctcaatacaccatttcggacatctgcatcaccttctatttctttccggtcatacctgcaataacctgctaattcgccaaattataaatatcagtatcgcaaaaagggtagaccaggaaagaaagaaagttaactaacaaattcaaattaaagagaccaggacacaaactca

SEQ ID NO: 7835 - DNA, 656 bp, Cannabis sativa
ttttcctatatcacatatatgtatgtattatataaattatcaatagaataattaacatggaaatgtatttattagtgcattacatatatatatagattgtaagtgaaagtataaaataccatcctaattatgatcctatctataatatgagttaaatattcctacaaacaactctaagtatattaattttaatctaataaaattatatttcgaccacctataaataaattattttctctcaatctcacatcacctaaattatttacgaaatacagtactgccttatatatttgatgatatacattaaaatttatatggataatagttattggacactctataattcaaattttaatataaaaaatagtatcctatttattttttgaacaaaaaatagtatctactattcatgataatatatatatattttttttaacatataacaaattaggtacttaaattttttagactacaaatttttcttaaattattcaaatattattagatccaaaaatttccgtctaattttattgttaaaaatataaaaaattggtaaaacacagtatgtaaataagtatatattctatatatatatatatatataaatattgtatattatttttgtttatggtcccctaataatatggttccccacc

SEQ ID NO: 7836 - DNA, 2166 bp, Cannabis sativa
  modified_base (1765)..(1771): a, c, t, g, unknown or other
agggtttctagcgttggtgttagataccactcgacccaagctaatttagccaaaacacattaaggtgatacaagagttcttagatgtatttccagaagatgttccagggttaccaccgcaacaagaaatagattttatcattaacttagcacctagaacagggctagtttctaaggcaccctatagaatgggtcctactgaactcaaggaattaaagatacaattttaggggatgcttaacttagggttttctcgactcgtgtgtcaccctggggagctccattgttgttcgttaagaagaaagatggatcacttcacatttgtattgattatcgagaatcaaacaagttaataatcaagaataagcactctctgcctaggatcgatgaattgtttgatcggatttagggaaagacaatcttctctaagattgatcttcgcttggcctatcatcagttgagaatcagagaggagaacattccaaagactgtctttcattctaggtacaacccttatgaattctttgttatgtcttttggactaccaatgcttcaaaaacttttatggatttgatgaatatggtatttaaggatttcctcgatatacatgttatagtatttattgacgatatccttgtgtactctcaatctaaagcagagcatgaacaacatgtatagattattttatagcgactacaggaacataaaagttatgccaaatttaagaagtgtgaattttggttattctaagtgtccttcctagcgcatattgttagtaaagatgggatcatggttgatctgaggaagattgaattcgtcaagtattagccaaggctgaaaacagttacagaagttagaagctttctagggttagcaggctattctgccattttgttgaagggctttccaagattttgatgcccttaatagaattaactaaaaagagtcagcagtttatatggttagaaaagtgtgaagcaagttttcaagagctgaagcaacgattgatcacaattcatgtattagccctacagtcagatcaaaaaaatttcgtggtgtattgtgaggcatccaagcatggtctagggtgcgttctgatgcaagctgataggattattgcttatacaagttacaatgtcgttctctagtctcatcccaatgaattggagaacgacatttcctactataaaccatctcgtagggagccatccctattgtactttgatagttgttgttgtaagaaaattctatcaaaggcaaatatttactccatgaactctcaaagtccataacataagcttgtaataaatcttctagtacttgaatcgtcttctcagactgtccatcagttagagggtgcaaagttatactaaactttagcattgtacccatagctctctgaagatgtatccaaaactttgatataaactttggatctctatccaaaaaacaatagattttagagttccataaagacgaactatcactttcacataaaactctgcatattgatctactatataggttgcttttaccggcagaaagtgtgctgacttgtgaaatgattcactatgacccatactaaatcatacattcccacagttttagataaattaaccacaaggtccatgataacatcttcccacttccactcgagaagtgttagtggttgtagtaaccctgcttgatattctgctttaatttgctggcatgtcaaacacttgaacacatatttcactacatctttcttcattctgcaccaccannnnnnnggtttcagatcttggtacattttggtggtaccccaggtgtaatgaatatggtgtagtatgggcctcaactagtatttcttaccggaactcatcactgcttggtacacatacccaagctttataaagtaacatcccattgttcaagattgaaaagtccttaggctgaccatctaatacctcctctcaagtcttaaccaacactgaatctttcaactgagcacctttgatcctttttaataagtcagattgaaacattaggttatgatgtttcccaactacaaattcaataccatctttagccatatctgaagccaactaagtgcgatcactatggtactataaacgtccccaagaccttttttgctcaaagcgtctgccaccacattggctttcct

SEQ ID NO: 7837 - DNA, 755 bp, Cannabis sativa
tacaccgtctctactctactaataaagttacaaaatcatcacctgagtttcccttattatattttccatgaaagttccactaaaacaaattaaaatacctatgcagtagttggattgctacaataaatatattaagatacaaacacgctagttcaatatataatttcaaaaataccaagtctttaaaaaagcaacattaactcaagtcaaagtagggaaagagggtgtttcgtaaatatgaacaaaagtagtgttgttttctagaaactcaactctctcactttgtctcaacacaactatataaatatatgtagtcacgactcactgcatatgtatatatgtaaagagagagagagagagagagagagactaacaaaacaaaaatgattcgtggggtggggttttggttggtcatagtactagtagtggtcatatcgttggggtcgggggttgaagggggtagtggtggtggcatggaacaccggctgagctggggacgcagcactagtagtggtggcaagtgcgagggatccatagcagagtgcatggctgagaacgagtttgacatggactcagaaatcaatcgtcgtatattggcgaccacagattacataagctatggtgcactgcagaggaacactgtgccttgttctcgtaaaggtgcttcttattataactgtaaacaaggagctgaggctaacccctacaaccgtgactgttcttccatcactcgttgccgtagttgattattacta

SEQ ID NO: 7838 - DNA, 608 bp, Cannabis sativa
ggcacaaaacccaacaaaacgttcccgagctcttgctaggaagcttgaggaagttttaggacgtttcatcgaggttgacactgcatcctttaaggaaacttggggtctgtatcttcgtgttcgaatcgaaattgatgtcactcaacctcttccccgaggaaccggattccactttcaaggtatggccgcccctgtgtggttggaattccgttttgaaaatctgcctaacttttgtcacttctgtggacaccttagccatattgttaatcactgccctgatttcctagccaagtgcgattctccctctaccccacccctgctacaatatgaccacactctaggagccaaaatccacataacctcaaatcccttttatattgccaatactcgaacccgacttcgtcctcatgttactaatcctatttccttagcacctcctccaaatcctcggccccctacaaaccaaatcatctctgaaccaccctatagtgatccaacatctgagtttgggattcaataatttcatcaaccacgaaccaccccggtaggatgctacatgacacatgtttctcaaaatacctccttcaattgtggccataatggaacaa

SEQ ID NO: 7839 - DNA, 1362 bp, Cannabis sativa
ttttttttttttgaaaagagattttacctttttcttaagctaggcccatcaacctttttttaagtataggtacaatttagtcgggattatattttattatttcgatttgatttttgttagtcttgtcaatgtgacataattttaagtattttaaatcttatctgtatgacatgatttttaagtattttagccttatctactttttatgtgacatggttttgttttattttgcttagtttgtcatggctcatctttgtactttgatgacttgcctcaatcgctgaaattggttgggaataacaagttctctatgactgaaaggattattaatgtgtatagttacgtaccatgcacaataaatgagtgcccgagttacgagattgaataataaactcgctgcaacagtttctactgttgtatcttctaagcagtaaatatgtgtttttaaagttagttgttgcaatttttttcatctaattatttggctcgtttttttaattctaatcctagtcgtgtcttcaacggaagagatatctcgattaaattacaggctattattttagctggttattattaataaaattgtatgatttattcaaaaataaataaataataataataaaagtttaagaagagttgaattatttgtttattttgtaggaaaaaaattgagaaataagaaaagactttgaaaatgaaagcaattatgtttgtacataggaatagtcctaaccctactcaccaattaatcaagagtggttgtctctttctttagaaaaagaccattaagtaattaagtagtaccctattgttaacgtacatgaccagtaagtaatccaatcaatggaataaaattcataactagtactactgcatgcatggacttaaagacttaattaaaagccctttgaaaattgctccaatgtgatctttggttgagagtactaaattcacttataaacgccaacagatcaacatcttgtttcactagaagaagatactcattcagtctaaggctgcctttcttgagatttttatgctttgtatgaaattctggaagttttggtaaggcttggagtgggaagtacttctcaagagtcttccatatatctaatgatctgtgttgtttactacaataaatttaataatttttatttttatattatcaattattttagtataagtcgattccacaaggactattatcaatttattattcaaaaattagtaacaagaattaaaaaatgaaggtttaattataaagatttaacaataaactagaaagtaaataaaaatagatattacgctattaagatatagtcaatacaaaaaaattagaacttttagtgataattttttagt

SEQ ID NO: 7840 - DNA, 1142 bp, Cannabis sativa
aattagtgaattcttaaaaagtttaatgactgttatgtttggtagaataatttgtatacttgtaaatgtttcttatgttgagctgcaaaaacatttgtgccttaacttgtaacagatggaagcgaaacaacaaaccagaatggcgaagaggacgacgacctggatcttccgttgttcaacctctctacagttagtacagcaacagataatttttcagaaaacaataagcttggagaaggtggtttcggacctgtatatagagtaagttttgcttatttaatgttacaaagtaaaaaaacaatgataaagaaatgtaaccaatttattatagtgttaatttcagggcattttggaagatagacaagaaattgctgtgaagagactttcaatgagttcaggacaaggagtgaatgagttcaaaaatgaagtaaagctaattgtgaagctgcaacatcgcaatcttgtaaagcttcttggttgttgcattcaaggagaagaaaagttattggtttatgaatacatgcccaacaaaagccttgatttcttcatttttggttagaatcctaagaattaccaatttattgccattttgttgtaattttcttaacttgaaacttacatttactagatcaagtgcaaggacaactgcttgattggacgaaacgcttccaaattgtatgtggaatttctcgagggctcttgtatcttcatcacgattcaagattgagaataatacatagagatcttaaagctagcaatgtcttacttgacaatgagatgaatccaaagatttcagactttgggttggctagaattgttggaggagatcaaatagaacataaaacaaacagagttattggaacctagtgagtactcttgcatgtttctttctatatagatatatatgtataatttaattatctctacttggtaatattttgcagtggttatatggcaccagaatatgcgtttgatgggttgttctcaattaaatcagatgtcttcagctttggtatattggtcttggagattgttagtggaagaaaaagtagaggctttcactgtgaaaagaatggccttaccctcattggacatgtaaggagcaataaacttcattggtaattaataatagggtaaattgc

SEQ ID NO: 7841 - DNA, 506 bp, Cannabis sativa
tgtcaattataaggttgaaaaaaagatatacagagtgaaaataatctctatttttggagttaaatagattgaagatttatgccaacaaccatcagatatatttttttgtccgtaaaataagtttaccgataatcctatatatgtttcgatatttaagatcattttttagttcaattttgtatggtcctttacattgtagttatttaagtcatcttacaaaattttaaaagatttagaaaaatttaacacaccgaaaaatatggttcaaacagttcgttacatgctggactcttttattttatacgcttgcgaaagattatttaaacatattttcggcatgttaaattttttttttaattttttcaaaattttacataatatcttaaattacacaacgtagagaattataaaaacaaaattctcaaatattaaaacagataagaattggtagatctttttagagggaattgtagaatttttctactttttttttaagttctatttcc

SEQ ID NO: 7842 - DNA, 690 bp, Cannabis sativa
caaaaagtattttaataaaatgatactctaatagttatgcaaatgtgtcttaaatttcacatttgagatgctaaaaattatgtcaaatttgacagaaaatataagttaaacttacatcataatatatattatatattttatttatatttttgtcactaattaatatatttacaacttatttatttatttaataatttttttatatagttttaataaaatttaaatactcttatttacttttttagttaatttacatcaaatcaattgtattgaagcataattgtaaaatttaaacaaataactcattgttttaaaagtttacacctttacaatgctgtagtatatatattctatcatgctcttggccatttattgtaaagtaatttactgtaaatttgtagttatagagtccccatgaactcaattctacacacaccccaggccaccacttgggggctccatggttcaatttctcccttgttcaactgaatccaaactcacagtaacaagactaaatctttcaagaaaagctgcagcttcacggcgtcgtattatctttggtggtttatactgactagctgataccccattatcaatggctaccttggccagcttaccatagctaccaggctttacaacggttagcaacaaagagcctacttcgcctttatctcgcttaaccctgtaaag

SEQ ID NO: 7843 - DNA, 703 bp, Cannabis sativa
aaggataagtgaaaaataaactactctacatgtcaacgggagcaccctcctgaacaagtagtgaaagggtattctcatcagaagagtcctcctcttcatcctcaaccatcatggcctttcctttccctaccacctagacagaaggatgagcaacctcctcaagatcgcccctaatcatgatgggccgctcaattggcacttagtcaccttagagagccttcttcttctttttcttcagagcctcttgctcagttgtaacctcctaagtcgcttgttcatgattttgaacttcttcggatgggtagagcccgtgcctaatgaaattagcctcagtggccaagaaggaaatattctgagccgactctggcagttggagtatcttttgggctcttgatctaagacccagggtaaaaagaggattataataaggtggaatgtgctagaaactgatgtggttggtacccatgtccttgacaaagtagtagtcctctacaaaccccccctccaatttcggacacatccttatctgtggtgtccgtcagccatttacattcatcctatgaaaagtagaaatacccagacctattctgcttggggctggactttagattaaacaactagttgatatcgtgggcagatggctgaccccatccttgggaagcataaagcacgcacagtaattcttggcctttgtgtattcttc

SEQ ID NO: 7844 - DNA, 1201 bp, Cannabis sativa
cataatttcaataatgaaattaattataaaatctttaagtacgtacatgcaaaaaatattataattaaaaccatgcatgcatgtggtgaagtaattaattaaactctctcacatctacatctttctctctattaatatttctcccttagctccagctgaaaccattcaaatcaaactgtttgcaattagaagaggagtcgttttgatcattgtgatgagtattcagatcaagtacttttgttgcaaagaaattagcaggaacaatagaagatgatcgagacaccttctcattattattctcatcatcatcatgatcatcttcatcattattatctaatttgacaaatcttttgtgacgatcttgatcacgagtagtgtcgtcccatctaatatcgctgatgatgatgattattattattacttcctccaatgctcatcgataacccatttctttcgatcgaaaacaatcttctttcttgcttaagaaacatgttgttttgatctagtaattctggagtagtaatagtagtagtgttattattaccttctttggactcgaaaaatgtagtagttgtagcactattattgttgttgttgttgttataagctctcaaaacaatcccatgtgctatttcttgatccttttgggatccatgctcaaatgtcaaacaactatctaccgagcaatcaccacggccgcgaccagggctagggttagggttagggttagggcacgaggctaattctggtggtggggttgcttcaaaagccgagttgaggcattgagtggataccttggaaacaagttcggagagttgaactttggcggcttcaagccccacgacagttcccacgttttgtcttccgagtgtttcttgagctttctccagcactgcctgcaggtattttccctgagcctctattcgaagctgcaagtgtcgttgaacctgatttagttcatcatcatccccaaaaaaaagacaacaaaaagaaaaaaaaaattgatcagattaatgcttctaaacattaatccaattctcacatgcaccaaaccaaaaattaaaaaaaaaaaatcttatgtagatttattacctctagttgttcatggagccttctttgtacttcaatttgcatttgtagtgtttcatttatgtgaaaacctctgctataataaattaacatagtatagtttagttaattt

SEQ ID NO: 7845 - DNA, 853 bp, Cannabis sativa
  modified_base (646)..(646): a, c, t, g, unknown or other
ctttatgttttactaagagacatctcataattttttataattttgttgttatttttatgtatttgtgatataatttctatcttttttgtttgtataattagcattgagctaaaatggcaaggctcatgacatgcttgtctcaagccaattgggagtcttgggcatttttatatagaagtttttacgtttttttttttttaatggtaaaatttaaaatatagtattttgaaaatatatttaaaaaattttctcaataaaatatcaaatatagtatcttaagagatagataaggtattttttttagaaaataattatgtgtattataaataaataataatataaatacaaaaaatagtatttaaaaaaaacaaatttgagaactttatgttgaagggtattttaggcttgggtggggctttagacatagcccttgctgccccacccttgaaccggccctagccctaactcataacaagggatgcacacgggatggagaatcggcagtaagtgctccttccgtccccatccccgttaagaattttaatctcaatcttcgtgtatttttcatcagggattgggcgaaaataaaatttacaataaaaatttaaatatataaaaaacattaaactacataaaaattaaaatnttacacattaattattattcaataaactaattattatccaaaatataatttaaaattcataaaaagaatattaatatactaaaaaaaatgcaaatatacattataaattaccaaatattattaaaaatataaaataaaatactaaacgagtctctgtcaagacgtggagtgtgatatttgtccccgccccattggacaaagatcgga

SEQ ID NO: 7846 - DNA, 742 bp, Cannabis sativa
caaactgtctttggcacccttgccgtggacataaaataatttgggatactctgaagaaccgaactggttagagtcaatctccctgcttgggaaaggcacttcgatttccatccttccagtctcagtatgattttcttcttgagaaaattaaagtcttcgcacctacgggcagtgaaaaagaatgggttccccagatatttttcatccgacttcagggaattcatatctaggatcgcttttacactctctctggaagtgataggagtgttgggagagaaaaccacaccacttttagagttgttaaccttttggcccgaccactcttcgtattttctcaaacattccgtaagagccttagcactcgattcagaggcttgacagtagaatatcgcatcatctgcgtagaacagatgagtaataggaggggcgtcctttgcaatgcaaatcccccttagaaaaccattagactcagcccgagagataattttagacagaacctcactgcacagtatgaacaggtaaggagataaagggtcgccttgtcgcagcccgcgattaggattgaagggagtcaacggcgcaccatttagaaggatagagtaagtaacaaaggtaacacacttcatcagcagagagcacgccctgtcattaaaaccatttgccttgagaacccttttgagaaaatcccattcgagacgatcataggcctttcgcatatcggtcttcactgccataacgccca

SEQ ID NO: 7847 - DNA, 756 bp, Cannabis sativa
gcatatattgttgacaaagtgtttttgattagttttgttgcatttagttttatttaatgctttattttgttaaactttttatgtttagtgaataaggaacaacttgaatgagttgaggaaaaaatggttgcaaatcaaagaaataaacatgtttttgttggttgcatgcagaaagtggaaatccttagtagatttgtgaagttttggtgcaacttaagcctttaaacttaaagaattaaagaagttggagtagcgacatggcatagaaattcaatgccaaggcgcccctttggaagataatagcaaaaagttggagtaatgggtgctacacaccggccatggcatgagtttaaccatgtcgtggcattacaaggttgctgcccagaattgtgacacacgggccatggcatgatgaagtccatcgcggcccgccacctctatttttcaccaggaagtaattccaagaagacacgagccacgacatggtgaagcctatgctacgacccgcatgtgaaaatatttctaaattaggctaagtaaacttaattcgaaaaagggaagacggtgacttttgaggaggcacaaattttgagagaaaaagcagccttggagactactaccattgattttcacaaagttcttttcttctttcttttattctatgttctcaattagttttatgcaatattttataatgattattatgagctagactcatatttaagtttttttaatggagattgtatgataatttct

SEQ ID NO: 7848 - DNA, 586 bp, Cannabis sativa
actactgactgtcacaattttttagttaaattattagttttaggatttaattgtagatatttaatgttaatttcactaaaatgagttctaaatctttttttttaattttgattaaattttaactatgttttattaaatttttaaatgatttttctttaaaattttaattgggtattaactttagggagttaattaacaattaaaaataattatttagtcaaaacacatttttgtttttaaaaaataattttaaataattattagataaaaaataaaaattaaataacataaacctatcaggggctgccacgtaggtactgacctggtacctatagaagttccactctaggaacataaaatatttttaccgtcaaaaatacgacttatgtacttatttgctacccgacagaaaacttaagtatttgtaacacaatttactctacaaaaattgatagcaaagtttctaagtaattttttttttttttaaataaatacttatataaaagcaatttaaatttactttgaagaaaataataataattcaaattattacttttttaattattaatatatattttttttaaaa

SEQ ID NO: 7849 - DNA, 852 bp, Cannabis sativa
aataacagaaaagtctttactttcaggattcaagcagtactggctcaaattgcttgacagcagaaatgccgaaacctaggtctttactataagtatacatcaaattgaattatttgaacaaaggaattttcaaatcagtctaaccattttttatgctttcgtcttttgttaatatttatttacaggtttgcacctgagtctgcacaagattttgaagaatttgtggagaatttttttcagggccttccttgcacaactgcaatttgtataagtatgcttggaagttcttatgctaattttttacaagagatcctacatcattcttcatgtgttagtgcgtggatgctagtatcacgtttggattctaagaatcaacctattgttgtccttcttccagtagattctataatagaaggtattttctcaatacatagttatgctcacataagtaataaatatttcaatgatttgttgctaaatagtagtatcattttatcagaagtttcagatgatgctggaagttctagctctagtaatttatctcaaagaaaagattcttgcaagcattggcaatgtccttggggttccaccctggtggatgatgtagctccagaatttaaattgatattagaagaaaaccacctatcaagttcaacatcctctttagaggatacaaaagagaacaggaaattatggtggtcatggagaaagaatcttgatcatcgtctaggtggattccttaggtatgattccttacccttttggccccatatttatttctcaattattatttttacttcaaaaatattgacttgcactagttccttgggaaactaagagcatgtttggtat

SEQ ID NO: 7850 - DNA, 724 bp, Cannabis sativa
gatttctcacaattcaggtatatatacttacataattatctaactatatttagttggtcaaacttattatatattaacaatattgtttgtatatatatgtatacagaatacatttggagcaggtagaaaagcagtttcagtaagagtatcaggggacaaagctgcattttacaattgtagaattctctcatatcaagacactctcttggatgattctggaagacattacttcagtaattgttatatagaaggagctgttgatttcatttttggaagtgctgcttctctatttgaagtaataatcaaaagttttaattatttatttatatattataagttatatatatatattttctcttgttaatcatgtatgtgtgtatatttatagaaatgtcatgtgcactcattatctgaaagagatggagccataactgctcatcgaagagattcatcagcagagaaaacagggttcacatttttggggggcaaaatcagtggtgatggaggttgttttctgggtaggccttggggctctttctctcgagttgtgtttgcttacacttacatgtctaatcttataattccacaaggatggaatgactggggagaccagtccacccacaggtatattaattatattcatatatgtttaaaaatataatctagttatatatgtttatattcgatagtgaaattaccgaatttactatgatagtgcataaaa

SEQ ID NO: 7851 - DNA, 875 bp, Cannabis sativa
tatatatatattatatataacaatggtgtgagtggaataatcactgggattttaatttggcaaaatagaagacttgatcatgagtgaatgcatgaacctcttcttaataattagtacttaaattgaggctccattgtaataactatagtactgtccacacttaaaactttttggatcttattttttaaaaaagaatttaaaaagatttaattttggaactaatatttatagtgatgacctacaatttcagtatcatcatcaaatattttgatgacatctaatttatgacgttctctgatgatggaataattatgaattaatcataaaaattgatcattattagatccactaatctgttattattgataattatttgttttatatatatgcatgtatctttgattaattattttttattattacttataaattacataaagaatatttaggcctcgtgtggtttatttgacaagttaaatgcatgaaccttatttatatattcatatataataaatatttcaatattatatatagtacactttcctcaaatgaataatttattttagtaatgttatatattttcaagttgctatagctgtatatcttttttgtttttttgagttcctttttcttcttctttttttttttttttttttttggttctagaatatttattataatatatttgaatgaagttgagtgaagaagatctagaaaaagtgatagtttgtaacaaattaattaagtgacatacaactaattaattattataacaagccaattcaaaaagggtgaataatctatttgtatatattgtatacatgtaagtgaatatttgaaattgaagctcaacattaatatatttacaaaatata

SEQ ID NO: 7852 - DNA, 726 bp, Cannabis sativa
ggacaaaataagaccaatttttagagtgaaactgctgtttaaaggaaagaacaccgagccccaggccaatgtcaacatgggcgcccggtgtgcttacacactagcgcccgatgatgcctaggggctaactcactacaatgatattttctcctaattccaactctcataatttttttggagcaaaacaagatggaatcgcaatcggatcgacggaaccaccggaagtgaggctatgtcaacctgggcgcctagtggctggggtgctgtcaccctaggcacagaacttttcatctgggacctagatggcatctgttgcttctcgaaaccacttgtatcttcctcgtgaacaaaaataaagtaaatttccaaaaaaaaacttctctaaaaagaagtcccggagtgccttaggttaagatactccaaccttggcgcccatagtggcctcaaggcatgcactgggggcccaggtggggcaacatctctaaaattgatctcattgatgttcaatcttctttttggtgaaaagtgctccacaaatttcagtttcgtcaaatttgcacgagcattgtccagtaaaacaaaatcggtgcccaggttggaatgtcaacctggatgcccaaagttgtggacgagctccttcgagatgtcgttgatgaaatatcatgtcaacttggtgcccattagggcttcttggtgcacgagtgccatttctcgtagacttatctc

SEQ ID NO: 7853 - DNA, 925 bp, Cannabis sativa
atatatatatttaaaaaaattagcttagttatattctattaccttatttattatttaagggacacacatgactagagtgttaagatttaagaatttatattaaatatttacaaacaaacatatataacatatgaattattttttaatgagtattactcgagaatttttaaaaaataattataattaaatgtcaactttaaaaaattaaattctaatccaatgacaataaaaaaaaaatagaatttttatacttaattttactatttaatttaaaaaatctcttttttatactatatcaaaaatatttttatatttagcattatttttatctctttcactctaattctaactaaacttaaacttaaatttatttttttatctttcacttggtgatagaataactttaattatataatgcaaaaataataaaaaaaattaattagataggatacttaaacataaaaattcaaattttactaataatattcattcatgaactaatacctattaaaagtatatataacatgaataatacaacagtatgactcatatcaacatatattttttttccaaaaaaaattccacacatttttaagatagatgtgtctatattgttatttttaggaatataactccccaaagtaaaaacaaaacaaactaattctattacataatttgtcaatctcattattatgacaaataaagcaataaaaatatttgccttagtgatgtgttctcttctctcctttgacaaaatttccctttttatctcaacaatacatcttgggtaaataaatagataaacatgctttaaagtaacacagcacaactcattatcaatttatttcttaaataataataataataataatgtataatcattttgaagtggggaagcaaaagaatagaaaggaggaataggcta

SEQ ID NO: 7854 - DNA, 1911 bp, Cannabis sativa
cacatggacaaacaaacaacagggagatgatcgtatctactccaagattgatcggattatggccaatcaaacttggttagataagtatcctacggctgaagctggctttatgaatgaaggactctttgatcacaccccagctattctgaccttatatcctcagtggcaaggagggaagaaaccattcagatacttcagaatgtggaagaatcacccggagtatgaggtgaagcttagggaaacatggtcacaaatatttcagggttcaaaaatgtttcaactggttagcaagcttagagctctcaaaccggtttttaaagacattaacaggaaggggtataatgatctgcatgctgcaactttgaaagctaaactggaattggaaaatagtcaggaggagcttcataaagacccactaaatactggtttattgaatgctgaacagaatgctagagctcattttatgcaggtacagagagattatacttctttcttgcagcaaaaagcaaaagttgcgtggattaagaatggagactcaatacagcccttttccatgcaagtataaagcaacgaatcaggcagaatcaaatattctcgatagaacaacaagatggaacaagagcacatgaaccacaacaagtgacaaatgcttttgtctcttattataaagatctgttggggacacaactagaaggaagaaggaaagtcagcaccaaaataataaacagaggaaacatcctctcccaaaaccaggcagatatcctcacacagaagttctctatggaggaggtgaaacaagttgtttttgggattccagggaataaagccccaggtccagatgggttctccagtttcttttttcaggataattgggggctagagggtgaagaagtgtatcaagcagttacatctttccttgaaccgggtaagcttcttaaggagataaactcaactattcttactatagttcctaaaatgaaatgcccaaatacagtgaaagactttagaccgatagcttgttgcaatgtgatttacaaaattgcaaccaagctattgtgctctagattgaaattgattctacctgatttagtttctcaaaatcagggcgaatttatccaaggaaggtatattgggcacaacataatgatatgtcaagatcttgttaggcactatagtaggaaaacaaacaaggctagttgtctcattaagcttgatctacaaaaagcttatgatactatagagtggaattttattgaggaaatgttaaatggacttggatttccaaagtctttcattaatcttgtgatgaattgtgttcgcactcccaaattttcactcatgtttaatgggactttgcatggattttttgaatccaaaagaggccttagacaaggtgaccccatgtccccattattatttgttttaggtatggagtacctatctagaatcatggggaagattggagaaatgcaggattttaaattccaccatagatgtgcaggaatcaagttaaaccatcttgcttttgctgatgatgttctattgttttgtcatggtgactccaaaagtgtatgttatatgttgcaagggctgaagctattctccttaacatcaggattacaaccgaatgcttcaaaatctgctatttatagcagtaacatgtcaaaatcagatctggaaaagattgtgaaagcttcgggttttactctccaacagctaccattcacatacttgggaatccccatttgcccgaagagaatatcaggtaaggagtgtgagattctaactgaaaaaatgactgctaggattaaaacatggagctcgagaaacctatcttttgcaggtagagtaacacttataaattctgtgctttttactatccatacttattggagccaacttttgctactg

SEQ ID NO: 7855 - DNA, 750 bp, Cannabis sativa
aacaaaaaaaagaatagtagattttgtcccgctgtcatggcagccacagtatacaggctatggttgaacagaaacaactgtatttttaatggtttctggagcacaattacatctattgtacaggatattaaaaaaattgttttacagattatcaatagcaaaaaaagagagcttgaatagatatgagaggaacttcatagagcaactatactataaaaattagttgacttgcagctggtttttttcctacagttgagctttgtttgtaattttttgttgattaatgaagtttttccttcttgatcaaaaaaaaaaattgtgttaaatttagcacaaaatataataaagatcacattttagtctataataaatattatttttttttattttttattttattacttatttgtaattactaattttttattttttattttttatttatacactatctattagagatagtctcatgaatttcatgagtggataaccaatggaagagctaatccatctgctatccagccagtttttaatgcgagcccctagagccccagtcaatctaaaagatctttttttttggcaaaaatgtgtatacttttctaatatttgttacaattaattagtgtgtttacttatgagattaggaaatgagaataagcaatgaatttgattaacttgtttaattctctaattattttaagcaacgagaataaaatttgtgagtcccacaccaatttgagattgaagaga

SEQ ID NO: 7856 - DNA, 586 bp, Cannabis sativa
atgatggattaagtaccagaaatactaggagctatgtcatcccaatcaagcccaaaaacagcaactggtgacaataccagaatcatagctagaaaagctagtgaagtagtagaggaagccattttgttctagtttattactgagagaggaagaagatatggtgtgtgtttaatgggcttataagtttacgtatttatataaatatattaattaacatatattattaagggtgtgagttattgaggtttttcttgttactcaaacaaacatgagagaaaaaaatatattaaaaacaggacttccagaaacaccagtttctttcttttagagtagctttcttgacttttactaagtaataaggtgatacgaatatactagcgtacacaagacaggtagtaataccattcttttcttctctttgaataaatcaaatcaaaataaaaatcattttttttaaaatattaatttaggagatttcttaggtacttaatactgattaatttatattattaagacatgtacacttatttaattatgtaaattttcttttaaccatttgggccgccggccgaatattactcgtgac

SEQ ID NO: 7857 - DNA, 801 bp, Cannabis sativa
aaacggaagcagtttcaggattcaactatgaatcattggaaattgttcaaggaggagaaaatcttttattgagatccaatgttggcatacacaaaacctatagtcaagatcagtttaaaaatagctttaaaaatagctcgagtagacccagacaaagttaaagaacaagctattgattggaacacgacagcgatatgtatggtgcttggagccaacctcccatggttgtcttttaaggctttatcaaaaggatttggggacacctagggattgctcaaattgtcaggatgacaatgggcttgattatgatcaagttcaacgatgaagcaacaagggatcagctcttaaaagcaaagggtgatccaattcgacaagaaacttgtaatactgagaccttggtctacagatctgaatgccattaaattgattcattcagtgcctttatggattcatctacatgatctagatcttcagtattggggaaaaatgcctgagtgctttacttagtacgattgggaaaccaattatggtggaccaacatactaaggatcgcataaggatgcaattttccagggttttagtggaaatggacataactgataatcctcctaaatcaattcattttatcaatgaacacgaccagctaatggaacagagcattattatgaatggctcccagttaaattttaaaattgtctaaggtatggccatatcatggcagactgtcgaaaaggggagattaagaagagaaagtagggctcaaaagtaggtaactctgctactgaaacaaggagcaagatg

SEQ ID NO: 7858 - DNA, 710 bp, Cannabis sativa
tttttagtgattttagtgtgaaatctaccattccaatgatctctcatctatctttgcaatgtagatagaaagacaaattttgtagtgaggattctcgcaatcaaaacattgtccagtctatttgttcgctcagcataattgtcaagaattagggttgaatcgttctaaggttcatcgtgtccttcatcttctttgttagaagattcatgatgcaaattaaaattggtggttttgcaggattgaagggagcagtcagaagaaaatttatgaaggaggggaagaacagagtaagaaaccataaaaaaactaccttagagaactataaccgcaaacacactttactatttttttttctttaaaatatgaattatgcatgtataagttttaataaataagtgtggattagatctttttattttttttttgaagaaaagtgtgcatatatatataaaagcaattagacctcctggtcattacaaaagagtttatctgggatagaggtaattggtagggaaccgaacctctggtgggaaaacgcccagttagccacattatgggctgcaaaattacaatgtctactaatatgttcgaaaatacatccaacaaaaaaaggagaggatctaatacaaaatgagacatagttctcaagctcccaacgggaatccttcccattaagagcattaatcctattctcgaatcactctcaatca

SEQ ID NO: 7859 - DNA, 656 bp, Cannabis sativa
tcccagaggtccacgtcaactcaaagaattaattcaagaaagatttaaatgaagaaacatctgggagggttgaagcctctcagatcccttctattgcatttggtcctaacttttgtaacgcataactaggaaaagcactataacttttcccttacgtgcgagcagcaaaacgagtttcctataaaacaaacatacttggggacatacttggggattcctccactactttttatgacatgcatatttctcatgcacgcataaacagctcatgccttcaattgtcacactagtcgataacaagccctcctcaccaaaggaaataacctctaaagatgtaacctttaagggacttttgagtatacgcgtattggacaatattatcccacattgattaaatgtgaaaatattgacccatatataaaaacatgggctactccactcattactaattggttttgagatggaacctcatgatttttgtcatggtatcaaagacatatccctcgtgaactttcgatccacacctatccagatagtaaagccagctgcatgagatctagatagtttaaagacgctttagatccgaataaaaaaaataaataagcgagcaaataacatttcttgtgataagatgattcaatattggtgagaaaaaa

SEQ ID NO: 7860 - DNA, 1133 bp, Cannabis sativa
ggatcagggacaacgactgcaggcgggttatcgaagaagcctggcatggcggggtggaaggcttccagagtttcgccttgtgtcggaggctccgcaatacagctaaagccttaaaggagtggaatcgtgtggtgtttggccactgtcaaacgaaaataaaagcgcttgaaaagcttcttagcgaggtgcaaaatcgccctccttcgaaggataatcttgaaattgaagggactattatgttggaattggaagaagccgaagttcgtttggaatctatttggcgccaaaaatcaagagaaaattggctcaaggaaggggataagaattcccggttctttcacgcctcgattgcagttagacgaaagcagaatcatatttgggcagtgaggcttgatgatggatctatggctgaagacagagcaagcattgctcattattttcgctcgaagttccaatcccttttcacttcggctgagacggttgtggaggatgagttgttggattatatttcgcctgcggtgtcggatgtggagaattcaagactttgtgctcctccctcggaggatgaaattcgtaaagttgtctggtcaatgcccccgttgaaatctcctggtcctgatggtttcccaatcaagttcttcaaacagtactgggacattgttggaaagcaggtggtggattttgtcaatgaattcttcctgaatggtaagttctgtagtgaggtgaataattctttcattgtcctcattcctaagaggcttcaggcggatggtttcgacgatttcagaccgataagcttatgtaattccatttacaagattgtgtcaaagattttggcttcgcgtctgagtggtattctggataatctgatttcgcctcagcaggcagctttcattaaggggaggaatatcgcggagaatgcagtaattgcaaatgagattattcatgaaatgagccgaagtagagggggaagtgcgtatgtttgcatcaagtgtgacatgtcaaaggcctatgataggctcgagtggaattttctcttgaaagtgcttaaggcgtttggcttcaacaatcatttctgccaaatgataatgcattgtgtgtctacagttagttttcaggtgcttcttaatggg

SEQ ID NO: 7861 - DNA, 1229 bp, Cannabis sativa
gaatattgaatccttattccttgtgagtagttgtgatatgaacaaaatgaagagattcatcaaatgctaagactgataatttggtagccacttttagtctcaaaaaataattaaggaattcactctttacactaggtcgatccaatattttatttttaactcttttcattgcaaattaatacaaatgaattcacaaaatgctagcttgagaagactttttatagttgaaaataatctatcagatacgtacccctctgtgaactcgaatataatacagcttactaattatctagctgacatcataaaaagaaaaaaaagaaaaaaaaaactttgaagagtttgttttgcaaattaactttctgcaatgcaagatattagctctgtcatgggcataaatttaaattactatattgtaatctcttagggatataggataaataaaatcatgagatttaaaatcattatgaatcttctcaatgatttaatatttttatatttgatttatgtagcacaatgttgtccaaaatctaaaattttatgatttctacgtggattgttatatatactattttttgttgcaattgtaataagatttttaagtagaattctgtaaaaataaaaaataaaaaattgttttgaagtttaaaaatgaaataatcccaataaaaattaagataaataaggtaactaattaaaatcgttttgtgagtgtgaaagcaaaatttgaaattttcaaccaaaaaaaattaaataaaatacttacatagtaaagaattttcttaaataaatatctttatcccgtttcaaaaaagaaaaagaaaatcttttattatatgaaatgcagtaagtaaaatttattaagtgtcaccaaaataacacaaaataatttcacttgatgcaaaattgtacattatagattgatcaatgagcttaccgaccaacctaattcgtcaacgaaaaaattcgattaaacattttttatgaacaacagaaattgtatatcaatatatcaatatatctatatattggagttttacataaacacattgattattataaattatatattattatgtatgataagagagcaaatatatatttgtggcgcaatattggtgggtgaatggagttggtctgggcatgaatttttgaattttattattgaaattattattttattttgaaaagattgaaaagtaagataggtagggtaaattcttatatgctat

SEQ ID NO: 7862 - DNA, 844 bp, Cannabis sativa
ttttttttacaaaaataatattgttgttttcaccttgttttatgttgcattatatttatactattatattttttatgttgctttgatagggctttataagaaaatgaaattaaaaaattcataagaaagttaattcattgtcttttttttttattatttttttttgaaaagtaatagaaactttattaatcaaataactttaattatttcaataaaaagaagttagccaacaacgatattcttactaaacccacgaattgaatagaaacaagagtcacgagcaacataatgagtgattttacttacagaatgcttaacaaagtgaatttttacaaactttaaatcagctaataaaagcttataatcttgtatcaataacccaaaagaaaacggcatatgaaccgagctttgtaatacttggaccgttactaaaactatccgagttgaacattgtctcaatctcaactttttttttaaatccaacttaatgcctccttaatttcaaaggcttttgctattacaacatccacacaccctgatttgctagtagaaaaagcttctaaaagtctccctgagctatccaaagccacatcgctagccctaaaccattcttcagacataaatattgcacgcaccatcaatatttatcttaatcttgttcgatcaaagctgatttagagcaatgctcacaaccatcatccattccaaaagaaataaataaagacccatgttttttttgagcaacttgttattgattaaggacctcttactgatagaactactttcgctgcaaaagagcttctttccttccaaaccaactcattcctagttatccaaatagccc

SEQ ID NO: 7863 - DNA, 852 bp, Cannabis sativa
ttgatagattactcagtaaattataggactactcttgaatctctgtccacactgatggcttttcaactgtaacactaataccaattggtggtttctgctcaataatattgctatcatggaacgataattatgtcttggatcaatttcttcttcaatttttcaatgtgtcagtctttcttgaaagtttaggcataattgattaaattattataactttatagacagaaattcctaatgtaagacaggtgctctctctgttcagcttcacaaatattatgctccattgatatcatatgcttgtttattacacaattacatagcaacttactcatgctgcaggtggaacttttgctatctattcattactctgtcgacatgcaaaattgagaactattcctaatcaagaccggagtgatttggagcttacaacgtatagtcgttctacatttagtgagcactcatttgccgcaagaaccaagagatggttggagggatatgcatttatgaagaatacaatgcttattcttgtccttgttgggtcttgtatggtaattggggatggaattttgactccagctatttcaggttatacttttttgttctgattctcttaaggagagagaaagtgggagggaatgagaaccctcaacataacaacttagttctttttaaattaaggatactttctctcaattccttagtttctcggttcaattagaagatacgttttctattaaatatttgttttgtttatgagatacttaattgtaatgttcttttgcagtgttgtcagctattggtgggatcaatgttggccaccccatgataagtaatggtatctacattcgtccg

SEQ ID NO: 7864 - DNA, 985 bp, Cannabis sativa
tgaaagcatatagtaagtagcacatatttaatattgtggaattttaacatgtattacagagattgaaaagagttagagacatatattttcactgataataagccaaaaatatgaaatttgttttgagtatagagaagaagcaaagcaatgtgttacattcactggatacagcacataggacaattaatgaatgatattgaaacttaaaatgggcatataacctactcctatcaattttctgtttcagccacacggagaaaagccacatttattttgtttgctctgctttttcattttctcatcaccttgtggttggtgccttaattaatcatacttttaggtaaagaaatatatactaactttttatatatttaaagccatccccatctatgatctatatgtgttaatgcacgcacatgaatttttggctttgcttataaggacacatatcaaacctagctcctttctcttttacaattacaaccattactagctaattattttgggatatatataaaacatcaaatcaaaaaataaagcactgtttaattaattggttaatgaaaaagaaaaagattagtgaatgccagctaacttaatcacatcagaaaaattaatcttagggaaaatgaaggagagcacagtgtttaacgtgctcaccaccaacttgttgttatcttttttgttataataaaataaatattaaactaaatcaacaatattgttaatttgtaaggcagtaaaatattaaaaacgtaaaaggaaggattaaattgaaagaacagtaaagatgtaggggttaaaagtaaaaataccaatagttttcttttcatcgtaaaaatagcaatagtgtccgccacaagcttccgacaaagcgacctccgttccgggaaaatcgggggtgtactcgcacgttcccactggtgggcccgcctccacatgtgagcccgaaattccaattttgggcttaaaaaatatatttttt

SEQ ID NO: 7865 - DNA, 587 bp, Cannabis sativa
tccgatcttaaaacggtatgtcgttttgaaacgtgcctcagcaacgtgtcgtttatcgaatcgaagtgcatttttgggatataataaaaaggtcttttacaaaaaaatcatgtaaataatttttgtccaaataatatcttgattggattttttttattagaaacagtcaaatttccttgttcggaaaattctattccttaaaatatattgatttttttataaaaatattattttgtgtgtttttttttaaaaaaattaaataaacttgagtaatcaaatagtttctttcttattttgtgatttattattcatcctattatatatataaataaaatgtaaaaaattattaattatattcaaaaaagagtaaataatatttattatagtgtaaaatttgactcatgttatatggtgtattaaatttactatgtgttaaatttagtatttttgaaaaaattagttctccaagtcaaatttaacgcatgctaaaagtttaactaaatttaatataagatataactttacaactttcattgttcacacatcacacgtggattggtggattttttatagttggtgctgctgcg

SEQ ID NO: 7866 - DNA, 1382 bp, Cannabis sativa
tttaataatattttgtcttttcttttttttgataaaattttgtcttttcttcttctctcttattaatgactttttttattaggtttttttttctttttctattttttttaatattttaattaaaacaaatataaaaaatataatatttaaatgatatagagaaaaaagatagagaaattaatgtaaagtgtaatgtaaaataaaagaagagtttggtaattggtggtgattcgtgtttgtaccgggtcaaaactcgtgtataacaggtacatatttgacctgaaaacaacctgtttaataatcgtgtgaaaaaatgaaacctaaacaagacctgtttataaacaagttgacatgacacgacatgtgtaacctgtttataagtatattttgtttaaacatgttaatcaacaacacgtttatgaagtattcaacacgtttataacccatttatgacgcgttaaagtactaaaataactttaaataagtcattaacgggtcaatatcgtgttagctgtgtcaacccgaacatgacccatttattaaacgagttagactagtcaactcaaacacgatccgaactcatttaaggcgaattcaaacccgctaactctcgtacgagtttcgagtcgtgttattgtgtctgacccattttatcggtcttagataataagataagttattgagaatgctcttattggtgaaaacaaacataatagtataatgttaacttaatgtctagtccgtttactgctagtttgttcgtgactggctcaacctgcacactgtgtaatatgtccataaataatataagtgtgacacgtccataaataatataaaatagtgtttgattgggaagaatgaaaacataagaataagaatgtgaatgagaatataaatagtaatgaaagataatcaaatttaaaatgtataaaaaaattaatgcaaacactaataaattttttctcatcttgcattgaaatagttttttcttctaaattaaaatggaatagtcattcctttaaaatgatggaaaaattattccattaaaatgatattctaagacttttaaatgcaatcaaataaaaaatagaagaaaaattattttctttctattctattttattgcttccaaccaaatgccaaatgaagatttatgctttttgtcctctttattaggtctagtctcttattctattctatggatgctatgctgtataaatattattttcttttcaagggacaataatataaactttgtttattactaatgataatgacagtgtctacactaaattatgacctgtgataatatgagctatgatagatggatgagataaaaagacgtttttcctttacgatctgtaaagaatatcagtaccatg

SEQ ID NO: 7867 - DNA, 836 bp, Cannabis sativa
ttatattgatatacattatatatgtgatatatgtgtacatatctaaaacaacaaaatgatcttctacacaataaccttgtttacataaagtaatgtttttttccaagcgtgcatgttactgttctaagataacaaagaaaagtaagacaagtataattatatatagataatcagttactccactaaaaaatatcatctatatgaaaataaatatataagaaaaaagagagtaaagttcaatcattacaacgaggagatgaatagagataatgaggatggtaataatacaataattgaagtgtcaatggttttagaggctgcaaaggaaggaaatgtagccaccttgaatcacttgatcgagaaagatagcttgattcttactagagtttcactcaccaattccactcaatctcctctacacatatcagctgctctaaaccatctccatttcactaaacaacttctccacctcaaacccgagcttgctttcgagctagattccttcaaacgctcgcctcttcacttggctgcagccgagggccacatggagatagctcgagttttggtgcacgtgaatagagatgtttccttggtgaaagacatgtatggaagaatcccacttcactatgccgccatgagaggtcgggtggatgtggttcaacttctgttggatgctcaacctgagtctgttttcgagttgcttccgagtggagaaacagctttacatttgtgtgttcggcataaccatttggagactctgagattgttggtggaggcggtattgctcgtgagaagagagagtgccggcgacttcctcaacgccaaagaagaaagtg

SEQ ID NO: 7868 - DNA, 597 bp, Cannabis sativa
tattggtacaatacgtctcaccattcctcctccagtatgactcctttccgtgctttgtatcatagagaccctcctccctagctccgttttgagcaaaccaacaccaaagtttctgcagttgagaatgtgctccaagaccgtgacaatgtgttggttctactcaaggaaaatttgctccgtgcacaacagcgaatgaaggctcaagcagaccgcaagcgtcgggatgttcagtttcaggtcggggatagagtgtatgtcaagcttcgcccctatcgtcaacgcacagtcgccaagcggcttaacgagaagctagctcctcatttttttggccctttccccattcaggagcgtattggagctgctgcctaccgtcttgagttacctcctactgctaccattcaacccgtgttccatgtttcattgctgcgcgctgctccctccaggtctcacggaagactttgaatggctacttgaaccagaatctttgcttgctattcgcccaggaactcacaaaattagtcctcaggccctcatcaaatggaagcatctgccggactatgaagcgacttgggaagatttcgacgtcattcacaacca

SEQ ID NO: 7869 - DNA, 561 bp, Cannabis sativa
tttaaagcaccaacccaactactcaattccattgccttttcttttttaatgtttctatagtaattttacacttacattttcatggggaaaattggtggaacaagctcttggttgactttggtcaaaagggctttcagttctccttcaaaggattctaatgacaaaagaactagtagaagaagagaagaggaagaagaagaagaagaagaagaacagcaacaaaaggtatatatatatatttatatatgttggtttgattcatgttttgtgtttatgtcttctgagtcatagtatatttattttctattttttgcagaagagaggaaaaaggagatggattttcaagaaacagaagctgaatcagcaagaaaagaaagctacacaaaattgtgaaacaaggactataacaactactgctaagatcattacagctccttcttcttcatcatcacatgctctggctgtggcaatggccacaagagcagctactagaccttcaatgtacattaaagacttggctgccatgactattcagactgctttcagaggatatttggtgct

SEQ ID NO: 7870 - DNA, 514 bp, Cannabis sativa
ataactaaaagagtatcaacaactaaaagtagtttactagtaaaaacaaaatcacatttgttgtcatgactaagaaacttatataattattaatattggcacaagatgatagtttttgtattattatattttataatagtgatatatatgagtacaaatatatataaatatataaaatggtaataccggccatgatcgattattactaaaaaaattaattataaaatcaattttaaaaatattaaatcagtaaattttgattcaataactaataataaaaaaagatgtttgaatttagttagttaattaacaaaatataaaaaatattactttttatactgtataaaaatatttaaatcaaatgtaactttttttttatcatttttttctcaatcggtagaacaactttagtatataaatttgagataacaaaattaagcataaatctaaatttttttaataataattatttataggtaatatacgtataacaatattaagatttttttttttt

SEQ ID NO: 7871 - DNA, 623 bp, Cannabis sativa
acaactcctacaaatagattagacacatttttcactatactacaaaataatccatcttctcccagcaaaaagaaaaaattacatcaaggaaaaaaaaccttttaattggtcaacagaaattttatatccttacaaaattatgttaaataaaaaactattccatgaacacatacctgttgattattctcatcactagcatctgatgaaccctctgatccactttcagcgctacaaacagtcaaatattataaaataacatcagaaaaagggaatggaagacagtcacattagcagcagagaaacaacttgcagaataagattaataccaaagaaagacattcatctaaagcttgtcaagaggaaaatcctaaaaccaaatggtcgtgcacctttgtgaagcaccatcgtttcctgaacctgaagttgcttttccgctctccccaaccttagcaccagccgctcctgtactgccagagttaattttcgacttcttggctgaagctcgttctttgccatctgcgctcttcccatccaagtcgggattcacctgcattgacacaggagtctgcaaaggaaatgcagcagagaaaaagatgagcaactttaccagataatttagatcc

SEQ ID NO: 7872 - DNA, 668 bp, Cannabis sativa
agagagagagagagagagcacaaacaattaatttctgataaattaaggatgatgaaaaaccagtccaagccagtcctttgcatgaagaagataaactgccaaaattagagatccaagattaccgattcagaaataagaattttaggaaaatcatgtttttaatgtggttatattttcgttacaattagaagctatagctatgtgtagctatatatagatagtacgtaatattatttatgtttgatgactttcgtacttgtaccaaacagacttttatatacgtacaactgtttaatgcgtgaacaaaggtcagcctgcaaagagatttttgtgtgatggggtcagaaccacgagcttgctttcggcaaggaaaagataaaaatgtcagataaccaattgacacgagttttgttttacactgataaaattattattcttaaaaatattcatcaaaaaactgtgatataaaatggaaagaaaagcggggtggagatgagcttacaaactattttaactgaagggttatcaataattcaaaaaatttattaatttagtagtgtgtcttaatcggcaggttgtcttcctttctctctgcctattcttctctgatggtactgtagggtcgagcagcatggtggtggcctggcgggtgggtttcactttcaggg

SEQ ID NO: 7873 - DNA, 1367 bp, Cannabis sativa
aataatattggctcatggactaaagttctttaatatcccaaccacgtaaaaaatctcattttgtccatttataatcttattgtcttcaacttaatcttcttttagtttggtttctaaaaaactcgataaatatcttggttgtgatagttagtagtctcgtgattcgtagagagaaaatacgggtaagctatgcaatcccacatcacttgggggaggtcaagtgtgatgattctaagattgtgtatgtatgagactaaacagttgaagaagacttaaatagattggttggtactactatatcaacaaggtgcatcttattttatggtaacccatcacttaagaactccaaagttaagtgtgcttgacttggagtaatcttaggatgggtggcctcctagaaagtcttcccatgaagcgtacgagttaggacaaaacacactggaaatacttatgttggtttgcaggactagtcgtcaatccaggaatcaaccaaatggtgtactcgtgtataagagtcattagtctgtgaggggaagtccaatggagactttaagcaaataccacgtaagtcgtgcaatctcacatcgcttggaaaagttcaagtgtgatgattctgagactatgtaggtatgagaccacacaattaaagaagacttaaatgaatttattggtactacctaaatcaacaaggtgcatcttattttccggtagtccatcacttcaaaactccaaagttaagcatgctcgacttggagtaatcttaagatgaatgatgtaatatcccataaattaattttaattaattgaagcatattttatgaaatatgaactaatgtgggtattagaagaataaattgagtaagattataatcttactaagttactatgagaaaataaacttaatttatgaaatgaggaaattaaacgtaatttattaattacggagattttattagactatgtaggtaaatatatgttatttgtgaaataaaatatttttctgacaactgtagaaacctgattggttggccagaaatgtcaaagagatattaatttaagtgattgtgatcatgggaaattttagttggtattggttttaccagggtaattgattatgaccattttactcatagttttagagattacttaggaagcaagtaagggtattttagtcttttcattaattaagttatctttaataatttgtttcttaatggaatgttgtggaataaaggttttatggttgtagttgataaattagaattagaaaatttaaattaattaagttaagtttatccttacaaacctaaaaatcaaaataagcattccctttctcctcatctctttctttctcttgggaaaaccaa

SEQ ID NO: 7874 - DNA, 797 bp, Cannabis sativa
aacaccaaatcaccctttccaactccatgttttcttagatggtgactgggggaacctgtctagacaccaaaagatccatcaccaatttctgcatctttcttggcccttctcttatctcctggaagtccaagaagcaagctacagtctccaaattttctgcagaagtcgaatataggtctatggcaaatactacatgtgaactcctttggctattcaacattctcaaagactttggcatatcacactcgactcctacagccctctactgtgacaaccaagctgctctccacatatctgtaaatgttgtatttcatgagcgtaccaaacatatcggtattgactgccacattgttcgtgatcaagtcaacaagaaatgcctcaaactctttcatgtccttttaagacacaacactgcagacatcatgattaaagctctctttccagctcaatttaacctccttttgtccaagatgagtgtccttaatctctacacctcatcttgatggggaatatcagaagtctatggttagtctatgattagtctatgattaagttagttaataacaattatagaaaggtgttagaattctgttactcagatttattcattctttattcatgtaacaaatattgccatgtataaataccctattttgggttagtgaataaaatcaattcattctcttctaataattggtaagtaatggcaaaagagcaaaatgaatcgtaaaagcaaaagagaagagaaggattccattgtgggttcttcttttttcaattgaactaatttgtcttct

SEQ ID NO: 7875 - DNA, 1432 bp, Cannabis sativa
ttgttgtttcctctcttaaaacttgctaatccctggtaaaggttggaaaggacttgactcaaggtgaggcgaaggtactaatcgaatatggttggataccaaatagtgggttcggaacaatgctcaattaccgcgacagagtagtgcacgacaggaagaacgagaaggacacctcagagtggagatccaaaatagggaagttgcttatggatggttacaatggtggaatcttggtggcaactagtatcccagaagaagtcgagtctaaagattctcaaagcccagaagtcaagctggagcctttctgattctgaaaatgtaaacataccaactcaacttgtatagaaagatcaagtagttgtttgttacttacggatgactttagtgtaggtacatactgagtactttagtgcatactgaggaatcagtaaacagaaaagtaagatggacagaagaaaagcaaacatgtagactgtatatagtgtagtttgtcgtttatcttcttgtcaagtccacaagtaaacaaaatacgatgagtctttcttgggatggtggacgtccatagcatttgtctaattattatgtacttgtctttattttggaggatttttgtcgggaccttttctcaaaaaaagaaaaaaaaagaaagaaaagaaaagttgtctacataggattggtaaaattcacattaactatcttatgtatattatgtttaattaattttaattatgattatgttgaatttattcaagtcacgatttcttgttaaagtttaacccattttctgactttgtggtgaagtcttcacaaataaacacacagaaaaattaaattttgacagattcattgtttcattaagttatttcacaattgatttgactctagcatttttacttagataatagttttgcccaactgttagactttggcctattgtttaaccagtaaataaaaattgttcattaagcaaagaaataaaataaaattgttctcctttacaataaaaaacaaaattcagaaatgaaaaaagaatattaaaactaggggtgatcataagaaaccaatttaatctgcataatttaattcacaaagtgcgaatatttgcacttgtacaaaatagattggaaaatttaaaatccgtataagaatatgaaaaaaatagtaatttaaaaatttaataaatatgatataaatatattacaaaatatagtagattaaatgtatatatttcattaaaaaataatttaaaatatataattttttttcttgctttaaattgattattttttgttttatttattttaatttgttgttagagtgttttattttgttgttagttatgttatgtgatttttttttttaataaatattaaataagtcaatattaaaagtaatcaattcaaagtaactttagattggatttgaattacta

SEQ ID NO: 7876 - DNA, 1558 bp, Cannabis sativa
atgggtatatatagcacaaaaattgggaaaatatccttgcaagaaagacactaatggtcttaaatcaacaaaacctaacaacacaaatgaattccttcataatggccaatgtagcaataggactcaaactcacaaaagcaacccttctgatcaaatcctaaaacttgcaaaggtaagagtagcaagaaaactaatcatttctctacatacagttgacacaatttcttcacaagaacactataaatatacaaacatttattcaatcccatgttctaatcagaagataagacttttatacaaatagacttgcaaaaccgaaattcctcatttcctattaatgaacagatttggtactcaactgatattcacttcaccacttgcatgagcctctttcactctcttctcatactcatcctcttcttcctcctcttcctcttcctcagcctctgcttcttcctttgcatcaccatcttcttctccaacccagccgaaacctccaaccgatcgggaagacggtggaggagattttgcttcatccactatcttcatgatgtcttctaccgtttggattgaaaagcttgggttttctctcctgtagtacatgacttgagctgcttctgttagttccctaggcaagttctttaaaaaccatgggtggttcttgatttctttaatggtgatcctctgaaagaaaacataaattaaaaatgttacagtttctaccatgaatatagattacaacagaaagcaaatatcggaatataaatcctatagtaatcttccaatattcttcttggcactgtgtgatatattaaatcccatagtgataggtggtctcaaagtcataaatttctactatgaacataaaatgccacacagttgtagaaaattgttctaatcataacagagagatacggtacttgattatatgataaagttcaatacatttgatgcataataaaaaccatcttcctagattacccagaagttaagagcagggtaagtaacatgtattttcagtttttttaattcattttagaatttgccaaactaccaaaatctgaggcaccccaagggttttatctcatcttattggattttcttttctgtagcatcattgtaggaacctaggatgggcttgaactttaatcccttatgagagtataccacaagtcttgaccatttgagctgccctttcggtatcttatttgaaatattttatgatgtagaaactttacataacaataaaaaaaaaagggtgattgctggcaaatatgaggactacttcaaataagcaatcactagagctcaaacatagatcactgattaatttgtcaaacattacctattataaaagctatggtgcacaagacgagacagggcgaataacatatttgtgtaatgagtgagctccaaagtaaataaatgcagaacagaacaaaaggcttcattaaaaaatatatttataaattgttaaattatcaaatgatcttaaaaatgaatcaacaaaaatcatatcctaaagtttcctttagtaggtcagttgttttaatgcttt

SEQ ID NO: 7877 - DNA, 1342 bp, Cannabis sativa
tttcattattaattactaatgtatcattattaatgttatagaatcatgaatgcatgccaagtctatgctaaaaaaaaaactttcactaatatgtgcatgttcatttataaaatatatatataatttttagttataacaaattaaagagtttcaataataagggttttcgtatatattttttagaatcttatataatgattttgtctgtatgtatgtcagtttatacttactttttggtgtatatttaaaaaggttatattattcatcaacaataaattaaaaaaaaaaacagtttccttctatatcctttataagcatgcgagacagatgactggcttagtcaaacttgttgttcaataaattaaaaaaaaaaacagttttcttatatattgaatcaagatcccttgtccaagtctggtatcccatggtatgtctaactaatataattatgccacatcatttaattttattttatttaagtttgcacaataaaattaacagagttagtgagagtattgttaacagtaacaagtagcagtttcttttttttgtaagaaccttattttttagatttttataatgagtatagtcccgttatttccttttttaaaattatctacattcctattatataaactaaatcaaaatgattagaactatttttttaaataaataaatagataataatagaagattttataaaacaccctcctaattacggcgtgttttggaacgatcctacggtccgatcagtttttggaaactttcggcttagtctttcgctaaaataaataactatagtattcggtaagactattcggtaaaacaagctacatagtaggtcgatcgttgcaataagtgataaatcgttcgtaccaaacctaattacggcgtgttttcgaacgatcctacggtcgatcgggattcagagacttccggtttagtctttcgctaaaataaataactatagtattcggtaagactattcgataaaacaacctacatagtggaggatgtaggtctatcatcgcaataagtggtaaatcgtgcgtaccaaacctaattacggcatgttttggaatgatcctacggtctgatcaggtttcggagacttccgacttagtcttttgctaaaataaataactgtagtattcggtaagactattcggtaaaacaagctacatagtggtggatgtaggtcgatcgtcgcaataagtagtaaatcgtgcgtaccaaacctaattacagcgtgttttggaacgatcctacggtctgatcgggtttcgaagacttctgatttagtctttcgctaaaatacataactatagtattcggtaagact

SEQ ID NO: 7878 - DNA, 600 bp, Cannabis sativa
ttactttttgatcccttctcgtagcctggtggttagctgcgtttttaaaagttattttcgggtttttgaaactcactaagcactttacaactagttgggttcataaaaaaaactagcttacttctcgaaaagctaaacgctgaagtttaagcccggccagacaagtccacataattttgggatcggccataggctaagacgggctaagcccgcgctaagtacatataatttttcaaataaaggccccaataaaatattttttcctaagacccactaaagttcagaaccggccctgcatagtttacattagtttaaatttattattcaactgctttaatgacactaacaggtgtttgttatgggagtttaagtttttgagaatgggaatgtaaaaataaaccaatgtaatgtgtttgatatgattttagtggagggtttatatatgtttattattaaatttaaccatcaacaattccaaagtcttttatttttcttgttcttgatcaatttgaaagatggcttgatgtagttgaattagctattgtaacttatcttgtttaacttaaattaatcttcctttacaattacttggcacacagg

SEQ ID NO: 7879 - DNA, 897 bp, Cannabis sativa
taattgatggattatttactaaaattttgaacgtaggagtcactaaatacttccaaagtataactagaataggtatatagtaacataaaatgaaatgaagagaaacatatagtaaccaaaataaatgaaaaagaagtaaagatcaaaaccgattgaaatttataatggttacttgtatatttactaatagttataacatattatttaaactgcaacaatggacattcaaaaacttctctaaacactctctctatctctagagtattatttggagaaatgttaaaaggcaccagcgctatctagcactttcctacgtgttaatatcgttattggctcaactaagtatcaagttccatataatttaatacaataacttttaaagagtatcgctagccaatttgcaaggcgacacatttagaaagtactaaacactgctggtgtccaataacaatactcctctcttacttcaaactctcataaattgtataacaatcattatactaggttgctcatgcctaaaactatatattaggacgagttaaaagtgaggagagtctaataacaacttagagaaagtgggttggcacgagttcgggtaggttggggctgggtttcgaattgggctgagtcttttttttttttttgaaaaatatcactttctttttcttacatttcttcataaaagtatacaaaatttcaactttaagcactaaggaacaagccaaggaggaggaggaggaggaggagctgctaggaagtctcggagcttctgcacacaccggccgttggagacaagaacaacaaattacaaagaaaaaaaagatcaaaatgaaaaattgaaaaaaaagaagaagaagaaggaggggagggaattaggtctttttttttaaaaaaaaa

SEQ ID NO: 7880 - DNA, 951 bp, Cannabis sativa
tttgatatgatttatttcatcgtttggttgtaattaattaataattttatgggattattattttctgattctcttctgatctagctagtatacttgtatttatatttgaaatagaaggttttttattacaatcatcatattgcataaacattaatttaacaagcaattaaacttaattatatacttggttaaaatcgtattttttttaatgtatgcataattaatatttgggattaatacagtcactgtattaatattttttttttaatattttgcgttgacctggtgaacacctccaaacaacccatcgtacatatttcatacagtcgattaggttttccagacatttgttattatttttttggaaaggaaggaattatcacaatatataagattgaaatgcaaatttatactctaatggaaggatctatttccatcaatctcttaataattattcttgagatatttattaatcaagtatttttgtgtttgaaattgattatttgtcagcaaaatggcaattttgaaaaaaataatttgcactttagcatagtttaaagtggaaattacacatattttctgattttttatatgcaaaaataaggtatttaattatttatgggaaaaataaaggttaaaaaatatgaaaaaaataatataaagtaactggttaacacttaaatatttatatgtaacaaaggtaaccagttaattactctaaactgtttttcaaatattttttagttttttatttaatttttcgataaaatatttttttttcagaaaacagccacattttttttaaattttggcaaaaaaaaaaccataaaaataaaaatcccttactttaaattatagtttgttaaaagaaacctctagacatctttgttaggaatttaaagcatggtattgagcgatcaatgttaattagagcaactccaatgtaagtat

SEQ ID NO: 7881 - DNA, 541 bp, Cannabis sativa
ttaatttgcaaaaaaaaaaaaaatggtttaaggaatcattttaataataaaacttttcaattcttttaaaagaaaataaaagaaaataattaattaagaaataaaattcataacagtactaaatattatcgggactcgcaactattaatccactattattaatgattaatagtaaacttttattatcagcgagctctgttggtaatcacttttaccaactgaatcttatatatttttcaaggaaattgttctgcccattataatgatatttgttgtagtcatcctaccattgagagaatacatattttctacactaaaaaaattaccttctttaaatcacaatatttgtgagagcaactattttaggatgtgataaagcgattttgtttggtgcataacaaaacgtataaataagttgttttattctaaagatgttgtcagtggcgaacctaggactaagttttagaatgggcataattttttttttttacatataaaatactaaaaaatacggatgtaaatacatgtgtatcatgctagt

SEQ ID NO: 7882 - DNA, 574 bp, Cannabis sativa
aactcaggtaaattctcagtctccctcttgtttacctactgctcatttttctactgatacttacaagcaaaatgacacaaattctgctggtttttctcctgtggttactgattctggtgttcctgagcatgtctccccaaacaacaatccaaatcatgccacatcctcacctgtcccaaccattacacccactgaaaatcccattgtagccacaaatattccctctgcaccagcaatctcaacctttcccatctctgaacctaccaatttaccacatcctgatcttccaaattctcagtcacagcccttaaacaccagccaaatgcctaatcctcagaccatacccgactctctcccatctgctcctgttaactcagaattagtatccacagatactactcacaggactcaccacatgcgcaccagatctcagtcgggcatcagaaaaccaaagtcatttatggcaacaaaacaccccctgcctgagtctttgttaccaactgagcctaagtctctcaaggctgcccttgctgatccaaaatggaacaaggccatgacaactgaaattggggct

SEQ ID NO: 7883 - DNA, 613 bp, Cannabis sativa
gttctagatctgtgagttttgggcgatcagaccttgaacgaggctcttaagttgatttatttatgcttgcactaatggattaactggacctacttattagcgacctgtgtcatattaagatctcttaaaattgggccccatacatagtattttgtattatctagttgtacggtaggaggaatatcctattcgcctaatcccattcttaattaaaatcattcctgaggtcatgcacggtacccgattgggtaaagactgattcgcctagaggcccttcttgtctgaccattgtgaacaaggggttggcccaatacctctgtccgaggactagtgttaggttgatcattctctcccaagtaacgagttggtaaaacttgctcgtctaccatttggcccacaatttgattctgtggcctaggattggacgatctatcaacttaggtttgttgagtgtgtttagctagacgttcttctagcccgtgctgtggcccaagaagaatgttaacatctactactaattattgaccagtgacttagtaagctctcctgatcagtatggcggcctacctggaatggttttcaattttcacttgctagactctcatgatttcca

SEQ ID NO: 7884 - DNA, 934 bp, Cannabis sativa
ctttaacaacaataaagtgatcaatgtttctagtttctctccatgaagtagaataatgatttaactaattcaatactccacgtgaagaaaagaaaatgttggaattctgtggataaaaataatgtttgcaccctactactaggggtgttcattcaattttgctcatagtatatctgattcgtactacgtgcggattttatattttagaatcaattcaatctaatctgcaaaagtacgaattggatcaattattttaaattgattgctttttaatatttaattatttaatatttattaaaaaaaatatattttttttcacataactaacaataaaaaatattattgttgttttatgtctctaacaacaaatttaaataataaaacaaaagataaaaaattcaaagagaaaaaaattgtatgtataaaaaaatgtttaattttatttaagattatattttccatataaacattaatgaaatatacatttaatctactaagttttgaaatatatttgtattatatatattagatttttgaattattaatttttacattcaaatatttattgtatatataattttttaaaaatatacacacaaatatgtatgaattagattgaatcgattatttttacatattaattaacattcaatccgcataggtgcgaattttagattggtcaatccaatctaatctgtacaaatatatatatatcggcgctttataaattagattggattgagtattttataaacacccttaaatactctaacgcatccctattcttctatataatttaaaattctaaattaaaaaagtattcattataattaaaaaaaaaattataactaaaaggaaacatgcacgcaccccgaaatttaataatttcaattattttaaaaggaaaaaaatcaagaagtcccacatcgggaat

SEQ ID NO: 7885 - DNA, 935 bp, Cannabis sativa
aaatagtgaacaagatcgacctaagtattgagcagcgtaggctatcgtacaaggccctaattaccaaggcccaattttatgaaagacaagggctatttttttttaaccaacaagtgacaattttttttttatatataatatagtaattcattaagtgaaacatgtactcttgaaaataatataaataaaaaacctcatatgttatctaatgcatgtatgtatctaaaataatatttcctttttcagtgccagttccaaaacttagggctgaatatcaggcggattgaccgggtttcaggtttatagatttcaggtccacaggttttaggttcaaaaaattatacccaaacccaacccgtgagatggttcgggttcgcgggttcgagatgaccgggttggccgggtcaactcattaattttttttttaaaaaaaaaaatcaaattttatgtgattttttctatatattaaattaagcatataagtaataaacttataacaacataatttatattctttagattaaaataaaataaaaaatacattaatttcaaatctaaaatacaaaagtcaagttccaaactatatgtaatatattatacattattatttttaatatattatctatgtaataaaaataaaatgattagattttagggttttttttaatatattatatatgaaataaaaataaaaaaataaaaaatgaccggtttggtaggagggttcgggttcaacccgaaacccgatgaccataaaaaaccaacccgcgaacctgcccaaaagtgtaccgggttgaactcaacccgcctgaacaaaacaaattagtttgaatttttcgggttcactagatcgggtccgggcgagttggccaggtccgggtcaaactcgatcaatatgttcaaccctacttaaaccaagtcctatctcaatttgg

SEQ ID NO: 7886 - DNA, 889 bp, Cannabis sativa
acatcattaaacatgaggtgattgattctgtcaattccaatatcagaaatgggttcaatgggctgatcatcaccctcctccatggaaggttccaaaaaactggagggttctctactgaattcatctgcacaagaataaaaatatttatcaaaaaaggaaaagatgaaacaacaaatacagaaataagaactaatgaaaggctagccatgatttctgagtttcttaaatgaaccagatatctgagatgagaagtcggcgctcaccgaaaattgtgttcaaggaagttggtggaggagtggacatgaaattgaggcctatgtaaaatccgagagctaatactattgtcaccattgcgtatgttggtatagccagtgcccaatatctgaagaaacacaaagcaattacacaacatatggggggaattcaaacagcttgtattagtttgtgtttaattttacaagaattttcctttactctttttgtttttctgaaaaataacagcgttcatatatagcaatgattagacctctcggtcattataaataatgttcttaggaatgaaggtatagacccacttaaccaccttatgcataacaaaatcacattctcttatgatttttgaaaataaataaccaacaaaaaaagaaaatcttttacagtgtctagtgtaattatcagtttcgcatcgggaacaaacatcattgagggaattgattaccacactagagtcgctctctatgataaatctaggcccattgagggaattttccattactcaataaatgtagagaaattgtttgctatatttttcacttctccataaaagcttcattaattttcatcttatctaagtcggaccaaaactgactccaaatctcagctagctaaa

SEQ ID NO: 7887 - DNA, 683 bp, Cannabis sativa
ggtaaaataaattccaacaaaaaccacctttagaagatactctacaacaattcatgcaatctactgaataaatcctccaaaacaagtcttaatcttttgccaaatttgagacccaaatgggtcaaattactaatattgtaattgaaagagaaagaggcaaacttcctagcaaatccattccaaatccaaaaggttaatatgaaataggaatgtctagtcacaatgaagaagccaaatcaatttcaactcttaggtctagaaagaatattgtcaaacctgattatacaccttaagttgaaaaagataaagaaagagaaaaaagacaacctaaaagttctaatataagttacttacgaaaagaggatgtttaaattctttctacaattctaaaagctccttttctagaaaaattgcttccactcaagaaagaaaatcaatatagtgacatctttaatgtttttaaacaagtataaacatctgattcttagatgccaatcaacagattcctacgtactcaaatttcttgaaggatctttgcacagtaaaagaaatactaatattccaaaaaaggcatttttaactaaacaagttagctctataactcaatacaaaagtcatgtaacatataagatcctagttgtcccccaatttcattcatcattggagttcatattattaataaa

SEQ ID NO: 7888 - DNA, 765 bp, Cannabis sativa
attattattgttatagttattgtttatttagactctacatttattgttcaaatgatataagatataaaaacactatacttgaataaatgtgaagtattattttcttaataaaatatggtattttataccataatatgtaaaaatatggcactatactataggtttaactttaagacgattaactataaaaaatccataactaatatggtttttacaaaatactattaaaagataatacagcttaaatgtggaaataacagcataaaaagccatgtgctaaatgtaattgccactgatctagttatattttgctgttaatattgaaagtgcagtttactaaaataacatgagaagactgtttattaggaataattggagatgagcaagcaattaagtcattttgcatttagtttgtaaaaagctttttttcttattaacttctttggttattatgccccttttggtttttgggctaagcaaaaattaagggcaccacccaaagaaaagaaaacccatttgttcagtacagccttttgggtttgggccttttgggtttttgggtttggttattttttttgttttacgttgtagagatttctttaattattatcaaatattttaatatattaattctattaatttttctctttctttctctttcctaatacatgcaatctttttgagaaagaaaaaggactaacaaatatatgtcaatttccaccgttgaacaacagagagataataattagctacccatctaattta

SEQ ID NO: 7889 - DNA, 916 bp, Cannabis sativa
tttataatttaagaaaatatttttggacttcctaaattatacaattaactttcactttatattaaattacaaaataaataaataaataaattattttgataactacaaaaataaaaaaataaaaaaataaaaaataaaagatggctaagttgataattcgacaaaaatattttctctctcatagtgttttgcctcttcttcctggttctcgtgcaacgtagaaggtcccaacagatgaggttcatggttgaatggcgagtgttagtgttggttcacgcatcttggggctggttttgtcgtccctgattttttaggcgagtggtggccattcttggtggttgggtgtctctggtgagatgtctatcgttcttggctgggggtagcagataaaatcgatcttttaggtcacgagacaacgatggtggtgggcttttggcggctctcttcctctcatttttgggttggcgttttgtaaagatcttttttaggcatgtgcttcgactgtgatgttgctcttccttacttaggatactattcaaaggtccttgctctggtgcgcaatgactcgtaatgagctttccgagttttatagatgtagaaggggattgaaatttatccccttgtcccatcactttcaccgtgttcagaaccattataggaggtcgagcgtggatgtttctcgtcgaaagatggaagtgctctggtgcctgtggtccgccagtctcaggctcacattttgcctcgtatgccttaaggagatggttgttgaagttgttctatctttattgttgttcgtttaatttttagtttgtttgagttgtttcgttgttgtgtacttttttggagtgtttgtccctgctcttgcgtgagccttgagcttaatgctcttttcgaatcgttggcgaatgcaatttat

SEQ ID NO: 7890 - DNA, 591 bp, Cannabis sativa
agcttaggttcaaggccacgcaagcacgcacacgtgtgatgttcttcagcacgttctataccatgactagtgaccatagtggttctctttgtggacctgtcattgatgatgtgaggttgatcagtgaacgtctcactaaagtagttaatgctattaattaattaaattatttctattttttatttattattattattatgtatgagatgatgagatgagatcattcatgtgaggttgatcatgttcctccatgatccgaacgtttaaatgttttgtttttttctaaaagaacaaaagaagaagttgaagaaaaaagtgaaaattattcgatttatcctttcttaattagttttttttttctgtactagtacgtatagttttaatattattgtaatttaagaaatatgatgaaattgaattattatgttttagtacttgtgttttttgttaaaatattattatacgatcgataaatatatagatcatataaggaaaaagacccataagacattattatgaatattaaattcacattgcccgttaacattatttatgtaaattataattaatgtgaatatctgatctgaaatt

SEQ ID NO: 7891 - DNA, 869 bp, Cannabis sativa
cactcacatattttacttgattgtgatgaataaagctacaattatcattgttaacaagttgttcatttcgaaaaattccctttgttaaaatatttaagttgattaattttttagttaatttttagatttgttttttgttgttactagtgtttatcatacatttactaaaatatgttgagctttcatatgtatttattagaagagttccttaagaagataactcaaattttccagaattatttatcactacttagtaagaatgtaatctatctagaataatgtattagctagttaattatttaattatatgttctagaatatatagtcctatatatagagatgtaataccaattgttaaaaggtaacatatcttcgattagaacaatactcttcttatttccaacacatattcccactaaagatttttttttttttcaaacttagttattggggattatatagcaaattaacgtgttaatcgctaactgatattgcattcacatatttattgctttatgtacttggacaaatatatataattttatcatgaagtaaataaggtagagtttggttaagagaaatacaaaatataaataagaatgataattaaaatagtaatagaaaatagaataaaatttaaaataaataaaaaataattgatagtattagattagtctttgtttctatttaataattattccactaaaattgtaaaaaggacattctattaaaataatatttcattcttattctatttggttaattgcaaccaaacattatttctagctatcggtttcttgtcattaattgtccacagaaatttttagaaaaaaaatccccaatcatctcaaactaatgtaattagggtt

SEQ ID NO: 7892 - DNA, 1828 bp, Cannabis sativa
atagtccacgagtcaattttattaaatttctgatgatttttcaaggcctttcttcttgtgatctttcttcgtcccttttttgatctaacttgccactctttataattacatagtaggcagttaattacagagttgactgtaatctttacaacgtttatcccctaaaatcgtggggtttgattacatatcacatagtataaatgcgattattatttgaatattacacagctatgatttatccgcttttgctgggtcaaaataatcgtgtgtttaaacacgtcttaaatcgtagcgttctgggatgtctcgatagaaactcggttccaatgaccttgatagcgagctgtggttgttccccctatcttttcgaggttgacaatgtacgccttgttgcttctttgtttgaaggcttaacgctttattttgacaatcgcagtttttatttacagaaagtacctcagcagtcatttgaatgtcagcttctaactcgtcaagactataagtctcactaaaagatgtctgaggttagttggtgaaagtcacaggagtgtgtcttcctatagcgaaataggtgcctcgcttattaggtcttgagtccacccaactgttatacttagtttgtatattatacgctaagtgttttcacagttaatatgcatcactttcgtcttcccaggtgtaacgaagttgatgtctcgccttatgcttccaatgtcgtatagtttcttgttaatacatgaggcaacagttggtatatctctatctcgcataagaccttatagtcagcgagttgcaagtatactctgtcatttccgcatttaatgagttattctatcagaagtgattaccgtttcacgcatcgatctatattctccttaacttgacatgtgtcctccactgaaatggtagtcgaatttcgggtataacagagagtatctcctaggttacatagaaaatttctatctaacaagcctagcaaagaaacaatatcataaaggacagaattgtcaatcaattgtgacactctttgtattttgtgaacgagctcattactgtaataatgagcagggagattaagctttcatgtgtgtatatatcttacctaatatataaaatatctatgtagcgttattttattgtaacttaacagtatgttatgtatttaacaagatatacttaaacaaaaagttaattttaacagacaccccatatacaagtaaaccaattctatttaaaaagattacacagaccaacgcaactattctgaagatacccattcgtacaagcactcattcattcacaagccataaatcataataaaacacacagataatcatcttatcaaaaaaaatttcgtgtaatgccaccatttcagatcaaattatttatttactggaaatcgcagtcattgtggtctcttcaagtatttctttatcactatattgttctaaatttaataacaatagtgttataaaatcaacctaaattttatatatgtatgagtgcactcttaatggatattaccaatgaatgagtaatatttaaaaaaattgagtttttataattaatttttctatttaattagaaaattttctcatttttacattatatgggctgggattagtccatcagctaaaaaaaataataattaaaaaaaaaattcagcaaaaaagtaataaaaaaaaattaaatttaacttaaatattttacatataaatatatttttgatatagtgtaaaaatatatattttttgatattttaataatgaagcgtatttataattttatggagtacaaatagaactatctaaaaacaaaaatcatagaa

SEQ ID NO: 7893 - DNA, 566 bp, Cannabis sativa
tatctacaatcatgacaagcagcaactgctgctagattgttagaccaaactccccaagttggctgatccctttatagttattttcaggtttgtttcttgctgcttactctattatatttggagttgagacagccaagggttttaggcaccttcttgaaaagaaaataacaaaccaaaagagcagcattcatagctctgagagtatctggagagtagacagtcgcgagcgtcacatagctgtcatggtggtattctttctgattctatgtctactgtggagtgtgagcggtataatgttgagaaaggagtttagaaacggtggcagtgaggctcagctctggttaggctgcatagtagggcccacaggtgtgtggattaggtggttcttagctcgacttaatggatgtggattaggaagggcgggtttgtttaaatggattccgtttggtactctaattgcaaatgtagctgcatcatgtatcatggctgcactctctactattagaaatgcggtatgactattcctatcttttatgtattacgtatttaaagtcgtcttagcaaaa

SEQ ID NO: 7894 - DNA, 1337 bp, Cannabis sativa
ctattcttcacggacaggaatatgtttctgtgagtatttatgattattttttagcaggagtatttataatcaatataggaccttccttataatttagcaaatcaaatgaacactttttaagattatttttatttttttaagacggtcagttatattccaataataatttatcgttatttttattattttagatcaaatattttgttaaaattattgattacaacttttattttattaaataataaaatgaatcttatattttttaaaatgataaaaataagattatgagtttaatttttgacaatttttttttaatataaccaacctacaatttctaatacatatatagaaaacataaagagtattttatcaaaacactattattattaaattttattttgataaaaaaatgattttagggtcttctttgtacaaattttgttattttgttatttaacaaaacaaaatgcctaattagtaacttttgtaaaataaagatttcaaagttgtatttacccttaatattattttacttataagtaataattttggccttttttttgttttttatttcagcaatgaaagaaaataggaaaagaactgtattttgttctaaattttatattaaagagtcattttaccgagttgtagccatttgttaatttgtattttttcatataaataataaccataacaaatttaaagttaaatgttaaagattctgattgaagccgatgtaatttaatttctctctaatatttacatttggatcaaatgcaatcagattataagaaatatgtttacatcatgtgctttaaaaaaatattgggtaatcttatagtatatttctaaaataattattttagtatagtctttatttgttttaggatctaaattttttttttagtttctattaataacatatattgtagttatatatattatttgtaatttttttttaaaaaaaaattaaataacttataattttaaaaataaaattcaaatattttgttgtatatatatgcgtgataactcaaaaaaaatatatatataataataaatcaagacattttcatgaaaaattatacacttccgaaaataaagttcaaatatctgcagaattgtaagaaagaggaatttttataaaaaattacaagtgatcttaaaaataatttcctatacacaatcttgaaaaaaaaaaaatatatagttggataaaaaaaaaatagcatgaatgttgaaagagataatcaatttaagaagttcactaaacatttctccaaaaatatttacaatcgttttccaaaaacaaatgtttaaaatctaagttattacct

SEQ ID NO: 7895 - DNA, 672 bp, Cannabis sativa
agaaagaaaaggggcatgagctatggaacaatttgatatatatttttaatattaatcaggtgtgacatggttatacccccaaacacttggcacaatcatgaccatcagcttttcaaaaattcagaaaattggcttcaaatcaaacttaagacggttgtccattccatggtcttgccacacacatataagagtactataattaaaaaatattcatataccttaaaaaaatattattttattttatttctcttttacattatcattttgacattttttatcttaaaataatctaatgataaatatttttaaaaaatatcaaaataatatacattattttttggaaaagtcaatcttatcaaccatcaaattcagctactaaactagatagcaaatccactgaaacatcctccacgtgaaaagtacaatcaaaataaaataaaaaagcttttacaaaagcatgagcaaccttattcgctgattgtttgataaagaaaatagagacatttcttaactcagacaacaatttgttacaatcattgataacacaaccaaatagagacaccgtgtctaacaaacttctaagtgcttgaacaacggccatgcaatccatctccacaagaacttgttgccaacctcttagtttgatctaactaagaacttccttgactccta

SEQ ID NO: 7896 - DNA, 907 bp, Cannabis sativa
tgactcactctaccgcgcccgattctctgccaccgagtttttcccgaccgacattgatcgagttctcaacaataagcttcatctcggcacttacgtcgccgtgccggtagggtctagcatggacgcgttcttgtctgagccgcccgagtcgtgggcggtggcgagtgtttggaatagtcaagaggtctttaagttagaaattaggggcgcgtcgcgttcacggcgtttggctgctaagtttacgcgcgtgttggataaggctttgccgtggatgaggataccgtcggtgccggaggtgtttaggccgtttgggatggtgtttttgtatggtttgggaggggaaggcccacgcgcggagagaatggttagggcgctttgtggtcacgcgcataacatggcgaaggagttgaggtgtggagtggtggccactgaggtggctagtcaagatccgttgaggttagcgattccccactgggatagcctatcgtgcgccaatgatgtatggtgcgtaaaaaggctggtctcgggttatggggatgggcctcttggggattggaccaagtccaaacccggcctttcaatatttgtcgatccaagggaattctaaacttcaaagataaattatttaatttctttcttggatattttttttttcatttaaaaatagaaaatagttctgaagaaaaagaaaaaaaaaaaaagcatttggggttctgtagattataccaatacttttgcactatctaattcttatgaaatgtgacgtaattctcactctccttttattgacttgaacgaaaaatattctattgttatgcatgagtaacgttattcatatgtacgtatattctaagttccagtaactttcatcagtcaggacaaaatcaacctaaaattgttttcttct

SEQ ID NO: 7897 - DNA, 710 bp, Cannabis sativa
catttacatatgattcatgtataatagaactaaaactaaaatattttaacaagaacaatttgtgtattaaacttactaattaatttaggagagactctggaagaagaagctttggattaagagctcagcaggtcaggccattggaatcagattcgatgagctttaagggcttcaaaatatgaagcaaatttacacaaactttttttatggcataagcaaacttgtttctgcactagtttcaaaatttatatataatatttacaccaaccaataggatcatattcttgactcataaacagatttaagaagtaataggaatccgaagtaattggccaaactaggtagttagtttgtagattaggacaatatgtcctcgtcagcttatgataataagagaaaaatgaacattgctgatttggacaggataggattcttctgaatattcttttaaaaatcttcctcttatctaattggtctaaacattccctttagttagtttctctattttatcattccttcatttaaaaatgcataacgaaaactctatttttcagtcatagacaaattatcacatttcatcttatataaagaagatattctaaaaattaataccctcttaaataataataataataatacaaaaaattttctattttttatccttgaaagagaaagaaataagaaccaaaaaagtttgaagcataactaaa

SEQ ID NO: 7898 - DNA, 613 bp, Cannabis sativa
ctgtgctcctgttgatcctttgttttaattatttttgtaacctagtgtgcttcccatgaaactcttgtcatacctattatagcaataggccactgaatgtccatacttgccacatacttggtaggtaggctttgaaccaatattttatccaccttctcttcttctgaaatgaccaattagagctccacaagtactgttctgattttctctgttgtaacctgaacctctatcaccattgttgttgttggccagatttgcaaaaaggttaagtggatttacaaacctatttcctagcttgtttgtggtggaaaaatatgtaagtctctccatctatctatcaaaactaaataacatatcctataactcttgccaaaatgttgagggtctagcttctatgagcagagcgatgggcagatagtactccagatctaggcaagaaaaagcattagaaacaagcaatttttttgtgtattggtcacttgcaagggctagagtatcgacacattgtctcttttttcgaagatagccaatcatggtgagagcaccttttctagctgtttgaatcttagttctacactgatccatctttgccttagagtgtgaaccataaaga

SEQ ID NO: 7899 - DNA, 1443 bp, Cannabis sativa
tctttttatatagtagacattaattaatacaaaaatgctaaagaccaacaccgcttgaggccattataaggtgtcagtaattctgtgatctgtaaggaaaaaaattaggtaagttgtacaatttcatattgcttgggaaatattaagtgtaatgattctaagattgtgtaggtatgaagagggtttaaatagattaatgagtactacctataccaacaaaatacgccttcttggcagttcatcccttaagaactccaaagttaaacgtacttgacctgaaataatcttagaatgggtgacctcctaaaaagttttctcaaaaagcgtatgggtgaggacaaagtacattgtaaactcatatatgttagttttcagggcaagtcgtcaaggaatcaaccaaagtgacgtagtcgtgtacataggaatacatagctgaagcaggggcgtgacaaattgcaatcacacatcgcttggttatgtcaagtgtgatgattctaagactatctaagtacgtatgagacttcacagttgatgagggtttaaatagagacaatgagttgtattttcttttcggtagcccatcacagaatgtaagtacgtatgagacttcacagttgatgagggtttaaatagattgatgggtacatatattaattacttatgacaacaagatgtatttttttttcggtagcccatcacagaattctaaagttaagcatgtttgactttgagcaatcataggatgtgtgactttctggaaagttttttcaaaaagcgtgcaagtacccatgtatactatgtaggtattatacttcacatccgtattaaaagcgttataatattgttactcgtgaaattaaatataagctatatattttaatctaataactattataaaatatcattaattatttttaaagcagcggcgaataataatattagacaccattagtgcctattattgcaatgctcttaataaaaatgttagcattaacaatattaaacgaattagagtaaattagctatgtatatatgttagacaaacatttgtatattgcatgttctattataccaattaatccattgccaaagtcaaggtttgcgttctaaaataatttgttactctataaaaaaattataatatatatggtaccctacataaaagaattatagtttattatattataagagatggataagtttgttataattaatgtatgtatatttttatttatataagtaagattgttagttaaaagtcaagttgagcgttaatcgtgctactcttttttaacaatataatatattacaagtacaaaaattaatgccgggagagctttgaaaatatggagccttaatcaacggccacacatgccaattttaatgtattatcacaccttaatcaatggcgtaacttaagtttacctccttctagcttcttat

SEQ ID NO: 7900 - DNA, 743 bp, Cannabis sativa
gtcaaccgtgacaatcgcgtacttgactcctcctttacccgtggggagggatcttactaaatcaattcccaaaactgcaaatggccataggttcctcataagcgtgatcttggtgggcagtgctcttgggactttggcatatctctgcccttgctcatacttcctcacatatttcatgcaatccttcttcattacgggccaaaaatacccctgttgaaggattttcttggaaaggctgggcctagaagtgtgatctctgcagaaacctctgtggacctcatggactaccgctctaatttctatctcggtaatacacctcagttatggcattgacaaccccctgcaatataacttcctatccatgatcacgtagccgggagcttgatattgaatcttcctggaagcggccctatctgtgggaagctcccccgtactcatgaatttgtaaataggtgccatctaggagtgagagttatccactatcgtatttaccccctggagttaaatgctagacttcttctaatggccaacagaactactctatgtttgatgatctcaggatttgttgctaacttagccaaaaatgtctatgaacgagttttgttctctcagaatctgacatatattgtaactcttgaatccttgcaacaactcgcgagacatcaggatataagcaaccatccgttcacctttcatctgatattcactagagatttgattcacaaccagccgagaatcactgt

SEQ ID NO: 7901 - DNA, 567 bp, Cannabis sativa
aagatttgaagaggcaacagtggcgacaagtcagggtggacacgtaaaaatggggatgccaatcatgtgacgctgcttttaagggcccttttcttttctctctctctttaataatcttttgtcttttccttgttggcattttatatattttactatttcataagaacatttattttctttacatttttttgatgaccaatttatgtatttaattaaaagtattatttttgtttattgttttgttcctcgggattttaaccatcatccgggttttatatgaggattctccactaattatgattaaatattaacctaatccctaaaagtctcattttattaaattttgtttttaattgtccttttaacgtcacataattctctcctagggtacctaaacttctttgtttgaaggtcacaaaattataattttctcttccatgatccgatctttttaagtatacgtgcctcaaaaattaattatttatggcattattaaaatactgaccttttattggtcttccacccaaaaaaaacaaatatttgtaataataacaaggctaattaaga

SEQ ID NO: 7902 - DNA, 1250 bp, Cannabis sativa
aaactctttacttctaatagaatgtagaagacaaaaagacaccttttgatatatttacctatctcaagccaatcacatagctttaccgtttgaaaatgttaagtctataatatatctaaaataaaagtgttaagatgatactagagaagaagtatgaaaaagttatcaaaatggaaaagagaagtagacctgcagcttctagttgcctctggagttcttgacccacagcatcattttcagcctacatgattttttttacacatccaacaaagaaagggtataaaaaagtaagataaatagtgacataactcataagtgcctaaagttttaaatttgtaattgtcataaactcaatgtttatttttaacagcataagtatcaatatttgttgttattatcttaaataatcacatattaagctatattctaaatcatttggtctagacataaacatgtagtataagttacttctaaatattcttttaataaatttaaaacgaagtctttattaatgaaacattaagaaaattacagttttacaaacattaggtacttatgccgctaaaaataaacatttacaaacttaaaactttgagtgcttacgctgctactgttaccgataaacatttgaaatcttaaatatagtgaaattgaatacatacctgaagttcttcaatccttttcagctgcgcttcttcacctccatctgacaacggaagtgctgccaccaaagcatcaaactgcacagcaagcatcattatgggatttcattataaaaggaaaaaactatatatactattcttacttatatattatataataccgaggaggaagcacctaattttaaaggaagcaaactattaaccaatctactcattatttcagttcaaaaattcctatctacaaatttacattgcatccaaatatttgcagtcatggattgatccacacttttcaatttcacccaaattgagacacatggcataataaccccaacagtatacacatatttcttaaatccctaacaatgattaataaaagaaactccagaaaactcgttctcttctaaaacaaatttctgggtgtgactacaatcataacaacaacatacggactgatgaattgaaattgttaatgttattccaccgacctgtttagcagccttgacgagagcggcgctcatgagcttgggttggtcttcgaacttggtagcatcgtcaggaggtggaaccggagcaggaggcgggtca

SEQ ID NO: 7903 - DNA, 944 bp, Cannabis sativa
aactaatgatttgcatgtctcatgttgtgttgattggtgtgtataatctgctaaatcgcatcttagttgtgtgattatgccttcttacccttcttgttggaatgttgttttctcaattgcttgaaagtagaacataagaaatgaagacccactttctataaattgctttctcattattttagttgttaccctattctgtaaattctttctttcccctagtttttccatgaattatcaactattactagtcatgcctcttctacattcaaagaaacacagagtccattcacctatttctagttgaaatggaaaacccacttgtcccataaaacccctttgtaacagttttattattggagaaattcttttatggtgtgtcactctttctctatttatgtttcaatgttggtgtattacaattctcttttcccctcacttgtaaaattttcaaacttttcattgctcacccaaattgtactatggttgcctttatacccattcaataaaacgacaacgtttttcgatttgatgttttttttcttctttccccctcaagttgaagtatgtaacaattgttcctaactatatgagcaagtacatagtttgatcattgtatgaaattccttccacgcttcttgtattttcttttaagatattttttcttatactttgaaatggatgctattttgtgtgaagtgtgatattcattcactattttaattagtttgatggtgttctattatgctgtgtattttagcaaattgagggtgatctcttgaaagagaaagatttgggaaattccttctacatgactcttatgtattttccttaagaaaaagtgattttgctcgagatttagtttttataatattctttccaattgggtttctgcaaattgagggtgtagtctcttgattgtgtacgatctaaggctgacaattcgt

SEQ ID NO: 7904 - DNA, 1086 bp, Cannabis sativa
atttaaattctaataaaaaatcattaatgataaagactttttgcttgctataaatacaagctcgttacgttgcataaatattctaagaattctctaaagtgcttaaaaagttcatatggctcaggttcattccatcgttcattggcccaaaaatgggcaatcttaggtcggttaaaattttagtcctgcaacagattggtagtttctcttatttaacttttcgccaaacaagtttttgttcaatagtgaacgaaatgcaacaaaatgagcaaattacaaatattttcaaagttcgagaagatttttttttttaaaataataataatttaagaagtaaaatactataagtgtcgaaatttagaaaataaaattcatatttatcctataatataatattgagttttcataatgagaaatgttagaggatactaatagtgctttaactcttttataaagtgtcattatattagtatgatttaatatcaagactcacttattttactgtaataataatctgctactatttataagacgtcattttataatgatgttagacaacatgatgcctcatagtaatacgcattgcaaaattgctcgttcgtcgtttctgaaagtacctattttcatgctaataaagttttaggcacgatatgaaagtcactattagttacaacatttaatttggtgctttccagtaattgaaaatgtaaaaaccatgagagtttcaaagtaaacaatagtgctaacatcccaaatgtgtagattactcctcctcctcctcatcttcctcctcattttcttcattttcctcctcctcttcctcctcctcatcatcattatcatcatccttattcccttgaatttgttgatgtagaatatttggcatacatagtgtttgttgcaattgcggtgtctgcatcatctgcaatgtttgttgcatttgttgtgtctgcatcatttgcggaaattgctgagtctgcatcatttgccacatctgttgcatttgcatcatcatttgtatcatttgcatctgcgacatcggtgtcattggccaagtaaatggtgacatctgttgagaagatgacg

SEQ ID NO: 7905 - DNA, 744 bp, Cannabis sativa
aacaaaataattgtatatatattattgaaaatataaaagagaatatatgtattaataattcaggcgagaccgcgtgtggactaatatttatagaaatttgatgatcacaaatggacaatactatacgtacacgaatcttcaaagtaagagatcgatcacttagctagctaggttgttatatataggtacctaacacaaattagttgtacttagtgtagtcgaaggatatatatcatttttgtggttaaatgatgtatattgtacccgtacaattgccatatgtgtactctataatgaaatgaatttgtcttactaaattttatataaaaacatatctcatgtcctttttagatattcgtgtattttttctaaaatatattacaattttccacgtatatatctagaaagtgaagtgacaatgcatgttatgatcataaccatataacctttttggtaatttatgtcgttacatgcaaatattgtgacatgctttaattatgtcatagaaattgtttttccttttactaaatcaaaataattcatcacttttgtttttctgaaaggattcatttattacttttatattttgtgagaaggggtatttgaatttgtgacttcttaagtgtgaaaccactatacacccaaaaaaaaaggtttgaaacctaggaactaggaagaataactagaattaaatttattaaagaagtaggattatagctaaccgtatcttctgttgagatatct

SEQ ID NO: 7906 - DNA, 802 bp, Cannabis sativa
ggaaagtcaatatagaattgagtgtgagagagagacaatgggatattattattccaactcaatgtatattaataattatttattattatttatgtgaccttgcatgcgatttctctgattagggtattttgataattccaaatctctgtctaaagaattaggattttgaagaatattttccagtcactacttcattgaactaattgttcagtaatataattatataaataaacatttttttattatttttttgacagctaaggtgtttttgcatggaacccagttcttcacgagctcacttcagagttgcatatacaaacatgcatacacagatagatagatatacatatatatatatatgcatatttttacaaacattattatatgcatatacaacaggtatctctcggtagtgtagcatctattataagtaccacaaaataattatgaattaataaataaaggacccacaattattgaagcataattgccacttttcttgcttgagatgagcgctagctacgagaaaatcaattcagtcagagtgttccagtttgtctgcatatcatattctcttcttcatataaaagggcccacatcaaggattttctaaactctattgttccatccttagaagaaagatacacaatatttttttttttggttaaaaaaattataataaataattaataatttcattattttcagtcactgacggaatgtgtttggaagccaagcagaaaatcccaaaagagtagctgctgtaagacagaaatattgaacaacaagagggtagagtaac

SEQ ID NO: 7907 - DNA, 1103 bp, Cannabis sativa
tgtgggaagtctgttgtgaagatatacagctattctaaatgcatcatcccaatattttaaaggtagattagcttgagctaggagtgtgagatcattttccacaatgtgtctttgttttctttcaactatgtcattttgttcttgggtagttggacatggttttgtgtgtaatataccagcagcttgtaaggtgtctatgaaagacctatattcccctccccaatcagattgaaacatcttaattttagtgcctagctgcaactctacttcagctttgaacatatgaaaggttttgatggcatcagatttgtttttaagcaaataaaggttttgatggcatcagatttgatggcatctacaaagtgaatgtagtatttgtagtcattatgagaaggtgtaaatgagggatcccataggtctgagtgaacaggttgtaatggtcttgtataactggttttagagaatttgggaaagggcagtttgtgtattttgcctaagcaacaagttgtgcaaacaaaatgtgtcattttattaatattagagatgttacaatgagagagtacagttttaacaacctttttagaagggtgatcaaggcgattatgccacaactcatactcattgaaagatttattaaaattgacacaaacagaagaactagaatgctgttgagaagaagcagtggctatgttgacacatggttgcttagtgaaactagatgtggtacatgactacatggggatggggaggtagacaactggatttggctagagtcaaaagtatataggccattgtgatgtctccaaatcaatagtatggaatttctcacctgatccttgacattatagacaccaggatagaaaataaagtaaacattattatctggagcaaacttagagatactaagaaggttcttcgtgattttacaaaaatgaagtaagttattcagaattaaaggtttttgacaagtattgggacgcaaatatgtgttaccagttttggagataggcaaggcaactccatttcaaacatacaattgttcagggctttcgtgctcagcttgtgtcattatgttttggccattgggagtgcaatgatttgta

SEQ ID NO: 7908 - DNA, 697 bp, Cannabis sativa
gccaactatcataatattaaaatgtccaacttaaaatcgttgaagcattcctattggggtaccatattttttttcgttacgttcagtctaaatgcaccaaactagaataatgaaaacacaaaactgatgtagtgaagacactaacaagagataattaagattgtcgatgatcttccaagagataattctaaaaaatttatttataccctcaaaatttataaaaacaccatatttaatcatttgtattttatgtaaaaaaaatatatatatttattttatacttagtttttcttaattctttttccttccttcttatactcttaaaatatatacatataaaataaaaataaattacatttcaaatattaaatcaaaaaaaattatatgaaattttattagtaaataataaaaataaatatatataattttaaaaaatataaaattaaaattaaaatatttattaaatttgatacaaaataatgtgaaaaaaaatatattaagagtgatttttaaaaaataatttaagttaatttgttttttctttaaatattatgttgcatttataattttatatggtgcaaatataacttttcttaaattctaatatagtaaaattagatagcaattgattcaacttgagtagttctttaaaaaaaaaaaataataataaataaattgaaacttgagtatgttggat

SEQ ID NO: 7909 - DNA, 1321 bp, Cannabis sativa
caaccttctcgagatcactgccatctcttccttactcttttttgttctccataagaaaaataacatccaagttcttgctacggattagcgactgaagtgattgaactgcctcaggcttgctaagccctcgataattccaagagagtatcaacatgaattaggaacaaaaaaccccaaaatagggcaatctcaccaaggagcaggctcactaaggagtcagtcacacaccaatgacaagagagcaaaaaaatgcctcacacagtttaaaaaactcgagcgcagaactccttgacataaagaaacaagccccaccaaaataagaatctcggcaacttggtatgtcacaaatgcaaaaccaagatggggccaatagaaatccacaacaatttagaccaaaatgagaccacctgaaactaaaaaactcagggcagagaaaaattcaaaaagaaacagagagggagagagatgagaaaacaccttcttgctcgcccaaaccaaacttcagcaaaccccaaaatctcaaaagtcgctcacagtagctgaaactccaaggagagggcaacaacaccgacgacacccagagagcggctcagacaaccaggaaaaggcattcgacgaacccagcagaggaccaagcgagactaggcgatatcaacgaggaaagatgagcgagcggggaggatggctagggacgctggaaggttcggggatttggacggccagtcaagcagcggcttggaacctcaagaggaggttcagaggttacctctgaggatttcaaaatctctcattatacggaagaaaaaggacaaaatcgtaagtctttgaattcaacaatctcaatagttcaggagaaatttttaacggtctaagaaatttgggaggtataatttagtacatgtaaaaattcagaaggcaaaaatcctaattaacttttattagaattatattttttattttaatagaataattatgtcatctatgggataaaatgttatgctaatatacatcaaaaaaattattaatcttttctattcatattaaattttatattccattcttattctattttttatttctaatctcaattatttttttccttttatttttattaccccaaaccaaacaaattacctaaaatttaaatttgaaggagaaaccaacgtttcttcaaatttgaaggagaaaggaaaaagtgttataaaatcatcatggatttataggtcatctgcaacaataagataaccaacaaagagatgagctgattatgattaaaataaaaaaagaatttcgaaaaaagaaatttataaaaaaaaaaaaa

SEQ ID NO: 7910 - DNA, 568 bp, Cannabis sativa
tcttaatgggttggttatatggttctatgtttgaaggaattgcttccgaggttatgcggtgcagatctgcttctactctttggtctgcgttagaagagctatatggagctcattctaaagctaatatggatgatctacgcactaaacttcaaatagttcgaaagggaggacagtctatggtgattaccttagacaaaaaagagtgtgggctgattctcttactctggtaggagatctccacccagaaagacacttaatagccaatgtgttgtctggtctggacatggagtatttgtccatcgttctgttgttgggaaatcgtacagatctcacatggtaggagcttcaagattcattactcagctttgacagaaagatggaacggttgggagctgtcttaccaacaaacaaatctctaggaaatccatctgcaacactcgcacaaaaaccatctcaacccagcaacaggggcggttatcatggaagaggaggaggatacaacaataacttaggtcgtggttatagaaacaactctggttatcaaaatggtgcaggaagaagtggaaac

SEQ ID NO: 7911 - DNA, 1442 bp, Cannabis sativa
caagtgctttcgggggagaaacagacttgaatgttagaataggggcctagtacccaggttgacaatcaacctagtgcactggctttgatcattcaaatgaaaattttgctccaagaattctctccggcatggtcagaaatggggtaggagaccgcgtcctcaatttcaagaaccatgtaagtatcaaaacgacaaccctaaagctccaaaaagagcacctagagcccaagttgatgtatgacctgttgtgttgagtttcggttttccgattctgatttcgtctcaaattttcatctagtttttcatattaaacgagagttatgaactcaaacaagtcaaatttataacttcgtattttcacttttttgggcaaagtgacttagttacaaattgggtatttttgagtctcccaatttcgctaaacgaaaacatctctgagaactagtgaactacttcactaaaataaagaaattgactaagtgatgtcaaaatatcacttaggcgtcaaaaaataaatcccagcacgttttcctactcacccaacatttaggttgacgtcatgtgtcaacctgggcactagatgtcaacctaggcgctgatatcaaagtagcctttagtaaaacaatcataactcactcaataattatattattaatgcaattaaacttgtttcttaaagatattttaatgctctatcaagtcatgtctcatactttaatcgaattctaaagatattaagtccaaactttatcctcaagagagttacgaattccaactataacttacctgaaacaagtcccataaatgcgattcaagctccaaaaattgacgaccgacctctaaggtaaatttcaccattagatcatcatctatattttcacatttgtttaaatattttattattattttaatacgacctccttccttataaaaggagagctcctatagcttatttggcacattcaaaaagtacggtggtgttggccgcttttcaacgtaaaaaacttctatgtataagtaatcgaaaaagaaaacacattaattaaaattaaaaataataaatatatattaaaaaaatccataggtttctcaatagggctatattatttagtatgttatcgacaggatttacttatctcctcttcgatcatggttcatcgacctttctataaacatggaagtggtcgaagttagggccaacactgttagttgtgcatatgttggagatcgttgatggaggattagcaccaaatgtcatcagcagcttgagtttgcatgtggttgttggcgttgccttcgtcaagttttggtgcgaggtgggtgtcgcgtggaggataccataggtctggggtgctactacacatggtggtagagtcgaccttaatgattgttgtgtcccagatgttggtggtttggtgtttggttctcctattatttctttt

SEQ ID NO: 7912 - DNA, 598 bp, Cannabis sativa
ttacaggtccagctgcagatgcttggaattttgtttgtgattctaaatctgcaggtggtttgggatttaggaatatttttgactggaatttggcagctatgttcaattatgtttgggccatagcaatctttgggtaaagtgggttcataatgtatacatcaacgaagaaaattggtggtcttacaagaccactcctgctgccagttggtattggcgaaagctggtagctataaaagagagagcaaaagaagtttttgatgagatcaatgtcctaaatgacaaatataccgtggtagcgggttttcactctctaaggccctctatttgtcgagttgaatggagctccattgtgtggagctgaatgaacttgcccaagcatagttttattttttggctcacaatgcttaatcggctcaagacaaaggacaagattcaagtgtacaacactgttgaagatactaagtgtctgttttgccaaaccaaagaagagtcaacgcaacacttgttttttgagtgctctttctcgtgtgattgcttaaggaggatcaaagagtggatttcttggaggatggcttctaacactcttcctcgaattgtt

SEQ ID NO: 7913 - DNA, 508 bp, Cannabis sativa
taccaaacgacaccttaattaatatgctagataatgtagagcattcattaataatgatttgaaactcctgattagtttgattcgagttgttgattgtgttgggatctcgagtgagttgttgcacgttatatgtggtaagggatttggacatgaattgggagatgttaagtagattcaaattaaatcagtcaagaacattaatgtaatatacggtatttaacactttttgacatattattttacataattttagtttaaattggatatctaaaattccataacaaattagaccagtaaccttttcaaataataataaaaaagaaagaaaaaaccaataaaaaaaatacacattgattataattatagactcattataacaattatcttcaatcaattccataataagggcatgttatagaattggtgggggtcagataagattacatcattgatgaaagtgagggtgggaagaaaggaaaaaggagactctaattctattttgaaggag

SEQ ID NO: 7914 - DNA, 577 bp, Cannabis sativa
cattctgctcttggaaacaagtaactcattttcttatttatatatgtattcttttcttttaatttttaaatatagatatgagaattaattattagtattattcacttaaattattttttagcctagaacatggattttaccaacaaaaataaaaatagtatgaaagaaaatatttttcataaatttgttattacatacattttttttttaatatttactttatatatttgcaattaatttaaatttcacaaaattatattccattcaagttttatttttatttttatcaaaaagataaaaaaaatgttttaattattttttctgaaaatagaatgctcttaatcaatccaagagaaagttaaatcttttaattattagaatttttatttttacatagttttatatatatatatttacaaaaatacacataacaacctacataaaaattattagaataatctaaactataaatttaaaaaaacttaaaaaaaatagtatatagaacaattccctttaattatatatataatttttagggtatatatatagattctatattattttcattatttttttt

SEQ ID NO: 7915 - DNA, 537 bp, Cannabis sativa
aaagtgggtatggggtgcaatttcatcttgtttccgtgagccttttacgaaagcccaaccaggcagtcctaccatagtaacaaacatatattcaaaatacacaaaagaagaaattgccaataggccatggaaaagtggaacattattatatccaaagaagaagaaacatagttatttaatcaaaaggatgataggcggcatacacaaatatcttttagttcaacaacaaaacccaaaaataaagagccttctaatttccctttttttttaccaacagtcaaaacaactgcatctatttggaaaaaagaaaaataactcccattaaaatgaagacaatggcaacatccttgatgacatgacccaacttgcttaggcgtcagcaaatctaaaccccacaaaaaaaagagtaatggttagcttaacagtgaagtattgtttacacgaaatcaacttagaaatagtgaagaaacttaccctagctcggagagcttctgatgagctacggcataatcagcaaagaagcaatcttcatcctga

SEQ ID NO: 7916 - DNA, 530 bp, Cannabis sativa
aattaacgatgagaaaattagagaacattaaaaaaagttatatcgagcagatacttctactcgctataagtgtttaattgttgagattattaagggtaagagacactttttgctagatgcttcatggtctgagtcagtgtatttaacataattttttgtagctaggcctttaaatattttcaatctaccactgtaataattactttttcaccaagtaatatagattttgaaattatggttccttcaaaatttcaaaataagtgtaaacaaaaactagttacactattattttttatcttatcatttttattatttctattttataggagtctctatttatattgctttattttattttctcaacatgaatttatatgttttatagttaaatttatttagtaatcatcaatgattaatatcattgaaaagtattctatataaatgtatatctatatatatataaagattctataaattaaaatacaaaaaacaaattgaccccaaacctttcaaaaaaataaaaaaaaaaa

SEQ ID NO: 7917 - DNA, 1317 bp, Cannabis sativa
ggtgagttccaggtggtggtggcgaaattgttagcattgcggttggggttgatttgggcgtctaggttgggtttcaatgtggtgagagtggagacagattcttcaattgttagtaattggatcaattgtccaagttcaaacattatgtttaaaactattattgatgagaatatttctcttttagctacagttggtggtggttcttgttgtgccatttcgcgttttgcaaatggtgtagcccacacactagctaagtctgttactagttcgattggagtccatgtgtggacagatgcttgtcctagattcttaagtgcttttgtaacagctgatttgatttaataatatttttttcctaaaaaaaaatatcctcattcatgagaataaagtagtagtgttctcacctaagaagaattaagagcatctccaatagagagttataaatgtggtgtattgccaatttgtagaatattttgctaaaaggtaactccaatggtgatgtaaaatatttaccaaatttgatccaaactaaaaattatgaccccaataaatttctaacaagtatgtgccaaattttagcccacataaatgtcacattttttaattaattatttactactcattaatactattcattaataaaaaatatttttatattataagttattgttgagaatcatggagttccatcccaaaaccaattgggcagcggtgctggtgcagggcatgggtgggctagcaggggcgtgggggtggggcttctggtgcttattgtaggtggctgcctcctgttgatggcaattttgtgctatcagttgatgtggtagtcactccgggcaggggcttcgctggttttgggggtcattcgtggtgagggtgaggtagtgtgggtggcataggcgataggtggagctggtgagttccaggtggtggtggcggaattgttaacattgcggttggggttgatttgggcgtctaggttggatttcaatgtggtgaaagtggagacagattcttcaattgttagtaattggatcaattgtcaaggttcaaatattatgtttaaaactattattgatgagattatttctcttttagctgctgttggtggtggttcttgttgtgtcatttcacgttttgcaaatggtgtagcccacacactaactagctaagtctgttactagttcaattggagtccatgtgtggatgcttgtcctactgtaacaactgatttgatttaatatattattgtttttcctaaaaaaaatattctcattcatgagagtaaagtaatagtgttctcacctaagaagaatt

SEQ ID NO: 7918 - DNA, 1065 bp, Cannabis sativa
ctacgggtctttcattacactaatttttgaagcttattatagaattttctcctaatatatataaattttattttcttgtataatgaaaatacttatgcataaacaggtgcagcaaaagttaaccgagttataatagtagcactgtacccttcagttagagaaagctttcaaatgtattacgatcttacagaagcaatgggaatattaatagatcgtttcatggagatggaagttcccgaatgcgttaaggtacttgacatcttcactcgcgtcgccaaacagttcgacgagctcgaccatttctacaactggtgcaagaccgccggaatagctcgctcttctgagtacccagaagtcgaaaagattacacccaaaaagctagaggtaatggacgatttcatccgcgaaaagtccgccattgagaagacaaggaaacatagttccgaaaaccaagaagagaatcaggtgaaagacgagaaagaggaagaagatgatgaacacgaagaagaactagatattaatgccataaaagctcttccagcaccggaaatcccagttgaggaagagaaaaaagatgaagtgattattgatgataatgatattaataagaagccaaaacaacaagaagagggtgatttgttgaatttgggagaagatttcgccttgtctagcaaagaacaagcagataatttggctttagctttgtttgatcatcatgttccaccacctgagcaacagtctaattgggaagctttttctgaagaatctccagccgattgggagacggcgctggttcagtccgccactgcattaccaaaccagaagacgactcttgctggaggtttcgatatgttgttgttggatggaatgtaccaacaggcgaagacatccatggctatggctgggccggggttcggggccagtggaagtgccagcagcatggcggtgggttcggccgggaagcctgcaatgcttgccctacctgctccgccaccccagtccttagcgccggatgggatcgcggtggtggctgctaacaacggcagtatggatccgtttgcggct

SEQ ID NO: 7919 - DNA, 1105 bp, Cannabis sativa
tatatggctataattaaatatgcaaaagtaagtcttcattacatataataataataaaagcattaataccagccaaatatagtggatatacatacactaccacacaataccaattacctatacatacaaaaaaagaccatattcatataactttgatcatatatattctaaaaaaaaaagtaaaaggaaaatgtattgattagctagtcttgtatgaaaaaaaagaacaagtcaagctaagcctaagggaaaaagatatcatcatcatcatcatctcatattaatcatgatcatgatcatgattatctacttattaaaggaaaccaacgttcatgaagagaagattggtaagagatcatgaaaaagagaaacacaagcaaaaccgcaactccccagggcgatccaccggctctatgaagagaatcttgttcggggaatggtataaggaagggaattccgccgctagaaaggcaatgaaccgcgaggagaagaagaagaggaacaatcatcaagaagagcttgacttgaaatatcaaatcttcaaacttgttttcatagtttatgtaccatgaaaaccctagcatgaagaaaaggatgagaatgaaagagcatagtggaagagggattgagaagtaatcccaataagaggtgtagtagtaattgttgttgttattgttgtaattactagacatggttttgttttgagggttttgaataataaattggtgtttatataaatatatgagagaactttttttttggttgagtgttttttctagaatgaacttggtttttctttgaggaaaaaagtttggtatgcatatgggattatatagggggccacaagtggaatattaattagtttaattataattattatttgtttaattggggtttaagttgagtagcattggtttaacttttgttcttattgtgatacgtgtaaaagtgctctattattatttgactctataaagactttgagtaaattaaccaaaagaaaaaggatttagataaagaagttctttctttttattaattatatatttcacttttttttttctctatttctaatcatttaaattagaaggtttttttttttttt

SEQ ID NO: 7920 - DNA, 840 bp, Cannabis sativa
tattagatattttaaacatagtttttctaaatttcactgtactagtctttctttctgttctacatttattaatgttgttactcattccttggctaaatatacactgtcggaagttattaataaggtttggtggtctggttatctttcttgtatacatgatcacattttatataagatgagttaatataataagttttaactcctctttggggtttttttcaaaaaaaaaaaaacacaagttgtaattttttattataattattaaaataaatatcggtataagtacttaaattttaagtttataagcggcataaactcaatatttatgtttagcgcattagtacctaatgttttgtaaaactgtaattttcttcaataactccaatagagtaacctttttcaggttatggactttggggattagcactacatttgtcgcagtgattcctttctgcattactccagtctgaaaaaagttcaaaattgaatcacataaatttcctcccacaatgtcccaatagtgtttaaagaacaaaactgaaatttcatacagactaggagctttgtagctattcagggtgaataagtcctttcggatctcttcagcttctgggacacgcataagttttattgatcatcttaagttagacatctatgataatattgttcatattaggcatctatgggatgttccttcacgtaaagatgcagttgaaataatccatgaactctttctcaatttgattttggctattgatccatttaccatttttgtccatgatgttttctatcacattgcagctctatctaataatagccaaaatggaaaaaaaaaaaaaa

SEQ ID NO: 7921 - DNA, 701 bp, Cannabis sativa
ttttacattctgtatagtttttctgttttgattctataaattggcgttctgctgtgacaggtttttaatctgttactacagattgttatagttgtttttcttaataattgaaatttagtaaatttattggcatattaaaatataatccaaaagttttaactgttacgcctagtatgtatatttatatattactatgtaagaatatcatactttgtttctagaagcataataattatcttattattctctagttcttccccttattttattctaaaaaaaatgcttttcacttaaaagaaaattgaaatctccctttttatttaatttataggtacactttgaaagcacttatgcaatatttttctattagttacatgggtttcataagtcaattatttgtttttgacataattaaaagtcaagtagtaatatagtagagtgtcaattggtaataccattattgtgactattgttatcactgtatgtctgtatacaattcaatctattaatttacacagtaagaatattgtttttgtttattttacttttaccaaatagaaaccatttacttaagcattttcaatctctttaaagaatcagaatttatgtaaaatatatatatttatgtacatgtaacagtcaattcttgaaagatagaataaacttttaccagatatgcttaccaaataccaagtgctcat

SEQ ID NO: 7922 - DNA, 628 bp, Cannabis sativa
ctttgaatttcaaattttgatgctcatttagtgaatgtaggtggtggttggttatactcattccattgagtatgcttgctttttcattgtgttgattgaagagcaaaggaaatcctttccttcactcatggcagaatatgtgccatctatgtcatgtgttaagctgcattcgcggataagttgtaccatcaaacaaaagggattctcacccaggcaatcacaaatcagaatagtacaaaggtttacttgcttgctattttaagctagttgggtagaattatttcattagtttcttacactaacattcacatgtcttggatttatgctctttaagttcaacactgtgattagctgtagttatgactgcaggaaatattcacatggaagctgcaactccatgcggtcaccagggttgaaaatgtgtaagcttactgttcttggcatttcaaagctgagagcaagtctttggtccaggaggacaactttgagctgtacctgtttaggaccaggtgcaatagtttctacttgggtaccagttgttgatcaaatacttctgatgtcaagtatatttcttacatacatggctggtgtaattcctattaggcagccttatagaaaagatgtctcc

SEQ ID NO: 7923 - DNA, 939 bp, Cannabis sativa
taaccaagatcacatttctcatataattgctgaactcaacaagcaattttccctcaaagacttaggcaagctcagttacttccttggcattgaagtctctcacactgacacaggaatgcatctatgccagactaaatatgccaaggacttactatgcaaggccaagatgcaggaagccaagtctatttccactcctatgacaggtggcctcaaactgtctgctcatggaagtgatcctgttgaagatcccaagctgtatcgatctgtggttggtgccctgcagtaccttaccattaccagaccagaaatcgcatacagtgtgaacaaagtatgccagttcatgcagaatccttcccaagcacactgggctgctgtaaaacgaatcttgaggtatattgggggtactttagattatggattacatctcactaaatctaccaactttgaactcactggcttctgtgatgctgactgggcatcggatcctgatgacagaagatcaacttctggttttgctctgttcttaggcagcaatctcatcacttggcaatccaagaagcaacatactctttccaggtccagtactgaagcagagtttcgaagtcttgcaattatcactgcagaaattgcctggctgcactcactcttctctgaactgcatatccatttaccccaacctcctgttgtttggtgcgacaaccttagcaccatcatgcttactctgaatccagtgttacatgccagaactaagcacattgagttagacctctactttgtgcgagaaaaagtacaacaaaagcagttgcaagttaagcatgttcctgcattcgatcaagttgctgatggtttaaccaaggctatctcaagctctcgttttactgtttttcgaaacaaacttaaaattggtagtattaccaattctaagtttgaggggggctg

SEQ ID NO: 7924 - DNA, 899 bp, Cannabis sativa
tatatatatatatatatatttacttaaataaataaaaaaaaaaccaataatttttttatatcaactgtaaaaaaacattaaatcttcttttactatattaggggttttcttctataaaaaaaaagttaatttgcatgtagaatttttaatacagtagattattgccaaaataataagatttttaacttaaaatttcagacatacaaattttaaactaattattaatacacgtgtacaataaataatggagagagcagtagtattaatgaggagagaggattgagaaccttgttaacgttaacaaactctaaatcaattaatttgatcatctttaatgtacaatatgattcaacaataaatgctgagttttgctcaaagtagatcatattatttttttcttggtcttttagaaaaaaaaaagttagttttactaaaaaactttattaataatttaatattaaaaatattatacgtgcgagattatagtgggtaacttttaaaattgtcaatcattagaatactctttgtaaaatattataataaaaaaatatttcaagatgatgtattatttttaaagactataaatcttgtcttttattagaaatgtatatgttaaataatgtgtcataaaataattagtgggacatggaggaagggcaccaattcaaggagagcaaattttctttccacaaaaaccgaaaacaaattttatttcatttatataagtacacatcagagttacatgaaacccaactatattacacatatattatttccttatttcaattatatatggaggatagaagtacataaagtacataactatttgtactgtgtatatatactatatgtagtttatctataaattaccttaattattggcaatggcatctttccaa

SEQ ID NO: 7925 - DNA, 734 bp, Cannabis sativa
tatatataagtgcaccatgttataattgttcttaagaaaaataataattgacttatagtctagaggattgaaaataatttatttcaattaacataataaatgataacaattaataaattaaaagcatgataataaatgaggaaaataaaagggagtcggctcagtcgggtcataacacgtggtaacagcacgtgcggacccacacatgaaaaaagacaggtccgctagctggcaaggcaacggcgctgtgagccataatggcaaacaaagactttccgcacgtgcggaggttgggttacgtgtgggccaaagacgtgtgccctccccgttattgggtcccactctctcttatttttatttatttatttattaaacaaaggattaattaattaattaaatttgcttttccaagaaatgggtgagagaggccggcgtgaagaaaaagtgggatgaggccacgtggggttccattccaaaccctttgtttcattttcacactcttctctttttccttcctattaattaattaaattaaattcatttaattattatttatgtcttttttttaatacgtgacttgcacgtgcatttaacttcctctacttttcttccattgctaatgatatgaattagggttggttaatttcgttccattttaaaaaattataactcaatttgatttgattagatatcaaaatttaattattaatttgattgaatcaattttataattg

SEQ ID NO: 7926 - DNA, 1171 bp, Cannabis sativa
tcgaataatttatagtaataaaaattagatttaattaaacagtcatttactatgtatataaaaaatatgtaataaaatatgtaaattttattttcgacattgtatattacttaattttttaaaaaaatctataaataatcttaaataactaaatataagatatataaagatatataattattatataattataaaaaaaattaaattaaaaaattcttctaaattaatatcgaaataaataaataaataaatatgagatctatagaaacagccgtgtgtaccagaatctttagtgagaatatataaacatttcttattcgtttaaattttaatatagttatgccctaagaaagttccctttaatcgaattatatgctacttttaataggagtagttatcaaattagggcatataatgccatgggcctagctgaatatgaccttcactaagcatatatatatttatatttatataaaaagttttataatgtttaggtaagggtaaatagtgttatatttatctaaagttttggattgtaagtgacataaatttaataatttttttaacagcataagtatttaatatttataaaaatataatttttttctagtctcatcagtacagatactgttattattttaaataaagtacatataagatccagattcaagattatttaatctgaacaaaaatatgtaatatttattatttttaatttttttttaaataaatttaaaattgagtttgtactaataaaaaaataaaaaaaaattacaattttataaaaatattattaaactcaaaatttttagtaattatgtcgctatttattctttagttaataatgacatttttgttgagtgtactgattatgttctttttttttcagagagtttgatcgagtgtgaagaccagaccatgtttttcttgttattgtttgtgaatttaatttaaaccgttggatggacattattgtaatggtattaacggtcgatatccttgatctcaagtgtgtgtatgtgtcagtatattagatattttaagagcaggctttcttttggagttattattattattttttaatttctactctttatttgatgtaattaaagtttgtttgtcggtttctatgatatggacaactgataaattagaatttgaatattttaat

SEQ ID NO: 7927 - DNA, 601 bp, Cannabis sativa
atttatggctggtgaagctgtccccgttactgctgtaccaaccaagtagtataatccattcttgagtctacctctagctattacaagtgaacctttagagatgtttagagtgccattgtctattttgacagcataaccattgttgtcaaacacacctatagacaataagtttcttttaagatcagggacatacctcacctcttgaactgatcgagtgatgccatcgtgcattttcatgttgactgagccaatgccttgaattttacatgccttattattccctaagaggacagtacctgatgcattttcttcaaaagaagcaaacaaattcttattaggtgtcatatgaaaagaacagcccgagtctagaatccattcaccaccagtatcttcactagatgcaataagcacatcagcagagtcatatccacttgagacaatatcagcctcacctctgtctctgcttttatctcttttcaacttattctttagcaagtaacaatcatctctgaaatgtccttcctttttgcagtagtagcatttctttccaatggcatttctgttcttggaattggatttgtgtccattctttgatttcttg

SEQ ID NO: 7928 - DNA, 676 bp, Cannabis sativa
gactttttatgtgattttacagttaaaatcaacatactccacgagttgaacttatttctgatgttcttttgttacaggtacaatctggcaaaatttcctcttagttagaaatttgaccatctttttgtacaatgtgatcactgctacttataagggtatgatatcagttatttttgatctaatttgtacaacggctataaaacgtggacattctccacgtttcatataatttatctaataggaagtaaatatgatctttatcatgaacttgggcccaagtccgggattcgagatttgagtctgagtttgagtccaggttcgggtctgggatttaggtccacggctcgaggttaggtctcggttcggctttacggttcgggtccggatctagatctggagtcgaggtcttcaatcctaaactctttgtaaatttacaataggaactaatacatatcatttattatgtattaaataatacgacttacattgtattagaatttataatcgtaataattaatataatacaatattttttctaaacataatactacttgttatttaatataatgcgattgttatacggcctactaaataagtcttaagagtatggaatgattttttttcatgttgataattagtgatatgtattgccataccagcctttgtttcaaaccat

SEQ ID NO: 7929 - DNA, 628 bp, Cannabis sativa
acaggagacccctcagaatatgtatgccaatttgaaaaaaaaatgctaactgtgtccgtcccgctaaaggacgtggaagcaatcaaatgcaaaaccttcacccaagggttaagggggcccgctctacgctggttccacaatctgtcgttcagcatagtaaactcataccaagatcttattttgagcttccaggcgaacttcgcaataagtgtccggacaccgaaagtggatacggacttaatgttgatacaccagcggtttgacaaacccttggataaatttatcaacagattcggtgaagagtatgtcagtgtctcgaaatgcactgattcggtggcgacaaaagcgttaatgcaaggattgttacatggctcagaattaaaaaaggcgataatagtgaaacccgacctatccctaacaagggccctaaccatggcaagaggatatgtggctttggaagtagaagagaaacgacatagtgaggaggtgtctcgcaaaacctcgacattaggggatactttcctcttcgaatcaaaaaatcaggcgccagctccacgaccctacaataggactgaaaactgctcggccgacgaaaggagcacccgagggacagctatggcgagtataa

SEQ ID NO: 7930 - DNA, 830 bp, Cannabis sativa
ttttagccaatgacttcgcagacacggcgggtggccatggatagacatcagaagtagttgcaactgatgcatctgcaggtggagcagtacttggagaatgggttgaagttgaaggaattgtagcaaatttggaccatctcaccatagtgaatgagctcggatcaaagaagggcggcctagtcgtcttgtcttaacaatagtggagtcctcaaagttgagggcattaatcaaatatattgtaaactaggaaagactgggtacaattaggaactaaaaataaatacaaattacaatagacaagaaaaggcatttcaatcaggcatatttagatacacattctcatttattgacttacccgcagctcaagataacatctcagaattatgtcacttttttaatcctcctaaaaatctatcataaaaactgttataagtttacactagtcaatatgaaaaatcaccaaaaacatgttaacataacttcaatactgtagttcttttggaggcaaatcgataaaataatagtccctgccaaatcccctgcccaacagcctgcaagaaagaagaccattaattatagataataatatgatcaaaatcagagaccaaatatatgcttacttacaataaagaaactgagctactccaaccactgggcaacgtttctgctgtaaaacaagaacatgagaaaaagaaacagtattagaaagtattatcgtaacaaaaaagtaaaaaaaaaattaataaataaaaagaggactctcatgaagaatagcaagtaaaccaacctctcaagaacaccaatccctggcattttggaacattttcaac

SEQ ID NO: 7931 - DNA, 590 bp, Cannabis sativa
tataaacgttaaaatgcgaatagcagcagtaaagcccctagctcttctctttccctccctccaccgaacaactacacacgctaacaccattctcttcaattttccacttccttattcctctccctccacaatctctactccaatcaaaaccctaccctctctcttctctcgccgaccaatgacgtcgtcggcggctgcttcttcattgccgactgtacatgtcaaggagaaaatcgagctcaacgatgttgagaagcagattttcgataggcttctcggaactcttcgccattttggccttcaaaaccagctccgagtcgccggtggctgggtccgcgataaggtcattctctcttcttcttttccgccgaattgattatgttgtttgtttggttgtgtctttgatcttagtgattatttggattttgatgttcgaattttcagcttctaggcaaagactgttatgacattgatatagctctggacaatatgttggggagtgaatttgttgataaggtcagagaatacttgttgtcagttggggaagaggcacaaggaattgccgtcattccaaggttctttatttattt

SEQ ID NO: 7932 - DNA, 638 bp, Cannabis sativa
aaaagcgatcctaatcatttggtacgttctctggaaaaccttcacttttatattaatattattgttcctgcggttggtggtgcaggtggccttcttttgacttggaaggctgggttcacttttgaaactgtctgtgtctccaagaatcagttatctggtattatttattcggacccggagcatcacccctggttgttgtcgtgtgtccatggcacccgtattttcatgagaagaaaagtttctggccgaggatgatggagactgggcaaaaatttagggggcctgagttgattcttagagatgttaatttttttctgaattgctcggaaaggagaggttcgaaggggagagaccaattcttaccgtttatttcaaatttaatcaatagtgctggtttaattgaaatgtctgtcaaaggtgactaccttacttgaaataaccatcagaatggcaatgctcatcttaaattggcacttgacaaggctttggtgaatggggatcggcttggtcttttcccgaagaaggtggtcaaattgtaccatacgtgcaactcggaccacaggcccctttgtatcagtactgtgaactaagatgttaaacattttaggccttttcggtttgaggcctggtggacaagg

SEQ ID NO: 7933 - DNA, 789 bp, Cannabis sativa
agaaatgagctagcgttatactcttcattatctcaaaacttaatgaatttaaataattccttcctctttatttgtgttataattaatttatttcttacatttaaatattagttttaattaataaataattatatcaaaataattatttcaataaaacattatttaaatactaattattaatttttgacattaaatatctaattaataatttaacttttattaatgcaacagagaaggattcttcatttataaaataaaatacaataagtataaataattttaaataatacattttcaatgtgttcagaataagtgccaaaaataaaactaaggcatcatcgacgttctagatcgtttagccatttgtagcccctcacagtatataccagaactcatcttgctcactatatgtactagcacttccctatctaatacttgtaggggaaagtacggggtgagctaaaagcccaataagacaatgtttgtcatacaataccatacaataacatatatcattaatgcactaattaagttttagcaatatcatatcacttagcttataaccattactaaataatttcacacatggagacctgtatcacatatgttcatgctaactattcataacatacataaattgaactcataactccaatatcatactcatagcgcataatcatatcaatactataaaataatcatgtcattatcatatcataagcatatcatagtcattatatacataacctgagcctaatctgcccctacgataacttgagcacacttagc

SEQ ID NO: 7934 - DNA, 507 bp, Cannabis sativa
atgagcatgtaaactcttaccgaatctcgttccatcagctaaactcgaacatgaagacaacaatatagcaatagttctcttatcttctctgatgccttccattttcatagcagtgaataaactcacagcttcgtcgtaaatgccatattcgaggtatgccttcatcatcgaattccacaaagcaacatctcgcttggagacattttcaaataacctacacgatgaatctaaacttccacaatcgctgtacatgttaagcaaagcatttactatgaacacatcatttttgtagccagacttaatagctatttgatggatttgagcacctaatttgagtgaaccgagttcagcagaggcttgaactacagctactaatgtaatcgaatcaaattcaaaaccttcaacaagcaaaagtacaaaaagactacaagcttccaagtactcttccatgtcaagatatccagttattattgcattccaacttactatatttctcactaccattaa

SEQ ID NO: 7935 - DNA, 575 bp, Cannabis sativa
ctaataatcgagaatttcaataaggtgtcgagtatgttaatgtgtgttttgaaagatcattctacaaaagaattgtgcaaagtacccaaaaaattagctctttagccaaacacccttaatcatatattgtaaagggtccttggcaaaatggttgttttagtcactttgctttgaagaggctctttcgaagtttcgcaaaaaattatcttttcgaaaaaagaagatcatcttagaaagtgatgtgaatctattttttttcacctctaactaatattgaattggtacttcttcctgttttaatgtggaagaagtattgtgatttgtacatacccaacaacacaaccatttttgtactattgcagttataacattcatgttgtggtagttggtactccttaatgaacctttaaaagtgtctttcaaacaaaattttcactcttgatgcagttcctaactattcatattttccaaaatttgagaccatgtcatgtcatgtacataaatgacttaaaagatatgtaactatcattgaaatataaattttgagtgtccctaccaagttacctatcaacaac

SEQ ID NO: 7936 - DNA, 574 bp, Cannabis sativa
atgtcagtcgaagagaccaatattctgttgggcatacctacacgacaaagggcgttacaataccaggcaaagtgtaagtccctaacccatcagacattcgaatggagatttggggggaaaatgctatctcaatttttgcccgcctgacgtagcacctccatgtggcaaaaagcaaaaaatacattgaagaaacgctaaaactaattggtcaggtctttgtcgtagaacaccgaattgttgggtttgcggtgtagaaacacttgggcaacatgtagtcatgattgtcattgagggtgttggatttcaagtttccaattttcaattgaaatgcgagggtgttaagttttggtcattggggttattatgggtcctattttaaaaatgattggtgacatgtggttgtggtgatattttattgatggactattttgatttgttgtgggtttgtgttcttgtttgggaaatttgatattatatgcttaaaattaatttatccactaaaaatatgctagcatattttgcatcatgcaaaatattatgcaaaatatatttacactatttttctcatccaatt

SEQ ID NO: 7937 - DNA, 1041 bp, Cannabis sativa
tattttaatgtctatgtatccattattgtataaatagattgggtttcattgtttctattgaattttgacatttttctgtctagctggccaataatacaaaataattcatttcaatcatacatttttctttcatgcaagagcggacacatcaatactataaaaacgaaattggactataattcattagattacagttacacagtacgtagtgcgatatagtgcaatggtatcccataaaaaaaaattgcatcacatatattgaattttctttatattttctaattataccatttgttttagaatgaaaatatcgaagttgtataaaacataaataaccattccaaatttattgagccttaatataattaacttaataaaactcttgggcactctttattacttttaaatatccttcatcggtccctcatcaaactgaactttatataaaaataatccatatctgaatatagcacagaagcctcattctcatgagccgaaactaagctcaagtaattaattgacagtgatattagtagtaaaactacttttatatcatttgtgatacttaatcttataaatagatttttttagtaaaattctccaagctatatttcattttagttttccatccgaaaattctgttaagtggcaagggaattatttaagtgtacacataacaaacttttagtaatttacgtaattttaattaattaaatattataaaaaataatttaaaaattaataaaataaacaataactagatagtttttttcctttttcttttattttttttgttttttctctttttccttgcttcttccctcatccaaaatatccccatgtctctctctctctctctctgtctctatgtggcgtcagcagccagcttaggcgagctattacagccgccaaaaacccgattaaccagaaagcccaatcccttctttatctactatgaaaaataatcatacatcattaaaaaaccaatatttacttcaaatgggcaattgggttgtaagaataaagacacatttttttttt

SEQ ID NO: 7938 - DNA, 2049 bp, Cannabis sativa
cccgcgcccactcctcgcccacgcccgtgccacgccttccccgcggctgagatttatcatcttgatttttgatggtgatctatgatttcaggagatcggatctggactattgataccaataaattaaatttcaacttgtgatccaacttttgatagaaaaaagtcaaaattgtgatatggctattaagcatgcgtagaagtatctttgaaagagctttccaatgaactttgaatcgcattaactcgagcttcaacgagtgagatatgaccgaatattgtaaagtgttcagcaataggcgaccaggttgacatatgacgtcaacgtgggcacccactactctgaaaaaattgtattcccatcatacctttagatgccaaggttatgtgagagcatctctaagataatttttagattatggtgatgctggtcaccgtctcttggtgattgagctcgggtgtgcaccgagtgacaatcgggtgtcacctaggcacatgtgtgtcatcatggatgtaagtgacataccaacatgagattctggcttgccatgacaacaacaccttattttttagacaaaataagaatgatttctagaacaaaactgcatttggatggacgaaactatgtgctctaggttggatgtcaacctaggcgcttattactgatgtcaggtggtgcttggggctaaactagtatcttgaggatgaattcttctaaacagaaatcctacaccgtgttttggaagaaaaataagaattatgaccgagacagaattgttatttgagtaactaaccacgtgtaccggggtaattccatttactattttatatgtacaagattttaataataatttatttactttttaaaaattattttattttcaaaattaagctcctcaagtttatttctgggtaattgactgccctgtgcctaagagcatctctaatggagtgccagaaaaatagtgtattgctatattttagcacacctaaaaaagctatattctaatggtgttataaaaagtgtgctaaatttggcaaatgctaaaagttgtgccaaatttggcacaagatatatcattgtgtcaaatttagctcacaataaatactgtactacttttttatttactataatgctactaattattatgatttattggcttttactaaactttatttactttattactattatttaaataataaaaaaaataaaaagtaataaattttgtatattctcaataaaatatgaaataaccatcaatataattaattattttttcttattttacattttgtgcattggagcacgattataaatatagcacaaacttattttttatgctaaatttagcacaaattttagattttctattagagatggtttaagagcaacgttcacgatcttaaagatatgggaccattttagataaatattcattattgtttttctgctttgtttaatagtaaagtgtgtacttggaaaatttattaattaaatgttatgaaactgtttcccatacaatactgataactgtaaaagggtgattactgtaagtgttaataattttaaaagagtgattaattgtaccaaagtgttgtcatcatcttcttcttcttctttttttttcttctaacatacatttaattagtataactttctgatttgtacatattttagtattagattgctaggctggcatggtaagggcatcataacatgcctcatattgccttaattgccgcgaatatatgaaaaaaagagacaaacacaagttcagttaagtcagttgcctcaacttcccaaatccacctttatttttatttatttattattctttaaaagcactttaaagcattagttggtccatttattcactcacagaccacatcttggaaataccacaactttctttcttcactatgattcatcccacacaaccacaactacccctcaaaactccctctttttccttttaacattcaccaaactctctttctctctctctaccatgttgttttaagtataatgagtgtgtatatatatatata

SEQ ID NO: 7939 - DNA, 1451 bp, Cannabis sativa
taattataaagattttctaagtacattgatgatatgaaatcagggaacagaggtccaggaagaattccattggattggactacaaggatcagcttggtgttaggagcagctagggggcttgctcggatccacgaagagtatgggtctgcaaaaatacctcacggcaacgttaaatcgtcgaatgtattactagacaaaaacggcgtagcttgcatatccgatttcgggttgtctctgcttcttaacccagttcatgccatagctagattgggaggttacagagctccagaacaagctgaggtcaagaggctatctcagaaagctgatgtgtacagctttggtgttttgcttttggaagttcttaccggaagagctccttctcagtacccttctccggcgagtactcggcctaatcgcgttgaggatgaagaacaggctttggacctcccgaaatgggttcgatcagttgtcaaggaagagtggacaggtaatgaacaatgctctgttttattattattgtgtgtgtttttttcattacaatcattatttgaccgaaagttaacttgaattaggtgaagtattcgatcaagagcttctgaggtacaaaaatatagaggaagagcttgtatcaatgcttcatgtggggttagcttgtgtggttccacaacctgagaagaggccttcaatggcggaagtggctaagatgattgaagatatcagagtggaacagtctcctctgggtgaagactatgatgagtcaagaaattctctttcaccatctctggctaccactgaagatggacttggtcttgggctgccatgattgtgtccaatggtaatggttctttggttggttgtttcaatctccttcctctctttcatttgcattatctcgttgcgaaattggcctcttctcagaaaaatctatggatgtctagtaatgatctgtgtaataatctattgtttttttcttcttcttaggtttctatttatgtaatgtagctttgttcattttgtatttgttcattatataatattatttcataactcattttcaatcaaagttaaacaaagggattttggtaaaaatgataataagaataagaatgaaatcaaatttaaaatggataaaaaaaattattgaaatggataaaaaattattaaaattattaattcattggaatagttttttctttattttaagatggaatagtcatttaactaaaataataaaaatatcattctattagaatgaaattctaatactttaaaatgcaatcaaataaaaaaattgaataaaaattgtttcatttttattttattactttcaactaaacgccacttaagaattaaattggaatagaatggaattaaatttaaaatgaatataaaaataaaaataaaatatcacattttttctatcttgcattagaatggtatttctttctatt

SEQ ID NO: 7940 - DNA, 718 bp, Cannabis sativa
atgttgcagcaagattcagttgctcaaactcattacagcatccttctgcagaatgcagagacagttgccttagtttcttcgtgccaaggtttatttgtttcgaatttcacaacaaaaaactcttgttgctaatatttcacttccattagtaacttgatgtgttctgttttctcactttcttcagcaggaaatgaggtggcaaaggctattccagtgagctcactaaaagttggagatgaagttgttttgagagtacagggtggggctcgacacactggaatagaaattgaagaatttattgtcgaaaattaggaaagacatatggcttcttaagtgaaatttgaataagtttcaattagttgcaccagagaaaagaagaaatttcattggaaggaagtatttattttttttattttttttcattctttgtccaatgaagtgttaaaatggtagtgtatagctatattttaacacacttattactccaataatgttataaaaagtgtgctaaatttaagtcagactaaaagttgtgttaaatttggcataagatgtagcattgtataaaatttaattcacaataaatgacacttttttatttactatattatcactaattatcatgatttattacgtcaaaaaaaaattatcatgattcattgacatttataaaattttactttctttatttgccatataataataataatattttttt

SEQ ID NO: 7941 - DNA, 1801 bp, Cannabis sativa
gaaataataattatgatgaatgggaaaaatctgtgtgtctcgctcttcgttctcgtcaaaaatttggcttttctaacggcacgattatggaacccatgccacccttcacgcaagaggattggttcactattcacttgatgcttgtctcatggctgatgcatactattgattcagaagttaagtctactatttccttttatgatgatgctaaactcttgtgggttgaattgaaggctcttttttctattactaatggtccaaaaatacaacaattaaaaactaatattgtgaagtttgaacagtctaaaactatgtctgttgctacatattttggaaagcttaaagttttatgggatgatttagctaatcatgattctattcttgcgtgtacgtgtgggaagtgcactagcaatttgggtaaggctcatgagaagcgtcgtggcaataagcatcttcatcaatttttgatgggtataaattgtaaatagtatgcctaactacactctactatattatctcaagagcctttacctttacttgatcgtgtttatcaaaaagttacgcaagaagaacaagtccatgggattactcgcaacaaagaatctccaccagaggttgtggctttttctgtgcacccggagggacgaggaaaagggaaaccagagaaagttgataagtctggactcatgtgctctcattgtcatcgttctagtcataatattgcaaactgttttcagcttcttggttatccagagtggtgggggtatagacctcgcactcaaggtgcaccatctgctcatggcaaaggtaatggtggtcggagttctgatccaccagctgctgggcgaggcagaggtccaactgttcgtgccgtaacgatagatggcagcaactcaagcatggtcagttttgtggttgagcagcccacttcatctaccacttcttcaaacactctcgtatctcttcctaacatgagtaaggaacaatggcataccattgctgccatgtttgataacgttcaatattctagcaatcgtttgcacaatgagctctctaaaaattcttggattattgacactggggcctctaatcatgtgacggaagatatatcatacttatttgacattaagaatattgttgcatgtcctgttggacttcccaatggaaaaaatattgttgctaccaaagaaggaagtgtgatgctattagaagatttttctttgaacaatgttctttatgtgcctaatttacactgcaacttgatttctgttacacaacttattaacaacatgaatttctctgtccattttgcctctaatatgtgtgctatacatgacctaccttcgacgaagctgattggagcgggtgaacggagagatggactttactactacaagcaactgcctagagtgcaagctattacagtggctagatctcatgcttcattggagctttggcatcaacgactcaggcatccttcagagaaagtagtaaaattattgtctttttttttgtaactctagagataaattaaataagccatgcgatgtgtgtccacgtgccaaacaaactagatatttatttgctatgagtgataataaggcttcttggatttttgagttagttcattgtgatttatggggtccttacaatacagtctccttttgtgaggctcattatttcttgactattgtggatgattattcccgtgctgtatgggtttgtttgttgattgataaattggaagtttttaaagtgtttatgtcttttattgttgtggtcgatcgacaatttggtcaaa

SEQ ID NO: 7942 - DNA, 574 bp, Cannabis sativa
tatatatatatatatatatattaatatatatatatgagatgataaatattaaaagtcaccaagggtgtctagtagggctagtaaaatgagtaagatacgataacacgatttgaaactcgtacgatagttggcagatttgaatttgccttaaatgggttcgggtcgtgttcaggttgacttatctaacatgtttaataaacgggtcgtgttcggattgacacgaaactgacctattaataacctatttaaagttattttagttctttaacatgtcataaatgggtcataaatgtattattggttaacatgtttaacaataatatgcttataaacggtttacacgggttgtgtcatgtcaatctatttataaatggatcatgttcggattttattttctaacacggttattgaacgggtcgtgttcgggtcgaacatatatctaggtctcgacacgtcacgaatatgttctaaatacgtgtcgtgccataaatataatatagattttgttgtgtcatgctataagaaaatacaggtcgtgccgtgccgtgaaataaaaatacgagaatttaaagtg

SEQ ID NO: 7943 - DNA, 1697 bp, Cannabis sativa
ttgatatttaaaacaatttaagggaaaaggaaggagctattagattttttcataagaatttaagactagacacatgtttgaaaaattacaataagccaaacacgctatttgtttagttttaggtggagttaaattattttttaggaaaagtaattagctaaaagcctgttcgggaatcattttgttttttgcttttttaaattttacttaacaaagtcttatactttcttcatgatttttgattaattaatcaaaaaaattgattttttaattattaccgaataatacctaaatgtattggtacataaagagaccgtttaaaaaaatataataaactatttttttaatattttttattatatataaataatgtttcaatatatattaattgtaactgaattgaattgatttttaattgaattttgagatcaacatccaataatcgttccaattcaaatagacatccaacttttgaaatgtaatctagttcaattataattggatattcatttttttgtaattagattggattttgttgatttggttcaattaaatcagattagatcctatctagccctagatgcctgtacaggtgttgtaaatgcgtgtcctgtctagcctaaaacgacacatattgtttttttagttttgtcttcaattgtatggatattatttatgccatatttttgtaaatatcttctaaaatcctatattttatctttttcattcatttttttttgtttttatatatatattttttaaattaaattaaataagaggggtagtggtttacttgaggaaattgcattgtatacccactttactttatcaattttaatttttaccttcattttcatatcctttgagatatacccacttttatatatgatgtccccattatagcccttaggttaatgtaaatcatgtgttacaactaccaccttgggcttgagtaccttaccgccattttcatccccatttcaatcaatcgtatgccattattcatttttatttttctttgctttttttttctttcttctcacattctgtttttgcttaggttttttaggtttgtttgtttcttcttcggttttgtcttattttttccttggttttctttttcgtgtttgtcagagagctaatcattgtgcttgtgcttgtgttcgtctctttgaattgttggagatttttctgggttcgaagcctttctgttgaagtttttgtatctatttatttttttttttttttgtgttttttttattttattttagagcttagaacgttttatttcgatttttatatatatatttgaatgtatgtatttgtgtgatgatcagtgttgattttggttgtttttgttttgtgttctgtttcatcttttttttttggttgatcatcttattttttttgtttatttatgcttaaatttttttgttgtgtttattgtttgagttttctagaaagtatacgcaagtatacgtctcgtttcaagtaataatagtgcataagtacgagtattttagctatagctctcttgatattgcttagaattggacgatttaagatgtttcgaaaaactgaaagagagatatagacttttattcaaaacgtttttcctaacagtgaacgatttatagttaaaaattagcttgaaacttcagatttaattttcgaacacagacgaagcgtgttgagca

SEQ ID NO: 7944 - DNA, 1775 bp, Cannabis sativa
tatttatttattttgaaacaaatgtattttaagacttgtagtattattaattattactacaaaaattagcattgattaactaccctttattcttttgaaaatgcttaccaatgtaaaaaatttaatattggttataaaagtatgtaagtgatgaatttggttgccttttaacttatgtaaaaaaaattgacaattttttacatcaacagtatctactaatgtaataaaactatgtacgaagttttggcattattttttatttttatttttaacatactgaggaccaacaaataaaattacaaaattagtttagccacaattatcccactgaactgaactaaggttgaatgggtttgcgggttttgtgaaaaaaaaagggttttacaaatgtactagatatttacaattttattactacaagaatttttttataaaaatatttttttttatataaaacaatcataaaataacataataaaacgactaaatatcaatcatagaacaaccgtgaaaacttgacacaatatatagaggaaattacactctatatcctttttatattgtcttcttttatttttaccatcttttctaaagtctattattttttatttttttttttaaattttgtatcaattttgcccctatcacttcaagatactttttatataactctcttatgtcagtgtattttgggtacaatgcatataaaaagaggtatatttcaattaaatatgaaattagaggtaaatttgattaatcgattaataaaaatggtattttttaacttacccccacaatatacaatatataatttacacactattttttaaaagaattccatcccatggtaaaaaaagaaaaaaaaaatagaaatttggtgtaaaaattctaaaaacaaatgatttcttgcccgtgtagtagtgattgagttgaactaataagttcacgggtggacgggtccaacgggtcacgtgtggttgggtttatttatttatttgttacatttatcttactctactacaaaagatataattcctcttttgttcttaaaattttagatataacaaaggttttcttttctaaaagttttttttctttgaatttaaagagtttgatatttttagtggataattctattctcttctcccttcttaagatcgtttacattgttatttattttttcgggtgtatatctagttttgttgtatattatttcactagatgtacactacagatagaaatcgagattacttaattataatttttttttctaccaatgtacctttgatttcttatcaataaaatttttggttattttattaaaactgataataataataataattgttaccggtgtatgtctgcatacggtatagacctagactgttagtattggaagtttttctcaccattgttacatagtaacaaagaaatagaaagagaaggagaagagaagaagaaagaggaaagaaacagagaaagagattgaaaaggaaaaaagtacaaatatatacaaggctcaaacagccaaaagcaaacaaacagaccatagcagaattgtaaccgaattggataacaaccactaacaactaactaacattctaactgtctttacataggcttatatttatgtaaaatataaactcggacctatttgttcaaatctcacaggtacaacttaacccgcatgtacttaacatgtgttttctaatttttgggtttcatgggtcaaatccggtccaaatgttcaaatattaaaatttgaaaaaaattat

SEQ ID NO: 7945 - DNA, 1542 bp, Cannabis sativa
gagccaagacattaccatattattacagtgattccaagagttaagaagggcgttaccagattcgggtcgaggaagagtgccatctatgaaggcagatttgttctctgcattcaaagccattgttatacctcttttccaagattgataatttgttccattgagaacggtggacacaaggattaggcctggctgatcggctgaactgagaaaaaaaggactggaaatgtcctcatgagccaatcgatcaagaagtgaacgccgccttggttgagatgaatcagctggtggaactggagatgaatgaacaggttcttggttgtcttcctcagtttgagatctgaatcgagagctcagaatgcgagttgaagccatgggattgttggctacaggtgcggaagtagaatcggggtgaagatccgatcggttgagtttagaagcaggtggatgaataccatcatgcgatcgtgaggagggcctcgccatggaagagtggccaaggttgtctactgataccatatgaggaacagagcgagacagaagaaaagagagaaactcagagaaaagaaaagtactattttattgaataatactctgttgatttacacagtacaaaacaagggtttatatagcagtatgaaacctagctgcattagtttaggaaataacagaagcctcagtaattagttataacaatttaactaatcaagattaagctctaactaactaacagacaccctaattctgataactcactagagaaataattaaatgtatatgccttgatatatattatatatattcaaattaataccttaagacagagaagaaaaaaaagtttgagttgaaattagataaaagactcaccaaatcaagtaacactcgtgaattgacgatataaatatgtatacacatatacaaagttctataatcttaattaaaaaaatgttggaggagtgttagctgtgtgtatattattatatacatgtttttgtcaaaagaaaatatgatatattaaatgatatattttgtgtggctccaatttaaataaaagataaaatatttgaatattagttgataacctaataatattattcaaagtttaattcaaatgtcagtattgaatttaaatttgagatattatcttctgatataaagtaaataattattcctcttaaaactatggaataattacctaaaataatcatttatatatatatatatatataaaaaaaaactctatttattttcaaataataataaagagatttcaagatacaaattgatcgcaaaaagtggtaaaattctaaatccatacgaaatggtacaaaattctaaatgagctcatcaaaattaatcttgaaatattaaaggggtcattcaccttacaaaatttcaaagaggtcattaacctcacaaaaattcttaaaaaatggtaatattatctcaaaatttaaaagtgcactaaaattcaaagccataataaatcaaatggcattctaaaaagaggggtcattcacctcataatcaaaaaaaaaaaaaaaa

SEQ ID NO: 7946 - DNA, 1205 bp, Cannabis sativa
cacaaaaagagatgttgcccaggccaggttcccttataatgaccccttggtcataacaacacatatagggagcatgacattggctaattgcatgataaaaaatggagccccctcaaacatacttttcaagtcaacctatgaaaaggtggggctccagttgacagatctagcacattatacacaattgatgtacgagttctttggccaaggccttgcactcctaggaaacatctgactgccttcgatagttagggaaagtcccacaataagaacattaaaggctcaattcatagtgatcgatgtgccattagcgttcaatacaatgataggccagccaaccctgtacgacttgaaagttatgatgttaatttaccacctatgtctaaagttcccaataaggcatgggtagggtgcctcaggggagatcaacagactgcccaacactgctacaacttggctttatccaaagccaagaaataaaagatgcttgccaagagctctaacaaagagttcagccaagggaaatgatgttcagcccaaagcgagaaggtagatttaaaacctcgctttggggatcttgtagaaagcttttgaccagtagaggaattagaataagtagagatcaatcccacccttccaaccaggatattgatgattgagaaagatttagcactagaaataaaattaacattgataaaatttctaagggaaaacctcgttatcttaggctggtagcatgaagacatggtggggatcaatccattcgtaatttctcatgcctaaagcatagatacaaactttcaatctgtataatagaaaaggaggttgctagataaagagcgagcacaagctttaaaaaatgaagtcaaaaggttgtgcgtcaatgacttcatcattagagctttttacccgcgatgggtgtccattcctttcttggtacccaaaccaaacaacaagtagcgagtatgcatagattttgctgacctaaataaggcttgtccaaaggaatatttcccactaccaatcgaccaactattagatgctataactagtcatgaaattctaagctccatggacgcctattcaggctctaatcaaatcaaaatgcatccactagacgaagagcatacaagtttcttgacaaatacatgcctgtaaatttacaaagtcatgccttttagattgaaaaatgcaagggctactta

SEQ ID NO: 7947 - DNA, 934 bp, Cannabis sativa
cttcattcttccaattataaccctctaacttctcaaacgaatctcttctctaattcaatatatgaattaacatttctctgcttaaaactttcagcaaaaaacaaatcttcctataacttcctagccatctccctcgccggagctatacgctttaattctctctcaaagattcacagtcatcaacaacaatcagagttgtacgtcctgaggttcaaagcttcgcagccacacagtcgttgaaccatttctgttgtcgcacctcagcatttctgactcccttgctcagctacatcaatgactaatttgcgtgaggctcatcaatctggtaacataaattttcagcaaaaaaaaaaattgttaacataactaggggtctattaggtagttcaattgtaaaaaagggtatattttaattaaatgtattatgcagttatttttagttaaagtttaatgaaaacatatagttatcaacttaccccttacaataatttcaagggccctatttatagtgagcccttaacaatttaaaaatatcatcagatccctaatccataagatttgaagtcacttttacacctgataacgttgtatcctagatggtctgatataccatacatcctaagctatagtaaaaagaccccttttattttgtacctcggatgaaatgaactttgtcctcatcatctatactcattgtgtcgtcgttatcttgtttgatacctcctcgcttagacttttggtgttaggagggaaaagaaaattgacgaggtgtaggaggtcgagcgcggggagcgagcacgacacgggatgcgcgagcagcgcgggtgtgagggcgcatgggtgacgggtgagggctcgtgggcgcaaagcgtgggagcattgagcgtgccagcacagggcgtgagcggtgcaggaagcacgggacgtggggcac

SEQ ID NO: 7948 - DNA, 567 bp, Cannabis sativa
tgaagtatatgacatatcaatgtgacttaagagtggaaagggctcaataataagtcttcctttctattaagaaaaaggctctgtaaccccaaattgcaaggtggatctcaaaaggtatgaaagatctccttccaagttgtgcataaagttttcatagaaaatagctttacttataattatcaacatatctatgagatcgggtataaaaattctgtctactcactataaggtgagtatttgtctccccccctctttttccaattaaaattggaaatccataaataagtccccactgttgaaccttctctctttacaaaacactcttgtatccctcaaaaccactcgaacatccttgttgatggttctctactccaacaacatctagtgttaatcgaacaatggaatataaatctttaatccttctctaactttctaagactacaaagcattcttatatccctccatctccgcatacttgtgaagacaatttgtgtgtttcatgctatttaaaaaaaaaacacacacacacacacattgcattgaaatatgacaatgaacgtaatgatt

SEQ ID NO: 7949 - DNA, 1595 bp, Cannabis sativa
ccagaaaaacagtctgccatttttataaaaacgaccaacccgtttcctcgatatttagggtattactacgctatttatctttaggaaaacttttaactttatacttgagttcccgaaaaggttttagaaaagttgtttacctatcttttgtgattgtgatatagggccttcgttcagcaagtgaatttccattcaggtttaccaacacacttgaatcaggaaacgagataagaattagtataaaatgtgtatatgtatagctggatgtatattatatgcatgctgtattatgtgatatatatatactacaaacactagtacggctgcagtactaagtgtattggtaaaatatatgatgttaaaggggtttgacacaacgttaccaacactagtatgtgatgagtacgaagtgcatgtggtacaacactcagttgtactcaaggtgtgattcagccctaccaatactagaacaggactagtacttagtacatgtggtacatagattgtacttttgttaaaaacgttcttaatcatcggttaagccttgtagttaggtgtctgtgcgactaaatgcaagttagtaatatgtttatatgttttatgcttttcatactgagtcagtcgattcataaatattgtttacatgtgtcggtcaaggaaaggtgaaggctgagcacccgtgagtccagtgcttgaggatgattgtacttatcaggatggttaggcctggagtgttcggtctcgagacaacatgggtttacattttgtagtcgcgatgcgaaacttttgtaaaaaaaatattttttatattgctgtaacttttgatcaggatcttgattattatgtaaaattatgtatttattaaagttaaagtttaattctaaaagttttaatttggcatatttttcaagaaaacctttgattagcaaaggtgtgcacagtaattagaagaatcattgtagcgtgcataagcaagtagggcattacacgagctgagttggttggtgtggtgtgaccctttattttttacagaataatttatttaataaaataataatttttattttattattttatttatgtgaaaaaagtttaattaaaagtgaatacttagctagtcatattaattttgtgggatacgttcaacaacaactcctctatgattcataaaacgttattcttcatgttttattttttcagtccatttatctatataatgcgattgaagtaataggagaatacaattttttcagtccatttatctatataatgcaattaaagtgataggatagaatacaattttttcatacccaaaaaaacaaaatatagttttctctaaaaactctatctgtgatatcatatatagagagtgtattcgacgattcgcaacagtgtttccgatacagagtacaacatggattgttttattttgggaatgatcactaattttcgactgtttgcaaatttctaagtagcgtcgtacacgtgttaaagaaagcgatctagttcacgactcaatcaaaaattttcattgggtaatattgttcttcttttattatttagtagcagctagtatttacaacaacagttgacat

SEQ ID NO: 7950 - DNA, 587 bp, Cannabis sativa
gggtctaaatgttcagccctagttttgagggctactttacaggctatttctaaacttcttagggctaaaagaatgccaaatgaggttgttcatttaggaatccctctgttcactccaacaaggcgttcaaataattttactttagtgattaaaagagtggaagcccgtgttcaaggatggaagtcaaagctcttatcaaaagtagggaaggctactctaattcatttagtggatacctcaattgcttcttatatggatgcttcctcttttatcccacattttgctacaaaaaaaattgacaaactccttagggaattttggtgggatcacaagaaagaatatctgatgtcttggaataagttattgcggcctaagttggttggtggtcttggattctaataaacctctttgattaatcaagcatttttggctaaaaatgacggggtcaagaattctatggcatacatttgttgaagctaaatatcctcatcatagacttttcttagatagcaaagaacaaccaggtcaatctctcttatggaaattcattcttaggaccagacctttttaaacctttaaaggggtta

SEQ ID NO: 7951 - DNA, 645 bp, Cannabis sativa
aatcttgccacagatttgacaaacaggacgattgcctcgaccccacgtccatttgaagcaccacgagagggaccagttgtattgcctcgatttgaaggctgaccacggccatgatagatgcctcatgaggaagactgacccctgccattgggcgatcctctattttgaacttgagcaagattggcttggggaatatcaagagaggatgattaattctgttcaattcgcatttcttgattatgtaacatatactaaaattcacccagggtcagagcatcagcacgagctgttaacagaaccacaactgtttcatattcttcaacaccaccaagaatatacatggctaattcttgatctgaaagatgatagccagcagtagaaagagattcaaccaggtttttcattttcaagacatattcatccacacttaaagaatctttcttggtggtttggatttggaatcaaagttgaagctccctgggtttggactgagcaacaaattgacagtgaaggacatgtccaatcatggcttcagacagggaagtcatgagacatgtcatgattaaagcatcacatctattccaatattcaaatgctggatttggaagttgagtagcaggattgatagtaggtggtccaggtgtg

SEQ ID NO: 7952 - DNA, 716 bp, Cannabis sativa
caaacagtgagttgtatacatgttaatttttttaggagtgcaacgaaccattttaaattgtatttttaatatattataactaaaatgtgagattgatatatgttataactaaaatatacacacaatatatatataagaaaaaaaaatataatctaaggcaattggcggtgaaactctcttatgtgctttaattttaagtaaattatggcaaaacccctaaactttcactatacttgcaactaactcccaaaattgattttttaaaagtaaaacctctcaagctcatgttatcttagcaattcacttttttatctattttttgatgttaaagtgtcatgttagactctttaggtgttgtctattacatacgtggcacacttttattgatccctataaatagttttttgaaagaaaaaaaacaacaatttttttccatcggttttgagggttagttacaagtggtggaagttttaaagattttgccgcaatttactttttaatttttatacacataatccctatttttttttttttttttttgtagcaatatgccccttaacttcaattttgtttgcaaatttgatgtgcgtcagttaaattttattattaatactaactgtgtccacctgtgtatatgtgacattaaaatctcaaagctaatgaaatatgttagtatatacatacacagtgacatttcagtacgttgatatattaac

SEQ ID NO: 7953 - DNA, 643 bp, Cannabis sativa
gagatggaccaacacgtcaacaagtttagaatatacaacaacttaaggaagtacgagaccgagcgagggctcaaaagtgttccaggtctctattataacaaactctctattcatggagaaaggcatagtggcacgaatgggggcttcgacatctggagttgggctcacttagagatgggtgcccatctgccactgaggtgttacttcgccaatttttgtgtcgtggccagagtggcacctttccagttcattccctaggtgtatcatctattgtcaagatggtatatcctttaggctcaacataataaatctacaccaacaccggaggagatattgtacttctacaagattaaatctcaactcttgaggggccataaggaaaaggtgggtttctataggctagagcaccattctaagagtgtagcttgtcccgtcagttctacaaaatatactcacaacttccaggactactatttctacaatttcaacttcctattgaagagagtttccacactcagcttgggtttcaacatagcgagtaagtgtttttttcctgactttcacttcttattttttttacctttagttatatcttgatgcgtgtttcatgtctgttagattgtcttccccaatcacccttgac

SEQ ID NO: 7954 - DNA, 1393 bp, Cannabis sativa
caagaagtcaaaaactttatacaagctagactagtgtttcatataacgaaaaccagaaaatcattactcttactatttgaattgaaactatcatgtaaattaatacctgaatcgttgcaacagcttccacagcgccagatgctccaagaagatgaccgatcatggattttgtcgagtttagctttatctacaagaggtagaatatttagtttagtgatgggcggaaaaaaatgggcaagttacttgtattttgcaatcaaattacctctgcattcttgccaaaacaatgaaccaaagctttgtactctttaatatctcctgctggtgtggatgtagcatgtgcattaatgtaatttacatcttctttggctactccagcctgagttaaagccttctctatgcagagttttacaccagcccctaatgtaggtgggaaaaacattaaactctaaattctcatcaaaaaaatccaccaaacatgtaaaaattaacttggaacttggtccccccaaaatatatgcattaatgtagatgcacatatgacaacaatagagaaccgagaaaattgtccatgtacatgcacacatgcataatactgatgacagaagattgttatcttaaacaaaattgtctttctgtacacgtatataagcaaaatactcgcgaagaggattgttattttagaccaaacaaaataccatcaggatgtggctcagtcatgtggtatgcatcacatgtgaagcttccaccaagaaattcagcgtagattttagcacctctcttctgcaaaattgataaacattcatggaaattggaacaccgacttaaaaaccaaaaaagtgctagtttcaaaatgcagaatcaaagtttccatgtttttttattgagttgaacgaataccttggcatgctctaactcttcaagaagtaaaactccagatccttcccccatgacaaatccatctcggttctgttcaataatgaccaccacaacttatgagagaatgaaagagagagacaaagagaaaatgagagatagtaaaagaaccaggattaaggtttcttttcccctgtcaaattttcagaaacaaagcagttaagaaacttaaatccatattcttcattatggcctcacaagttagtagttacaatttcttatccaaaaaaacccgacttatttacgacaaagtttaaaatgtgaacagatgatgcatagttctggcaaaattaatcttcaaggcattatttaagttacttcactcgcaacacaaacaaaaaatgacagttcctcaaacttaatattttaactttgttcttacatgcaacgaatgttcataggctgtagagagcatgaaagaggagagtttaagaaaacattacagtgtcccaaggac

SEQ ID NO: 7955 - DNA, 670 bp, Cannabis sativa
aaaaacttttaaacctcataccaccatctgacttatgccaacaaagattttgccaattacacccaatacaacttctaatgatccttattcccccaccccaccaccaccaaaagcaggcacaaagacgatgtatatctttcacaaaattcacaagtagctgaaataagctcatgacatagtttaatatagcttgaatgacccattcgagaaagacctttctcccctagcttaaaaaaattaaatttccaatcaaaaagtttattccaaatcttatctaaaataaattgaaagaacattatatcgatgtgacgcattatgggtggttagcgtttccacaggcagacccacatagtagtgtaaatagatcgagtcggatctgatctagctatgatccgacctgatccagatcatgtaatgatctgccccgcctcgccctgctagatcagatacttagatcgactcagatccgacccgacttattcggatcgaatctcatctgactcatcttttttttaatgaatattaattttatatctaaacatttattttatatccattttaattttgtattagtattatttaatacaatactatgtttgggtcagggtctgaatcccaagtccggattcaagttcgagtcccgtgtctaattcgggttagagtcacaggt

SEQ ID NO: 7956 - DNA, 720 bp, Cannabis sativa
tttttttttttttaaagaaaaagagaataaggaatgcataatgtattttaaagttaaaatggatttgaaatttaagggttttctttttaagaacaatttatggattgttttacatagttactttgtaagtaaataaaaataaataaaagaaaattttatataattttgaatttatttcattgttcaaaaaatattttatataatattttattttttattttaacatttaaaatatattttatttttgttttataagtacatccagaaaaaaaaacttaaattaatttgaaaagttattctatatatatattttaaaatcatattattctgtattaattttaatatttttttcatattttttttttctaattaatgtattttctttttatcttttttaagaagattgcatataattttttaattttatgttttgttttaatatttaaaatatattttattataatttgaaaatctaaaaaggatgaaaaaattaaaagaaattatagatatatattataattttttttgtaaaaaaaatatgtatattttatatatataaaaaaaaataataaaatgagtaaatctataaattatggtgcaaataaaactcaatgtataattttatttttaagagaatcatctagctcatgactttttctctcgtaagatcatttagcttaaaaatcctatcagacctgaaataaaaaaccctaacttcaa

SEQ ID NO: 7957 - DNA, 749 bp, Cannabis sativa
cttgaagaggattagtaggtaataatcccattttttccacttattctagattttattgcactaatcaaattaatatattcattccttgaatgatcttctaatccagggagttgcgacgcgagctatttgggaaatctcatcgaaggcacagccgcagccgaagcaggagtccttatcggcaccacagctatgaagaacgctctcgtgggagtcgtggtcatagcagcagaaggcatgatgatagggataactaccatgaaagtcgcagcaggaggcatagaagtataagccctggccatagaagagggcggagtggaagcagaagccctggccatagaagaaaccgaagtccaattagagaagggagtgaggagagacgagcaaagattgcacaatggaacagggaaagagaagagaaagaaaatgccaatgatgttggtaccgacgaaagaaaatatgacgataaaaagcatgacaatgactataggcaaaatggagaggatgactatgacaacgagaagcagcagcagcagtctcctaggaaggaagaatatgaatactgatttttctagctgctaacggtttgtttcctctgtttactattcctcatagttcttgtcttctgcctgtttaggacaaagttttatttcctgaaaacttaataaatatagcttactgcccattttccactgtgcaggtggtgtgcaggttgacaattctgtaaagtggaatgtgaaatgttttttttt

SEQ ID NO: 7958 - DNA, 761 bp, Cannabis sativa
aaagtattggtaatgagagatttactccactactttattacatgattgttttggaaggaatcttggaatactatatatatagttaaatatataatcttgaatcatatgtaaattaaaaaaaaaaacacttccaaccccacaaaaagaaaaagtaaaaagacaaggtaagaaagtgtagtactactactagtgctaattatctcatcaagtactgtatataatattttactttctccataataattttctatgattttttttttttttttcaaatgattatagcaatatggactatggagtgtacaaaaatgtcgtcattgtgacacatgatgctcacaaaaccctaagaaattaatgaggtaattaatgaattaaaaaataaataagaaaacataatttatcaaaaataccacttttctctaaatattggcaataataccactttattataatacttatttaatttgtaatacattaagtttttacttggtttagacatagtttacgagtcacttttattgattttgagtgtttaaataatggaggtctgtaagagttaaccacgtaaagctttagaatcaaaatttcaatactattcttgtattttatattacaataaagtttgtaatttttcttctattgatattatgaaatctctaaaagatactggtcttatttataggcccatagaatcgggtcggactaaccaggcccaatataagtaatcctttgattaataactccactaatggaagaatttc

SEQ ID NO: 7959 - DNA, 753 bp, Cannabis sativa
acctcaaaatctaactacgtgtattgtatgatttatataaacgattttgacagagaattgtagcagctaggcacgtacgtttttttttttctcagaaaaagaagatcaatttaatgatatgaatatgagaagtggtatacaaatggtcaagacccctaaaatagttttccaaaattagtatcttattgaatcaaatacatatgtaaatattatgtcatatacatatataaaatatttatgtggtcatgtggatatgtggtcctaaccaaaaaaggactgatatatatatatatatatttataatataagctgtttgttaacctttggtagcttcaaatggattatgctttgtgccctctctttctatttaattatcataagtaagcttattactagctacttgtgtgcgccaactgtgagagtttataaaaacatcaattttttgcatctcagaatcttaatctttgtttgtgattttttttttattttattatttagactactactactactacaaagtacatagagtgaagtttgcatcagaatccatgattattgttttctctatgttttaataattaattagtattgatcaatagaagagagaatctttaattaacaagtagagagaacgtacgtcatatatttatatatatataatatgtttaacccttggctttacgtgaaagcctaaagttaagcctttggttttgttctaatacattattttagtctaggcctctctctctctct

SEQ ID NO: 7960 - DNA, 688 bp, Cannabis sativa
aaaatctttattagataaaatattaatcaattacccataagaaaatactatttttctcacaaatcaaaatgacataataaaattattattcataacctacatgaataacatttaaaatagtttttaaaccatgtgagccttttagatttaatttatttgtagaagaaataatatttatagttttatatgtgtagtttattttttagcttatttatttatttttctaaacataacttatagttctcttttaaacaaattgaaaaatctcctaatttttttaaaatagaatggaaaaatatagaattttacctaaactctttgtgttaaaaaacatattagttaagatattaaccaatcacccacatattaaaaaatattgtgacaaaataaaatatatttttaatactttacatgtaaaacatctaaaagactatttaaataatgggacactttttttggtaaaaaataatgtttttatttacaaatttaaatatatatatatatttataaatttaaaaatttgtgtaataatatataaaaaatagtaacatatttatatgtacaaaaagtattgaattatttatagttgatattgtattataaaaaatataattacatatgtgtattaattttaaagaaaaacaattataatttgtaaaaaatttaattattaaagatgtaattattt

SEQ ID NO: 7961 - DNA, 759 bp, Cannabis sativa
cccaaccacctcgcaccaccaacggaattccccaaccaccgagcggcacccacgaactgagaatgtcaaaggttataaaagaatattatatatacaaaattgatgataaaaaaatgagacttttattataaaggatattgtgtaatggcccaagctgccatatgcttgggtcggctttgcatgtcccaagaaatggacccacgtagagcccaaggtaggcgtccaactccagaaaaaaaatattagaaaaatgaaagtgagtttcattaatggttaaatttattagtatgtatcgatttaataggtatatatgcttgacctaaatacaacacatttatcagcgaacctacttcgacttaatctatttataaatgtatattgtttaaacaagtcaacttattaatctattaattacttgtgtgatacttttatggtataatcaatacgtttatattaacctatttataatttcttaaagtcctaatgttactttaagtaagtcattaatatatgagttaatttcgtcgtacttgaactcaaacatgatctgtattgtaaatggataagagggatgacccaaatttatttaagacaaactcaaactcgttaattttatcataatttcaaattatgttatcctatttaactcgtttttgtactcttttctcctattcttaagtgaaaaggaaaaaaaaaatctgaatatataaataattataatttattgtagaggtaattattattattttatcattatca

SEQ ID NO: 7962 - DNA, 807 bp, Cannabis sativa
acaaattgataaccctggttcttcggggggccagaggcctcctgatagctcaaagcttaccacaattcacgaacacctttcttgtccttcctctcgccccttctctacgtttatataatactctaaccacccaattacccctgctaaacaaaccagtcattctactcatgacagttgtcctataataacccattcctaatataggattttttttcttgttttttagtagaataagaaagaaggccttatttggaataaaggtgtttccttagcttttgtcatgtacattccttgtacattatttagttttcaattgactaatattgcagacagtactagactactagttaactaaagctggagttcaccaaagcattaatgcttcttatgtgctgtagtttccaatgacattttatcgagtgtaagtggaggttgagtatgattcatataatttatctcctatcaaaaccattggagcattttccatttggttgtgccaatttcctattaagaaatgctatagggcaccagtgaggtgcctagcaccaccacgaggtatcatactacaattggtttaattaaatatcaagtgctacatattttaatataattattattgaaaatccataatctttcgcaaggtgccagtttgtggtggtgttaggcactattggtacctaatagctgctctttcctattcgtctctgcttttcaataatttatttgttttccatgatttttcaacgtaagtattctatctctatgattctctattagtaaaaactgtaattggctcatatttgggtg

SEQ ID NO: 7963 - DNA, 993 bp, Cannabis sativa
aattattaatcatatacataatcacaatattatattaataggatcaaatgataaattttgtgttgaaaaaaggttagtatatatattatatttgtatttaaatttgaattttgatatttatttaaaaaaaaaaattaaaaatgaatgaaatgcatattatattataaatataatttatatataacacatgtatataaaagaaaaaaattaagttataattaatttcttcaagttgcaaaaatagataagggcttaaatagttatagcttacaatttgcaggatcatcaaaacaataggacagacgtgtagtccatcctgtccgatcatccgcggtggcgggcgtgatcggaaactgcatggcgggtaaacatgggctcggaaatcctgaagctgcaattgatgtagctgttggatttccacaaccttgatgatcatcacctccatagatctttgaatcaacagccagtacttgtggtgcagagtacattataatatataaaagttttggacaaatatataataaatattattgctacaaaatgagcctagagaggtttcttttgatgagaagttagttataatcagtaatatataaatatgaagctatatatagctaaatatttatcatggatatgtacttcttagtgtgtataaattataattggcgagtgtcattaattaatttttcgatggaaacattctaaaagttgttatagaaatggtaacatttgtgtttagtaatttttattagtataattaaatattaaaaatgaggtttcatataatttaaaaaattagtattttaaagaatatcactaattaattataaagcgccacttatagaagatgttagacactactaatactcactaataatgcgcataaatataagagtacgtattgctatattgggcaccagtacgtacgtagtgctcactgcccatcactttttataggtagagtttcacaattggttaacgatattttttaaa

SEQ ID NO: 7964 - DNA, 756 bp, Cannabis sativa
caattatgccaaggtcttaaagaagaccctaaggccccgccccatgtacagtgtacatatatacgtcacacaatctaaaaagataagagtttgtgtccaaaagaaatgaacaaaatcatccaatttgtaataataatgtgtgtcatgcacgttttatgtcgcttcactatttcaatatttgtaggattttattatacttatcttatacctttgtcataattttattttaaataatcttcaggtttaggtagcactattatcaagatgttggttataaataaaaagtatgtcttcatcattatatactaatgacttcaagattttaaatccaaacatagataaagaatattggtttgtttggatgagtataatgagagtgaaattacatagaaaaaaaaaagattttgtgttttgttttttaaaagaataatcattcgaaataaatattaacaaagtcatttcaattattcacaaatgaatgaacgaaatgaaaatagattcattttctcccattatctgaaacataccttaacaacaaaacaaataaacattgttaccaataaatcatgaaagactcgaaaaaagcgtccaagctcatacagaagcagcagaaattagacccaaagcactgcaagttgtatgtgaacttattttaattaaaggtagatataaagaaaattccaacaagaataaattctttcataattataaattaatatatatatatttttttatgatagtacacaaagttatact

SEQ ID NO: 7965 - DNA, 869 bp, Cannabis sativa
tccaagggggttcatgttacactaagaaatagagtaggggcttattagtaatttgtaattagtgtgaaaccctataaatatgtaattgtataggtattcttgaatatggattaagaaaatagaactttggttcaattggaagattagcattgtctcgaaaagtccatttagaagatatgtaatgttaggtaacaggtcctcttcgacacaggacaaatctctgaaatacactctttgatgcagtgttaatctcccaattgaactaaagttctattttctcaatccatattcaataatagctacacaattacatatttatagactttcacaccaattgcaaattactaataagcccctacattgtttcatagtgtaacagttcaacttcggatcaaaactcaaacaaggtaagtgttacaccatcattgatctctaaaactatgtgcataatttcagataatattcttgctattgtcataatgaaagaggaatcctgagggagttcaaaggagactagactcttcacaaatcgaacctctataactttttgtgttctttaatttctgtcattttttattccaaattcaaactcgggtcatttgatttctggtttgttaattttgtttcatgctagctgaggttgttcattaatcccaacaatgacactacttttttcattataattctctagtctcttctccaccattagttgatcataaaggtagagaagagactcataatggcatcagctcctctacctttagtgatcttaaaccaagttggatgcaagactcataatggtctctggtatagctagaggactattgtacttagatgaggcttgcactagtctgatcatacattgtgtt

SEQ ID NO: 7966 - DNA, 1283 bp, Cannabis sativa
tttttatgaaatatgataaccgttcgtgggaaatcattacttaaccctatacatacatagtttggtactaattaaggatttatgtttcaaagcaggttctattatttttaagtttaattgatggtactgataaatttttccaatactcgagttttatattctcttaatctaaggtatacaaacactccaagtacagagctaaaacatagtaaagagaagaacaaaataaattagagaacgtgggtgggtggggggtagatgtgttgataattgtacttgtggtacgtagtgcaattttatgcatgttaagcattaattttacagaaatgatgtcagaattacaaaagtgcaataattatttgtgcaagggaaataacattgtatatatattttaaatttagtggcgtgtttataatgcatgtgttcaggatattattgaagaactaggtgttcacatagtgggatttgacaaaccagggtatggagaaagtgacccagatcctaaccaaacagtgaagagtttggctttggatatagaagagcttgctgaccatttgggacttggatccaaattctatgtgcttggaaattccatgggtggccaagctgtttggggttgcctcaagtacatccctaataggtaacaaaaaaattagagtaaataacattttatactctttattttgcaaaattattgattggactttttgttttataaaatgttaaattagactttttttttttttattaaaattgaacttaataataatacgatatatagaagagctatgacaaaagaaattgtgagcaagttaattatattaaaaataaagttaaaacttataaatttaagatcttatttatattattttagaaaatgcatggttatttaataaaataaaaagtccatcattaacttatataacataaaaaaaatataaggttcaaaatagtattaactgatacatacccaaattatatacatatttatatattttgtatgaatatagacttgcaggagcaggactaattgcccctgtaataaactatcgatggccatcattccctgctaagttatggaaagagtgctattcaagacagccaaaagaagatcaatgggcactaagagttgcttactacatcccatggctaacctattggtggaacactcaaacttggttcccttcttccacagttataagtggaaatcctatcaatatctctgctcaagatcaccaaatcttgaacaactcactctcaaaaatgactccagaaaaggaaaa

SEQ ID NO: 7967 - DNA, 1672 bp, Cannabis sativa
aaaacatcaaaaagagttgtattataattccttaagcttaactcctgaagattacaaagattccccaatgaatttggtattgatccaccttcaatttgattatcccctaattcaattcgctttagagaatttggaagaggaccatctattttatcatctgtgaacaaggtgaggttaattagattggtacccatatttagcaaccaaggaagtgttttgggaggtatggtactgtctgaaataacaagattggtgagagaattcgaagaatttttgttggtgaagatatgatctattggttgaagtatacatccatataactctaaacttgataaagattgtgctcttttaatcaagtgaaaccaatctgtggatttcgaatttgttatattgatgtaactcaaacttaagattctaagagacgagagatgagagagccattcaagattagtactaatcatgttgtttttataatcacaatctagtttgagaaattgcaaccttgtgaggttcccaagctgagaaaaaaaaatggacaaaataggattgccttcaaagttgagatatgtgagtctacttaaagaaccaataaactcaggaattttagtaaattgattgtaactaaaattgaggtacctcaaatattgtaattcaagcaaagaaggaccaatttcaccacccaataatgttggttggtcaagatcagaatgaagatcaagggtgatgatatgatgagttaagttgtgacacctgacacctctccatgcacaacaatctgggctactacttgtccatgaggatagaagattgtcatcatcgacaaagcctttcttcaagtcgagaagagcttgtctctccttctctatgcaattactactactccatacttgattagtgagtgtggctagcaacaacaaaagtataactttgatcatattgagaaagtaatataataatagattattaattatatttaattatggaatcatatatatatgcccacactacctaacatatatataggactctaaatcatcacaccactagaaaccacaatcactctttttctttctcatatattattctatattaattttatatttaattaatgttattttgttgtttttatttgtaatactacaagtgatcatgtcacatgcactattcagtattaaattttacgtattttaatttaatatataagtaatatataagcagacccatacatataaaggaacaaacagttaactttgttttgatgatgataattaagctaccttaattataaatataataaaacgccatatgcttcaaattcaatatttacttaactttagtatcaataaaaaatgattcttttaagatttttaaatttttattatccataaaagatgagcatgtcttacatttttttttttacttttaataacaataaaatttacgattaaaaataaaaaaaattgagactaattataatttattatttttattttaatgaaaaataaatattattaataattattatgtttttaaaagaaaaaattgaaaaatgaatattagtcaaaatctttggagcaaaacattttttttttttaaatggctatcaaagtctttggagcaaaacaaaagtttgattaaaatcatgatgagatttcaattcaacactattatt

SEQ ID NO: 7968 - DNA, 1318 bp, Cannabis sativa
ataaagattatcgctaattaattaggagaaatcgaaaatgctagacttgtccaatagctatacttactattcgttaatgagacaaaatcactaccacctttaaaaaccagcaaatacctccaaaaaccacaaaagaagaaagtaaaaaaggcaaagatggagaaaatagagcataccacagttcaaaccaacggcataaacttacacgtggcatccatcggaaccggtccagcagttctcttcctccacggcttcccggagctatggtactcgtggcgccaccagatgatttctctgtcatcgctcggctacagagccatcgcccctgatctccgtggctacggtgacagtgacgcgccgccgtccgcggagtcgtactcttccttccacatcgtcggagaccttgtgggattgattgataaaatgggtattgataaggttttcttggtgggccatgattggggagctgtgatcgcttggcacttctgtttgtttaggcctgatagagtcaaagccttggtcaacatgagcgtccccttccgtcctcgccacccaatcattaaacccgtcgaaggtctcagagctttgttcggcgatgattactatatttgcaggttccaggtaaattcccttttcactgctttcaaataatttctctattgactttttttctcaattaatcttgcattttatcatcttaattgttaatattttttctttaaattttatattttaaattattaattgatttacattacactagtcttatttaataaaatataaaaattacattagtctttcggtacaccaatgtatatttcggaaaattttcataaaataataatttgtagagatgatgttaaaaattctatatatagttcacaaaattctgaacaattttgggcacataaactatccaaaattttatgaaagtttgcatgtggtactacaaatttaccttgaatttttttatgaataataaagctattatttattttaattttataaataattttgtttttttgtatcatatatattttaattttaattatttattataatttaaaattaatttatataaatttttgaatgtatgaatatttaagtgtaagaaattaaatatttgtgtaacaaattataaattttgagtaatttcgccacactttaattgaatatgttatatttataatgctaaatagtactcttagtcgtactattggatacaaatttaaattgtacatactttacacataattgtttttaatattagccatagataattttaagaaaaaaatttatttatgtggttaaaattatt

SEQ ID NO: 7969 - DNA, 2420 bp, Cannabis sativa
ctttgtcctactttatattatcatggctaaagatatatatataattttatttgggaagttttgtgggaccacgggtaaatgatttttctggtacaagggataacatggagcaagatgttatggggcttccaaaaaatggatctttggtgggttctggtttccaggcccaccacgaaccatgagttgcttaagctggaattgccgtgggcttgggaacccgcgggccaaacaattcttattggaccttgtgttccaaaagaagcccaatattttatttatttgtgaaactctttgtaacaaggctagtatggagggcattagagcccatttgggttttgaaggttcttttgtggtagaggctcggggacatagtggtggcttagctttgctatggaaggatgcaagtgaggttgtaattcaaggcttttctttctctcatattgatgccacgatacaaatgatagggtattcaacttggagattcaccggcgtttatggagaacctaaaagagagcttcgttatcgtacttgggatctctttcggtctctcaagcatgatagcagcctcccttggtgtctcatgggagacatgaacaacttggcgtcccagttcgagaagaaagggggaaggaaatatcctgaccgccttatagatggtttccttggtgctttggacgattgcaatctggtggatttaccacttctcggctacccgtacacctgggagaagggaagggacatcagggagtggattgaagaaaggttggatcgagctctggtgacccacgattggatgtctttgttcactcaattggttctgctcaacttggaaatttcaactagcgatcactgcccaatttttcttgtcttcaaaggtaacattccatctagctctcatcactcttttcgctttgaaaatgcatggctccgcgaacccctctgtgagcagattgtggagagttgttggggggaatcgggtattaccggtattcaaggaaaaatcttgagatgtggggaagttttgggaaggtggggatgggatattactggtaactttcgtaagagaataaatgagtgtaagaaacaaattcgcaattctaagtggggtagagatcctttatcaatctagcaacacaaggaagggagagataggttgacggaaattttggctcagaaagaagtgttctggaagcaacgatctaaacaatattggctcaactccggtgacaagaatagcaagtattttcattctatagcgaattctagaaagaggagcaattgtattatccaacttcaagatagcaacggagtatgggttaattgggagtcgggtttgcctaatgtcatcacaagttacttccaagatctttttcgttcctctagtatcaatttgggttcggtgttggaaggtataaggcctactgttagccgtgagcagaatgaagctcttttggagatggtttctgaggaagaagttaggaatgctcttttccaaatgcatcctgacaagtccccagggcccgatggtatgactccggcgttctaccagaagcattggaatattgttagggctgatgtgattcattttgttcgagagtttttcaattcgggtcaattcccggaatcaataaatgatacacatattgtccttattccaaagaagaaaaatccttcacagatgggagatcttcgaccgatttctctttgtaatgttctctacaaaattgcttcgaaggttgttgctaatagaatgaagaatgttttgaactacgctatctcggaaactcaaagcgcatttgtgtcaggaaggttaatctcggacaacatcatggtggcttttgaagtgatgcactacctgaaaagaaaaaccaatggtaggaagggttatatggcacttaaactcgatatgagtaaagcctatgatcgtgttgagtggggtttcctggaggctactcttcaagtgatgggttttagtgatcgatggattggtttaactctcagctgtgttaattcggtgcaataccatgtgattaatagtggccagaagttggggccgatcacccctactagaggtattcgtcaaggatgtcctttatctccgtatttatttattgtatgtgcggaaggcttttcttccctgataaggcatcatgagtcctctaggatgctaaccggttgcaaagtggcaaggagtgcccctactatctctcatttactctttgcagatgatagttacatctattgccaggcctcggaggatgaagccaatcatgttctctctctgcttctgctttttgaggctgcattgggtcaaaaggttaatctccacaaatcatcgacattcttcagttccaacaccaccacggttactagggatcgtatttgttctatgatgcgtatccaagaagcaggggtggata

SEQ ID NO: 7970 - DNA, 1277 bp, Cannabis sativa
gtgatatttcttgtagtgatttttgtgccgaatatagtgtaactcgttatatataatgtacataaggctatttgaagttggaaactcattttcgataaaagaaattaaaaattggaaatatttgttgtgacttattgaatgatagaaacaagagactcaagtaagtattcagcaaaaaaaagaaaaattaaacagactcaagtaagtactcccttacggctatacacgtagcattttcttaaaatgtatattggaaaattatggggtactaatttgccactattggtaggatattatactacttttatagttagagaacttataatttttttatttttttttgtttatatatataactgtgtacatttagttataatttatattaaatttttatcctttttcataaaaatttagaataatttatcttgctaaggtttaaatatttaattgtatgtgtatttattatttatacatgtgtaataaattactttaaattttatttttgatatcacaaattatttataattttttgaaaataaataagatgtctactataataaatagattaccatattaaaaacaaaaaaaattatactttcttcaaatattaaagtatgaatatcattattataaaactaaaagtgatatctctgttataattgtctcctatatattttttattgtgatgaagataaatcatttgaaagaattattgaaaaatatcagttgggattctttaactttattcttgctgttgtaatcatgatctaaaaatttcactttccaagttgcaaaagtcttaacatattatatccagagaaagactatataatagtaataataagtggcatacattggaaagataaccaaaaccatgttttggcagcttgaaatggggacatagatagggagatccatatgggcagttagtagtgtggacaaaaaactaagactaccaaattttaggcaaagcctaatacttataccactttcattgcattacctgctctgctctcttcagacctcacaaactccatcaacataaatattataaatgatatacatgtattatctggttcaatatataattttaagaatgttatcagacacctctccaaatattatttttagtatattttgatattgaaatctaattattaatatgaattgttaattattttaagagtattgttattggatattattagtgtttagtacctctaaatatgtattggttaacaatagtttttaaaagtgattatattaattatattaca

SEQ ID NO: 7971 - DNA, 935 bp, Cannabis sativa
ttagttcccaacttataaattcattacaagatttagacttaaattttgtcacatcaacaacttcataattagagtaataataatgctttgatgatgatataataacatgaaactatacacaagtaagacccacctaacttaatagcagtactactaccacttcattcctttctaatttctatctcaaaaaaaaaaaatagcaatattacaaactaattatgaattagagtaaaccatataaaatatgcaactatattttaatttttttgtgactacaaaaaaaaaaaaatgactgctcctctcacctctatgtgtatccacttgtgacaactatctatcattttgaaaaattaagtatatatctataatatttttcaaaaattaaattgttacgaaataaagtactatatgaaacattaaaaggattttaacaatcatttactctaatagtattatatatatggtgatagagctagggaagatatgtagctagttgtatataaataaatgatcttaataatcatttactctaattacaatgtcgtattacaacctagtatttttaatggtcaaaattttaaaaatactgctagatgagtaaatgaagtaacaaaatattgagatgttatactattaaaagaaaaaaaatatcattttaaaaatatatgtgaacgttatacagtagcattgatgctatcatttttttaataaaaaattattgttgctaatgaatttataattaaaaaaagtaatatattaaataataatgtgtaaaattataattatagtatttttaaagagtgatatactattgaagtgattttagaagtaagaatgccaaaaattatgtagaagaaagataaaataaaatattatattttcggatgatgtgaaaatttttagcatctctaagtcaatctccatgtaacacgtca

SEQ ID NO: 7972 - DNA, 674 bp, Cannabis sativa
  modified_base (565)..(565): a, c, t, g, unknown or other
atatatataaaaatatttgggatagccaatcaaaataataaaagtaacaaaagttatacatgagatggggtatttttttggttaaaaaaaacttcattgtctatcctaaaagcatgcttagctaatctatgaggttcaacattaaagttgcaagttgagaatgacacgagagagatgcctaaaaatgctagacaataaaattttagtatcaaaaaagataacacccaatttattcatatatatataaccctacaaagctaagaccaaaaatggtgaatctaaaaaaacccatttaatgggtagtctcatgtcttaaacccaatgcaaacctaccagcagtgcaactgcttctgcttggagaacttaaaaagatactgataacattttttaattgtaaaaaatagtataaaattaacatcccataatgaaggtgaaacgaattttactgttaatgacactactaaaaaatctaaaatttccaacaattttacaccgtcgggtaaagaattactaatgatctataaatttgttgcctataaaatcatcgcataatcagtcatattangggctacctaacttcaaaaattctttgaaaaatctttcatagtttcttcaagcatatatctttgaaaggagaattatgatctatttatattgccggagtccacaatacc

SEQ ID NO: 7973 - DNA, 910 bp, Cannabis sativa
tttaccttcctagattagctgtctttcgaagaacagggtcaagtctattaagaagtgaagataacgaggcagcagatccagcgcgaataatttcttcagtaaatatgtttacctgcaaagagaaattataaggacgaaacttgggtagtaacaagactacaggacaatatctctttgaattttaatgcagatagtatcttacagcccattcatcaacattcagaagtgatccaagatactccgcagatggctgcaaaatttgatcataccactctgccttgcttgcaagagcaagacgagttctgtcaaggactgattttgcatagagtgcccattgattattttgactatttaacaagttggtagcctgattccatcccttcataaacaatataatgataaaaaaaattaaaaatagaataaaattagagaaaacgaaatggttaagcctccatctagttgacagacaaatgaatataatctcaaactcttagatattcaacaatgttcataaaaacattactataaaacaagagtatattgggtactgttacaggtatttaccttcaagcagtatattaaatcctcattatcatctgatgagagtgccaggttttctagaaccatactgatgaagtacattattttctgcagaatgcataaataaaagctggtcaagaagatataatttaagtgcaaaatataaatcatgtaatgaccaaattaacattacaaacctcaggtcctgcagtatttagttcttcgtatcccctttcaatggcagtcctaacagcagaatcaagagcgatgtccaaaaataaaagatccttcagacgattttgagacttggaaagacatggacgaagctcctgacgagcctctaacaaaccctgcatcagattatttaaaa

SEQ ID NO: 7974 - DNA, 758 bp, Cannabis sativa
ttctttgggtataaataccctttacaacttccaattaccactttttcccaatttcaaattttttacctttcggaactcaaaattttctctacaccctttgagactaaaaatcgaactcaaagccaagttatcttcgtcaatctgaaatgtgctattgatttctgcattcaccttttgttgagaattagggcacgagattttccacatcgtccacccccagagatcgtaagtttcacaccagaagaaaatgtgaacctggattttaattcaaaaattaacttgttgatcaccctagcatcttgtcttcgtgaaaggtatgatcgacttcctcaaccaaacccagcgacaattagcttgacatctccacttttaatattaggtatgttgctttctcgtctttggattgtactttttgagtttactactacatgtcgtgcttgcatgttctattctaaaatgaaattagggctttctatatatgtggttgttgtcgttagtagatttaggcaccacatgccacattgtttttagaattcgctgctaggaattcttagtatcaatcgttttacagcagaagtgctggcaaaatttctccatgcccaaaatccttctagttttcgattcttcattaatcttttctctgtttcttcctctttgttgttcttgactttctatctggaacgagtgactcctggaagtttatgctttaggatatttagtctcattaggacctccccaagcagtttatgggagaggac

SEQ ID NO: 7975 - DNA, 994 bp, Cannabis sativa
tttttgtcatataataatataatcaaacttttgaatagttaaagaataaatgattggaaatttatatagtacatcttcttaaagggtgttttggtagattcgcgtatgtggtaattatttaagaccactttaataacttgtagtatcgaaaataatttataagtattttaaataactataatgaacactttcacacaaataactaaactaaaaaactcttcgtttgttgaaacggataataatttgtttataactaattaaaactagtaatatactacacaataatttttttaagaccgatcttagactaaaacagatattagaaaatctcaacaaaagcaagatcgacgattcaatccttctcgctattaaacataaaccctaatactcatcccgaccaagataagtctctcgaagaattttgttgagagactatctaaatcgggatgaaaaatatttttaaataattatccttttttttcccacacaagaaacaaaaagaaaaatctacataaaatttcttagtagaagttgaagaagtacaatgcaagaaaggcaagagtgaaaaaaagaaaaaagtgggttcagattcagaaatcacagactgaccaaatctttcccaaattcccaaattgaccttcactttcataattatttacatttaaacccccacatccaaaaaaaccacactaaactccggcaactgtttttccccaccggaaaactcatacatacatacatatatatatatatacacacacaattatatgtatatatataaatataatcatcatagaaatataaaacattccaatgaaactaatgggttatcaagtgactcatctgtattattattattagtattattagttcttgttgtggttctcgggtcaacgagactcgacttgacccgacccggtgatctgcaggctcttccggccgattggctccgacccacgttcgatctggtagttgccggagacctcgacctccg

SEQ ID NO: 7976 - DNA, 1796 bp, Cannabis sativa
ctggtaaaataatatccaacagtggagtagccgaaaggatttcgattcaaacttaacaaagttagtttgaagagatttcagattttaaatttgttgaagtgctttcaatatatatacaaggggatcttttatattagcaagtgatttagtttaggttaaaagtttcactattgtaaaaattgtattgtttttctttgttgtattctggattagttaccacaaaaactatatagtggaggttattaccctgattcggagaacccaagccctagtcagctggaatgagttttcagtgcagacaaatcttgtaatttcatgtgttaagtgttatgttttggatcttgagtttcatgcttaaatcaagatgttatccttgttcccggatagattctacgtggaggtagcgaaagggtgccacgttagatcgtatgagaatattagggactccccttccttttaagataggatcaaggaaggcatcgaagtatctgggagagcgcatccgttgcaaaggaagaatcgatccttgaagttgtaacctaatgctttcggtattcggaggcatacgcaaagcatagaccttctgagggtccttaggaattagctatttgagggggtcccgagctacacttcctggaagccccttgcaacctaacttggagatacacttgacggttacaccttttttgacaccaagtcagatcttgtcccctacgtcagaccgtggttgtgcgggtacgtgcctctatagtgctaattgtctaacgactttgtctgggatattgcttttaaaggaaaaacctttgaaagacacatgtccatatccttatgtgacaacctacattgattacgcaccgtgcaattgaagagatacctaccaaatcaatggttagatggtcttgtatgttttacatgtgtgcctataaatacctccattttttatgtaaagagggtgaacaatttttacttacaaaaactctactaaaattcctagagagctttcttcttagagagaaacaaaaggaatacaaagattaccattgtaaacatttataatactcaaacatttaccaaagaacggtaatactactgactcgtggactaaggatcattaatgcctgaaccacgtaaaaaatctatttgtctattatttaatattttacattttcttaagctcttattaattagtttctaaaaatctcggtaaatattttggtgctttcattgagaaccgaggaaagattgtaagttattgcctcacttcaactatggtgaatacgcaaaagaacaccagtaagaaaactctactggacacagtcatggagaaggctgactcccacacctctgacctcctgactggtggcgttagagaggaaggtacagccctcgctaaaaactgaggggaggatactgagaacatgtttgacaaccccgatgatggccaaaaacttgaaggaggaatgaagaagatgacagtgacgactatgttagagacgggtattacaaggatggttatcactatgaccatgactaaaacttatttcaagtaaccaaagacttagaggcaactcatgcagagttggctgaacaaaaatgctcattgcaaaaatgaagaagatgatggagcatctgcagagtaagttcgaggatctagaaaatttgaaagtgaaattggtggtcgaggaatgtgcctgaaagcaaatagaggctgagacctcgaatccttataaggataagggcaagggcaaagtgggtgagccctcacataagcctgtacctgttggaatttattttac

SEQ ID NO: 7977 - DNA, 1070 bp, Cannabis sativa
ttaatttgtttatttctttgttgatcaatttcgtataactagttttaacaactaaaacatagtaatgtatgtttatcttcaataattacctaatctcataattactatttttatttcttgtttggaaggaaattagtattcttttctgaaagcttaatttgacatatttaaatttaagggaatttttttaattttttttttcaaatttacggtttgagtttttaaagtggttatagcgctagttgcaatagaagtttctatacgattttttgttaatatttaagttgcaacgctaactgtaataggggtttcaatgtaaaattccgtaaaaatatataaaaaaaaaaaaactgttttaaaatgtaaagaagaaaaagactttattttttatttaaaaccaaacatactaactttcgctattatatcttataaatcattaacaaaagtttcatatatttcatcggtaatatttgctttaaatatgtaactttatttgagaattaaatatcagtcataattaagcatttgcacaataatattcaatcacttgaaaatttgaaatgtcataattcatatatattattattaattcataaaccttcaattctcaaataaatatatatgcataaaattatatgtcataaaggattagtacttttcacaatcataaataaatatcgatgaaattggaagtcttctctttttcatgcatgttcattgtttcatacttcattataaccttgcgtacatttttaatacaaacctattttgaaattggtaggttgtgtggtgaagtgaggggaggatgagctttcaagttacaatcaaagtcgtgtatgtatctactatttaatttaaggcttcagcatgtgtttcgattgtttttcttcctattttattattacttgcctaaatttcttaaacagaaaggtacgtgtcagaaagaagtagagcatttttcttaagtcttgtttagaaaagttatgttgttggattaaaaatctattgtggccatataattataatgtatatgctattatcgtgggaataatgtgtagatatcataagtt

SEQ ID NO: 7978 - DNA, 786 bp, Cannabis sativa
tcaagaaaatttggctcaaacaaattcaattggagatagcaactggtatcctgattctggaaccaccaaccattgtactccagatcttcaaaatctaatgaacaactcagattatggtggatctgatagactttatgttggcaatggatcaggtttgtccattcaacatactggcagctcttttcttactcctcgtgcatcaggaaagtccttagttctcaataatcttcttcatgttcctaaaattactaagaatttacttagtgtttcaaagttttctgaggataataatgtctattttgagttttatccccatgtgcgttatgtgaaggatcaggtgaccaaggaaattcttctaactagaagacaccagcatggcctctatacttttgatctccattagtttcaaatgcagccttcccctcaacacaaagattccttggtgactgctgcaaattcttctcggaaagttcttcttacttcctcagcttcatccaataacattgatggcttggactctgccataactgagacaagtagcaataatgaatcttgtcccttttataatgaacattctttttctaagtttgaattgtggaataatagactaggccatccttcaaaaaaaaaaagtgatgaaatctatattagcatcatataatatttttgtggaaaataaagtgtcttcctttatttgcaaagcttgttgtttaggtaaaattcacaaattacctttcctaaagctgtcaataaagtttattctgagcctctacagcttatgtctct

SEQ ID NO: 7979 - DNA, 611 bp, Cannabis sativa
ttgggcggtgaatatttattgattgagtttctaatttgtttgcttttcgtgcactattaatctcttttgaaagtttttactttctaaattaatacagtttttgactggtgtaatatatatcactgcctctttcagctttcagtcttgactcacacattttcgtttatgcatagtaattggcgcatattttgtcaaattcgtttgtttcattaactgtgcttggaaaaaaaaaaaccaaacaaattatattatagttttctcaaatcacttgaaaagattagtctagtctaataaataattgaaatacacaatgtaaaccaccatctttcgagtcctatcttttcttttaatatcagtctaagtttattcaaaaaaaaaagttatcagttaccaacttaccacttgcaccttcattttcaatagttataaattagcttctgcaatatattgaaggtgtgatcgtatatgtgtatgtgcaaagaataaagcaatttttgtgtaaaagggtactcatctttttcttcaatttctctgtatttatatatatgtatatatgaatcaagaacataactgggtttgttcttctctgctaaatttgacatggatttgtt

SEQ ID NO: 7980 - DNA, 1939 bp, Cannabis sativa
tataatctatgtaaatatatcgagatcttgagactgatgattcaaattatgataacttagagttattttataaaattatttttgctttctactctaatttaaatcataaaaactaacagtaatgtattatttggtataagttttattaattgctctaaacttgctaatggtgtggctcataaccttgcatcctttagcatatatcatttgattaatgcatgttctcttactcttaggtcaaggttcctttgaaaaaaaaaaactatgtttaatatttatttgtatctatatataaatatttaatatttaatataaattaaaatttaatattgtattatataaaaatataacatacaatacaaatataatattatacaatatattataatttgttataaaaaaatagcattatattgcatactagtcacctaaatataaaactttacaattagttactaatatttcctaaatattattacttaagttatatgagaccaattaattaattatacgaacaataatataaaattgaaaaaaataataaaaatgaaagaagtaatagatatcactatccgtcggcactttaacatttttctatagaaaagcaaaagaaacaaaataagttaaggggataattgcagcaaaagttcccaaaaatttagagttgatgcatattagtccccaacctcaaaaattagcggtagtagtcctcaatgtcgtattttttgtaagtccgtaggtcccttttctaacagatccgttaaacttaaataaaatgctacatgtcgacaacttattggtccaaatcatattttttatttgaaataacttaaaattaaaaaaattatttaataattaaaacaatttaaataatttaatatttttatagaaaatattaaaagaataaataaaaactttaatattttattttatttttttctctctttatgttcaactctttctctctcattgttcttcttcttcaacacccacaagcatggccatggaaaccatattcaaccgaccactactaggaactcctacaccaaaaccccaccactaggaactcccggtaccccaaagtcagcaccattcccaccccgaccctttttcttctctccccttcatctcttccttctaattacctccataaccaccatggccagaaactgatgaacaacttggagctccgatgagagggcatgaacgatggagcttcgtggatgtcttgtctccttcgcccattgatgagttttgtgtttttattgatttgatctctatactagttttttttgggagggtttatttcaggttagaggaagaagaaaatctaaaatctaagaaccctaatcctaactatgagtaagagaagaagaagagaatttgaaacccgtgagaaccctagccttgtttcaacagctagaggaaaaagaaaatagaaaacccataaaaccctaaccctagtttttggtgttgctgttagaagagaagtatttttgagaaattttgaatttcttggtgtcgtgaatggagaagatggactaaaggggtggacggagcacttgggtttcgagctcgacgagagtcagagttggtgctgggttttgggttggctttttggggtggtctaggcatcgacaagaagaagaaaaagataaaagaaaaaaaataatttgtttagtattttttttttgtcattttaaattaaaaatataattcggactaataaaaaattgacacgtagcattttatttgagttaacggatctattaattagaagagggaccaacagatttataaaaaatgtgactttaaggattattattactactaatttttaagattggagattaatttgtattaattttaaaattttaagaacttttgccacaattttacttaagaaaagtgttcgggaaagaaatagataatattaatg

SEQ ID NO: 7981 - DNA, 1327 bp, Cannabis sativa
agaaaataagtgtggacaaaaatataagtgtaaattactagagtaactaaattactcttactagtaattattaaaattaaaattaattatacaaacaaaataataattttcatttaagaaaattttatcccttcttatttatcaaacaacatagaagaaaataattttcttttctttccttcaaaatttgtccatccttcttattttcttttcttctaaccaaacatggtgtaaaaggtatttaaatggtgaaaaggtttgctttctttaagttttagaaaagctaatcattgctttctcaatatttttagctattttttttaggttttcttttactcgcgatcacatacttattaaaattatgaatgggaattactactatcaactttttattaagattgaatatttttaccggatttgatccgacccaacccgaccaactaggaaatttaaaaaaaaagtgttcaatgcaggcaattcggtttcaacctggtggaccttttgggtgggttttaagtttgattttttaggtgatcgagtttcgggttggactgagaacccccgcacgaaccctctccttcttcttttactcttacttgaactttaacaatattataagtttatactttgcaatgcacttcaaatataataatattaactattcctaaaaaggaattacataatacaatatagattatatgaccatacacttcttctaaggtttagttacatgtttataagtgttgaggtttagttatatgtttatatataattaggtatatttgtagaaaattaggtgagtgtaaaggaaaaaaaaaatattactgggtcaactcacaaatttattgtgcaatttagtttaattattatatcaaaattaatattatctgatagaaaatattttagatctgctactattgtgtgaaaatttatttataatttatttaccatttgaataattttgttacaaatagaataatcttacattatatcaaaattgatgcaatcaattttgaaaaaattacatagttatttttgataaaaaaatttatatttttatctttaatttttttttacattattacaatattctataaaaatataagaaaacaaaaaaaaaaaaaatataaaaaaaccacaataaaataatatacaaataacaaaaaaattaacaataaaataacaaaaatataacataaaaatacatcaaaaattatactttatatacataaaatttttaaaaccataaaaatatttacataaaatgaggaggatttgggatgttaagggagaaagaagtctaataatgaccacaaaattaacttat

SEQ ID NO: 7982 - DNA, 1074 bp, Cannabis sativa
ttcatactatgcatgcattatcgtaaaaatagcattgtttgcctctggagtatgaacacatttattttaagataagatatttttctgagagagaaataatttgttattataaattaaaagtgtgagtcatttagaggaataaattccaaccaaacacaatcttcatccaactctaaaacataccgaatcaagcagggaaaacgaataaaagactattgaaatatctacaattaaatctttcaaaaatgaaagtgcagaaaaagacttttccaaagcttttgaaaccatcaaagctttcgtatctatttgtttaatcgacaattgcaattggaggatccaaatcaattataacacaataattaaatgtttggtttgctttctaggagactatttattatcacagtgacttatatttccgtactttagtaaacaacctaattagcttattgtagttaatttgtaaccttatttctaaaaatggttgtatttaaggtagaagaaacaacttgataaaatatctaaatatggttgtatttaagctatttgtgtatttttatatatagtaatagcatgtttttaattttttatatcagtactggattactaataaggagattgcttccaaaattgtaatgtttgagctaagcaaatatccatgagaacggcataccatatttgcaaatcaatgctcaatatgtgcctatgaatttaagaatggtgaggaagtaagaatcaccaaatgtggtcattgttttcacaacaaatacactcgtgacatgatccaaaaaaagttcacccaatgccctatatgtagaatcccattatttactcagtagagacttttattttataatcaatatataaaactttgtttcttaattaattgttggtttacatttctacgtatgtgtatgtagtattattaataatatactacttaattataaacaatttgtaagattaatctctcgttatatattattattgctatttatgttaaatttgtaatatgttgcatttttattattgttattaatttatataatgtattttttattttaatagtcttgaata

SEQ ID NO: 7983 - DNA, 1012 bp, Cannabis sativa
agaattgttcttgtcattccatataaaccacattgtacaaagaatttgctccaactctgatttagttttagtcgaggacaaaaacatgagataatcaccaatttacagacggaaagctgcttaatcaatagaaattcctgctatttttcaaactactttggcatgtttacagttaaacatggtgtgtcccaccaattcccaagcatttgtacagagggtgcaagttgcagaatcattaatttttcgagaaaacaaggaggcagcagacaatatagcattgtgaaacaccttcccaacgaatatattcacttttgaaggaaggtacgttcagattccaaaagtatttccataaagttttatggttagtagaattagaagttagatcagcctctttaatagaaagtgaaggaaggttcagattccaaaagtatttctattaagttttatggttagtaaaattagatttagatcaacttctacaatagaatttacaaagtgataacccgattgaattgaatattgacccgtagtattaaagtgtcaaatccaactatctgtaacattagagagagatagaggaatagtgagtatgtactatgtagttaatatcaactgaaattttatgtatattaattatcaattacttatattatttatcaaattaaattaatgtatgaaatacaatattaaaatgtaataattaataacaatatgtcatgagttaaagtgcccattttccttattatatatatatatatatatatatataaagctggtgaaaaagggttgagatgctaaaaagactaattagagaagccatttagttaaagaaaaaaattatcaatatgcttttgcctaaattatttggacacttttgatcaagaaagaataacatgcatggtttcttggctcatgataagttgattatttatgtgtatgctttagtacaaaaggcacaaaaactatgagggaaaaaaaaaaagggccgttctgatatgtgtgtgtcttaatt

SEQ ID NO: 7984 - DNA, 3040 bp, Cannabis sativa
aaaaccctctatttatagccaaagcgagtgaatgaaaataattaaatgaggttggtgggatatgagaagggtaaaaaggtaaaataaaatgtccaatttattgggtgagaaaatagtgtgagatggaaaaatgagccaaagaaatgcaaatggtagtgtatatttgaaattggtattttaatctcattttggggacacatggcagcaacaaagggcttcaaaaaggcgggttggaatgaggagctgacaaatggtgagcgtgtggagcttctgacaatggtggccgaagcagggggtgctatgtggcacgcttgaggaggctagcgtgggggacatgtggggtccacgcggctagaagctaggaggaaggacaggcagaacagagcttcacgcgcccctgtctgttagtgagactcacgggtgcgcctaggctacaagatcatgcgcggacgactatgatgaggagcttgctgatccgtgcaagtggcctttgcctgagctgaattctgatttttacttttgaaatttgaaatttggctccacttcttcacattttctttagttcaactctaaacttttgccaataagtacacctaaaaataccaaaaattaattagaaaataaatataaaattaaaactaacgaaaataaaatactaaataataaaattattataaaacacacaaaaaacggtaaaaataatattaagtctaaaaaaataaaaaatacttaaaaacttaataaaataattaaaaagtcaagaactaatctaattttttcttataaaatatggtaaaataactctattttgtagagttatcagttcaccttttcgaccttggtcagggcaaggttacagcgttcccgtgcaattttctaattcccttttaggcaccctaccccattttttcttgtgaacttcatgcacaaatgaaaaactgaagtgatagttttcaagtcatatagggctggtcggcctaacatgacattgaaagctgatggaacatctattatcagaaatgtgccatcatagttatgctcgtcggagtttgcccaacagtgaacggtagatggatttgtcccaaaggtgcaacactttggctggaaaaatcatacaccaattggctataggggattagatctttaagttggagccccatcttctcgtatgttatcttaaacaagatgttcgaagaggctccattgtctatcatggtccgggccaatgttttattttctatcggtacttccatgaccaagggatcattgtgcgagaagtggacgtggataacatctgcttctatgaaggttatagtgggttcccctacccatggtatttttggctttctctcttctacggcgaaaactatttccttctgctcatgttgtaaggctcaaggtatacttttcccgagcttttcccatgtctccagctaggtgtgggcccccaataatgacttgtaaatgcccgtccactagtgggggcattagtagatcctgattattatctgtttgggcagcccgttgattctggtcggcattgacatatttctgcaagtgcggattattctttctgattaagaattcaactaccgcttcaagttgttgcgctcattcatttcgtggtcgtagtctgcatgaaaatggcagaacttggacgtttctcttttacttacatccttattcataggagcaggttttttgtacgggaccattgattgagttgttgcgtagatcatctctaggtcgtcagttaggacagagaaggcagtgaacttgtaggcattttctctgagggtacattcggtagtgcccgtaaacttttcctttttcccgttgcattccctaccattgttattggacctttacccgctcagagttgagctgcaagggtattgtgtactctgagcaggtgctcctacagagaagatatatggctagccctgcttaggttcaatgatgtccactcgccgaatggcctcctcgagtttaataaacccatctgataggtctagaagttctaccatagaccccacggggccacatcttttaatgtccttctacagttctccaagtggctcaatgcatcctagtatagcagccacccttccctcctcggttaaccttgcaacctttgtagcctatgtcatgaacttgcttatgtaagctctgaggggttttcctagtatttgttttatctcgaccaaatcttttaggtgcgaggggagttgacgagaggaagagaactatgcatggaattctgaggagatggctttccacgaattaaacctccctagtgatagcttgaagtaccattgttgggcggcttctgcaagtgtagcagggaatatcctacaccatacatcacccatactccctgcaagtccatttgcatatcaaaatatttaagatgtgataagggatcttctttccttgtatacatcatccaagtcagcatcttgaatttcaggggtaattcaagtacatcgatcttcggggtgaaaggcgatcctcgtgcttggtccatcttgagatcagtgagttttgggtcgtttaggccttgaaccatattttttagttgatccaattgtgcttgcaaagatggatgaattggttcagcctcttcaccgacccgtgtcacgtcaggatctcttggagctaggtcctggatgcggatacctggttgagtagctggttgaatgtattgttcgtctaggcatctccttctattcaggtcagccctgaggtcgtgggtcgtgcccaatctattgaataccgaggtaccaggtggtctcgatgtttgactagtttggtcggtgggttgaccagaactatcactttggatgatgttattagatataagtccacctgaagagcgaataggtaggacctgaccgtctaccacttggcccacgggttggacctataagcggggattggacgattgaccattatgagtttgggcagtatgcccaacaacaaattcttttgtgccgcccagtgggatactggatggagtagctggttgctgattagcaac

SEQ ID NO: 7985 - DNA, 1219 bp, Cannabis sativa
aaaagatgtcagattagtttctactacaatgatagcttggaaagcagttttgaagagaatgttgacaaaacttacgttatttactagaatactagacaccctcatatttgttgagctacaaataccaatgggtcattatgtggaaaatgcacatccttagcatcatcttctatgaaagtgattagaaggttcatcatttagtgacattgagtagatgtttttacatgattacatgtttcttcttattgaagctaatttagatatatcttctgagcatttttggtgcttccgacaatatatgcacctccagatacttttaccacatggccatctagcgtaggtggggcaactccaggtggatatagatttcctggtttgggagcagcaataggtcttgccacagggacattttgtaccccttgaggggcctgtatagtcggagcttgtggaagacctactccttgaggaatatttacgactccaggatgtccaggaataaaaagttgtttgtgtgtatccatttcggactaatccttcaatttcatccttcaagtagtcacatatatttttagtgtgcccagtgtcaccattgtattaacaccttttactctgatccctttttttcacctttaaacatcggtagaggctttttataatggaccatgttacacgtagctttgtaaatgctctcacgagtaacaagcaagcttgtatacttggagtatctgaactgttgagttttctctttctttgaggattcactttagcttggaggttaaaatttctcttgctccaagaatgaattgcgttcgattccaaaactttcatttgttggctcgtctgtttgggagcgacactatatccattttgtgccactccaaagcaagaaaagttggcttgtgaatgtgctcgttggaggaataatagctgaagtagacaactgcggggtttaagttgttgcagtactagaagttggtgctggaagtactctataggcttgagcataagcttcttctaggttaatgaatcttcgggctctagataagaagttagctaaagagtcttcccttttttgttccaactctcccctaaagaacaatctagtagttatccctaatgttaaagccaccatcttcctatcatctgtaccttggttttttcaaatgcgcccgtcttatgttgattgtatttcttaaggctttctcctggttgctacttg

SEQ ID NO: 7986 - DNA, 823 bp, Cannabis sativa
aatcagccaagttatataatcagaaccactaaaccaccaaataaaataaccatataaagttaagagggctgagggagtatgaatcgcactattagcaaaatatatatgaacaaaagaaacattacaaaacttattacaacactcaattatatttataatattaatagtcaatcatactttgttaattatttacccttaatatataagttattctgacaagcaatttgggtggagtgggagacttttaatataaaactcttaacactgtacaatattatatatagattaaattaaaaaaataaataaaaccagctaatagagacacgataaaacagatctgatatcagtcataagatttagagtacgtactacgtagtgaatcgtgattttttttcatcagctatatatttatacacctattaagcggacggctgatttttttttttttttttaatgttacttaaattataaacaaggcctacattaatatgggccacatgactgacttcgttgaaagtcaggcccaattaatgcaccttcttcatctttctggatcaggcccaattaatctctctctctctctcttttagaggctttttacaaaaatactagattttaggcaaaagcttacaattttactgtcatacgaaattttttacaaaaataatctttttataaaataaccgtaaaataaacaattaaaacaacagtagaacaactaaaaaacaaccgtgaaacaacagttaaaacttaacgcagtacacagtataaaacttacacaatacttttgaaaaagattacgccctacagtaaaaaggtaaaa

SEQ ID NO: 7987 - DNA, 535 bp, Cannabis sativa
ttagagataattgtcttccttaataatgtaattacatgaatttagactcttagtgctttacttaactactgttgttgttgttacgaaattacttaggctgaattagttcaactgatcgtaatcttataaggtcctctgtttgtatgaatttataccttgaaatgttctacaggtcagtggccatcagaagatgttcttgcttacttttgcttgtctcacgctgacttgttcaggtattttatgtatgtattgactgttgtttctgattgtgctgtttgtgggaatagattcacttttgttttcttacattactcaggtccaaaagggttattgaagttgaatcaggctatggtttagctggtttagttattgcagcagttaccgacgctacagaagtcataatctcagatggaaatcctcaagttgttaattgtatccttttttcctcttgatcaaactatcagttacttcaaatttgaaatgggaattctatgtttgatttctcatgagtcctaattacacttttaagattgtt

SEQ ID NO: 7988 - DNA, 562 bp, Cannabis sativa
attaacagtttaaattactagttctcttggtttccatataaattgttatgtgaattttagttgcaatttaaattgctctaattattaagtaagtttgttatgccaatttcaagaaaaatgtaaaaaaagaattattttaaaatatatatatataaaaaaaaccttttaatatataacaagcaagaaataaatagataaaatgcgtcaaaaaaaaaaaatagataaaatgataataaaatttgttaagactactgactaaacatatttaattccatgctgaaacagaaaataaagaaaacatctttgattataattaaatatgttccacttgtgtttcaaaaaaaaaaaatgtccacttgctgtttttaatgtcagtaaataaagtaaaattaaggaagagttttatttatatttcacaaattataaatacattttaatattaaaaaaaacatataaacttataaaggaaaattatcttatatgttattttttaaatttacgaattgatcaccgttagttgctcccgtggtttttatatgagtttctataagagttttggtcg

SEQ ID NO: 7989 - DNA, 817 bp, Cannabis sativa
aagcagccctatcataagagtataaatcttacatcataataaccatatgatctaaaatcaatggtaaaaaaaaattccctaccggtagggaacttttgctaggtcctaccatagtcttgccatatatatattaatcaaacaacaaaatataaacaatgatttcatttgtttatttctttaatcatttccttatctcctccactttgaaaaattgatttcagttacgtctttggttatttaggttgtcatttgtttttcaagatgaaaaaaactatcaacttaaaaatatatgtaccaagaaaaaaattgaagatgatacaagaaataatcatatattttttaatttattatttggtctaattaaattattttaatatagagtgattaagataagaaaaataaataatattaactatgtaaatgatggtgttacaacctaaatataaatactttatgcaatatattagtaatattgcataaaaaaaaacatttaaagaatttatttgatgctcgaagaaatcatgataatgtagaacaaaaatgcaagatgttgaggcaatctaggccgtctgttttttttatagcaattaactttaatcgatctttgtttatacattcttagtagaagggtactagaatttagaagccatagaaatggatttcggtatattggtgatgggagtttaggcctgaaaaatttggagagttgagctaagtgggaaaataaggaaaggtcttcacaatgattgaaaaaaagtttggaatttctttaagtatcatatgttattttgtgggagtgtgtgtaaagatttttata

SEQ ID NO: 7990 - DNA, 567 bp, Cannabis sativa
gaaagtgaaaaaacaaaaaacttaccatgttaaaatgatcatctacatgtgtcttttgtaatacaatcttgaaatatggatatggggatttgaagttttcagtcttagataaagctttggctttttcttcaactgtcattgtcatcgatcgcttccttttagtacaagccttaaaaagtcttgtatctataaagaggtgataattataagtaataacaaataagaaagcaaaacataatcttaagcaataacaacatgtaatttcatacaaaacaggacaaacctgttattttgagagacttgaaacactcttcatcattgtcactacttctactactactattactactactaacacaaaacttggtttttcttctattgaaagttgaaaattgtgagtggctcttaaggtattcattattttctatcctctttcggggttcatcgacgatgttcggcttcaacttatagcatatctccgaaccgtttgcatcaattatgaccacatgaaatctagattgaccttcatacctaaagagcaaagaaaatccacattgtatggagtga

SEQ ID NO: 7991 - DNA, 2033 bp, Cannabis sativa
aatattgaacatcagtcaaggtgaaagaattatggtgcctaatttatttacaactcgtttgtaacctttaatttatactaaataattatatagtgttcataaaatttcatatcacatataattttatataaaaatattatataaaatacaatttaatataatactatacaatacgatctaatacaatgtttcaaacgagcccttattgttttaatttaatattggatctcacttattttataattttattaaaatttaaagtaaagtatatgagattccatttccaaatcaattgacaatatgagctacttctgccactattatacagaggaggaggaatcatatttgggccatcaatgactatgaagaccactggctctgcaaccgtgatgacattggaagatattttgtggagaaattcaaaaatctttttgaaagttctaatccatgactcggaaatgactttcaagagctgtttgtcaacaaggtttcatctctggaaaatgaatcattgtgcaacattccttcggattctgaagttaagaaagctgcgtggagtttgcatcccctcaaaagccctgggcctgacagtttcccaggcattttctatcgcacttattgggacacggttgggaaggatgtgtgcaatatggtccaagaattcttcaggtccggcaattttgttaaggaattaaaccatactttcctgtgtttgataccgaagaaagaaagtcctactttcgaccaatttagaccaattagtctatgtaacttcggttacaaagtcattgcccgtattctaacggatcgtctaaagccaatcctggataatataatcagcccttttcagaatgccttatcaaagggcgttggatcgcggagggatcaattttggcggctgaggctttccacactatgaagaagattcgaggcaagaagggatacatggctgttaaaacagatatgcataaagcctacgatcgcattgaatgggatttcctacacaatgtccttattgcaaacggtttcagttcaaaagtgtgcaatctgctaatgagatgcgttacatcagtgagctttttagttcttctcaatggaacccctttgaaatcgtttttccctggccgtgggcttagacagggcgaccctttgtccccatacttgttcatcttatgcagcgaagtcctctctaaactagtctgtcgtgctgaggccaatggtgagataacgggtatcaagttaggtaaaaatgccttgcctctttcacatatttcctatgctgatgatgctcttttcttttgcaaagcctctcctggcaaagcaaagagtttgttaagttgtttggagacttatgaatcttggtctggccaaagaataagtgaggccaagagtggtgttttcttttccccaaaagttggacgggaagctagaaaagaaatcagtgagaatttgggaatctctgctcttttgcacaaggagaaataccttggcaaccctcttcttgtttcgatcaggaaaagggaggagttctcgtttttaaagtccaaggtgcttagaagacttgaaggttggaaagcaaagtgcctctctcaagctggtagactcactttggctcaatcggtgcttcagagcattccttgttacactatgtcaactttccggataccaattacaatctgcaaggaacttgatagcattatggcccgtttctggtggaaggggagtcctcgggacatgtcaagcaaccactatcttgccttgaaaggttggtcttctatttgtcaacctaagaggaatggagggcttggcttgagaagattcagagatatgaatttggctttactggccaaactggcgtggagtatgttaagcaacactaataggccatgggttaaaatcctcacagctaagtattgtggcacttggagtttttgggatgtggaaaagtaggggaatgaatccttcttgtggaagggtatacttgaagcacgacaactatgtgttaagggtgctgggatcatcataggcaatgg

SEQ ID NO: 7992 - DNA, 585 bp, Cannabis sativa
gagatatcaaggtacatacgtacattattaatgagaaatgctaatagagtatctcgaatgaggaatatctatattttttgaaatacatatatcatactaaaaattattttttatccaaaaaaaatactaaatattattttatttttattttctatcttatccacatttgatttcacaacattttcataaaaaaaatatttcaatattgacaagtctaacagttgtccagcaacattttacattaaattagtttgaaaattagatcagatttcatatgtgtgacaagacaactctatgagtatatgcaaccccatacaccttatggtatcaagtaccacaagagttgacatatcgttattcgtgcatgtcataaaaaaatattacatgccacataatttaatttaataataatataaaaaatctcactaatcaattgtaacgtaacaaattagtatagttttagacaccatgccttattgcaatgcatgctcattattaattaatctaataaataacaaattaactttgttagattgttgtaatattaatttatataataatctcctgatatatatatatatatat

SEQ ID NO: 7993 - DNA, 1059 bp, Cannabis sativa
ttcaccagtagtctgcacaagaacaacatccgttttgaaagtgatggaaacgattggcatctctaacaattattatcctgtttgtgagttttgaaatgagtttcacagcagagtggcaatcatcacacattcggaggttcttaatgatacggagaggcgcttcagaaggtgttttcattaggccatatgctatcgccaacttctcactgtgatagctaagatactcttctttctgctcatcctctacatcatgcaacactgcagcaacatccggtacataccccagttgtttgattttgttcaacaactcccctaccttttcataaatctgtctagattctgggtgcaatttatcctctgaaacaaagacatgagtagtattttttatctccacccaactcactccaggttctttcttaatgtttcttcccctcatgagttttcgaatcctcacaactgcatcccacctgcttgctttggcatacatatttgataacagtagataagttcctacatcatcaggatccatctttacaacaatctctgcaactcgcttgcctaagccataatttctatgcacataacaagcattcagtaaagtgcgccaggcaactacatcccatttagttgatacagatctcatataattctcagcttcatcaagcattccagccctgctcaaaagcccaacaatgcaggtatagtgctcaactccaggttcaatgccaagttgtttcatcagttggttcaaataatagaacccttgttgaaccagacccaaatgagcacaagcagaaagtacagaaacaaacgttacgtagttaggatagtctccagcactcatcatatctcgaaacacatttagagcttccttaccaagcccatgatgggaatacccagatatcatagcattccaggtaacagagtttctaaaagtcatgtctaagaatacttcattcgctgcttctatgtggccactcttggcatacatattgatcagtgcatttccaacaatgatatgatctttaaaacctgacttctcagcacaggcatgtaaca

SEQ ID NO: 7994 - DNA, 530 bp, Cannabis sativa
acccctagttttatgttaggtccgctactgcatacactataatttatatatgtatgtattattttattttgtgtgttcatcaacttttagtgactactgctaggttttattcagcaaaaaaaaaaaaaacttttagtgactaggtttcattgcggattattgcctctaattaatgtttcaatattataaatcagaaaacaattggcgccaaaattataagttacgtatcgttattctatgtacagttcaataaggacaaaagtccctagctataaaatggttaaaataaggggcttttgaattaattcagttaatctttataaataaatagaaagaataattaattcatttatcaaacatctgcaataaagtggtatctcataacaaactctttaaacttattcctgtacaactaaaataatccatccatatttatttttattaataaattttctattcattcatttttttttttttgaaagtgaaaagttcattcaacagaaagaaaaaaatgggccaacatggggtga

SEQ ID NO: 7995 - DNA, 500 bp, Cannabis sativa
caagcagtccgagcgaacctcaaacaaggacactcggcgttgaatggcggctgtaataccatctcttatcgctaacagctctgccaccaagggagagcttgcataccgcaccaccgtggctgcggcaaacctcacagcccctgcaccatcacgcaagaccaccccagtggccgccccatctccctgcaaggaaaacccagcatctacattcacaacaaaacatccaccaggaggttgctcccacttctgagtcacccgttcaggcccctcagttttatggaccataccttgttgaaagtcatggatgtatttcccacaccactctaatatatcccccgctctaggaagacaacctccatgaatgaatctattccgaagtgaccacagatgccaagaaactaccacaacatactcaaaagaagaagaagaacaaacattttgaatctcttggaacgtcagcaagacatcattggattgtgctttctgaatcacatcccaca

SEQ ID NO: 7996 - DNA, 654 bp, Cannabis sativa
aaaaaaaaaaaaaaaagtaagaaagaaagatgagatcatgttttcatggtataatcttaaaatttaaagctatggatgagagagagacacacccatgagactatgagagtattaatttaagcttatgtgttgaatcatataaactccattatcattatcatgatattattcaaagagcataatcaaaaaataaacaaattataccctttttaataattagaatgaaaaacttatcacattcaactaaaaaaactaataagtcgccaataaaatttaaataaaaaatgcagaaaaatactaaatttcatatccaaataaaaatgtatatttttttaaaaaaaaaaaaaaaagattattttttttaagtaaaaaagagtattttcaatatgtggtggtggaaataataaatgaaaatatatacacgtggatggatgtatgtatctaatcacaagatcacatggatgagaattgaatagatatatattacttgtacatatatatttcattatttcttcaactacctttctttatagtatctctatttacttcttccatttttagatttatatgttgtggccctatcttaaccattcattctcattcaatttctctatttataaaaatatgaattaagttgtgctcattcatattgat

SEQ ID NO: 7997 - DNA, 1211 bp, Cannabis sativa
aaaccaaatataacgtggccatgtccttcataaatttttaacgacagataaaagattcctcttattgggttctgcgagaggtgcttaaattactcaggtaattagtttttatttatttctatttcaatttatattataataatagcatttatatttatttattttttttgtttaataacttgtataaatatttacttgtataaatattagtttaatattttatatttataagtagagattaacaaattaaatcagtaattaccttatatattaaaatttaaatatttattagtaattattattttttaacttaattttctttttgatcaagaaaagggactgatgctgaccctttatctcatcaatgttggccaagccaagacctacgaggtagatggcagcaccagattcagttcgaatcactcactcgtagactcaattttcttactaaacaaacagtactggtaagaaaatagtttgctaattttctttctcatctttttgaataatctatatcgatgcaaaatctgtgcagtgttaatcgatctcttgtttcatgttttgagaaatatttcatacgtaatgtatttgcaaaagttttcttaaacataaatagtatttcattttcctcactgcctttgaggaggtcaagcaggtacaaatcgagacatacattaatgcaaaagtagcgatatattaatgagcattcctacattatataggtcactcactctctatgattggttaacgatattttgtaaagtatttccttaaatttgataaaactcctatacttaatcataccaataaaagtataatactgagaaaggagctgggcagtgatgctttttaacaactcacttttctcggtgttatacagttaatattgaaattaagtattgagtctttaataatttaagaaactagtttttaaaaaatatcgctaaccaatcgagagagaagatgctgactaacagcaatactcttatttatatattcctcttactaataatgaagagtactattacacaaacaaatgctgatctaaccccaattttactaaaacagaattggtgttatacgacgctcttgatgatgattatcactgttgttgtgccctacgaaagcgggtacggttatggttaggtccatcagtgcaagctggtggacctccccatgtctgcccagtaatctcattatctggctgcgaa

SEQ ID NO: 7998 - DNA, 677 bp, Cannabis sativa
aaatataaaatattaaataacatttctactacaaaagtcgaatactaatataacgatctcgaatccgtatacaaccaatatagcagtacatttcatagaactcatcaacttcaactttcacccaatcctgcactcgaatatatatatatatatatatatatatattgtcagaatattatgcaattgaactctaacttacaaatggaaaatgtagatgcaggaattgaagataattataaatataaaatagtcatttcgctagaaattaatttgcttatatttcagtattacaaacttgtctatgggaaaaagagagatcaacatttattcatcattaaatatatatatatacatttatataacactacttattttcatccattccacatgtacacaaacggtgttgtacacttatatatatatataaagtaagcacaaataaatagtttgcccctaatagtataatatcgttagtatagaacatttcataaataatttttattttaaaaatatataatgcattttgataaataaaaaaaaatatatgactaattttatcatattattttaataattaccacacataattttgagcaaactacaatatttgcatgttttataatagaaagataaaagcatattattacttggtgcagtcagtgttgggagaaacagcg

SEQ ID NO: 7999 - DNA, 890 bp, Cannabis sativa
cttacataaattgaatctacaaccttagataataaaaatatacttcaagatataaaatggttaccctagcttagcttgcatagcagaggccatcattgatgaacggtgggaggccacgccaagaaaggtcgtgggtactagctctttacactctaatgttgtgttggtagaactcctactttagattagttttctgtaagctggttattgatagaatttgcgaaggtgctctctattccaatatcttcgttccttcctagcttgtaggctcccttactagttatctatgtaacttgataagggccttcctagttaggtccgaacattcctgctactgaatcttcggtattgaagaatactcttcagagaacaaggcctcctatgaataatttcctatcactaacttgcttgttgaaccttttattagtagggctctagctttaggttagcttgatctcttctttcttttgcttcctcaagggattctgcccgcaggatgttatttgtatcctgatcataagttgttctcttgtgagatggtggcaccagctctacaggcaacatttcctcatagccatgacctagagtgacttgagtttgcttgatggccatttttttggtagttctgtgcgaccatatgacctttgggatctgggagcaattcaagccagttgccttttgcatcctcaaggtacttcttcagggtgtccttgacggttttgttgatagcttctaccttcccatttgcttatggatgggcaacgacaaagaagcttttgatgatgccatgtttgttgcagaaatcaatgaacatatcaccttcaaactactttccattgtccgacacaatcttttgcagaagttttaatcaacatatgatgttcttgaca

SEQ ID NO: 8000 - DNA, 1728 bp, Cannabis sativa
aaattatggagtgcatcctaggcggcatgcactatacgctacaagaaatgtgattttttttggcacattatttcgccaaaaaaagtagactaaacacgccaataaacttttactagagcattactgtgctggtaaaagttgtctacaaatatcgtaaaagagcttttgtcggcgtaatgcactattgcgcaggcaaaactggcttgtgctggagctattattcgtcggcataaacaacttttgttggcttaatagggcaccgacaaaagttttggctgaatgctttggctcttcattcaacccctttatgtcggtgacttttgccaatgcatttggccaaatgcgccaacaaaagttatatttcttgtagtgatgtcacccaggtatgtagctctaccacttgggtggtatattcttgcttcccaagtagtttttggggtgcagttttttgatatcaaagttgtcttctgcaaccaacgatccgagaccttttgaaagaagatcaatcactagacttaaactaagtgtttcaacaacttaaagattccctccccaagtatacacttgggcggtgtacaaacagagcaaaaatgaagaattatctcaactacacatgtaaccccacgaaacagcccttgcatgtggggtttactcaagagacaagaaaatgctttgtaagaaacaaatgagagaacacaataccatttcgagagcaccgttctgagagtaagctattaccgttaaaattggggttgaacctctataaaaatcttgtgtcaccattattattgttgtatttgctatcatttattatcgttttttcgtcgtttacttacaatgccatatatatttcattttaagttgagactgagcattattgggcctttttacaaattactaatttttttatctacatataaatgtattatatacaattttttggcattcgacaaaagaaaaatacaattttcgagttgtgggtttgggtggaccttagtcataagcctagctcaccttagtcaaaggtcggcctaaacacgtgcctagcagaaaatggacgataattgggtatttttgcagaaaaaatcagatatataagtgcataaaaactcaaaaatatctagtatttatacaataaattttctttattaaaaaaagaagaaaagagaattttttctgatgacaatttatttttgtatatagataatatatttattttaatatttaatttaagtttaattttctttctttataatttgatttaattttttatttttggattaaattatttttttctactttaaattaattaatattttttattgattatgttatccgtattttttaagaagagacatgtgatgtaaagtggaagataatcacccaattaattatcatctaagcctttccgattgcaaaaggacaattgagacttggaacgggcccgagcccggtgaaaacttaaggccaccttgagacacaatgttcttctaggacttggaagccttctcagccttctgagactcaaacgggacaaagccctctaagcttacaagaagaatgtcagatgcctatcgtgaagtggaaattggatatatcccctgacatgtttgcctttctgacataggatcagatattgtcccctatgtcagaccatggtagtgcgcgcaccgctactgcatacacccattttgttcgacaactcctctgaatttgtctggtaagcgt

SEQ ID NO: 8001 - DNA, 644 bp, Cannabis sativa
atattttaacataattattaaacaaatcgtattaagataaagtatacacatatgtatcttaacataacacgaatacaaaccatatattaattataaataaaataactactatccaacaatttttatatgagatttccataaaatttatttaattgattgaccttgagatttgatcgagagcagcttaacaaagagatcatatatgtctcaacttggaggatcataaagaattttaaaaccagttatagctatctatcaaacaaaagaaactagttatagctaaaaaaatgtccagccaataattgctgctagcacgagtacataactaataaattgttcaattatattattctttatgtatatataaaaataatttacaaaaatagctatcggcaattaacatgtaatgtaccgactatagaaataaaaataggggccacaaatattattgggatcactataatataaatattacatatattattgtccaacttttgatacattattgttttcattctctatcgcaatttttataggatatatcattctcatgggtcatcgtatgggtactattaccaaaaggaatcatggctttgtcgactaacttcacatgcacatatatacatcatctgtctatttataca

SEQ ID NO: 8002 - DNA, 894 bp, Cannabis sativa
tctgaattcaagaatcttcgatgaaacttgcagtgtgtagtgtttctcaagggtggaccagatttggcgagctgtgtgacagccaaccttttgtgtcaacaaactttcagacattgatgataagatccacgaaattagcagctggtcttgaacatcccaatcaagaaactcaggataatatgtctttgatgcacgatcttcatcagtcaagaacagcggaggtggagcaacatcctgaataaatttcaagaaataacttccacgaataattgcaagatcttttcgtttccaaagtaagaagttgtgatcgttaagtttaaccaaaagattatgagagaaatacacaggttagaactcatctatcgcacgattgcgatttcttggagaagtagggtatgaatttgctatatttcccaggttcaacggattagcatggttttgagctcctatagtcgccattttagcactcaggggggaattcaagctcttgtaccatattaggattgttaatccttctattcatagctgtaacaccaaagaaaccataatggagaaacaaagaaagaggaagaagaaagagtaaagagaaagagaataaaaagactagaaagagagagaaagaaaacaattgtattgattattttgttcaagtgttcagaatacacaagagggtcatatttatatatacaatagaaacagagagaggaaaggaaataaactagagtaatatactaacaaaaatccaactactctgtaactaccaataacgactttgtaactaactctgaacagaatgtccctaatacccaagaacaatacaaagtaaaaaaagaccaaaacctccaaacagcaattcgccaaagcaaatggaaaactaataaaaacattgcaaaa

SEQ ID NO: 8003 - DNA, 1134 bp, Cannabis sativa
aaacccacttttctctttctttcctcgtagtaataataataagagagaagagtgttttttcatgtgtgcacccaaaatcgttttaggcgttataaacattatattatatatagtcaaagatcctcatctttatccagagtgtcaaaactcttttttcctataatattattaatatttttgtacgttaatcgtgttttgtttggctttttatacgtaatacagagaaacagtacttttttgaaaaagccacaaattattatactcaatttctgccctacctatctatctatatatctgttacattacattacatgttgtaatatatgttgttagcctaataggaccagagaatctattaaaagctaccgtcactaagagtcaactccccaacaaaaccaaaacctaaatccaaacccaaaacaaaatttctcttccagctggccaacattttttttttaaaaaaaaaaccccaagtacgactgagcttctatagaaatgaatttatcgtctagggtttgtaggagactgtttatatacatatgtctataatcttttccactaagaaaaaatgtttccagttcgatcatcattcgtcggaagacagtagtattatttgccgtattaattgattctggtcaacttcgcaggcgactgagtagctagttcgtttatcaggtcagtaatttttattttttgtttttttggtaattgttgtgggtttatggcggtggggtgggatttcattgggaaatccatggcggtttaattctatatgtatttatcattatagtttctcataaatattacatagtatatagaggcaatcacataatgagttttttataataagggatctaatcaattaaatgattcaagttgtaaaacccttctcaccctaaaaaaataaataaatcattttctcgatagaatgaatgtgagtagggtggggttggagaagactttgatacatgttattaattacacagtggaatacagataataattatctcattaaaagcataacatatcattttattagtcctttcttgtactctctttaaatttataagttctctatcatcaatattttttaagatccataaaattaactatagttctactctaactagaaaa

SEQ ID NO: 8004 - DNA, 865 bp, Cannabis sativa
atagcaaaacatatatccaatcttagatttaaacacaaacaacaaaccacaccacaagacataacaatgggaattcatcatcaacttcttcatgctactcaaattattcgacggcgatcatcagcttcttcgaaacaccgatcatttgtgaccgttgatgatcatggtcatcatcatcagggggttccaaaaggacattttgcagtgtatgttggtaaagagagtgaagtaatgaagaataagaggtttgtggtaccaatctcatatttgaagcatcctttgttccaagatttgttgattaaagctgctcaagagtttggttttgatcatcatccaaagggtcccattactatcccttgtgctgaacaagattttattaatcttatttcttctttatttacctcaatacctaactacaattaataattaataattagatattgtacgactctcatcatataggctgtaaatatataattattatttcttatatatttatttaactacttcgatcttcatcattttgtactataattaccaactaacaaaattagatataaatttattttatatatatgtgcagagcattaatttattcacaataattattcaaccaaaaaaaaatgtaatcaaaatatatcattgccgcaaaaaaggaaaagttacaatattatagtagctagcctgtagccatataattataattgatatttacataaaaaaaaaaaatataatggatataaatgcataaattggtaaatctatataatataatagagtactttttttcgtttaacttattttgtcttatatgaatcactgtactgacttaaaaaagatggagaataatagctcttttttttat

SEQ ID NO: 8005 - DNA, 544 bp, Cannabis sativa
tagtgttcttttggcccacggaaagctcaaaaggaatagagctagctagccaaccccagcaaaaaaattatatgaatttttatatataattcaagtgggaaataaaattattataaacactcctttttagggttaaaatgtttcaatttttaatcttttgataagatccttgccccctccacgttgacatctcacttttccaacctttctttctttatcatctcagaaactaacttttcttttctttgtttctcttcatgaattctcttttactttcttatatatatataaagaaaagagaaataaaaaagaaaaagagaaaaggagaaatatttagtaaaatatgtatagacacaacttttaattattagtacgttgaccagttttggtgtgaaatatttcaggaagagaagagagaagaatagtaggtctctcatgggagacaaacgtttctttctggaaacaaaacacgttgaagaaagatttgggtttcaaaagagagcactgtagtctcaacatgcattcttttttctttctttctata

SEQ ID NO: 8006 - DNA, 949 bp, Cannabis sativa
ttttaacgaaatataacttattttggtacattttaatttgaaatcgtacacatttaatgaataaactcaaattttattaatataacaaaattgctattaaatatatatgaaattaagtgaagattgaatttgatcaaattttagtccatataccaaatataattttattttataaacaactatttgatgagtaatatattaaagaataattaacatgttattttaactaaatgagagtaatctatattatttatgtaacatgtatgtagatttattaatttatattatttttttatttttaaaatcctaaattaacatttatttttgtgatattacatatttaatgaataaataagaaatgtcagtaaattatttttattatttttaattaagaaataatatattttctatcattatatgtaattttattttatatatttaaattataaataattaaaatagataaataagtaaaaaaaaaaaaaaaaacctaagcaaatgtgttgcttttaacaaatattattatatgcatcaactaataattatagattagaaagtgtaacgctcctattttacctgtgtagtcttatgtttatatagtataaacgagtatgtcactttaagagaaaatttttaaggaagtcatttatcctaagattgttctaggtcaatcacacaatttggaatttttaagtgatgtgctaccaaaaagaaaatgcatcttgtcgatataagcagtactgatcaatccattaatttaagcccattcaattgagtagttccatacttatatagccttagaatcatcacactttacctttcctaggcgatgtgagattctaggttcgacatcctcctcgaccacacttccggctggaccaatgctctttgataccattggtaatacccccacttcacctatgtagtcacatacctacacaatatatac

SEQ ID NO: 8007 - DNA, 755 bp, Cannabis sativa
ttttagaaacctttttttgtcacagcagtgtgtggtagtaactcgatggaaactcgatggaaactcgaaaaggtttatgggattctcttgctggttttgggaagatcatcgagccttggatcatcttgggtgatttcaactcaatgtttagctttcaagatagacatgggggtaggccaattcaaaataaagacataatagatgcttaaaattggctagcgatgggtcaagttgaggagcttaaatgctcgggttctttttttacatggacaaacaaacatgaggtgggagataggatattttccaaactagatagagttttcatcaatgatatctggatggaggattttcctactaccaaagcttgctttaaatgggaggtgatatctgatcattgtttgtgtttaattcgccattttgaacacaacaacacagggataaaaccttttagatatgggaaccgttggccttcttacccaggctatgaaaaggctgtcatgggctgctggagtaaactagctactggcttcggtcttgatggtctcgtgcagtaatttttcagaataaaacataccctcaaggccttttgtaaaatctctgttgcagatgttaggagtacaacatggctacagcaaagatactgtattagtcgagaaaaggttgttaataacccgaatgatatgcttatccaagttgctatttcggagcacgagaagactttcatcagatcggaagagcggttcagcaggaatgcc

SEQ ID NO: 8008 - DNA, 1000 bp, Cannabis sativa
ttaaggttgttccttatctccaactcccgagccaagatctagtgccagcaggcaaactttagataccatgcagctgctcttgtaattttgaaatgcaggtatccagttttctgaactgtttccggtccacttggacagagccaggcgagaagctcccactttcttaaaaaatctagcaggggcccaatcatgtgagactaaagcccacgcatgttccacaattaaagagctacgggggtccctggtccaccaggcttcaaaccgaaaaggtctcctgttcctagcctccaagaaagctgagttaatgaatagaggccggtggtagaattacaggtggcacgagattgaactaccaccctaggaaataatcttaaccaatcatcattaataagagctttatccagggctgatttgatgtgcttcttgccctctctatgattgtccctagtcatgcaatcacctttaatgggcaagtccaccagagcatgaccattgataagattcgagatgaatgggataaactggtccttcccctggacccagctctctccgaattgctcagcacaaagtccacatctccaattatcagccaaggcctgccaaacttacgacctaactccatcagattagaccgaaaaagctttttttttcatggaaatagggaggctcatacacacaagatagaagccaagggcttctaagagggtcagagtaaaaaagcccagaaatttgatttttcgaaacaataatattttcaaacacaaagccctctctccaagccaaaattaatccccccgcaatccccatagctgaaaaagtaatattatgataaaagggagagacttaagggaacgtaccagacttgtagcatccactttaattcggtaatgaaaatgaaattaagatcgcacgaccaaatcagagctttaacttccagaacagtagaggtctgccgcaaccctctacagttccaagaaaccccttgttggaaattatttta

SEQ ID NO: 8009 - DNA, 731 bp, Cannabis sativa
tatattaaatggattattctcaacattcccctatatctgtttcatagccttccaacacttccttcttttgagttgttcttccattgttgggtagacatattttcaaagataccgttttcctcctaagttatcatgtgcaaattgcaatacaacaaaatgtaatctacatgtttaagggaaaaatgtttctttgagaaaattggtaactaatcattgttgtgtcctttccatactaaaaaaaacactcaaaatttattatatcttgttttaaggtattttattcctttgtaggctggtaaacattatcaccttgaaaattaaagggaatcttatgagtataagttactttatcatattttatgtgttgacaaaagtagtaactagttaccatttcaaaacaaacaaactgataactaattaatatgtatcatgtttttgagattttcaaaaactagtaaccaatttccattggaaagtggaagcttaaaaaattggtaactagttagctattgtatcatgtttttttttttaaatattgacttttgacataccactgaaccagtaactagttattactatgaaatttaaaaatgaattatgttgtattttcttgatattagcaataaatactaaatcaacctcttaaatactctaaaaactaagaagaagaaactcatataaaaaaaaaaaaaaagcaactacagtgtggatcattctaatgatttaatatt

SEQ ID NO: 8010 - DNA, 1497 bp, Cannabis sativa
tctctctctctctctctctctctctctctcttaccactttgcaaaaaaaacctacaaatgcccaaactgtcgttgggatactcggccaaccgtcgtgaaggacgtccgcccaaccttttctagtcaacccaaccgccgcctctcgccgtgaaggacgtctgcccaacctccctctcattgtggattaatggataagtgttttgtaaaagattttgtaaactttcttgccccatatatagtatattttcgttagatctatgtagttgttaatttttgtttttttttttttttgttttgatataaattttgttgaaatcgcaagatctaattgtttggagtatttagtgtgttcatatttttctcgatggattctcgatacgttctcgataggttcttaacaaggatgtcccaaggtcaggatagacgtttctcgatgagttatcgatacgttctcgaaagtttcttgatgcgaatatcccaaggttaggggagacctttctcgatggctttttgataggttctcaattatttgtcaaaaatggcgaatgattttgtatttctaactattcttgacatgttatctgtgttcttaattgtttatcaatagttttttgatggtgtgtatagttgtgcttttaagcttcctacgtgttctcgactatttctcaatggttgactgattattattttcaacgattattaattacttttctgcaggttctcgattggttctgtattattttttttctttacatcttgtacatcccacttgtaaataatgaaccaaatatagcacaatccttttttgtgccaaattttaaatctttcataaatgatggtcttggaaagctaattttaagaaaattgttaaaatataactctacactattttagcaactccacatgttaatgatatggacttatcgtggcttggacattggactcttttataatatggactctcttattcaggtacagtttattattgatttccccttggtactctttctttactgcggaaggttttaattaacgtgacaaagatttatttatttatttttttcttagaaaaaagaaaagcaacacaacctatgcaacctttcttatatgaactctcgtaccagttggaactgactataccctaatttcaacggatacaagcagctttttagaaaaacacacatgaatgaagattatattagtataaatatagatataatatgaatatacaagaaaacaattaaattgaattgattccatttcaaaaaagaagaagaattgattccaaagttctgtatctagtgcttcgttatatttactcgaaaggtgacatatataatatagtatattcttaagccaataaatggaatgtacatcaattagtatgaatgctaagtatagccataaatttgacccaagtggtggtagttcaagacaagcagagtagcagacagcacagcacacaaaatagatgatatctttgagagaggcagtcag

SEQ ID NO: 8011 - DNA, 1030 bp, Cannabis sativa
ctatgtaatctcaaatctgtcataaccaatatgaccaagttgcaagtgtcatagatatatttattgatctttatcaattttttgctttttatggttttttggttcaacaactttaaaaaattcgttattaagcgcaatttgttcatagaatataaagtgcattttttttttataattactattattagtttttaatatttaaataattagattaataaaaataaaaatataatatttatatttcaaatttaaaaatgttatagtctaaattaatataaaaatttttaacataaaataaatatttatctaaaaaatagaataattctaatcgagtagctcatcaaattgtaagagcttctcgtttaaatgatgattatattttttttgagctccaatgtcttaattgatgctcctgtcattgttgaaattaagttagtttagttggatgaaatttttcattagaaaaatagaaaataagtaataattaatatagtgttgtaaataaattttaaattttaactttaataatatagaaatacaataaaagttattaattataaactctatattttcaattagatactattaaatttatattttaaatttaaaataatttacctaataaatataatttatgttgtatattataaatcaatttattcggattaatcttagcagtttagaataatttttagtccattcaatatatctactgaatgatttgaattttcattaagttatttgagattgtattttttattcatttatgatttattttaaacatcccttaaagttttttacatactatccttgggataattaatagaatttgttttatttagttttttttccctgatattttgcttaacattgcatatcatttattttaaaaaaaaataatttgatgaaaggattgagtaaatgaattaacttgatcgttctcattaagagaaacccatctcatcctcctccattatcctctacaaaattctactctaccatatcattgttgtccactcaagctttgtaa

SEQ ID NO: 8012 - DNA, 772 bp, Cannabis sativa
acagctggctttagaatttttccttccatagtgccatatcaaatcctgacaaatcatgatgttatgcgcaataaacctgccagagacgaatccaccttggttttgcgcaatcagatctgaaagaatagctttcaatcttgaacatatgagcttagtagcaattttgtaaatgacattacagcatgcaataggtctaaaatcactaactgtattagggcacttacatttaggaataaatgttaacacagtagtattaatttctttgaggatctgacctgagtgcaaaaaggacaacactgctttgctaatatcatctcctattaagtctcaattgtcttgaaaaaaagcagctggtgtagccatctgggcctggcactttgattcctgggattgcaaataaagcttttttgacatcatctttggaaaattctttcaataacaactcagattgagtttcattgacaagaggtcccaaactcattatgcccttgttgaccttctttcttcgttccattttagagccaagtaattgttgataaatgagagaaaggctgctaaaatttcttctgctttgtcagttcgaacaccttgttggtcttcaatagaatggatactattggaccttctcctctccttgatactagcatggaaaatggctgtgttgtcatctccatttttagtccaagcaatcttggatttttgatgcaagaatgaattgagacccttcaaaagttacccatatttgagtcgaccagcagcttccatagctata

SEQ ID NO: 8013 - DNA, 582 bp, Cannabis sativa
tgtttgccttgaatccccatcgtgaccacctcgcttttcatcttattttctttgtttgactctttctcttcgttaatgaaattcatatttcaatttttcttttacagatgaggtaggttcgcgggtggttcgaccgtaggtgggttcgaggttgtggttttgctagcggttagtgattattatcggcagtaggtgatttaggagtggatgggtagcggtggaggctcgcaagggtgggttttcagggttgtggatttgtgttggttagtgatttacacattggatttgtattattgcattttttttcttttggtgtttccgacggtataaaactgtcagcaatagtttccactatagctgatggtttaaaaccatcggaaaatttcttggctgattgttttgcatgtcacctattttacccattttgcaatgattgaatatgccacagtttcaaagatcgacgccaatacattaaccaactgtttaaaaatatcaagaaaatttcattttttagtaatgcctcccaatcatcattccgaagcaacaaaagtctaccacttttactaatataatcgacatgaa

SEQ ID NO: 8014 - DNA, 866 bp, Cannabis sativa
tatcccacctcgaaaaaccagtcttcacagcccctacagcttcaacagcaacagcagcagcagcagcagcagcagcggcatcagcaaaaccagcatatttcgcatgcagctcgccagcttgaatctgagatggggggtgaagatagcccttcaactgctgatagtcgtgtttcacgaccaagtatgagcatttatggacagaattttactatgcctttgcatgcgccaaactttgctttaatggggcctgcatctatgggcaatgcaagtggcccaaatggtgctggtggcagtaatggggaaaagaagcagcagcaacagggatcgaagagtgtggtagagccgcctcatgcttttgccatgtcttttgctcccatcaatggtgctgcaaatgctcctggcattgacatttcttccattgcacagcagcaagctattttaacagatgttagacaaggatatcagtacatggcagttgcacaagcttcagcacaacagaagaagaattaccgtggttccgaagatggaaaaaatggcggggactctaatttggaagaagaaagaaagaacatggcagggaagggttcatcaacgttggggcagtctatagctttttcgaggccagatttgtccgatgtatctggttcgacaatgccaggtagttctgtagttgatagctctgcgagaaatatcaaccttggctctactcaacatcgacctggttccgttatgactgccacatctaatgcccagcagcaacttcatcggactcatcaacagcagcagttgcagcagcaacaacaacagcagatgcttcagctccagaagcaccaccaccatcagcaacagcaacaacagcagcagca

SEQ ID NO: 8015 - DNA, 528 bp, Cannabis sativa
aaccgcgaaaacttctgatccttagtttaagtgttgctttttttttgcatggctctctcttttttgtatacgtgcgtacgtattatatgtattatttttatgtatatctttcttatatatagtctttgttttgtaatctttgctaggttttaatctttaaatgaatatttatttattactttggtacccctctctatgcttcatgtttattccatataagattggagaaattatggctctattaagtgcatataaaaaatggatacggtgctttggaaagtggaaagacatatatgctcctcaagccgcttctcgcaatttgggtacacgcatttgctcgacacgtgtcccgattttaatgccaaagtggctttttgtttccgttctcgtggcatccccattaattgcatgcaagcttctgcgtatataaataagtttgtagtttagctattttcttctaaaaaatcctttcgatactttttctaagtaagcattctcttcttgttcatcctttttgcactatggctt

SEQ ID NO: 8016 - DNA, 1421 bp, Cannabis sativa
caacgccccaaaattcaaggctccaacaattctggtttttggagaaaactttggcacctgaaaatcccacctaaggttattaattttttatggcgtgcaatcactggatgtcaccctacatgtcttaatcttgttactaaacatgtccagatttcagtcaagtgccctgtctgcaaagttcatccggaatccaccactcacgcattgctgcattgtagctttgctaaagcctgctggaatgtttcagtgcccctgtaagcactgatatttcagcttcttttggcacctgggtcgatgctcttttgcacattggtgatgctgatatggtttgtcgtgctactgtactttgttgggcggtgtggaaagctcgcaaccaaaccgtttgggacaaacgacctctactgtgaatggtgttattgtttctgcttcaactacttttgatcattggaagaaatctcaggacaaatcaactcttttatcattgttaatagaaataatgaggaagggtctaagcagtggtaaaaccagatttaaatcacatcaaaataaatgttgatgcggctctttttcattaagaagatttcgatggctatgcgttggttgcaagggatagctcagcaaaactcatagaagctaaaacatgttttcaaggtggtcattatactgctgaagttgtggaggctttgggctttaaagaggctcttagttggattaagaatcacaactagaataatgtacaaatggaaactgatagcttgctctcgtttcaggccatccgaagtaaccaaactttctcctcaaattttggcttacttatttaggatttccaattattattatcttctttacaatctgtgcatttacgttttgttagacgatcagcaaattgtgtcgctcatgctattgctaggcactcacgattttttttttctagttgtagcatttttaagcataatgcgtctgctgatttaaaagcccttttgtattcagaatgataatatttcaatgaagtttagatttcataaaaaaaaaaaaaagtccataaaatgcttctaactaaattatttttgtttcaaaaaaaataaatataaaaatcaatgtacaatcatcccacttgccaccaaccctaccaaaaaatgggcaatataggtgaagattttaacaaatgattctcttcgacacactagacgctctctgggaccatcctcataaaggatagtttgacatttgatttatttttgcaattttaacaacctttattttttttttgtcattctcactatttttgaaaggtttgtctttctctcttctttattattattatttttttgaaagtatgtctttttcttttcatcagttaaaaagttatattattaattaaaatttttaagccactgtattgttgaacaaattgaccttta

SEQ ID NO: 8017 - DNA, 655 bp, Cannabis sativa
cctgtgattatccatgtacttaacatttttttcccttttctagtctttaacttgttcttaagtgtcaatatctttttcttaattctgtttgaaatttaaatctgtacttatttttgttcattcggttcttatctgggctattaagcaatatcatttttagtatgaaagagaatattgtcttctaatgattatttttaatttggagtctttttccaccagtgtatatgtacatggattattttaatttgacatggaaaacttacctaacagatctaaattatcacttgtcagtcatcaaaataacttcacaacatttgtgccttaatatagttgatactaatttaaaaaggagaatgtgccttaatataattttactgtgtaaattttcaaggatagttttgtctcacgtgtcccgtaaagataacacttcggcccatggtttagctaaacatgtccttaggctagacaatgagttatgctggtttgaagaggttccagcaccgattgttgaagtcttctcgagaatgtcctaatgtgagccagatcacgtttttttttttaaaaaaaggagaattttaagggcaactttatcccaaaaagcacaagagcatttgcacataactaaaataattctcatttcgttatcaatcatctc

SEQ ID NO: 8018 - DNA, 525 bp, Cannabis sativa
atagcgcaagactctacttcaagcggagagtcaacctgctccttactagcaaatgccttaacaacattctctaaactatcaagaacaagcacctcaaagaaggcagcgttgtctctaaaggccgcatcaacaaaaatgttcaccagattaccagctcttagctccaccagagaaggaaggccacagggtaagggattggaggagcatccctgaccatatgatcacaagaggccaaagagtgtaagacctttatgataatgtcatcagggaaagaatgcacatcttcatgaaaatatttattacgggagttccacaacgtaaaacaaagcaaggcagcaaaatgggtaaagtgatccaaataaacactatcaccaaaaggaggagaaaaaatctactccacaatctcttagggaattaaagtggaggagatcgctacgaatgccccatgagcttctaaactagcaaaatcgagctacaggatactgaaaaaacaggtgttctagagagtccacatcattatcacaa

SEQ ID NO: 8019 - DNA, 1705 bp, Cannabis sativa
ttttattattatactaaaaaaaattgtaacagaagaaaaaattagcacataattaattatatattcttggtttcatttaaaaaagaaatataagattagagaaatgttaaaaggtaccagtggtgtctagcacttttctatgtcattatcgttattggttcaattaagtatcaggtctcataataaattttagttttagtgagtatcgctagccaatcgcaaaaggatatatctaaaggtggtagacaccattaatgtccaataataatgcttataaaattaataatttctcgacaagtaagaaacacgttgttggtcaattcgaataactatcatcatgcatcaccacgagattagatttctctcttgatcgatcggcattaaaatttgcaacgattgacacttgtccaactttgtgtaattaataggggatcgtgaattaatggggtttcttaatctggtgtgaggaattgtatgtatatatatttattaaacataccatttggaattttgagctgcaaattaaactaagcagtaaatgattgagattttgaaatagaagagggataagtatatcaatacagtaataaaaagatgcaggctgtgaaggaaaagctaactgacatgaaggaaatgcgcaaggccaaagctgaggctaaggctgaagagaaggtaattataactactatacgatatgtaggaactaatatattattaatctatatacatgcttctaattcaatatatatataatagaaattagcataatacatgtatagagatttttaaaatcaaaatagaaatttagtttacttactaatatgcagtggaaataatgactctaccttttaaatttccctaatcttttgtttgatgaaagctagatattgtcaggcatccaaccgttagaacactaacgaagtcttacaaatcattctctaaaataacggccttagttatttgtgtggacaaatctcaatacattgttagaatttaggatataaggtgatgggtttcatctcaaaactaattggcaatgggaggagtagtccattcatcttatatatcacaatttatctccacacattagctccacccattagcaatgtgagactaactcttaatagacatgagaataaaaagcaaagagaaaaagagaggataagagagtggctagcttagggtagaatttctttgtgaaatattaccttggtcacaaaaacattggcgtttggtaagatgaaatatttaaaataatttgattaattgcgaaataataacacaaaatatgtttagtttgaaaattaatgactaccttttgttatgtaaaaaatatctaataaaattatattatttaattgaaaatagaaatgtatgcaataaattattgttaaaaaattatataaaaaatattaatatattaaattcatggtattattatatgatgaaagaatgtttggaaactatctttttttgaaaagatttaagattacccataagaagttaattttacttccatagtaacaaaatttttatatgtaaaatagagaaatatctataccaaacagagaatgtaaaagattacttaccaatcctattaaaatctatacgttctcttcatacaccaccacttagtacatataaacaaatactaggtcataaaatatgtttagttataacccattttgtttttaattatttttat

SEQ ID NO: 8020 - DNA, 984 bp, Cannabis sativa
ctgctctctctcgtcaaaatatatcactgataatcctctctttcaacctcttggtcctgtcaaaaagccattattagttgatcacgagtcaaattttgacgactcagtcaattctcataagaccatggctaaaaataggacgttgaaagagttggtcgtgccaaatcttgatcaacaactactgtgcatccattatccacctttcgatgtcaattttgaactaaaatcaggcctcattcacttgttgtcgtctttccatgggttgcctggtgaagatcctaacaagcatttaaaggagtttcatattgtctgctctagtataaaatctctttcggtgactgaagaacaagtcaagttgcgggctttttctttctccttgaaggatgcaactaaagagtggttgtactattttctacctggtactattgagaaatggaatggcatgaagaatgtattcttggagcattactttccagtctttaaagttggaagcatcagaaaaaaaaaatttgtagaatcaagcaggttgcaggagagtcattgtatgaatattgggaacgattcaagcggttatgtgctagttgccctcatcaccaaataagtgaacaactccttattcaataattctatgaaggcttgttaccattgtatttttcaaaatagtacaaataggtatctgaactgatttttagtcaaaaaataaaacttaataataatccgacatagaggtgttatgaaaaaattgattgaattttctgcatttgttcgtgttagaattgtttttaagttgattatattaaagaaattgtcaaaaattaaggttagggtcgtatttgtatcatttttaaaaatataaggtctattttctcatttaacaaaattaaaggtccaatctataacttttgcaaaacacagagtagaaaataatattacaataaacattaaaatatatgtcatatgtagatatatatatttaattaaaaa

SEQ ID NO: 8021 - DNA, 940 bp, Cannabis sativa
gtagctaggtgagtttagacatcacaagtcataacactcattcaccagtacgaccatctctaataattaatgtaaaatttgtgcattacttaactcaaaaaataagttaatgttatatttggtttaaatttaaaaaaataagttaatgttatatttggtctaaattttattaatatactctaatgcacttataaaaaaaaattattttaataaaaagttgtgaaaaaagtaacaaaaatattaaattttcattaaaagtatataaaaattattaatatttaattgataaaaatattttattattttatttatatattttgctgttgtatattaatttctatatatagtctatttgatttatttatttaaattagaatatttagtgtctaacttttctagtttgggaaagtaagacaaatatgaaaaaaatttaatgataaattcaaatcttctagagctatttctttctagtcaagtttcatatattattctgatcttatattgatattttaagtgatttaatcagatattgaaagctgatattcaaaaagaaagtttttttttctataaagaaaaatttatacttacggctcacgattctgtaggtacaaataagaaatttttgggcagattaaaaatttattttagaaatgtttcctatggattgtgtacatgtctaatccatgtatgagttgtccaaaatgagcatatcatctataaatacttcatattggttgttaggttttttatttattttatctctttatatttcattcatattttgtaagaaagagtgtctttattttgtagaggagagtgatttcaactctagctctatgtttatgtctttatattgtcttgatcaagtctgtaactaggtgtcaactacggacaagaatatcacgtgttgaaagattattagtctaagtcataattttaa

SEQ ID NO: 8022 - DNA, 949 bp, Cannabis sativa
tttgagtttttcctgatgctttaattatataaatgcttcagtgaccgttttctgcccgataaagcaattgacttgatcgatgaagctggttctcgggttcgacttcgtcatgcacaggtaattatattattttcttctacttcacttacttgaatttacgggaaactttcaatctattccagatatgatggtttgtgtcatgtcattacagctacctgaggaagcacgcgagcttgagaaagaactgagacagatcacaaaggagaagaatgaagctgttcgtagccaagattttgaaaaggtaaagcttttctgtttggtttcacggtgatgttcttattttcatgattaaaacttgggaactatttttttcataatgtaaatattggaaactttcaacttttgtatgctgataaacaacaaatagaatgtcaaagaaccttcctaggcatgtcgcaattttcagtgaagttttttagtctatttcttttggcatttacaaggacgatcatgccctcattcagtaggctgaccatgcttattactgaagtagcgatgattattactgctaaagtaggctgaccatgcttaaaatttcacaggctggggagttgcgtgaccgagaaatggacctgaaggcacaaatttcagctgttgttgacaagggcaaagaaatgagcaaggcagagagtgaggcaggagatgtgggtcctattgtcaccgaagtggatatcgaacatattgtctcctcttggactggtattcctgttgagaaggtgtcaactgatgaatccgaccgccttcttaagatggaagagacgcttcacaagcgggtcattggacaggatgaggcagttaaggctatcagccgtgctattcgccgagcccgtgttggattgaaaaaccccaaccgtccaattgctagcttcatcttttctggtccaactgg

SEQ ID NO: 8023 - DNA, 1168 bp, Cannabis sativa
aaaaattgatgaagaaagaatatataaaaagaataatgtgaagaaaaagatagataaattaatatataaaagaaaattaatagagtcaaagcaaaaaataatataagagtacaaattttctatttaaaaaaaacatacaacacttatttgaatttttacattatatttttcttgtaaataaaattttaatacaatccaccaaacatgtccttttcagtataaattcatccgtcctacaattactttgtttgctttctataaaaggctaaagcactcgataactccataacaattaacaactctcaccaaatatggagaatctaaagccaaacccagcaaactcttcccctctaactccactcggctacctagaaagggcagccctcgtctacggcgactgcccttcggtattgtacaaccgaaccacttatacgtggtcggagaccaactcacgttgtctccgggtggcttcatccataataaaatggctgggagtgaagcctggtcaagtcgtatcagtcatctctcccaatgttccagccatgtacgagctgcaatttgcagttcccatggctggcgctgttcttagcaacatcaacacccgtctcgatgctcgcatcgtctcggtcatgctcctccattcggaatccaagctcgtgttcgttgacgaactctctgtggatctaatccttgatgccatctctagattcccactaaacactcaaatccctcgactcgtcctaatccgtgatcatggaatggtgtctagtacttcttcatcttcaaaccactttgacaagtttttttgcgagtatgaggagctagtcgcgagaggagatcctgaatttcagtggttaaagcctacgaacgagtgggatcccatggttctaaactacacatctggaaccacctcggctccgaagggagttgtacagagccacagaactattttcaccgtcacacttgactcacttctcgactggagtgtccccaaacaggcggtgttcttatggacactgcctatgtttcatgcaaatggttggtgttacacatgggggacagcagccgtgggtgcaaccaacgtatgtctccgaaaattcgacggccctataatcttcgacctcatccgacggcacggggtgactcacatgtgtggagcaccggtggt

SEQ ID NO: 8024 - DNA, 613 bp, Cannabis sativa
gtagcttgttcaagcacaaaatctgaatatcgtgccattacgttagctacaatagagttgatctagttacaatccttgttcacataattgggtttatcctgctcctcttctccaattctcttgtgtgacaatctcggagccacatgtcttgcctcgaatcctgtcttcctgccatgactaagcatattgaagtcgatcttcatttcatcagagatcgtgctatggaagatcaacttgatattaggcatgtctcagctaaaaactagataacagatattctaacaaaacctcttcccataacacagtttgagcattttcgatccaagttaacactgacaagccctagtgaaacttgagggggtgttaggtcttgctctgtcttgtcttagagttagagagtcagttaaattagttgtttcatgttttgactaatcttttgtaaaagctattatgtcaagttctaactaactctagtgttataatctcttcctataaatacaagtctctcagctcagttgagattgagcttaatttatttatttttttgaattttttttttgcaaacatcaacaaaagttattagagagagcttagactagttttccaagcattt

SEQ ID NO: 8025 - DNA, 891 bp, Cannabis sativa
ttaatatatttatttttgatgaaatctcccatttattttgattacattatccatggcatctaccttggagagtttgtaatatgacctaacatgtctaaagctacacatggttgatcagcaggtacctgtaaagacaaaacaaaatcaattgaattcaaaccaagatgatgaaggctcacaccccatcataacattctcaattttttcacaataaggaagaaattttttacaagttaagatctccatgcccatgattcatattcaatatttatccttatgacacaacatgaattgcagaggttaagatactgacattaagtaattttggacactgagtactttcataattaatgcctgagaatgagatatgaacttggataggcagatctcatcacctcattatctctctctctctctcacatgtaattgtcactgatacttgttattataccaatgcatgcaatagccatgaatgagtgttatgggctatacccaatagcccataggccactccactcctataaagattgagtgtgtggctcttacacacagataaatattatcatcatcattagcatgcttggtcaatgaccattgttcataaacatatgtgccaaaattgtcttgaagaggaacaataattgaaaaaggtgacataattttttttcacaattttaaactctaccctgaaatagtactttattgttactactaactgtgttttttttttcttttttctcaaggttctactaactgtgtttacttgtttgtttgtttgcttgcttatagagcctagttgttatgtactatgtagtggtcctatataaaatatgtttgttgtaggaaattacattttaagatagcaggtgatcaattaaactatctactatt

SEQ ID NO: 8026 - DNA, 714 bp, Cannabis sativa
gttgtcacatataatatatagtacactcatgccacgttcattaacttttggccccacattatgaatactatcatacatagaacaattagtatttttgtctaaactttttatagtatagggtttgtaaataataattttttgaaatataattttcataataatataattcttccatcacattttatcgtaaaatgaataaattagtaaataataatattaacaaatgaattcaaattaaaatacattactataaaatttatattttaaaaagtaatattaacgagttatatactataaagagtacaatttataattgtgtaaaaaattgaaaataaaaatgctaattattttattaaatataaatatatatactatatatagcatggtacaatatatatgcataattctcttattatgacatactacatgactaatgactaagtaatcattagcctataattaaaagaaatagtacacattcatataattaaatttatttattattaaaatcatttttttagaagacgaggaaaagttagaactgcacacattatcttaaaattaaaatttattaatcaataatgttggtaaataaaaatatatgcttctttcaatatatatatgcagcagccaaaatttattattaaaaataaacaaaattttgctgattaatagctacacagtaacgcccacatagcaaacatattaattggt

SEQ ID NO: 8027 - DNA, 641 bp, Cannabis sativa
cattacatacatatctttttaaattatttagataaaaaaatttatgtaagggaataaatacataccaagaaacacgcccatattgattttgttcgataaaggtttgtactttatacaagaatcttttagataaaaaaaaaatccttatggagtaagtttacaataaatttttaattaattatctgtttctgaagaaaattttttaattaatttttttttaataatcctatatgttataacatatagttatttaagaatactgtaaatttttaaaattttttaaataatttacaataccgaaaataaaatttacatattctattatacgcgggattgttttttcttaaatatatagtaagtaactgtttaaattttatttttaatattataaactatttagaatttttcgaaaatttataagtgattttaaataaaaaaaatctatcagaaaaactcaaggttcactaaagaaatttccaaatttttatagaaaattgctaaaaggctaacactttttagtattatattactattagtataattaagtattgaatctagtataacttaaaaaaaataaaaaaaaaaaaatttaaaagatatatttccccaatcgtacataataatcatgctcatctataaga

SEQ ID NO: 8028 - DNA, 1761 bp, Cannabis sativa
agattgggtagaggaacattgcagaagtacttttactgccgagacactaaaaaatttttggttttatatattatttatgaattgtgttattattaatatgagtagcctttattttaaccttttttttttcaacttttacggaagtttaagtgttttagttacagtatcaaatttggaagtattacaattttttttttttttaataatttacaggaaaacgaagtacttaatattttggtttatcaagtgtgttatatttttagggataaattaaaaattatctcttttttggtattctttaatcaaaaatatacttatattatattttattaaaatataactacttttttttgagtgggttgtccaatatactctcacctctaagtaacgtgggtatttaatttagtgtcctcatgtttttattgttgtaaattatctagaattttttaaaaatttatagagatactattgtaagtgcaatgaacattgttaataaaaaaaataaaaaaaaaatattttgacatgtatttttgaatgcgagattaaaaaaatattgtaataggaaattataattaacattcttttatgaatatatacaattttttatttttgaaatttgtaaagagtttttgcatatttgataataaatattagtatattattttcaattaaaataatataatttttcattatatattaaattattattatttgaaatttacacggtaattattttttttttttttataaaataaagtttctaattaaatttgacaaattttatatatcctactatatattaagacgggatatacgttaaaaaaatgagtaatttgcggttagacgatttgagcatttgggtttgtacaatcaagtccaaattttaagggtaaaaccctgagaatttcaataccattttggttttcactttttcattaacttttgatttgttaagtataaatgtagactgtcattgtgtacacaattgtacattaattatttaaatatttcaaaaaataattaaaaaaataaaaaattattaaaatttgaaaaataattaatttttcttttgttttttgttttttctttcttttttcttctttcctttctttttctttttttcttcttcatctcacaccctctaaaactccctctctctctaaccctaaacgaactctctttcctctccctcaaatctatcctcgatcaacaatcgatcggtgaagctttcttcaactggaacgcagatgacccaacaccttgctactagtttggcatttcctctgattgggcaaagttttctcaaactgatactcacctggaacaaaatctctggtaaaattccgtcggggatttggtgaagaatggaagatttatccaactcgacctctcttcgaacaaggtaataagtctgatcccaaaagatataggcgagatcatgtcatttacggttactctgaatctctctttcaatcatttatctggaaagctcccaaaaacattaggcgaatttcctgtaatggtgagttttgatcttcatacaataatttaaggggcaaaatacctcaaaaggggtcgtttttgaaccaaggtccgagagggaaagatggggggtgggttcagggtttttgaggttttggggggaccgaaggtccacttgaggtgagaggggaggaccggagcaaggtgctcctggtctatcgccgacgcctcacaaggagagagaatatgtttctgttaacgcagattttccttaactaa

SEQ ID NO: 8029 - DNA, 961 bp, Cannabis sativa
atattattggattataatgtcccacatgaaacaaatataaaaatattgtattagtaaaagtatgaggtactccatttgttataaatagattttaatagagaaatgttaaaaagtaacagtggtgtctaacacttttttacatgttaatattgttattaataatttttaggtaatactactagccaatcataaaacgatacttctagaaagtgttaggtactattagtgctcaataacaatgctcattttaatattaaatgtattaacaaactatatgtagactagatagtatactagggggctaatttaagatttaagagggggtgtcactctcatctcatagtcctcctagagtttcaactttcaagagtgagtagtaataaataatattcaactaaaaagagtagtaacaataaataatgttgtaatttatatagctatttaatagtgaaataaattaataaaagaaaaaacatataagcaaagacaaaaaaaaataaatcttaggcatgaatgacggaagactcttctgagtgttgtccctttggattggaaagtgtcctatcaatttattgaattttactgcaatttcggactttcttgctttcatttttgtatgcacgtgaaatctttactctgttttagtatactatatatatatactttcatgcttattattatttttcttcttctttcttctttctattcttgacatttattttctaagctttttcatgtttgggctgaatcaaagtgttgtatatgttttcttagctaagagaaagatttcaatatcataaagttttgatttttacttcttttatttatgttttcagtcttttgtcatttctttctttcttctctaccctttgcagattctagcctttgaatatgataatgtgattttatatagtaatactgatttcttgttatttatttttattaggataaatagcggcat

SEQ ID NO: 8030 - DNA, 767 bp, Cannabis sativa
gctattatattggagagacggggctaagaattgatgaccttgcctttggtaagccccatgtatacttgggagaagacatcgaattggccatataagagaagatgcctgccaaattgatcaaatcaaagaaccacgcgctattggctgcgatgcattcacacatagagacagaaatttctaaggtggatggataaccaagagtacatccttcgatctcactaggcacagctagaccgcgataatagagaagttacaacctgttgggagaggccataatctcatcagagatcccctcaaagggagactagtcgacagatcgaggagggtctaccaacaaattgtccaaccaggttccttaaaaactaggacatgccttctcttacccaaaggaggacacgtcttgccacaaagatctagtggcaagaacagctagatctcggcaactagcagtttggggggcctacatcagtcccaactaagctggaaagtccatattcgcatagacgtcagcacaagaacttgggggcaaatgttatcccaatttttgcccacctggcgtggcagtacagcttgccaacaagagggccaggccaactactcagtatttcaaccaacaaggtgtctgagtactcaggcgggatgacaaagtgacgaactaaccaccataaaggggttggccggccacccttagccggccctatggccaagacaggccggccagcttctagacatctcatggccgaccaacatgcactctaaaggtacat

SEQ ID NO: 8031 - DNA, 1321 bp, Cannabis sativa
aaatacttggactcaatttgttatgtggtgtaacatatgtcttgtcgtattgacatggttattcagtaaaaaagttttggtttgtttcgttccaattctgtgagttttctattgttatctttggtacacaatgagcaacagtcagacaaggttccaaaacttatcggaggactacgctgggtttacgattgatgatgaggatgaggagggattattgtttgaggcaggggaggatgggcttgcagaaattgatgatcgatggcttttggtggggcggtttctaactaatagatctattgattttcaagcaatgcaaaacaagatagcgactctatggcagccaggacgtggtctgtatgtgaaagagctcgatccaaacctctttcttttccaattttatcatgaggtggatatagaaagagtcatcgagggaagtccttggacgttcgatagggcgacgttgattatggaaagggtatcacatggagtcaatcccagaacaataccattgaataaaattgagctttgggttcaactgcacaatctatctattggcttcatgtccgaaaaggtcattaggggggttggaaattatattggaactttcatcaaatcggatccaaacaatttctccggagtttggagggattatttgagaattcgagtaaagattccattggagaaaccgttgaagaaaaagaaaaaattagaaatgcaagggggaatagtttgtcatgtcactttcaagtatgaggatcttcccacattctgtttcatttgcggggtactaggccacacagaaaaattctgtgaacgactctttgatactccgaaagagatgattaaaaagaactatgatctagagttgaaggcggctccgcgaagacgtaattatgcggatggttcaaggtggttgaggtctggattggccacgaagaactctgtatggcaaggggaaagttcggtcaacccgagaaggaaccaggtggtggcgccgttgacagccggtggtattaatgatcaattgatggtggagagaaatcaaggggagaatttggtgggatttggccaacagaagaataatcaagatagtggcaatcaaagcaaatcccatacatcaggggaggcgcttttaagggaggaaatagtggaggatgagatggacaaatcaaatgatgggttgttaatttttgattcaaaaagaaggagaacaattgaatgccaagtcagtgggccaattcaacgtacagtaggggatgtgggccttgctaatgttggctcaaaaatgcacgtgataactgaggaagaggtggttatttgt

SEQ ID NO: 8032 - DNA, 1663 bp, Cannabis sativa
gccgtaggatgccccatgcctgaataattcgaggaaattattggcttccattcatagtttatacccacactaatattcattccaaattcatcttcaaagtccagcatattgggaaggggctaattcatttgcacttcaattaacactctcggataattcagtctttctagaaaggaaatagatagtaaatgaaaagataaatctcagctcaaattatgctgagtaaatgcattgccttttatagaaagattttacaattagtggccactgattacaagacagatggcagtgtacaattggacaacaattaacagcaatatcagcatggggatttgttcaatgattgcacaaatcccgggtacaatgccgctagggaatattctagaatagagttgagttgtcctctgatgtatagggttgaaatactctgctgctgcactccacaccagctgctgtagagactcaagtcttaacaccacctctcaaacgcaagggtgaaggtgtcactccaagtttgggcagcagctggaatcttgatggagaaagagctttagtaaggcaatcggcaatttgatctgatgagggaatgtatctaacttcaagttctttcttcaatatcttgtcaagaacaaagtgaatgtcgatctctatgtgtttggtgcgggcatggtaaactagatttgaggcaagtgcactagcactcacattgtcacaccatgttatagatgttttaggtagaggaaactttatttccttcagcagcgattctacccatgtgatttctgctgtaacctgagcaagtgccctatattcagactcggtgcttgatctagatacaacagattgtttcttcgaagaccatgagacaagggtgtccccaagatagacacaatagcctccaatagatcttctatcatcaatacaacatccccaattagcatcagaataaccagtaattgaaagtctgtcactgtaaccgatgtgtagaccatggctcattgtacccttcaagtatctaagtatttgttttgcagcaccgcagtggacagatatgggagctttgagaaattggctcaatttgttgattgcaaaactgataccaggtcttgtatgacataggtattgaagggcaccaatgaggcttctataaatcgttggattgtgtagtggttcaccatcagttaatgatatggacctaccagtgacaatgggggtaggacacggtttcagattagccatgtcatgctttctcaatagttcctcaacatatttcttttggttcaaatagatgcctgtatcatctctgatcacttcaattcctaaaaagtagtgtaaggcacccaagtttttgagagagaacagtttgttgagttttgtaatgaactcactgagtttggcttcattgttacctgtgacaataatgtcatctacaatgatgagaacaaatataatgagtttgtcatctttgtagaagaagagagatgcatcggctttggaattttgaaaattgcagctcagtattgtgttcttcagcttgtcaaaccaagctcttggggcttgcttcaagccgtataaggatttgagcaatttacacacatggttaggtttgttcggatcctcaaatccttctggttgaagcatgtacacatctttttctaaatgg

SEQ ID NO: 8033 - DNA, 746 bp, Cannabis sativa
cacgtagctttttgctagtattaataaatgtgtaatggacaactcactcttttattaattgataaaaaaaaaaaaatattcctcacctatcggtccccgtcatttatgtgtccacactcaaacgaactcagttttattattgcaattcttcgaagtaagattggtgtgtccaactgaactgatgacgcaaaaagaaatggagaaagaagcaataaaggaagcatccgtagaagtatctcgcgagtttaaaaccctaatcgactctcaacatttggattccctcaagcaaatgcagaatctcatgtaagaattagtgtccctctattaatttcattacttttctttttcacaataaaaattcttgctttggaggatagagtgatgatcaagacacccataaatgtctcaatttgaggaagcgaaacttaatattgaatttttctttggttagattaaaatcgaaattatatcttttctttcaaaatagcttttgggttttggggattcccttgaataccagcataaatttaatgaatcaaaatgaataattaattaggaagatcccccttttccaatgaatgtcatgaagtatgaagaagcgaatggaaacaattaagagaacatggatttaataacataacatgtcctatatacatttctatgtgatgatcttggttgaggcatgccattcctcttgtacctgatccctctgggtaatgtttttttttttacctcgatcagatatt

SEQ ID NO: 8034 - DNA, 1139 bp, Cannabis sativa
caaaccatgacagatgtcaagactaagatagcatctacaaaaaagtatttataaatttaatgtccatgcttataaatgcttatatttataaaataaatatttataatggcttggctctctaaacttcaaactttcctatagggccttaggcttaggctttggctcatctctttatgtcatgacatcatctatatttcaaagtttcacatctttttaatcaaaaattaaagaattaaaaccttaagtaaatatattttaataaatatttacttaattaataatacttatttcttactattaaaatcctctaactgaagctgattacactaataaattagaagtgcctgaggtagtggtggtggtatcgatagtagagagagtagtatcatctatttttaataacaaagctattagtataaatattaatagaacttaattaaataattataatctatataaaatataaaatataaaattatagaatattattatactaataacaatgttttctattgtcgatagatctagtttttcatctttatattcatgaacaactataggttaatgtgattgactccactaatttttcaaacataacatagcctccacaattgtcgaactcaatgagctcttaaaaggatttaaaatacaccctccagtggagaaaaccacctcagaagcaacaatagtaattggaacaactaagatgtcacaagcaatttttagatttttcataagtgagaaatgcgttgaaaaaacatgtgtaagaataaatatatgcatataagttttaacatcaaaatacaacaatctagttggccatcaaaactaggcaaaagtttctaaattcaaactataaaattaaaacttcatcaataaaaatgatatcacgaagattgtgttggatttcaaaccacattcttaatgttgctcaagaaaaacaaaaattaaaataataaactaagccccctggttaggagacttagatgcaacatcctcgacttcaattgcaccttcctcttccttagcatccaactcctacttgaactcctaagctttcctggccttttcctctccctcatcttcacaaaagtcctaatgttgtccttgacataaggctccaagaaggacgtattcat

SEQ ID NO: 8035 - DNA, 513 bp, Cannabis sativa
gaataaatccacaccaaagctttgacgtggatttgtatttattcgtagaataattaatatttgattgtaataataataattattctggtttttctgatttaggtactatcaagaataaaggagtgattagatgaacttgttataaaagtctgtcttatgagtcattttttgaaattaaatggttctattttgtttacctcttgattatttttttttttttattgcagtttaatttattgtactaaaagaaaaaatcattattaatctagaaaaattagactttttatctgtttttgtatctaacaataatataattaataataacagtttctcgtttaataacatatcgcaaatataataatataattactaggttttcagttaaaaattgaagaaaatcaaatagtggggtgagggtttcgttgcaccgaaagagaagaattttgtttgtatatttatatttttaaaaacataacatataatcactcatctgacatggttcctgagcatgag

SEQ ID NO: 8036 - DNA, 502 bp, Cannabis sativa
aaaattttaaagctttaataaagtagtaaattaaggtaaaaatctttcaagttgtgatatgtgtcttgtggttggctctgttcttataaggatatgtcttgattctaatttaaactcttaaatgttttttgtgtttattgttttgtgatttaataacttaattgtggatttcaatggaactgtgattctaatgtgtagttgcaatattgaatatttttttaatattactattaggcaccactacgatgtaatgtctaataatattttataaaagttaatatattatgaataaaaaaaattattgtattaaattatgttaaatttgatacttaattatacttatttattatttatatatatttactgaataaataaaaattgttatatattaaatttaataaataattgtacataccaatttaggtagtgttagcatttttcatatatttttgccacctctttaagaagtacagatacttagagagatagagagtgatcagca

SEQ ID NO: 8037 - DNA, 641 bp, Cannabis sativa
cgtagagctccctctttaactcacatgttctttgctgacgatagccttattttttgcattgctgatagaacttcttgtgctgcccttagtgatgctctcgctatctattctaaagcttcgtgtcaaccagtgaattttcacaaatcttctattttgttttctcttaatgtttcctcccatatcagggcatgttttacacttatcttaatattcaagataggccattcattagtaaatacttagggctaccgcaatgcctaaccaagtcaaaacatcattcttttgcttttttcaatgatagaatttcctttgtgattcattcttggcactctaaatgtttctctaaggctagtaaggaaattctacttaaagcaatcattcaggctattccttcttatgcaatggcctgctttcgtcttcctattaaactctgtaaggaaattgagtgtgtcatggccagattttggtggggttcatcgagggataacaagacaactccttggaaaaattagcaatctctttgttgttctaaatttgctaggggtttgggctttcgatctcttattcattttaaacaagctatgcttgctaaacaggcttggcatatttttactcgacctgattctctgttgggtctcact

SEQ ID NO: 8038 - DNA, 510 bp, Cannabis sativa
acagacattattgtaaaagttgggatcttttatccttattctctaaagttgtctttcatgtgggtagagatgctaataaaatcgctcacggcttaacaaaatatacttaagagttggatgaagtctctgtttagttagaggatgccccctcccttatactatatatgttgttgtaaatgaatacgtttgatttataataacaggctttattctaaaaaaatatttagaaaaagttacattgtatatccactttactttacatgttttaatgtttacctttatttctatattttttaagatataactacttttatagaatatgtttttattatacccttaaattaatggaaattatatgctatacttaagtggagaatgaggatatgttatgcaattcacttacaaaagtgcgtacattttaataaaatataatatgagagtttttttaattaatagatacaaaaaagaggtatctctcaccttatctcaaatatttataatgatagttaa

SEQ ID NO: 8039 - DNA, 1776 bp, Cannabis sativa
  modified_base (632)..(642): a, c, t, g, unknown or other
  modified_base (1405)..(1411): a, c, t, g, unknown or other
aaaaaaaaaaaaaaaagcataccaagattgttcaaacaaaaaagcatgcatacctgaaagaagatacgagacttttaatcttttttaattgcttaatcattttaccccttcaaacaaatggatcaatctcgattgctgatcgtatttgctttttattttattctattttatattttgcactatatattttactgtaattatataaattttaacttttgaataacacatttgcaaagattatattgacacaaataagttttatcctactatagcaacaaattaaaataaattaaaatatatgttacagagaattactattttttagagagtgttaaaaaattattatttttatatgtttaaaaattattttttgaatacaagtagtgtttaacatattgtttactaaaataacttttaaacaataaaaatagattattttctagaattttcattactttttctcattatttattacaaactttaaaatatatatatatatttttataaatattatatggttgacctctttaaaatctaatgtacattcatatataattaagggattatttcacaaatacacaaaaataataaaataaaaaattacaaaaatacggttttacgaaattttaaannnnnnnnnnntttttttaattttatttacagagaatacggtctttttatgttgtactcttgttaattaatttgcagtcaattttttgtcatctgtatgttacttatttaatgttatttagatgttatttttatgtaattttcttgttattttcatgttaaaaccgtgaaaatgtaaaaaaaattctttaaatgtaaaaatgtaattcttttttacaaaaaaaatagtacgtaattaatgggtgatttcaaattgcaccctaaaaaaatagttgtattaatgtactatatatttttatattttttgtatttcggatacttaaatagttaattatgatatcaataatgatgtatacggtagttgtttaattatattactgtaattgttttttttaaaaaaaaaaaattagaataatttaaactatttttatttttttaaatatttgtagaatgtattaaataattacaacatattatattaaagaattaagaccaaaattatttcgaggttaaaaatataaaagtaatgaatcgataacctatatttttagagatggatcataacattttcaataattatatatcctcaatgataagtttattttaaaaaaactttgaattaagagaccttcaaaaatcaattgttttaaaatgattaatatatgtcttcaaaaaaaaaaaaagaataattatgttaatttatgtaactagaattaaaactagcttgttgaaaaatttagaaagaaatcagttataataataataataacaatannnnnnntaataataataataataaaagtcattgactaaaatttgtttataaaaggataagtggttaaagtgcatgttttggttttttgtgtgcatgcactagggctttgattgggttttctgaattaatattgttccaagacatattgttatatactgtagaatattatatatgggaagcagccctctatatatgctgtcatatatataatgtcatagtccattgatatatatgtttccattaatttgtattgctatgttatgccaactgagttgctcttagtggttgaagtggatttctacaagcatgcatgggaagtggacctgccactgatgcatgaacaaagttgataaatattattatttactctc

SEQ ID NO: 8040 - DNA, 625 bp, Cannabis sativa
tatatatatatatatagtactacaccacaaaatcattagtagcaaaaaacaataatgtcacacaaaatgcaaacactataatgggttgtctctataactaatatatacatatatcattttcaaagaagataagatttcacattgcccctttattgtagaaattaaattgataaaaagaagaagaaagaaaaggaaaataaagatgctaattaaggatgatcaagttatgtgttataaaaaaatcacttgcatatgttaataagaaaaaaaaatgcaaaagggaagttatttaggttgtttgaccatatttttagttgtataaataataaatattaaaatgcgatcgaacgatgggatcaacggaagagacagagtgatggagagagatgatcgacaaaaaatatttttaagcaacgaaaagtatcaatgacaacgagagaaagagacaatatgatgagcattgttgtgattttaagatctggaacttaattatacaaatagttaaaatttatttttctagtagtgattaatagtcacgagtgaacctgtatagaggcaagcgtggacaactcttaatagagttagttccagattactaatatatgaatagggatcttaacatatg

SEQ ID NO: 8041 - DNA, 1417 bp, Cannabis sativa
actctgtcacttctgggtgttggggcatgatttaaatacagtcgtggtcaagagtaataaggtaacgatttctaactacctttgtctgagctggaaatcagttagatttactgtaggttgttaattgactgttaaatgaaaatctattaattgtttggacaggttggcattgggtaaatttatcaacacttataaatatcatatttttgcaattttttttttttatataaaattctatattccatgtaatttttactaaaaaaataatttatttaacaaactcttatggatctcaaaactgataaaaactataccaaattaacacttttagacaatgaattgtacaattacccataactttaaactacttattagcacatttaattcttaccgtgaatggataatgttacaaatcatgcaaatacatatgtgacactataatttactgtactcagacattcaattatatcatcaaactcataattatgaaagaaacaaaaaaattaaatagaacatatggagaattgtgcaatactacgtaagtactagaaattaaaaactagtttggttgcgtacgtacgttacaagataaatatttacggttatgctagtgacgccttgacgtgatatatatttgtcctcataaagagtatgcaataaacaaatagacaatatacaggcctttcaaaataaaaataaaaataaaaataaaataaaataaaagacaaaagtagataatatacaggccatttaaccgtaatttacttatcatttattttcatcaaaaaattaattaatctgaatatgttgaaattgatataattaatgaataatacacatataaattatacataaatttgatacactgctatctatttaattacttataacatttgagataatgtaaaatttggtatccaaattctctcaattatcacctctttcaattttccaaatcaataaaatcattaaattcaattaaaatttcacatctactaatagcttaatacattttaattggtacaatctacggtttttattaacattgatacattaaattgtttttctttcaatatatattcatttgttgtaattgctttaatccatggcatgcctaactttttaagaaaataaaaaaataaatacaacccggcctaacacttgttttacggtatatataaaaggagcatatataaaaatacattagtttaaaacaatgatttaggacttatccaatagaattttgttttttcaaaaataaataaataaagaaattatttattttttcttatggttttaatttcaaatattttatttatgagattaatagagatgaaatactctttattatctgctatatgttacacacggcagtaatgccaaaaagatgaaatggtaaatacaaagtgacactaca

SEQ ID NO: 8042 - DNA, 573 bp, Cannabis sativa
acaacaatgataatttagcaatttctcaagaaaaaaaaaatgataatctattataattgataaatgagtaatgagtaatactaaagatattcagagatatgatgatgagttgttaaaattaataagatatttcttggattttctaatttttatttgtgtttatgttcataatatttttaatttaatccaataatttgcactaatcttctaaaagattgttctggtagattatttatttgttatagtatcgaaaaaattattttagtctaatttattttcatgattatatatgttgtaattatttagaaatccctgtaaattttaaaaaaattccaaatgatttacaatatcaaaaatttattataaaaaactacttactacgtgtataaagaaaaataatcgcacatgcaataaaatgtataagtatcataaattattcgattttttttaaaaaaaattataagtaattttaaataaccatcataaaaaaaaaattgaccaaaattatctttcgcatggcgaaacaaacaagtctaccatacccaataattttaagttatgttttggtataat

SEQ ID NO: 8043 - DNA, 575 bp, Cannabis sativa
caatattgtattatcccaattaatattggttcatgagaacaacaccatagcaatagcaagagcccttttagatttatgttatcctcaaacaaagtcattatcagttgaaaatcattaaaaaattattagagcctgcatttcaaattaatctagaaatgccaataaaacattcccaaaatctatcaagattagttcacttaatatataagctgaataacagtgaagtacaatacaaaaatcaaaataaaaaacatgtacacatatattaattctgccatttcttcaagtagttttatcatcgccaagttgcccaaggcttacacttttctaaaatccaatcgtggattttatgccagtaacccctcttttattttttatttctattagctttgtcgctgtaagtttttgctaagattttgaatactgtactagacaaattcatcatttaattgaaaacacacacacacaaaaaaaaatatatcaacagatatgataagatcgaactggtataaccattaatacaagtggtctctcttaaccattattcaataactttttaagtacattccaaatat

SEQ ID NO: 8044 - DNA, 730 bp, Cannabis sativa
gcatccatatcctataacaactggtttccaaccaaaaccaatctcaaattcaaattcagattcatgatcaagactcgtgcttggtgtgacatcattactctcacattcctttgataatggaacaccacataattcttcgtttccataaaaggaagaatttggaaatgtacttatttgtgtgcctcgtggtatcaaccctgtaagttggttattactaaggttaagatacgcgagatatgggggagttgccaattgttgagggattcttccagagagcttgttgttggagagatccaatgattcaacttctttcaaattctccattgacagaggaatgtgaccttcaaaattgttactcgatagattcagcacaatcaatgatttaagatccccaacagattttggaatttctccatgaaaattattgtttgagagatcaatgccagagaagattgttaagatccttagaaattccatttcaaagcctttatttatgacagttatagactcatggtagtacccattcccatccatgtacaacgaacttgacttatttgcactcatattaattgtattaatggcactccaattagcaaagtaatttgatgacaatgttccactaaaatgattgaaagagaggcagacaatttgtagttttttaaagcctacatacttattaggatcccatattggaccatgaaattgattggaacgcagtacaagaacttgc

SEQ ID NO: 8045 - DNA, 1001 bp, Cannabis sativa
acgttttcataaatatggcatatcatcatgaaattagattctataccccttttatattgtcctctcttaattttactctcttttctaaagtctatcatttttacttttttttttaaatactataccaactttgcccctgtcatttcaagatattctccatgtaactctcttatgtcagggtattttgagtacagtacatataaaacccttatgtcagggtattttgagtacaatacatatataaaaaaagtatgttttaaccatagttcacttcactatttccactctttccctccggtttacaacaattattattcaaaataataataataataataaaactattttagatcacattgacattatgctctctcccgagaagagcctgccggaaggtcagatgcaaaagcttgtgaattccatggatgagttgttcgcgaaaacggacaagcttactgttatcgacgatgatggatgggaaattaatgaagatgggggatctgaattggggaagttctgcgctatggggagactctgctctaatcaaacaatgaatcgatctttgcttaaaaccattctggggcgtatgtggggattatcagagagaagctggggagtcgaaatcaaactttccacgaaggattttactttcttggtgttttccttcaaatcgacccaagatttgaaccgcattctcttaaagagcccttggttcttgaatcatggtactctaatcttggatcgaatgacggagattcctacaaattgggagaagactctttctaggatttagttgagaggtcgaatcctatctgtgccgcctaggtcgattactcaaaggaatttagctcgtcttgctggtttagcgggtgaagtaattgaagtacaacaaaccgatgttgccaaaatctccacaaagggattctttaccttcaaggtgtggtgtgatctggacaaacccatctgcccggggttcctctttccgcatgaaggaaattcaa

SEQ ID NO: 8046 - DNA, 1538 bp, Cannabis sativa
gctttggaagattagggcacctgagtcttgcaagtattaccttttgagaaaaagcccttgggagtaaatgggcgtataatgagaattacgattaaaatggactttttcaacgattgaaagcactacttgtcatttttggaaatcatcaagttgaaggcattaactacaacgagacttgctccagttgcaaaaatggtgacagttcgtacttttcttgcattaacaattgtaaagaagtgggaaattcatcagatggatgtccataatattttcttgcatgatgatttagaagaagaggtctgaaaattccaccaggatttgaaaaacatcaaactaatttggtatacaggttgaagaagtcattatatggattaaaacaagctctgagatgttagtttgctaaacttgcacaggcaccgcagaattatggtttccatattcagattactctttattcacattgactaagggtacaatttagattaatgttcttgtctatgtagatggcatgattatttcttgcaacgataaggtggccctagccattttaaatactatctcggtaaatgcttcaagatgaaatattttggggtattcaaatattttcttagcttagaagtcactcgcaacctaaaggacattttcatttgtcaaagaaaatacgctttagacattatttcagaggcaggtctcctcagcactaaacctggagaattttttatggagaaaaaccattgattggcactagcaactgggagattacttacttctccacaatattatcgtcaactagttgggaggttgatctatttaggtgttacccatccaaatttggcttattcagtcctatttaccgagattttcagaaacagaatataaataataagaactaaagaacaaataattaaaagagaatgaataaggagagccaaatatttttttacatagttaggacattaattaaccttagtccacgagtcagtattatttactagttcctttagcttgaaaaagccttcaagaatatagagaatatatgctctcaagtctcaagtttgccttagaaaagtttaaagtttgtaagagaattcaacccttaatctataggattttaggagtattaaagttttcattttccctctattgaagagtttacagtaaataatacacttaggctatctcatgaagtccagcccatgaagaagatgatctactgactaggcaaatcaaatttggattgatttgttcaacactgtgtgcactaattgtgggaaattaacctatgacttaattgcacaatattcactataggaagtttctccattaatcctgatacaatactctgttacgatctggcagttggaatttccttatttggatgcaggaataagggtcttctaggaacgcattgtcttatccttccagtctcgtggtaccggacatgcttccaggtacgacatactaagggcgaaaggctttacgattgtggaactgggatacgttccggaaaggacttatccaagtgggcttagcccact

SEQ ID NO: 8047 - DNA, 1634 bp, Cannabis sativa
  modified_base (640)..(651): a, c, t, g, unknown or other
tactgtgtttcttaatgtcaattcaatttatgggactgaaattttcttttattatgttaatgcattaaagtggcgtttggtttaatgtaagggaaatgataatgataatgaattgtaatagaaacagtaacaggaatgatatggtgtttggtttatttttggtatggtattggaaatgagtggtgtattgacaaaattattctttaaatccttggaaggtaagggtataaatgtaattttaattttatataaattgtgtagttgtgattaagtaggtatagagttgtaatccgatatatcataatgccaaatcaaacatgacctgaaaagagtgtttaaagttctggccaagattatcataaatgcttttgtattaatcttaaatgcttcttaattttgattagtatattttcatgatttctatgatattataggcaaagaaaagaagtgtttaaagtgactataaacgattataaacgcttaaataaataaaaaaaaaaaagactataaacgattataaatttacacttcacgaccatcataattgcatatactataaacaaatagttacaattttctagttataacataaattttttgtgactaatgtgatttttagtcacaacaaaaaattacttgnnnnnnnnnnnnagtatttaaatacaagttgtcactaatttaattttgtgactaaaaacacatttagtcacaataaattgtgatttttgtgactaatatctttagttataaatttttagtcacaacataagaatacttaattataattagtcatattttttttttttttacatttagtcacaaattttgttgtgaataaaaatatttttttttatatatagagtaaattaatgaaattattttataaaatttaatattttatattgttagttttattaatttcacgttctggctaagattgagttatcataaaccctttttaatcttaaatgcttattagtttagtatattttgatgtttgtatgatactattgggacaaaatcattgcatcacagctagtagctaagatattatgaacaagtttttgctataaaatgaaaaagatttctttctttacaaggagaaagcataatatatgaaacaaattctcatagcaacctttttcaaattaattaaataaaaaatatagctaagtacatcaacctaataacctaaacatgattaagttaacataattaagctagagagaaaaagagaattagtacaatgaaataataataagtttattcaaagagcacaaaacaaaaagaacaaaacactatctcactatttatactatttttttttttcataatatcttttattatcattattattattatacaaaacaaaagaataacaaagtaaagagagaaagagagagatgctaatgatcccacaaataacaaagatcaaatttgttagttatggaattaagcatacaaggttgatcaattttgatactccaccaacaaagagtgcaatctctatcttttggtctactagttttgtaaatatcaaaataatgagtaatgacattgttgctagtgacattgtcccaactcatggtacaaaagaagagagtagtaccccaaaaatttggcttgaattcaaa

SEQ ID NO: 8048 - DNA, 592 bp, Cannabis sativa
cggttgatctgtagtaaactaatataattttctgctagttaattaacttctatatttgattaattaattaatttgtatatacagcagagagagataggtaaatataaatattaatcaatattcctttggagaaaaggaaagaatatatatatagctatttgatcgaaataaacaaccaaaagttattatttctggaaagcctgcataaacttaccacacagatcaaaagaggcacccaaagcccaattaataaccttgttaattgctcatgtcataaaaaacatgcatatatctacataggcgcctgcaagtgtatatataatatatgtattaattaatttataaatatattataaattcagtcaatatatatatattaataacatgtatgtgcaagaacaaaagttacaggtgatttatgtgtacatatgtatatatatgtgcaagaacaatatttatatgcatggaacagttaacagtacgtatgtatattattactttatatatacctaccttgacaagaagattgactatagtagtctccatggggacagagggccagttctcacgagccatatatatatatatatat

SEQ ID NO: 8049 - DNA, 855 bp, Cannabis sativa
aaaatcaaatcgatttggcttcttattctccgaactcattcaatcggtagtcggtagtgagatgagaggaatgctccatttaaaaagttaccaatgctatgattgggatttattttattatatataaacattttatttttaatataaataaaaaactatccatgaatttctcataaactaagaattctatatagcacactttatataaaatagatattttatatatttatatttcttgtaattttgtttttccctttcatttattctttaacttgtgtaaatataatccaacacatttaatatatacaattacatgtagccccaaagataaataaagtgtttaaattattcttcttagagttaattagtgataaatttattcattaattttgaccatgatgaatgatatatcgatatagttaatgtatatatatttttttaaagacttgaaatgggataagcaagccactatctccgggtcaaacatgcatggcaaaaatatgttctataattgagtcttaaacatgttacatgttatgtttacagatcactatactgtagatgggaatgcttgaaagaaattctgcttggtgattggactgatgggatattgtgtagctttggaatgcctgtaatcaaagggtcagagcgttataattttcaaattctttgtatgaaccgaaaaatattgatgatacgcccaaagatgtggcttgcaaaagatgtgaattatagagagcttagatggtttacaacttggaaacaaagggaccaacttgttgactttcacctgccatttgagatttctgagattttgcaacaaaagtcagggccatttggttatggctttattca

SEQ ID NO: 8050 - DNA, 1356 bp, Cannabis sativa
tatatatatatattgatgattttacattttttagagtagaataaagaaaagtaaataggaaaaataaataaagggctttgaaataactttaggtatttttttatccaagtatacatgattaataagaataattaaaaagtttttcaataataataattttttaaggttaaaataacaataataatatatatattcattgttaagtttttattagataattatattaaaatgatgtatgtatccattttttttatctttttggtgatcaattacctttcaatttattttctatggttagcttagtacgaataagttattagttatgagacatattatattatttaattaaattatttatttaaataaattatttcaaataataaaaataaaatatttaatttcaaaacccctgaataaatcttcaataaaatctttataaccaaaaatagctaaaaatatcaatgatttgtagatacatattttaaattaacataataataataatataatgattcacatgtgtaaaatattgtaaataaatttttccttaataaacatataaaaaacgcataaagttaataaacattccaaataaaaattcataaacttacaataaaatacactttaaagtgtaaattttattgacataattatatattcggtataaattttattgacataattatatattcggtatagttaaaacttaaactaagttgatgttggacttgtacttattatagacttgtattttgtggtcactctcgtaatttgagtgctagagtgctagtttaattactttatggctgatttagttgaaaaggacctccatcataagtctacctccatcgaaaaatcattcttccacacaacatgcaagatttactttattcgatcttcgtcccatgaattgttagaaaatattaagaatatgcaacataaatatcaaaatttaattaacatcatttatcattaaggcaaataagaatatattaagtagaaaactgcatcttcttacatgaaagtaatccacttaaactggaattactgcttctttagaagaaaaaattaaaggtgcatgggttcacttacaatactctcaaacaaaagtaaatcttaacactcagaatggccgaaggtgaaattctcatgtatgtcttcatcaaggtaggatcacgacttgtgcattgagttagagaaattgcttccctcaatgggcttagaaaagaaaagaaaagaaaagaaagtattaaaattaaattaaattttatatccaaaaataaaatagtatgcgagttgatatttgggacttaattaaatacccatattatataaagtaattgttgtaatcataca

SEQ ID NO: 8051 - DNA, 661 bp, Cannabis sativa
ggttttagcaggtttttttcatctcgaactcgaggatctagatcctgatcctgtttcttgcctttctccattatgacaaccattaactgatggccaacatttttatgctgtagctctattcgatagcattctcgagccagtagttggtcacctcacactacacctatacctgccgatgtttgaattttaaagacaggtgtttgattgaactaactgcccatagtccaattagtgcaggacgacccaacaatatattataggccgatggtaagtcaacgactagaaaatcttgcatcaatgttgtggatataggtggctcgcccagagttaatgggagcttaataattccttgactggtgacactgtccctagtgaatccgcataaattcaccatgcaaggtcttaacgttgcattttgtagtcccattttctttagtgtatcctcgtaaaggatatttattgaacttccattatcaaccaataccatttttattctcttgttggcgagctagattataatcacgagtgggttgagatgagggtacctcatatgttttgtgtcttcctctaaaaacataattaggggttcctcagtcttacctttctttgacggttctggagcgaaagttgaccggtcattcttgatttccttgacatatct

SEQ ID NO: 8052 - DNA, 1011 bp, Cannabis sativa
atatatctatttgcactcacaacaataatttggacacaataccatatgcaaatacatatgcaataataatattataggggaagaaaagcaaatacattttttcagtgttatttcatcaaaagcgtgactaaattattaaaggcatcaaactactatttcaccaaccctaaattttttttattattttttcaattaaaccaacccacgggagaaaaaaaaaaataatttaaaagaaatatgttaaacgacgtaccgactgttagttgctaagtgatagcaataattctcgacccaaacaataatggaaaaaaatcttctgtcccaaaaagcatgtctccaccctgtctcaccaacaagtttaagccacctgttttttttcatttattaaataatttaatgataactgtcttttaaccttttaaatttttattgaagtatctattaaatgaagaaaataggtggcttaaatttattggtgggacaaggtggagacatggttttggggacagaagatttttttccaacaataataggggtgttattatatttatatattaaagagagatataaattaatatgcaagagatttttttatgaagaaatatatagaacagatagtgttacgacaatcaacgcagtgtacagtacagttgttaccctactcacgctcacccactggccgtgagtcatctctacaattattgttttaaaaatataacaaattaattgcctttggaaaaatgggagtgaatggcattgtgctactagtcatggaattaatactggtatgtgaagtttattaatatcactatctagtttcttcttctccatacattttgaattgtgggataaagatgggctctcatataaatgtgtattacggctataaacgtgcattccacgtttgccaattttaaatgatacaaaatataatattatatctaaaattattgaaaaatatataccttattgtaatgtcatggattccatgtgtgggagtgggagtgggag

SEQ ID NO: 8053 - DNA, 810 bp, Cannabis sativa
gtgatgctagtggtaggacataaaccgttaagaacataagcaaattccttatttaggccttagctttattaacgtgatagtttcaacagactttttttcttgatcttgattcttgattggcttggcatgaaattccatagaattctactctactttgcttcagcaacaaatatgtctattctagtattccttccaccccggggcctgtgggttgctatgcctgcctaactttttcaactatcatagtcagcttcttggatgtctctcatcccgggaaaaataacacctcgttccttctatgaaagtggaacattgagtttttctctttaacatattcagattcaagagtggttgaatctggcagaaaagagaaaaaaaaaaaacaaacatttttttctctagagaatattcatcttgttggattgacaccatgcacatagagttccgttcttgagtcatggcttagtcagatcatccaaaactagattctcattatataaacatatcttttgtttccaattaaaaaaaaatattgatgaaagtgcttgatagacatggatgtagagaggcttgtaaaagttttaagtggtgctgtatcagaaccacctcggttttagtcatatagatgattgaagttagattttcatgacttgttaaatttggacctggtatccttggtattgattcacagacaaagaatgtgctaagcaagagcgtttcaccttggcaaggtgcagtttatttgacaaattttatagacattgcatctgctggttctatttgtgatgagataatattattaattggctt

SEQ ID NO: 8054 - DNA, 648 bp, Cannabis sativa
gcacatgagacaacactggcaatatttgagaagctacgatactattcatgggaagcaaaagcggtgttgactcttgcagcatttgctaaagaatttggagatttactgcatcttgttcagcttgatcaaaccaataatcacgatcaactcacaaaatcgttggcactgctcaaaggttcttgtattcttccaaacactccagagtttcgccataaacggaagattgtagttggtgagcttaataatctgatcaaggccactctcaaagtgatggaaaccatctttgagttgcagaagctttctgtttatggtccacatagtattgctgagttgccaattgctttgaattcttattgggttgtcatcaccgttattgcatgcgctaataaagttactcttctcactagtgaacagtaagttctcttatatattaattctacgtgagattcgtattgctcaacaaactttttctaagaaaaacttaattagtttattacattgatagaaataggaatacttttttcaataattattatttttcgttttttatgtgtagattatcgttgtttgtgattaattaatgatgatttttttcgcaatattatatatacgtaggataataaataacaataatacaaattttcagat

SEQ ID NO: 8055 - DNA, 779 bp, Cannabis sativa
aagtattgaactgtttgatgactagattgggtcttatatgtggtaatgattagtacatgttgttgtcattttaagtgaatatctgtggaataggactatacattggtgtcactttgttatgccaatttctacaaacacttcatatgagattgactgtgttaagtgttactaaatttctcagctttagcttgtttgaagccacaacaataaacatgctggttgttgctttttcattggtttttttatgtttatgtgcctttggcagccaaggaaagcagaagaaaagaagcaataattctagttttgggatgatgagatttgagaagagacaggtctggtctggtatggtattagtcaatgagattagattatattatgtttcattcttgtattgttgtttgacttcaatgccaaagcgaccttgttccattttcaagttatagacaaataaaactgattgaatttgaaagacaaaacaaaagagttgaatttcctcttccacttctagagattgacaaattttctgcttgtgggaatatatgtacttgaaaacaaagtttacatattcattttatcagcaaattaattttcacccagaacctaaattgcctcaaaagcttggaaaagcagtgtcacaattcacaagggctctgttcaaaggatagagaaataagaagacaatatttggtttcaattttacttaatatttaaataattttgatacgtatgcaataaattcatatgctggtttttatttctcacattttccctacagaccg

SEQ ID NO: 8056 - DNA, 1116 bp, Cannabis sativa
gatggcgccgggaggtgaggtgtaattggtgaggacgaagcagagaccaaagccagggctggagcttataactggcaaaacagaaaagacaaaagaggtggagaaagaagaaacagaggaagagtttgagcttgagcttcttctcatggtgattttagatgggtagaaagctcggccgacggaaaactggtcgatgagggtttcattagttaaccgaatcaccgatgagtcgaagtgggcatcgttgactaaggtgacgttggtggagtttgaggtgccggcgaatgagttaaagaggaaattgagggcgaaagttggtgagagaatgaagaggatgatgatgatgatgatgatgatgaggaaggttgtcatgtgaagggagtggcggagaatcattgtgttactctccagcggcgatgagtttggtcaaagctcaattctccattgtagaaggaaggaagaggtttactaatggtttttctaatatggtttcgtttttatgacatttttggctcttttattttcatgttaataattacttttggtcgtcctcattaggtagaaataatagattattatcataaacaaaattgtttgttttaagaaaatgagaaaatatgacatttttttttctttctaataagtgaattatgaaagagacatttccattaagcctaaatactcattttctaaagtaaatttatacttgtactttgataagttagtaaatcaaaattttagtactcaattatatataacatactaacataggatagtttatagttatacgagatcatttaggattcttccgggacgtcatattacattatatatagtatattattaaattatattttatataatatttttatgtactattaatttttataaataataataataaattaatataatattatataaaaatataatctataactcaatttaatataatataatataatttaatatgacttaacaaatgaaccctagtttgtacttaaatacaacaccgggtatgaaataattatttagtcttacactaataatcaatgtctttttttttttttggcatactttgccttttttcagatgaataaataattgtttctaaca

SEQ ID NO: 8057 - DNA, 525 bp, Cannabis sativa
atgtcgggcacatagatatgagaaaggtcaatgactgatggagttgcagaggtaagtgatttagaggcagtgagtgggttggaaagaagtgattttggattaccctcaaggattttttgtttgccttttatatcataaattggagaaaggggctgacttatggaatgattattaatatcaggattagcatgatttgtggagaaaaggctgttgtttagggtagcttgtggatttggtgagttgcagaaagatgttggggatgaaagtggaggccggttacaggtaaagttgttcaggggattgatgagtgtaagcctctgtaagtggtgtggaatgagagttggtaatagttggaatgtgaaggaggagttcagaactggtagtgttaatactggagaaaccagtagtggcagccgtgtggttaatttgggaggagtgataaaggtgaggagggtgtgtgggggaagtaagcaaaggcagggtggtaaaagcactattacttgcaacacttctaggattaggagc

SEQ ID NO: 8058 - DNA, 512 bp, Cannabis sativa
ttattattattattattgattccatgcaatgtacctaatatatattaattaatttaaagtgcaacagttgagacctaattatttaatcctgtaataggctctgggggaggactcatcttccaagttaagaatattagttaaatttactaaaacagtcttcctcgtatcggaatcatggtcggtagttataagggtgtttttgtaattccataaacactttagaaacgcgtgatgaatatcagtctcgtgaagaagagactcagagatattttgttcatgtattcactgacacctgtcaattgggtcccacaactgcaatcgctgttaaacactcaccaaatcaaaccgaaaccgagtaatatcaatatgaggtgaacaacattttacaagtagttattaaaataaaataaatgagattgtttttttttatatatgagattcaatattaaatattattttaacatttctcaatcaaaacccttagaagaattaaatattgaatatattaaata

SEQ ID NO: 8059 - DNA, 1036 bp, Cannabis sativa
tttcttttttgatatcatactatcttgaatcacttcaaatagtgtttcatgggtcaaatatgtccaccatcttcaatgagcctatgagcccattaataagttgggcctccaatggattatggacccacgagcctttagttacgttgggaccattagtatataacaaattcattgtatcccatccaagaccttcacaatgttcttcatgccctccctacatacatttcattttcaattgtagattttagcatctacaaagatcaccaactgcaacaatgtaatttcaactcttttacctaagatttcccagtacataatcttcatttggttaacaatgtaatgttctgtattttgtcgtgtctttagtattttccctatctcatattaaccttttgtttacaaaaaaaaaaaaaagcattaattttaatcaatgcatcaaaatttctataagaatacaagaaaatctaacaacaaaaatcagttcatataacatgacttggattcctttttcaaaatccaagtgtgaaaagtaacttatcactatcaaaaaaatgaaatgaaatttaattaaataaatataatcgttttaggatcactgcaacctgtttgctaaaattttgttgaaggatggcactagaaacgtcttcacaggatcttagtacttacctaggcacccgctaatgtcaattagggcactgacacagtttccaatgcgtaaattaaccactttagtcccagtggttgggccccaagattatttccttcttgccacaagttaaaagtgttgttaatgtcatcaaatcaaatttttgggtaaatatttgccctcaaaattagtatgacacaagtgtcatgctaacttttcgatatgaacgtactaagtccgtttcatacaaaacactagtttggtatcgctttttggtatgttaccttcatttttggccttctgctgagattctttatgatctgggagtttttaattttttttttaaaaaaaaagataatttttcagtaatttcctaattgcattaggaat

SEQ ID NO: 8060 - DNA, 1695 bp, Cannabis sativa
aagtgcagatcaacaatcggtgaagctttgacaatcatctgtgataatagatacttatcacaaagcaacacccagccttgcaataccaagagatgaaaaggttatggaacatgtctagcaagtagtgatgagaatcgagaagcataggaatattacgacttgcagcatgatgataaaagcatccatgatttaaagtatacttgagtgaaaagagtctttaaaattcactgaacacccaaaacaaaagaaatgaaccaaaagtctcacaaagccagagctaaagaaaggaaacactagtccaggacaaatcttagtcgcgtccacgtttcaaattattcttgagtaaaagaagagtcctgaaaatccattgaacacccaaaactaaagaaatgaatcaaaaatctcacagaccaaagctaaagttaaaaggaaacactagtccaggaaaaatctcaccctaaaatattgttgagtaaatagaccagttaaaaaatttgaagccttttagtagcatcaatgttttaaaatattcttgagtgaaagaagagtcctgaaaattcattgaacaccccaaacaaaagaaatgaacgaaatatcttacaaagacagctaaagttaaaaggaaacactagtccaagacaactcccttccaaggttagattcttgtttaaatagacctgataaaacatttgaggccttagtcttgagtgaaagcagagacctaaaaatacatacaacacccaaaacaaaagacatgaacaaaaaatctcacaaagaaagaagctaaaattaaaaggaagcagtagtccaggacaactcccttccaaggttagattcttgtttaaatacacccgataaaacaattgaacccttagtcgagaacctgaaattaatgaacaaaaatgaatatgctaagatggacagcatataagaaaacgccaaaaagaaagaatggaggcagaaagaaatttaaaactggaggcatgatgaaaaaggagagaaaaaagatgggaagatgatactacgtcaaacccataaggatgagacgccgcagattatcaacaacctgaaaattcaattgaatataagtatatcaaatcatctgtctgaatcaacgagcgaaaccagatactcatagaaaagtcaaaatgatttcagaaattacatgagcaatattattaataatattaatagtggataatcatcactaccactcctcatttatgtgcaaaccgattattctagtgaagatgatcaactaagattttatttattaaacttgatctaattctaattattaaatataatgaagcttctgaaggacgtgcatatttaataccacgacacaggaagtcccatcctcaaccctcgaatgatgttattgaaagcaagatttcacgaaaaccacattcaacaattgtaggcataatctgcatatttcaacacagatgaaaccaagacaaggcccaattcaatgccaccataagctaaataaaccaaaagaaaccctaaataggaaggaatcgaataagaaatatgaatccaaactcaaaatgaaatcgattaagaaccaaaccgatctaatcagaaacgcaaccaagtgtaaatcaacgatctgcataaagcaatttccacagtaatcactaaccgatcaagacaacccaaacagtaatatatatagaagaacaaagcccc

SEQ ID NO: 8061 - DNA, 698 bp, Cannabis sativa
ttatttattattttttaatatctacatactttttgcacataccgtaattttttaaaattcataaaattatacagcgtatatactttgtttggatcttaaattttgaggaaatgaaaaaaaaatcccaaggttccattttcttatatatgcaatgtgttatatcagtaattttttattttggtaaaaaaataaaacttaaaaaaaatatgttaaatttgaaaaaataaaaaaaatattaaaacaagtctcataaaatgtttaaactttttagtccattaaaatatagttgatgaactactcacagttgtaaattggtggatctatcaaatttttttacaataaaataatgatatagttgtttagccaattactacgtcagtcagtgccacatgtataatttaagattaaaataattaaaaaaacaatgtatatctgtatttttaaaacatcattaaaataaaaatcaatcaatttttttaaaaaaattatgtaaatgtaaattaattttctttttttttttttatgaaattaataacagacgttgagttgacacagctttgaggtgcctttaagatgacaattatttaaacaaccaaattattattctgtttgcatgtgtgacaaaatttgacacaactattaattcacaccactatgaatggattctggacaatttttagggaactaaaattaggggc

SEQ ID NO: 8062 - DNA, 651 bp, Cannabis sativa
aagcatttgctctatctccataccgatcttcgtctcaattaggacattatttctgtacaactcttctgtttgtggcaatttctttaaaaatcgtacccggtacaaatgcatatcatatagctttaattctttcaactttttcccaaactattcgattgaacagagaaaaggggagaagaatacgtacgccttattgtttaggttatcttaattgaaattacagaatacattcacgggtccaaagcttctcttcaatatgagatcttacagaatatcaggcacagatacatgcaacttttttattctaactatgttccctcagccaaaaattcattagtcgagctctcagactcggtgttttggccaagttccttctacattgcataaaatgtgatttgaatgtatagcatattctctatggttagttgcggactcattctaagaacatcctgatgtgagaacagatgtttatatagttactaatcaatcggcctgactaatgagaagaatgagttagttttatatgcctatctgttattgtcagattttatatggtttcgaaagatgaactggatatggacaattccaataagattacattcttgaaccaatatccattttttaatttagttcaattgttctacagcttga

SEQ ID NO: 8063 - DNA, 2495 bp, Cannabis sativa
taaaaaagcccctaaaatatattaatgtaatggtattttattattatttaatttttaaaatctcaaataattttatgtaataattatattattttaaatacaataatctagtttataacatgtttaattaatcttgataaatttcataaaaagaaagttatcagtatataattttcaaaataaatttaaatagttttaatttaaattaaaaatcaaagtggcatcttccactttgaaatttaccttttttgatatttttaacaaaaaaaaaataacacttattttaacatttttcaattccatcataattttagtaaaactattccctttgtcatattttaattttttttttttggtcatatttggatgatagatttgtacaatagatttttccaatattataaacaaataattttgataactattttcaatatttaaaaaaaaaaaaatcagaaaagaaatagtgaaaataaatagaaatatttggttttggtgtgaaaagtggagtaaaggatcgagattcgagctataaataaaggaaaggcaaacccaaacaaggcgacctgaactgagagaacgacactccccaagctccaaacgacaccaaaaatggctactctcaactctcagcctctgatctggactttgctaggccttttcatggtctccttgacgctgggttcctccgattcacccttcatcgttgcccataagaaggctactcttaacagactcaagtccggggccgagcgagtctccgtctccatcgacatctacaaccaaggatctctgtatgttattttttctaaatttcaattcttttgctcagatccatgtatctttgactttcttttctcttagatccatttgaatttggcattcttctgcatgcatgcatgctcaatcgattgatgaatcgatcttgtttttattatgtgtttctttggttttgaattagggtttaatttttacctattaagattcatgttttgctcggtttttttgtttaattaagagataattcaaatcgaaagtattgaagatgaatctcagattctcttgtgtttcacccaccaaggtcaactaatgtaattgcaactcagaatctgattacgagtttttgcaataacgatgaattgggtttatttggaaattgagtttacacttaatattgcaccattgttgatgatacaggggaataattttatttattttgagctttggtgctttaaagctagatggctttatggatgtttaattcgcaatgcatacttgtttaaatgaatgattatttgtgggttgaagggattaagtatttgaaagtgtaaacgaattttggaatgtttgcagaaagcaatagagaacaatattgctttgaaagggttctcacaaaaatactaaagtttgccgatttgctgatttgataaaatatgattcaacaatattgtaatgtactaatgtgttatggttatagagaaaggggataagagatgcaacaaaaactttgtgtgattattacaaattgaaaaaagagggggtaaaatacttgctttagttgataagatcacatagtttgttctaatctttttaagaatttttggagctggttttatctgttttcatgtctctcaccctaccaaatgtttcaacactgagatatgatggatgggctatgtaatttgcggttgagttatgcataagaaatttggagcgagggggccactgggtcaacataatatatgctagcattattctgtgcttattcttcatttcgattgtttttatgtttcacaactcttcttgttgaatgtaaattcacatgttctagttctaaatctaatgaattttcctttaacatgttatactttttttgctattcttttccttttcaggaccgcatacgatgtgagtttgacagatgatagctggccaaaggatttatttgacattgtcagcggtaacgtctccaagtcatgggaaaagcttgatgcgtgagtaccctattggtgacagttttttcagtttacatttccaacatcaaattagcatagtcttatttttgtttatttttgagttcggttatacagtggtggtattctgtcccacacttttgaattggaggccaaaactaaaggtatcttcaacggtgcacccgctctcatcacataccgagttcctacaaaggctgctctacaggtgggatatattttcgaagaatcttcctcgttagttttctgtttctgtgtaaaactttatttactaactcttactcgactgcaggaggcattttcaactccaattttgcctttggacgttcttgcagacagacctcctgagaaaaagtttgaatgggttagtttctacacaaatggtctatattttacaatctcaatttgaacccttctcttataattctaactgatgcctctgttattgttttcatttcatgtgattatcttcattctggctcaaatctcttcaggttaaggtatgtc

SEQ ID NO: 8064 - DNA, 1168 bp, Cannabis sativa
ttaagcttgaagaagttattcgacgagcccaaactaggagataggcgggtgccggacaggcccagactggcgaacaaccctcagttctacccaatacacctgccagcatgtgcaatgccagccagccctccaaaaatcaaaataatagaggcaagcataacaccaataactctggctgaggaaatggcaaaaaggggaaatttaacaaccacttacgccgcaagactcaaaggataaggaggagaggtttatgtgcttcactctcctaacagagactcctgaaacagtctatacggctacacaatccatagttctgtacaagaagtcttatcccatgaagaaagacataagcaagagggacacttccaaattctactaatttcacaataattttgtccataataccaatgagtgcaagcacttaaagttgaaaattgagttcctaatcaggaggaacaatccccacctacattgttacgtgcaagacaaccagatataggcacgaggtgcccaaaacaaagacctaatgccaccacctgttgtcgatcacctaggggtcatcattggcagacctcatattgtagggaaataagcaaagctagggagcgctacgcttggactctccatcatgagcaaaactgtgacattctggctgtagaggaaaagatcctaaacatctaaagcttgaagagcctaccatctccttcacagagggagatgctgccaaagtcaaattctctcataatgatccattggtcataactgctcagataaggaacatgtcagttgccaggtgcatgattgacaataaagcttcttcaaacatactattcaagtcaacctatgagatcatggggctctagttgatagatctagtaccctacgcacaactaatgtacgagttctttggccaaggccttgcgcctttgggatacatttgattgcctctaacagttggagaaagtcccacaataaggatagtgatgtctcaattcatagtgatcgatgtgccatcgacgttcaatattatgattggtcgaccaaccctgtacgatctgaaagttgtaacgtcaatttaccacctatgcctaaagttcccaacaagacatggggtaggatgcctaaagggagatcaacagattgtccgacactgctacaacttggcttt

SEQ ID NO: 8065 - DNA, 713 bp, Cannabis sativa
ttttgccgccacatcgattccttcttttgccaaatctcgtaaagctgaccttgaatatgggactcttccttactcaactcctcagaaatttgctgatgttgaatccacttgatcctttcttccaactccctgatccttttatctaaatctcccacttgtcctttttgccaacgttgcagagctctacgaatgttgctgaaatttctcagcaaacttttcgtactgttgtggtgatcctgcctccataccttgcatatttcttcacgacaagtttcttctttagaccaggaatcataaaaccgaaagggaatgaatcccttacgcttaaacatgaaggtgtcaagcataattggagcatggtccgatatggtaattggaaaattcaacactcccgcagctggaaattcaatagtccagtcagccgagcccacacatctatccaatctttcacgaataagccccccattaaatcttttgttctgccatgtaaattggcaccctttgaaacgtaagtcgacaccgccagtattctgaagaaattcctctaaccaataagtatctcttaaggaaactttcttacctcccatcttttcttcattgctaagtaagcagttgagatctcccatgactacccaggggtcactacaatttctcactttttgagtcaaaccttcccaaaaaaactttttatctttgtcatatggaggtccgta

SEQ ID NO: 8066 - DNA, 510 bp, Cannabis sativa
tttgcgagttggagggtgccctctgcctcagggtttttcttttctactctctctcccttaagaatatttaagcataaataccatagtttttagttttatacaggtaaatactatatcttttttttttttacaaattaaatactttaagttacattttcattacttccgtcactatgtcaccttaaaaaaatgaagtatagtcttctactattctcatcccctatcttagctcttttttggttttctttttccgttcttttttgtttgtcctctgatttttttcgtgatccctttcttttctttctatttgtgtgttgtgtctttctttttcttgtgtgtctcgtttgtttttctttccccgtctttgccttgttttctctcctatgttggcttatttgttccttttgttttagggctttggttgaccttttgtttattgtgttggcattctcgagcttttctttccttttatttctatcccctcccttttgttggttaccttttcctccc

SEQ ID NO: 8067 - DNA, 2124 bp, Cannabis sativa
tcctaatggtattaaaaatcactaaattaattttaaaattatttatccatattacatattcttagcgtgttgacttaggtgtcgtttgataataattttgctttctaatttttaaatcacaaaatgaaagtaaaatatatgtttttaaaaaataaagatgcgttatgcaaccactttcattttttaattttaaagtgtgttttgtaaagtttattttcgttttcattttttgattttatttaagtcgggtctaggttcggagtcgaattcgggttcgagttcgagtcagaggtcgagtttggcgttaaggccatgagaagatttggattcggatatagtcagagtccaaagttcattttcgttttaaaaattttgattcttaattaaaatattaaaaaaaaaagttttatagaaacatgtttttgaaaatatttttacttttttaattttaaaaattaaatttttttttaccaaacactaccttaatgttgccttgtcagttttaaactaatctagaatgctaatacacgtgaaattaaattagctcatgatagaggaaattacatgacaaaatttgagggtataaaatatatatttgtgctaaagttgagggtataaaatattaatcatgataaataatttcacggtcatcgtcactttcatatgttcaattaataaatgttatttaatatgaacacgttatgagatttttcaaagaaacacgtcgccaaagtctttccccttttcatgcaatattttttaatttttttgtaaagaaagaaaaatgatcaaattacatacaggaaccgtacaattgctcaccactgaaataagataagaaaaaatatatattacgaagctgtttgtaaaaaaaaaatacagattttggaatttgttatgttgtgcaattatttcatatctcaagagagaaagagtatgttatgtgtacttaatatataagagacaaaatagttgtggatcccaaatattaatgtggatcattacacatttatttagagaaattattagagtaataactattaaaatctactaaaaaataaaagaaaattattagttaatggggatgatgaaaaaagcaggttccatgaggacaagatggaaggtctgttgcgaaacatccaagagatttcagagtttggccccattaattattgtatataatatccattcgtataaaacaaccactagctagtactccaaatattggacaattatttatattttcagtggtactaatctttatatatatatatggtttatttatgtttttggcttaagatctttgtattatataatttggcacatgtgtaccaccatgccctacatgatgtcgcccctaaatgtgcctcatttttagatatatattcatattttattaaacataatattgtaaatattattaataattgtgcttgaataataatcattcatagatagtagtatgtgggataaatcatcatgccccccatggagtaatgaataatgatatagtatatcttttgtaaagaagaatgaaaatagaagtacttacagtactgagtatataatataccattgacattccttactgaaactttgatttgaaggccaaatattggggtgaaattaacgtgtggtagggaagggataatcataatccattataaagacactttggtggttggaagcgttgatgtcttatatgatacattcaattcatgaatagtaattttatttttattagcataaactaaataatagtataatattattttgtcaacaagacaactgttgcattttgcattaaaaagttattctctatatttttttttgtcacattcatttatgaagctacggtttataacacgccatgaaatatgaattacaaatatattctttcaattattattttcaaattttcaaaaaaaaaaatattatttttaaaataaattttatatttttctatgtatgttttttatattagaaatagaaaatttgaatttaagacttttttttaagaaaatatgtaaagccactacaccataataactatattccacttattatttttacttctttacgacaagctagccacttcatctttttctgtaatttgcccactgt

SEQ ID NO: 8068 - DNA, 1163 bp, Cannabis sativa
actgaccatgtggagcaaatgtaatgtcagtgccatcatatgacaagtttcgtgtagcaagagtatctggtcttgatgcaagagcattatcatggactttctagacctctttagcatactctcgtgatgaaactactatggttggaacttgtccgacttcgaggtacattaaaggtccatgttttttggccaagtctctgaatttttgatgaggcaaaggacccaaaagctggtgcaagtttcctagaaagggtagtctccatggacctcggggtagttttgaagttgatcaattattgcttgtttgacctctagataactgatcagttccaacaaatagtaccctctagagttcaaacaagcaataactgatccgcttcaagagtatgctcaccaaaataagcataaaaactgaaaagagaacgacttggaaagagggtactatttgttggaattccatgtggtagatagtgatgatagggcttgaagagcttaataatttgtttgtgaaaacaccaataatactttgttctataaataatatattattagtgtaggtaccttgagagtttcgtcacttttgtactatattaattaaagtttgaaaaagtaagcttagttaagtaataaagtttatttccatttcaaataaataaataaataatgttccttataaaaaaggttgttaataacgttctggttagggcaactaggaaactatattgagctataaagccagcatgtttaaaatttttcaaattctataactaatagatgaggattgttatttgacactactttcaggttgtatcttgcaaatggttagtgctatttcatgctaattattaatttaaatttatgacaccatattcttaattataccaatagttatatgatacgtaggtcgtgttaattaagcaccattagggccttttatgcaccctcgttaaatttatcaattcaaaacattggctattcccacccttcaaccaccctatatataactggatctttagtgttattttaatctaataaaattaatgataaagtagaaaatgtgcaattagaagattccttggaaaaaatgtactgagtgggattttcaaatacaaggaccaaaaaaactatgagagtctaggttgagtgctacagagaatagagac

SEQ ID NO: 8069 - DNA, 685 bp, Cannabis sativa
aacatagcattgaccctagacaattttttctacctatctcttcttttactaacttttagtcagaatcatatttcaaaattcagctcaaatggattcccttccatcattggtaaggatggctgtgcatattatggaattagctaaacttaacaccaatttttcacccatattcatcccccatttcccaacattcaaacctggaatctgtataaaaacatctaatatataaaaaaggtgtcatctgcaaattgtgaatgagaaatttaacacactacctcatgagaaaccttcaaacagacttctagcttttttgtcttatccaatcaccttcccaacaataaaagacccctgatctcagccatttcgaactttcaattatgctgccaggacttttattgatcatcaccaagtatggaagtcacgaaagacacctcattacccaagacctgtattttatttaaagttttcttctcctgaacaaaatctagaattggccattccacattgtcaatgttttttcaaaattttgtttttttcaaagtcaattttgaaaaccactcccttcttgccagtgctcggtactagctgacatttctagaatatatcttcttgttataaaggcgttatttgattctgaaatagtattcccagaactcctcatagtttttaggggagaactttgacc

SEQ ID NO: 8070 - DNA, 1087 bp, Cannabis sativa
aaaaatgctaggggtatgtagaggacttagaataatgctttaagatcctccaaaattagaacatgaagctcaaacccctcaaaggttctttcagagtaggctcaggaaaattccttcaattcatagtcaatgccaggggaatagaagcaaacctggacaagatccaagctcttttggacaacaatcaaagaagaacaaagcttgattggatgtattattgcactaagtagatttagtccaaatccacagaaaaatgcatacccttcttcaacattcttagaggaaacaaaaaatttgagtggacaggagagtgtgaaaaagaattccaagagttgaaaaaacgactggctcaacctcctatcctataaaaacctttggacaatgaagagctaggcatgtacctggctgtcacaaaacatgatgtgagtgcagtcttaataagagaagaagatggtatacaacatccagtatactacattaataagagactgatcgacgctgaaagtaaatacccactcatggagaagataacatacatcttactcttagcatcctgaaaactaaggctatacatctaagctcacccgataagggtgtacactgaccagccatttcggtaggttttgcaaaaacctgaagcatctacccgactactcaagtaggccattaaactcggtcaatttgatatcacatatcaactgagagtgatcataaaaggccaagccattgaaagcttcatacctgaatgtacaagcataccttctgaaatatcttaagatttaggagtaaaccaagatctagagcaaaagcgaaagtaagtgcagcagcaagaacttgaagaatcaaaggtggttgcagtgtaccctttgtcaggtccttagacctcaaaggtccattttcactgctattcgtaccttctcgctttcagagtcttcaaaaggcctggttgtacacttttctcttgcatgccttgtcctttgattgcgcctccaatgtcatttttgtcaatatgcattcaactctcaccttacacatagaacccctaaaacacactcacacaacacacataatggctcgcatgcgaggc

SEQ ID NO: 8071 - DNA, 804 bp, Cannabis sativa
ttgactttgtagatgaaaggacaatttgtattggattcccaacctctatcgtctttacatggcgtaaattaagcattgatttacctttctttttttacagttacttgaacttgattactactttttcacctagcttgccttgcaaaaatatttaaacaacttattgatgccacacacacactgatttgttttcgtaagcaacacaatatttaagttaattattcattcgtaagtattaagtaagcccaattagagtaaaccatttggtgatgaaagctacattataaaggtatcctaattttcatcatcattatattttcatttcaacatagggtcaattgcgtcatttattgaaacgttcacctaactgccattggattctaacagttttgatttacaaacctcggatttagcatattcagagtcagacagagcttccaaaaaccaaaaccaagatagaaataaagagaaaattaatttaattaaaaataaataaataaaggaatctgcattgcatggctgtaaagtgttaaaaatttatggtcaaagggcattatttctcgagggccccgaagtccctgaccctcaagacttcgattaccaaaacgatccacactggtcacagtggtcagtgtaaattaatagagccataaccaaagacggacccaattgtaaattaaactattttcagggacaaaatcaatagtaaattccttatttctggaggatgtacaaacgaagatgtcttacccaaacccacattaccaaaataggaatttgccatttcccaaggagtttaaaatt

SEQ ID NO: 8072 - DNA, 938 bp, Cannabis sativa
acagatacctgagagagcgttgagaaagaggtgtcttggctccaatacgaaatggggaagggcgagccgctttggcttcggaagcgataaacgatgcggcgcttcccccacgggaagatatcgaccggaaaatggatctggcagcggttgaggcggccattggtgatctaaatttgcagtatattgttcaaaatcacaggaaatgagcctcactcaagttcggggtttttgaggttttcactcggtagagcctagggtttagtttatctacccgaacctagtatgtttgggagtacatatagtcaagatcctaaccgtggttagaataactctattcatttttagtgacttctagtaaataacattcaatctgtagcggtgttcgctgtgacggcgatgtgagttttggccattttttcaaactaaattgtatatgtaaaattttcaatttctcaaattgcacccgaactttaaaatcgcgaaaactacactgcaaaaatgtagtatggtacggtgtgtcacaggctcactttttcaggcggcagcggaacactcgtacaacaccacattgacttctctaagccaaggtcaactttccaactatcagagtaataatgggctcatttttcgcgccactgtttgcctcgtacacacttccgtctctcgaacaactcccgtcgagtcatgctcgcaagcatccatgagtgcatccatgcatcgaggctctttagccaagatactcgcactgtccataggttctcactacgataaggcaaatcccaacaccgacgctcatcttgtcactcgtgaccaaggtagcatgtgtggcaagatgccaagccaacgtgccaacgcttctatcatgccccattcgatactgtccaaacagtctcccacctagcccaaggactcctatacgtccacagaccaatcctcaa

SEQ ID NO: 8073 - DNA, 1646 bp, Cannabis sativa
tttatttagaattctaattaatttacttaactaattaattgagcctacaaagtaatattattccagataatgtaaggaccatggacatatgtaaccaagctcctaataaataaatctaaaatttaccaaatgaattttctcgcttattaattaccactttacacttcaatttattttatccttcaaacatttagctcattgtaaacgatatttcgaaaaactaatataattatcaaaatgagcgctctatcatttatcgagtttagtcaagctcaaaagaaaccgttgtttcacttctaaatagttatagaagccatagattccatatcatgattattgattaacactctcactcaattgcactaccgaattcccaagatgtaaatatgggctactcctacaataaactggtaacgaacaagtcaaagaatccgtatagtacaattaaactagaacttaaccatctcaggattgagatcaatcaattgatctacaatcaactaaatgatattgacttagaaaagatataatagtaaatttatgatatattctccattgtcaaaaattggtccaatatgatatatagccaatacatttgatacagatttactttactaacatcctaaaaaagacattccgcttatccagatttaagtaaactacatcgatgattatcacgttagtacaaattcagtgcactaataaatcgctgaagcatataatcacaattatttcacttgtgatgatatcactataattatgaataactatatgtacagaatttaatagaacttatataaacttataattatgtaataaacatgtgaacaaaacatatgacaaagtcaagatatgatttctaatctatattaatagtaaataaaattacattaaattaagtattatttaggacataaaatctcaacagtgtcgtgtttgacatctttttattttgtgttaaatcgtctcgacttatttttgacccgtgtctaattttttcaattctaacttgtaaaattcgcgtcgtgttcatatttgtataccgtgtcaaaacccattttgccacccctacataaaatctgtgtgttcaatatttccacttcaatctctcttttctttatattttgtgagttgttagaaaatccaatcaaataataacacaaaatcacataaggaatacctttcatatttgaaattcacaaatctttcatattccctcttttcacaaatcatctcatcacagggattcatatgtacgaattttaaaacttatttggttttttttatcaagaaaataaattttattaaccaactacaaaattacaaccaaaacaaacatagccacaaaagcactcactctctatacatcattcagtaagtgtgtaagtaatctttgttcacaaaaattcaactttctatatttaacactattgtgaaattttaattacgtaagtgtacgtatgtacgtatcgttgcaagtaatatattcacacaagtgaaattgaaccacaaagattatactaaacaattaaatttctagttctatctagagttattattaaaagccaatcaaaaagattcaatctggattacattctactttcatatccaagtagtttatttcttcacatcaatgggagtatagt

SEQ ID NO: 8074 - DNA, 794 bp, Cannabis sativa
gtgactgcttttaggtcatacagagctggctgccccatcatgacattaaatatagatgctacatcaataattatgaattgggtcatggctatattctctgcgggactttcaccgattgtcaatgacaattggatgtacgttaaaggagctagtccttggcccgagaacccgtacatgaggtgtgtaaagggtgttaagtcttttaaacgaagccccatcttcccttacacagtcttgaagatgatgttggaggaggctccataatccaccatgcagcgtgctattgtcatattccctatttgtgtggttatgaatagagggtcattatgagggaacctgacgagagcaacaccttcataagtgaaggtgatggcaagctcttcgacctttggctgttttggatttatttcttctacagctaagacttcgtttccttgctcataacggagggtccaagtgtagcggtccaaagctttatttgagtgcccagtgatgtggggtccaccgttgatgacttgtaaatggccagcaactagtaagggcaacatgtcgttattctgttggacttgtgcctagttttggtcgacttggacatatcgacgtaggtgaggactgttccttcttatcaagaactcgatctcttctttcaagttcttacactcattagtgttgtggccaaaatctttataatcaacattactttgtgggatccctcttattgatgtattttttcatcggatgggcttcttacacagaacaatggcctgcatggccatcaggatagttttatgaaa

SEQ ID NO: 8075 - DNA, 541 bp, Cannabis sativa
agtcctgcacttggacttggtgatgccttctttagcttttaatttacaatgatttaataataattattgtgtgtcgttttcctaaattgtgtcatttttagtacgatcatgtcttttttaagatgctcttgtttaattggaaagtagtggccggaaacgtatgcaattataatcgattgatccaatagaattgaatgttaaattacaattgggtctgaaattttaaaactttaattggataagatctaatccaatgtattcctcagatcagatttagatcgaaagggttcaaatttgttgatgccatccaataaaaacacttttactgttagaaataaatgaagggattggttggctagccaattaacgttgaacttttagcttttcgacttatttttatacaataatgccttccatcctagtgatcggaaccttcaaaaagttgcattatttgtttctacaagacattcgaccaagtatttttactcagaaaggaaaattcgaccaagcagataagctaacatttgaatggacttacggg

SEQ ID NO: 8076 - DNA, 1464 bp, Cannabis sativa
cattattaatcacttttcattttcttaatgtagtaataatgtcttcttggtttttgcatggtaaataattggcttgtaatttgacatctggattgtgaaaatgatttttaaggttgttgaaagtggaggaaagaacatagaagttgcagttatgacaagggaacaaggtctgcgacaactagaagaagctgaaatcgacgccattgttgccgagatagaagcagagaaagccgctgcagaggctgcaaagaagggcccttcaaccaaagaaacatgatcgatgatttcccatttcaccttgctactattgtttttttaagaaaccgtaaatctgcattcccggtgttcttgttataatcagcattttagagggattactatcttagttaaaactgccctttcatacatgttgttggttcttacatctaatgcctttgaaattatttttatttatggaatatgaattcaaagacaattttcataatcactgcctctgtttttttggatgttatgtccatcttaaaaaagagttagaaaaaattaatcatatcctcatgaatctaacaactcttctattttgttagattgattagtttgttacattaacaattatttcaaatagagtcttatacatctaaatatgaaaattttataatagtgaaatcagaacagaagtccgcaagactttctccccggtctggggttagattgttgatttgcttctaaaagtttctctccttcttagtgcttgggcattcatccaatgcattcttttcgatcttgtacccatggaacacaaatccaatctctatttttgttaggtgctagtcaaagtagtaagcaagacccgcgagaagtttttgcaccaagctaaagaatgcaaaactcgacttggatcaaggaaggttttttttccgaaacctcttttttttggtatgccgcttcgcaagaaaagagtaacacacacaggagcgaagcaaaaacaaagcaaggggaaatccttagattgtgtattgaatataaattcatgtcttttttcactagctttcattattacaatcttattttttaaagtcaaagaccagtaattatgtataaattattattgaatttcgattttttttatttttgtataagtaacattttttattgctttataaaaaaatgattactatttataagtaaaaaaaataaatatttaattagatcatactaaagttaacttagaaaaaaaatggcccatgcaggtctcgaacctgcgaccttcgcgttattagcacgacgctctaaccagctgagctaataggcctttgatgttatagccattccatttttaatatttattcatgtgcagacacagttcttcacaagttcaaattcatgttctctctctctctctcttcattcgctgtagttggttcatagaacaagggtcctggagtttccgccatgaaagaagattac

SEQ ID NO: 8077 - DNA, 856 bp, Cannabis sativa
ccaaaaggaaatgggaaaaaaaaaacccccaaatcagggtgaacttaatgcagagctaataaattcttataatgcactaccaagtgagggggaaagttaggaacaaaagaagaaaatgttttcgtgaaattctatgtatactttttaatttcttctcttttatcatatcttaagaaaagttgaaaattctttaaaatcacattacattaaattgaatactttcttttcctaacaacaatttctgttattctttgtttgttccaaagaagagaaaatggaaatccaagatataacaaagggtaaatgtatagattaaactagaatttgcttcacaaacagctatttacagttccaatttcttcctaatgtgaagttaacagtttaacagtgcattactcataaaacatcgaaactcaaaaaacctaaaaccaaaatttctcaaattcttagaagcggaaaaaggtaaatgtagaattagctcgaatattccgtagtctaaagtttaaacactcctcactacatttttgtaagcaaaccaaacaacagaatattaggagagagaataccggagtcgttgcaggtgagctggatcctggaaattttaagagcaaaagagtcaagaaccctcaaacatacacatatatatatagatagatagagagaaagagagaaagagagagaccaaaagaggggcgagcgggcttgctgactttcctgttagctggatgcttggttctcatctctctctgagaaagcttggtctttaatggagtcttttctttggtggagtaggaggaattgaggagggagagagagtcgttaggagcgtttgaaattttgatgtaaaatcatttaa

SEQ ID NO: 8078 - DNA, 539 bp, Cannabis sativa
aaaaaataccacatttaaaatattggatactcaaattattattaaaaaaaaagcctttgatcatgtgagtacttcatttaaacgtcagcacaaatatattatgttgtaaaaaattatatatttaagttgttacagacatgtataatggctatatttatagaaaaaaaattaataagttttgactaaaattatttataccaaaaaaagaaagaaagaaagatatatattgtgattcacaacatacgtgtacataataagttaacattagccaaaagcatgcagctgaagccaccttactccaaaatatcaatcaatagtcaagctcattattatatcaatttaattaatttacaattttttaaaatatatattttttaaaatatttaggatgctttggtaattatgtataaatataagtatttttcatacaatatttatattcatatattttctagttccaatgggctgcctcctctggttttacacaaaaatacatatcattgccaactatttaacaagagtgatgcaaaattcgaatt

SEQ ID NO: 8079 - DNA, 522 bp, Cannabis sativa
tctaaggagcttgttttatttgaaattttttttttgttaacttttgaccattaatttttattattaccattaattttttatttttatggtcaaataagatgaataaaagtcatggttcacggcctaacgtacaaaaaaattcaatattaataaatgaatacatatataatacactaatataataaagtcataatagagtttgtagttaattaagtgacatcatgcccaacttgtctaacaactaaaattttgttatgtattgattgtttttttaatttgtaagtgaagaataatagatctcaaatgatgcagtccacttggtcatgacttgttaacccatgtttaataataacaaaaaaaaaaatgaaataaacaataaaatattggatattgtttaatgtataagcaaccatgaaaagtacttttctgagctgtaattttgtgtttaaaatgggattagttgacccattcattattttaatgatagcattaacatgggatccaatctttgattgttttgtt

SEQ ID NO: 8080 - DNA, 569 bp, Cannabis sativa
taacaccacgtttagtccaatgcccaggatgatttgctgcaaaacagtaagcaaacaaggactccctagtccttgactgagcaaaactatattgatcaaagaccgttcttgccgaaagaacaaccgctgctgtagtaggggattttcgctgccatagatacccgttactatccatccaaataactcaaacaagcatggatgcatcctctaacacacatttatctgatctagctgcaaactcgatgaaccaactagcaaaactcaattcatactagttgcctatacccacaatcgaacgattccagcaagatcgtgcaaacaagcaaccaacccgtttcatcatgtatattacactctggacagtgagaactaataagaacatgatgctttcgtagctgaacacacataagtagtaccccagacacaggttgccacaccaaattagtgacctctggtggaatctttagattccataatctcctctagaaattagtggtactatcatccacccaaccatcaatagttccttccaagtacctataagcactctttactggataatgccccaa

SEQ ID NO: 8081 - DNA, 856 bp, Cannabis sativa
  modified_base (710)..(716): a, c, t, g, unknown or other
aaaaaaaaggaaaattagtttatgagattaatcagtcaaatttagctcttctttcaattccaaaaagtacctttttatacaaagttttggtgaatttggagaggagtgtttgagttgatgaattttaggtatgcaattatgcatggtccctcttccatcatttatttataaatagatgattctttttaattcagtgtcacattataaataaagggaatatgcattttaatttttatttgaattattttattatttttttaaaagattatttgaattattattgactgaagtattgaaacccatttcgaataatttgagtacaacaacaattaattattgagccaaaaaaataataaataatatacatatatgaagttttgaagtattcataatataatactaataataataattaattattagataatagtcttttgcccatgatctaatgtctagtgccaacctttttgtcaccaaagatgggggacaatttgggatatgccaactgttctcatacatatgtatgtacccacaaaattgaaaattatatacaacattataagtatcaagaacaatcctaaatcattaacccaaaattacaattttttcttttacactttaaaagtatgtcacataaaattgattaagaaaacaattccactttcttgaaaaaagtggtctcattaaaaataaaagagagagagagagannnnnnnagagagagagagagagattgtcatttcaatatgctcaattatttcatggggtatcaaatcatggcctaaagaaagactaaaagtgtctttagctttatatttattaatgtcatccctttcttatttattatttaaacatt

SEQ ID NO: 8082 - DNA, 1147 bp, Cannabis sativa
acaatggtgaaactgttcaatcagtcttagcagattttgaagaaggaaatggtgaaagagaagactcttcttcttctccttgttcttcatgccaaacaagtaatagtattaataataataaagattctcttcttaaagtttacatgtatgatttaaaccatgaatttcattttgggctcttaggttgggaaccagaaggaaataataataataagaataaacaagtatggcctaatcttcttaagaaagttcctgattatcctggtggattgaatttacaacatagtatagaatattggcttacattagatattcttgcttcagaacttgttaatccacctaaggctagttctgttagaagagtttataatgctagtgaagctgacattgtttttgtaccattcttttcttcattgagttataaccgatattcgaagacgaattcgaatcaaaagatgagcaataacaagttacttcaggataagttagtgaggtatttgattgctcaaaaggaatggcaaagatcaggtggaagagatcacttgattgttgctcatcatcctaatagtatgttagatgcaaggatgaagctttggcctgctacttttatacttgctgattttggtaggtatcctcctaatatagcaaatgtggaaaaggatgtgattgcaccatacaaacatgtgattagaacctttgttaatgattcatctggtttcgataaccggcctactttgctgtacttccaaggagcaatctatagaaaagatgtatgttctcatcttcttcttcttcttctactttgttaacatttgttttaaaagtttgcttgtgaagattttgatatgtgaatatgaagagttttgcattatattgagttttgatttgtcatttgtcatttgtattcctagttagtttggtcatcaatgaagcttgactatgttagaagatgtaaagtagaatagcattgggaccaaagtatagttttccaatgaatctcaattctcatagtttagacaattattataggttgctctaattatgaatatgcaactcaattatgctcaactctgtccatatggttgggttaagttgatgatgctcactgtttctaaattagatactcccttttcaatttcataccatt

SEQ ID NO: 8083 - DNA, 526 bp, Cannabis sativa
ggagttttgaaatttattgcagatcaaaggcatctatttattagatggcatgctctgacagcagcctatgcctaaaaactctaaggcaaaccagagtatatcaacatgcaccttaccgtttcaagaatggttctattcattctctcagcaagacaattttgctgagggttccttggaactattaggtgccttccaatgccaacctttctgcaataatcattaaacaaatttggacaaaactctaggccatgatcgattcttcatttcttaattttctttccaatctgggtttcaggcatggctcttagctccttgaactggttagaggcatcatttttatttttcagaatatgaatccacacatatctagtgtaatcatctataatagttagaaagtaccttgcttcacctcttgaaagagtccttcaaggccccatagatctgagtgtaggtagtctaatctgttgcttgaggtgtgctttcatattcaaaccttgatcattgttaattttcagtaatttgatca

SEQ ID NO: 8084 - DNA, 540 bp, Cannabis sativa
ttgctaagaaaacagaacccaaatcgacatcgttaccttcgtccacagcattgacgttgtcactccgtctaggtctcttcctcacctctatttccatcacttccatctcggtctctctctcactccatctcaagtttctctcaaactctctttcattttttttttcttagatctctttcaaagtcctaatatttttcttttaaaaatttgttattttttgctaaatcaaatagctcatactttatatataaaattagatttgtaatgatttttcaaaagtaattttttatcctttagtgttcatcgactaggttcaaagggtttaggggatacaaactagatctgagatttattttttggattttatttattttgtattttataggtgtttatatggatttaaaaattgtaatagtggtagtggttattgcagtagctacggtggttgtggtggggatggtttcagtggtgtggtgggggtggtttagagaaaatatttgtagtggtgataatgatagtgattgtggtgtgaaggtagtg

SEQ ID NO: 8085 - DNA, 830 bp, Cannabis sativa
aaaaacactctgattcaatggggatacaatagtagcaaatctgacaatagcctttttttctccatcaaaaatggtaacctgctcctaatcttggtgtatgtggatgacatattcataactggtgcatacacatctgaggttcaacaagtaattttttctctacacaacattttctctcttaaaaaccttggtccattaacatacttcttgagatttgaagttcacagaacagctaatgagatctgcttgacacaacaaaaatacacaagggaccttttggctagaactcagttacttgactcaaaactccaatccactcctatgtgtccacctcaaaactctctgcaaaaataggcactctaatggaaaacctatcacactacagaagtgtcatttgtgtcctgcagtacctcaccatgtcaaggcctgatattgccttagcagtaaacaaataaagtcaatatatgcaagcttctgcatctgaacattggggagcatgtaaaagagttctcagatatcttgctagttcaataggctgtggactggtttttaaacctgttaatagacatgatatccaaggtttcactgatgtagattgggcagggtgctttgatgatagaagatcaacatcaggctattgcattttccttggaggtaatttaattagctggttctctaagaagcaaactattgtcgctagatcgagcacatagtctgagtatagagctcttactctagaaatttcaaaaataatatggatctaatctcttttctttgaaatatgcatctaatcattccttagccattttttcatgctcgaactaaacata

SEQ ID NO: 8086 - DNA, 974 bp, Cannabis sativa
acacacacacacacacacacaagtattctaaacacttgagattttccaaccttgatttctaccctgtatccttaagggagctatatcagatcctacctatagtgatctgaataatattatccctcgatatcaatacaactaaaatgagagtaggtcattacccgctatctaagggggccgaacctctataacaaatttgtgtgttctttattttctcattctaattgtgtaacacgtgacaaatatcagattcatacgacctcggtgtcggttgaccacttttcaaggtcaatatgaacaatctcatttgatcttattctagtcatcaacgtattacgcagaatcttccaccacatcaatttgaatcttggatgcattctactcttagactagcttctaatttggatcataactcctattttgctcaccttatatcctctcatacgctgattttagaatgaatttgcttgcaagtaacttcatccaaccgcatctagctattttgaaagtcatctattggtaatacaacaaatcgaacaaattaaacacactacattaagattgtaattttactcaggtcaaaattataaaaatgcccacaaagataaaaatgagaacttaagctcaaatattcacatataatcacaagtattggattataaagtaatataaactatcattaatacttaattaagttaattataattgctaattcatatctcattttaggatatgacgcacatgtccctaatgtgcacttaggatgattttgataacttaggacaacaaaatgtttagtattgttcttatagtgcaagtcgaaaatgttgtttatgtcacttcgttaatttttatagataagagagtatttttagaaacaaccataagaattatatattttgataatgtgtttaatttaggcatttttttgaggttttttatttttcacttcacttcaattttttttttttttt

SEQ ID NO: 8087 - DNA, 560 bp, Cannabis sativa
aaataaataacatgcatcattaaaaattcttgatttttattattcatttatagacaatatattgttcttcacatattacatgaattgggaaaaaagaaatttacaagaaaagaagtgatgtgatatttttcagtataaaatttacataagaaatatatttatatatttatatagccaatagatattggaactcaaaatcagagggtattttttcaacagtagcagtagaaataattcttccactattattggatctaaagcaatcaacaattgattttctaagtgagccagctgttggtaaatggtgacaaacccactcaactagtaactctttactaactgcaaaatcaagcatatttgtaacaagtaattctggtaacccaatcttctttgtgcttgttactattattgaagcttgaaggtactctaattttgatctttctaactcagccacaacactttcacctgtgtacattctcacctatatatacatatatagatacaattaatttgtatacttattaggattagtttatttattattagaaggtgtctaataa

SEQ ID NO: 8088 - DNA, 508 bp, Cannabis sativa
ttggtcgggtcgggcagggaaaggcggatccggttcaagatttgggttgctattgtctgtattgtttgttccctcagttttgaaaaatgacactcatttcggttgagaagaaaacaattattcacaatgaaccatttttatactagttattcacatataaattacatacaaatttaataataagtgtaattaatttcaactttgtttatgtataatttataggcgtacatattattactgataatgtaataaaatttcatattaaaaggtactaatgtctactatgataattttaggagattctaagctaacattttttgaataaaaaaatcaaattttttcataagaatttatatttactctcttacattttattttattatatatatattttttgtatggctcgctctcttatatattattatttatttaaagatgaattgtgttctcttggaagatgtttttctttgctttaaagaaaagatgtttttttttttgtttttttgaa

SEQ ID NO: 8089 - DNA, 683 bp, Cannabis sativa
ttggcgccaacgtgtgctgacgatgactcagccgaaaaccgtaacaatgaaaaaaattacttgggcttaaggtgaaggccagtgagtgggctgtagggcccatactggtcaattctccttgtttcaaattacgtctgcggattttcacagtcaaatagtaacgaacacgattcatccacgccgtcaattaagaatgccgccatcttttgtaatcgttgtggatctctacacgtgtcacggcttcaacactgaatttcaaagtgtaaaaggttatcactgttaagcattttagatcagtttctctgtttggtttcggcatagggtcaaatcaagtaaattcaacctcaatccataaatccatattaagtcgtacaatatatattttatttcatttattgtggacttgatatatataaatatattttgcttttcaaatgggtgctttccgctttattggacatggaatattacatggtaaggtgtgttagtttaatacattgtactcagaaaaaaaaaacatggtttggtgtgttagtttaaattcatattaacaagtctaaattgatcttcaatgccatttattttttattattacatatataccggtcaatctattatatataaattcttataaacaaacttaattaaaaagaacatatatatatgagtagtttaatgtatga

SEQ ID NO: 8090 - DNA, 1777 bp, Cannabis sativa
gagctccagttttgaatctgggcctgctaagcaagttatgggagaggataaattaaattataagtgatggatttatggtgagcaagaagagcttactttttccataagggttagcttttaacacaggtcatagatattattagttttatagaaatctgtccgtactttattagtggtttttcttggaactatataaactcatcaacttcacagttggttgttttgttttgttcttctattcattattttgggacaaaatatcttatgttcaacttcacattcttcgatttatggtgttaactttgtggtgcataactaaatatatggtttgaccttttgttattgttgatttcttaagctgttttttcccttttctttttaggctctagaagctattaggatggtattggagataaccagaaataaaagagtttctgtcgaactgctggaaagaactgtgacagaagtagagaaaagggtttcggttagcctgtcttccacaaagattgatgattatggtaatcaagattctagcatagatgctgagaatgagccaactatggaatctggggagggtagatcacgggaaactgagcagctggtcgattttcttggaaaagtcttacagaaggtaagtaaactagatagtttccctcattctatgtatgtgttgaattttgtagtgagggttgaatctgaacaactgcatagtccagaggacatatggacattttgatcggaaaagtaatcaagatattatgcttatatagtataaaaaaactgtataaaagtgtggtcttctgtattttcttcttaaattggagaattgtatagactatagtgtggacattgtattatacttctcatcatgttgatataaccccttaaatatcttcgcataacaattattattattaattttggtaaaagaaatgaaaaccttgtattaatgcaggaacgatctgataggagagtatcacgatcatacaaggaaatctgtaaaatcacccttcatagttttctttcactaaattgactttctaatgttggcatttctaggtgggagtggagtggttatgtgtagaaccacacctgcatagttttccttcattaaatttgctttctgatgtaggcagtactaggtgggggtggagtggatatctggggcttgtatgcgaggtggcacaagctcaaaggagatctcacaatgtgctctgaagcccttctcaagcaagtcagatcctaccaggtattgttatatttgtttgttggtatcttataaccgcagcttagtttactagtcttgctggttttgtaatcaatatgtgatcttcttttatgtaacaccccacttttctcttatatcttttagggatctgacatatggaatgaccgagatcagtttagaaaattcgtccatgcttccttggaactttgcaaggtttacatggaaatttcttcatctactagcagcagaagagagctcttttcagctgagatgcatctaaagaacacaattaaacaggtaagttagcttttcatattacttatacttactatgaaagggtaaaaaaggtaaagaacaaaagactaatgagtaataaattatggaattttaggcggtggccttctctgacatggaagaatacaaggatcttcaggcttgccttgaagcagtacagacaaaactccaatcaaattctgttctatcataaaacagcacctgccaatgatttcgtgactgaggttagactcctatgtttgtgttttctttttt

SEQ ID NO: 8091 - DNA, 546 bp, Cannabis sativa
cttttctgatcgactgtgctcccgagaatttgatacacatgccttctccttcggggaaggttagatgcacgccccccgctgaggtatgtgtatgcctcctccctatcaattcgagaaggatgctggggatgcctcggcggtaacccacttgtcctaggttgtgtcccaggattttctcgttattacgagggatctcttgtgcccctagttcttgggctgccttgatttctcgttcctacgagaagagtctggcatgtcattgctttcattcccctgatttgtaaatccctaaggtctttgaggtactcctcgacgaggtgcttgattgtttggttgtttgtcttctggaacattcctagtttccccaagttactcctcctggtgttctggggattttcctgattcgtcttctgcctcctggttctcgaacctcgaggtctacctcgtggccttcttacttcaggatcaggttggttttgtgcattgttctcctgagttgccctggctgcagctgcctctctttccaactgagcgtttcgttggtta

SEQ ID NO: 8092 - DNA, 881 bp, Cannabis sativa
ttaatcaacatagttgacgatcctgcaaaagaaagattcctcgagctccaacttttgatccttgttgatattttatcacctagtatgctacattccgtggctgaaatcttttttgctcaagcacgaattccatagtatttaaaaggtactaggctttcagcaaaacctaatgcatcaagcactctttgaacttcctttgaatccattctactacagtatatagcagatttggacgggttgggatttaggcttgaagtattgaaaactagtttcaagccctgcaacataaagtagatgctcttatagtctcttttgcaaaatcaaagcacatcatttgcaaaggagagatggtttagcttcaggtcagcacatttttcatgaaagccaaagccatctttcttccctacattttgcattatccattagagatactccatacctaatacaaataataggggagacattggatcctcctgtgtcaagcctctccttgcttcaaaaaaaaaaaaaaacatgaagggtgccattaaatagcagagagaaacgaggagtgctgatacaagtcataatcaggtgtatgaatttgctcaggaacttgaaggcgtattgtcgcaataattaaactaacgctaatatcatctaaatatatttaaaaatctatattgtcacgataattaaagtaacactaatatcatctaaatatacttaagaatatatatagtaaacataattaagctaatgctaataatcatctaaatatatttacaaatctatatagtaacaataaattgagatataatcacattgctcaacaaggcaaccgttgttgcttcgcttttgcttccatgtaaagaatttaccgatcacgcataatatttatc

SEQ ID NO: 8093 - DNA, 1044 bp, Cannabis sativa
ctctctctctctctctctctctctctctctctctctctctcctcgcccgaaccaccatcccaacccaaatcctcagccacaaccaccatcccaacccaaaactgcagcctctaccaccatcacaacctaatctcgcaaatctcaactatctcgtccatggacagccacgcacagccactggagatgtctaaggtaagttttgatcctattttgaatccttttttcaactatctatgcatatgtttgttttagggtttaactgttctttgatttagggtagatttttgttttttaatgcttgatctgtaatgtgtgtgagtttgattagacttagggtttattttgggtctaatttgtgttactacgataaatctagtttttagcttaggcccgatgcatgctcgatgtaggcccgatgcatgtgcttttgaataaagttagaggttgaaggtataggtctgatagaggacgatgtaggtccaattcatgcatgatgctaactaacagatgcttaggtccgaaagaggacgatgtaagggtcaatagttggtctaatagtttttgtaggctttatatttttatagaatttgtctatgtttgacagaggacgataattggcccgattatgggtccgattgttattgcatatttttttttatagaataccagtaggtctgatagaggacgatgtaaggggcggtagtgtgtccaattctttttgtaatttttatttttttgacaaaatgtgtctaggtccattatgggacgatggttggctcgatagttgatttgattgtcgttgcattttttatcttttaacattttgggtttgaggtcgatgttggtctgatctccttccggtgtttgtccgatgcttctctacataatgtctaacttgtattttcttgtgtttttctttttcagagttcaagacctccacgccttatactttcaatgtcagagccttacacatgtcgtgtcacttggcgtggcagtggtttttactatactaggattacagaaaaatttgaggaattcaaatta

SEQ ID NO: 8094 - DNA, 838 bp, Cannabis sativa
gtgaatattagatgaaaatttaatcgattaaagatgatttttaaaataaattaatttgtgttgtacaaatagatcaaaaattgttagtagtatgtcataaataataatctcttttacgtatataaatccttttcattcatgagtatagtttcttttttatattagttaattataatcttacaaactactattaattctttggtaaactctcattatcatcatttggtctttggactaatttatgtttcttatttttcaacatcatgcattaatctcattcatatcattttctcattttgaaaccaattcttcaaccttttaaattcattattaacacatactttgcaaattcaaagtaagaaaaattagcaaatttcattcaaaaaaacaaacaaaacatcttagagaattttttggtgcaagtactccctaaaaatagcgtatatgcgttctcaaactgtttcagtatattcatttgaattttttaattaattttttttcttaatgatcattaatattgtagttatttaaaatattttatacaatttaagaaattcggtaaaatttaacacattgaaaatatgcttcaaacaatctattacaatagacatgaatattttattttatactcgtgtaaaataaaatactatttgaatactgtttttttatattgtaaatatttcaatttttttaaaaatttatactatgcatgccttaaataagtataatcgatgatcataactaaagtttttctttgatgtcgaactattttcgagtgtattagaggagcactcgatattattttgttgagtattatatatataaaaattatatatat

SEQ ID NO: 8095 - DNA, 612 bp, Cannabis sativa
attcccacacaaccatctaaaagagttgaggagaaaatctctatcagaggattcccccattcggcccgagaagctgttttggactttagatgagttgttgctgttatgttgtctgagctaatatagaaaggtttagtttccatttttgaaccaactacagtcccagtttaatagccaagacttctgccaataaaattgaaacctgtcctgtctgaaacccagcttccgccgcaagcaaacaacccctgtgatccctgatcacagcagcaatgtcgcacccgtgtgtgtctgtacaaaccgaagcatcacagttcagcatataggatccttccggaggaccattctatcttctcttctccttgatttggatgatttggttgtgaactttatctttctgcagcaagttagagatgtagtcaagagcccaaagaatccagttacccatatcaacagtcttgttttggaaaattcgttggtttctttgactccaaacaagccaacttagccccaggaatacttcaaagtcctctgtagaacaatttgacttcatatacattagaaaggcaatcatattagtcattgaatcgagttctttggggaaaagatgccaga

SEQ ID NO: 8096 - DNA, 509 bp, Cannabis sativa
aacacttgtactaaaataacaaatctttagttttccttttattccaatatacataaatatatttttttttttgacaccaagtataaatttggaaataattatttgacaagtggtgacaaatatctcatcaatcataaacttattttgctttcacaaaattttggaagatggagaaccacaaacttggctagtatggaatggctattattagcttgtgacattttggagatatcatagtcactccattactttagacaagtccacaaaaccaaaataatgatgggcccatagtaagggcccaagtttctaagttccaaccattcaggtgagtttggataggggcattattaaaaattaatgacacttggacacacattttaacataaacatgacatatttgtacagtattggatcaataactggaactcatctttaaaaaaacaattagtaactgggtatccaccatcatgaaatgttgttttacaaatggttagcaacaatttttataa

SEQ ID NO: 8097 - DNA, 1059 bp, Cannabis sativa
tgttgcgaaactgtgtttgtgcttgctaaagtttgtttgtcattgttccaaccgagttcagggtagtaaatggttcttaacccataaacagatgcatttaagagtttctttcaacaagttgtttcagttgcattaacttgttttagttgaggataatgtaaattttggactattttgtttttttttttttgtttccgaggaagattcatgtacagaatatcattttttgcatttgtcttgcagttataatgtatgtgcttctccctatgccattactgttttttgctggatctgatggcagtgctctattttctgaatctgacaataggttggtctttattttttccttcaaactatactttacttttccatctattatgaatacaaatattgtttccttactctttaacaaatcagctgggtgaatgctaccaagttcttgaccggagcttcatcagtcggaagtattgcaataccggctatcttaaagcatgctggtgtaattggttggggcgcaatggcaatggagttttcatccttcttcatatttgtacttgccataatgtgttacattcgtatgaatgatgaagacaattattacagtgccatctgagatgtaaccctacaaagtgcagcaacaactgaaaaaaaaaaggaaaataaaaaaaaaactgctacatgtgtgcaaagatatattatgattgtttatattacaattcttgtgtaaagaaaatgttggttcacaatgtgtgaggcttggtttccttctcccctatacgattgctacttatataatacatcttattcttttctattaaagttttctttgcgagatgctgattgtattgagaaacttactaataaaaatgaacatagattgaactcattttgtctagcaaaaataaaacttagaattgtaatctttgctgcaaggttatgaaaggaattcaactgttataacgattgtaaacgtagtaatgattttatgatgataacagtgtcaaaacattatacatgcctacttgtaataaagtcattttccttgtcagccatttaatc

SEQ ID NO: 8098 - DNA, 549 bp, Cannabis sativa
caatgaaattcttttgtgataagctactaaaattatcaggtcctgcaatcatatgcgcattgttgatataggtaatactaatggatctatttaagcatttctaattgtgtaatctcaaaacatgaccttcccaaatgatgcatatgattgcacagctgtattatttattattgaaacgaataaatagtttcagtgctatgtattattctctgtatatatatgtgcagagtgtggagccaacttcctttgatcatagtaacaaatattattatgtcgactcaatgtatatatatgaaattatgaattatgagagtgtgtgatatataatataatatatcatgtgtgtcttttcttgttgttgttgttgttgatatgaatgaagcatattagattatatttgtgtgtataaatatataagtggtagtagtaatggtggtcctacagtcctacaaagaaagaaaagggtccagtactctacttgtgtctgagagtgtcagtgaagtcatccaacacgagtatcatgacctattctacatcaatatatattca

SEQ ID NO: 8099 - DNA, 593 bp, Cannabis sativa
cctttttaaatccattagttgcatacactaattcaacataatctatccttaaatagattcttgagatcacagctcagcatgtataaatatatttatgtatatgtatcaaataataaggagcagggcaggtttgatcaaggaaaaacaaattaacttaaactaattagtacattaatattaaacaataaaagaagagacaactcactcaaatgaaagcatcatcatcatcttcaacagttggaaaagccaattcaagtgaactgttaagtaacactagtattgtcttcaaaaccatctcttcttctcagggcacattctacctcatcaattttagaccaatttgaactcattcctctgtaaaggaactcaaaagagactatcttggtatttactaatatccctataatgaccacaaaagcaaaacataatcccaaaccaaacaccaaaccattttgtctctcttcactttccaaaacaacaaggctagaaatcctcacaatctcaaaaatctcaactccattcaagtaagcattaggcacactagaccagttattttcagcccctaaaacaatacttatattgataaatccaca

SEQ ID NO: 8100 - DNA, 557 bp, Cannabis sativa
cccaaaatagcactggcaatgactttaggaggaagattagctccaggtcctctcacctcataatgaagagcaataagggagaaaataaatcctttacccttgctaccagaaatttgagcattaccaaggttaacaaagccttctataactttcattttgtcaacagcagtgataattgaagaaaccataataggagcatggggaagctcaaaattcatattttgaaagccaagtggggaagccgtagtagagatcatagaactcaaagcaccaagagtggaattgctaaacaaaatagctttatcctcaatagaagagccaacatccgagggaacaacaaaagaagtactactagtaagagtagcagacacaacttcagaggtgtaaaactggttcactacttcttgaagcgccttgttagaagagttgccatgaaatcccatctcttgcaaaggtgtagagttagaaagctcaaacaattttttttttaaagaaagacctagcataaacacgaaggtagtctatataacccaaaataggaggcacaattgattcat

SEQ ID NO: 8101 - DNA, 1642 bp, Cannabis sativa
ggtcgatcatgactttcttcccttgtccttagcaagcctaacctatttcgtagaagagtcagctgtgggagtcgcaataacatcactcttcctcttctgcgggatgatgggagatgtcgtcgcagttccagccttgggctttcggttgaggactaaagcttgcttcaggaaagtcatctctgcagagacaagcattaagataagtataaatctatgttatgttatgttacgaatacacgcgatgttttacctgatgttgctcgagaagtttgtttggatagatgtttgtctattctctcattttgcttctcaaaaggctccttgtacactggttcctgatgaaggctggcattctcggggattagcttatgttctcgcagctctacagtcgtgcacaacaatcgccaatcgcgatcttgaacaggtaggctaccgagaacttcagcgacctctttacgggcaggatccaaaacaggtcgagttggtctatctgcgatcattaaaaaacaaatattaacgacttcataaggtaacacaaatataaactaagtgttgagatatgcgacgtactatggcgatggttgaaatctgtcctaaaccctaattctttgaatacgtaaaatcacttagatttctaatcccccatattggaaaccatgccttctaccaaattaattttagaagtggcccgcttgctaaaacagtagaagccattgtcgtggcccacactctttatatcataaaagtaactgaaatcctccatcaagggctccctctgatcatattccatatacatcgcataaaaccctaaggctatgcaataactattcggggttaattggaaggaagagacgtcgtagcgtctcaggatagcttttatgaaagggtgaaaaggtactgaaaccccacatcgaagaatggggactgagataaccacgtcctccgtagggataatcgtagtattggtgaagggaagatgaggcctttgagatgtgcgaggacacatggtaccaagtcgcagcaaattccacctcgtgaatgtatttaggtctgatttggtaactcgcgagactaggtcctcgcatgagaagggttcgttcaattaggtgttgtcaaacgaatccgtctcacttccctcggcattccttcttccccttactcgcgataaggaacctcccaatcttcccccatctcctcgacttcgatgtcaggggcatgcctcgaatgaacatgatgttctcgggcggacaccgtggattcactgtcacgaatctcgattgtccctggttcggtgagttcctcaaccatcctttctatctcattaaaagacagtagacccaaagtcccagcttcagcaacaggtacctcctcctcaaaaattgagactggtatgaagttgttgcttctatcttgctcgttagcgaaagccccacctcctaagtcgagcatttggctgtctaataggtcgctcatctgaaagatagaagatcttttcagcgtggtgaaagtgcgaaaacaacataagtgacctcacccgcataaaaaacactactcaaagtataaaggattgacctggcatctcaagaaatggcttggggtatcccagtaacctaatgaacatgtcgttacatgaaaattaagg

SEQ ID NO: 8102 - DNA, 836 bp, Cannabis sativa
tgttacccatggtaaacagagtacacatgatttcgtcattggaggggcttctaatatgctctgcttggtcgccctaagagattttatcctggattaagtagttgcaattaaggtcgtgaccaatgttcgtctctataaaaattcctttaaagaattccataaattcattgtcaattaactctcttttggtgatccacatattgcctttattcaggatgctctcaatgacattccttcttcctctaatagtctccgaaagaaaaaagaacttagaacatttatcaccttccttcagccaagagaccctggctctttgcttccaatacaactcttttctcatccgtgcctcattaagagagcggcggataccactttcagtagcccactctctagatcctgtcgacaaactccgaatcctcctttccagatctttgattaaagtttcgattttaccaaattgggctctattccaatgcataagagcgactcgagcagccccaattttcttaaagaccctggccagagcccaaggataacttacagatttccaggcagaatcaactaccaatttgctcctttcatccctagtccagccttcctcaaacttaaagcaccttttgaatttttcttccaaactgccgaaaaacaggcacagaggatggtgatccgaattgcaagtctgggaggagcacagtacaactcttgggaacaacctaatccaagcaccattgactagtcatttgttgagagcagatttaacatggtttgcccaagatcggtggttatctcagggcagcttatcgccccggatcggcagattaatgagactcctagca

SEQ ID NO: 8103 - DNA, 661 bp, Cannabis sativa
tcccatgttcggcccttggctttcaacattatcattataccaatgcgttttttctgggctgaagtcatctgtcttccgtcgactaccagcttctttggcctcgggaagaatgctggaagtgttttattgttgccggcatccatggaagatggagatgctgaacggaggagcttccctacttctcaagctcatcgatcgagacggcaagtgatggggacatctcacggtgccactggcctcgggaagacgaagcgtgcggtgtggttccctaaaaattgcctttctggtggtgagagatcgattgccatttctggctttggtggtgaggcagggtctctgcaagcaggaaaggaaaaggatgacttacttgttttggagatgaacagtagggaccaaaggaatttcaatttgaagaccgttggtgaggataaaaggaaggatgggctttttgttaatgggccgagtggtgtgaatgttgggctggataatcaacaaatgagaaaaggaaagagcccactttaccagaatttaaatgagactattaatgtaaatgggcctccgccttcttctaaggaagctattctgtgtgggcccgagttagtggagtccttgggctttgataataatacaaaaaatctggaggggctgtctaatttagata

SEQ ID NO: 8104 - DNA, 676 bp, Cannabis sativa
aggtagaccgtagacaagtataccgctcctatagtcctatataaatatacagccgatctatgcgtaactttagaccttgcaaaaaaatcataggcgtttgatattaccattattgtatatttatatttatataatcattattattaatattaattacatgcataacataagtaagaactttctgttgcagctgcaagctcatgattctgatccctctatcaattaattcaatgcgactcataatttagctttttgactgagtttttatccaaacaacttttaactttttagtgattcgatcttataaagggaaaaggattaggtacatatacgttctatatttatataagtttatttattaagtaatcatttactacaataatgtaatacgactcaagaataaaacaaaattaaggtaaaccaaacttattatatatccaatttgtcttgtcaatcaattatagaagacaactaattaatcagcttaattaatttgttttttcttaattataattaaaaatgaaattgatattacatatacattagcaaatatattagcaactataaccgctctcattattggccaaggtgcgggtggaaagactttttgccaactaattaggcagcgatggttgatagaaaataaaaatatgatttgtttttatacatactagat

SEQ ID NO: 8105 - DNA, 944 bp, Cannabis sativa
aggcctcacgacaaaaataagcttgcctaaagaatcatgatacaactcaaatttggcacgtttggattggaccaccagccataacataacatgtcacagaagtagaactctatgcatattgccaaataaaaaaagaaataaaccaaaatacatatctagatctctcaagcacaatctggcacttcctaactatgatatccaaatccaatggtagtaaatatagacatacacagagataagtaccattaaccctactaattagcagatgcattataatttaacaagcttaacacagggaatataataagaaacttcattatatcatctttctttttccgagggaaaagcagagatattcattggcagccaatgtagttcaagctttagggcaccctggagtcaaaaagacaacagtcttcttgcccatatctgcaataatacaaccttttctggttgagtagatttttgggactcaggaccattattcagttagcttctctgttacctttttcctttccaaacaaagttgtggtcattttaacttgtgaaacttagtttttttaacaaataaacaattggaatgacaacaggaacaaagaaatcctcaagctcacaaaactagattgacttgttaactttacactcgtagcgatggacagttagctagaacatcgctataggaacacatagaaatctcaaatacatgatggagctatcatcagctaaaatataagagcaaggacaggacctcctgtactcaccatccacaaaacaccaactacaatgcccaaatttaatggacaagtgcatgaagtgtcctatttactaacctccattgtttacaaattttacatgcttgaagcttgcagaacttgggaaacacatctgcagagcctcaatatcctcatgtatccaacttcaagattctcagctgcagatctaat

SEQ ID NO: 8106 - DNA, 2027 bp, Cannabis sativa
acaaatgaaaaaaattataatatagaaaatatagatgtaaaaatataaaatatcatagtataaatgtaaagttttttaaaaatataatattttgtgtaaaaactcttaaaaattatatgaggtctactactttattgtatcaatagtgtactggtaccttttagtattttatggtgactaccaaatgattataaatttattataactatgatagttacattttaatatgtgatttttttaagaagaattaaattaattaatcataaataattaattattttcttgaaataattaaaattttaatttaaatatttaccaagactctttttagcaattaatatttatatataattttagttttatatttaaatccctattataatttttttaacagttaaaccatttaactataataattattgtaaaattctattttttttacaaaatttagacttccacccccttcttaaataaattttagaataactaattattttttaaaatgacatctaattatttttttggtcaatcatgtaaatatattccacatatcaaacttaacatcctagcagcatctttttcatatatctgcaacctctatttacaaatgctcaaactattttatatcatgttttgccactttcttaggcatactactagttttaattctaacgttaatatcatatttaatcctctttacaattacatcaattgtataaatttgcatgttccaaagagcttcatccatgcaccaccaaatgtggtaaattttcaccgctattgttgctgaataaacttggcgtcagaaacaaatcattttgatgctagtcagtcattggtgtaggctcggtattgtccttactgttatattctagttcagccaactttttatttcagcaaggacatgaatgcttaagtgacaattgaaaatcaatgctttccattttctttacctaatccacaaatcggacacacctcatccaagaaattattgtatctaaacaaccttgacttaaatctcaatctatccaataccacaagctacaatatgaatctatgctttggtatagacagtctattccagaccttcctaagccaattaataggagaaactcaggacacagattagcatatccattccttatcaaatatgtacctgttgtaacagttggaaggatattcatctctataattttgttcttcactcgcataatctgttttcagtaccagctactggagggaggtgcgtcataggccctcctccaaccttcttctctaatgtatactgtattcacccatttcactaaaagtgtgttctacttcgtttcacttgcccaaacatatttcctattacggcttcattctattctttggttcttccaaaccccaatcgaccttgtttttttatttacacaagtcttccaaagctaccgatcttgggccatttatatccaccctttcccatagaaaccttctacaaatagagtttactttttgaagaagcttttgatgtgattgtgaacaataagaatgaataacaattaggactaaattaccaaagtttcctaacctacataagacaagttccttgagcttcatactttgattctttggaccatattttctatcaaaacatcacttttggcaataggtatttttttggcaaaaattgaaataccaagatattagaaaggcaactgactcctaccaaaattggacacctccaccaccctctgaatttcattgttagccatgttacaacaaaaaaaaaaaaaaaataagattgggttcgcttggttgtagcccaaattattgagaaaaaattttgagaccttgaagcatgtgatagattgacttgaaatctccatgataaaaagtagtacaacattcgcaaagcatagatgtaacaattgtagtttctcacaacgctcatggagtttaacatcatctttctccctaactttcatcattaatcttgatagatatttcttgcctaggataaagagaaaaggagacatagggtctcc

SEQ ID NO: 8107 - DNA, 2289 bp, Cannabis sativa
  modified_base (934)..(940): a, c, t, g, unknown or other
taaattgatctaatccaatgacaacagaccgattcaatccaatgacaatcgactaattcagttacaaccgactgctaaacgttggacattcaattttgatcagatcagattagatgttatttttgaaaatctaattggatcggatcaaatgatggataatgtgtccaaaatccaatacatcaaacatatataaatagtatatatatatatgcatttaacacgtatcatttttgtcagcatttaacaggtctgttagattgggtatcgataaacttacaaaaatagtgaccttggggactattaccgctaatttttgaggttggagacttatctacatcaaacataggtttttggagacttatgccgcaattttccctattaattattacgaccaaaatttttaatacaatgtaagttgtattatttaatacataacaaatggaccgtattagcttgtattataatatttacaaagaatccggagtcaacctcaatcttcaatcctgtctcgaacctagactaagacttggacctgaatccgaacgtggacctgaacccggactcaagattcgaactcggaccctcacccgaacttgggactcggacccggacttagacctagactccgacctaaacgcgaacgcggacctaaacgcagacacaaacccggaaaatggacctgaacctggacccaaacgcgaacacggacctggatgcgagccttggtcaggcgaaaaaattaaggggcacttaaaaacttctaaagagaaatcttaaaaaagaatagagagaaacactggtttatcaattttcgttgttgcaaaattttatttgtacataaaacttaaggtgattctacaatgcacctccttaaaacagatgtattgatgcaccttctacttgtttcggcatccagaagaattttttagtctannnnnnntcatattcatgtacgttataactagttaagatatcctacaaaattttaaaaaattcagattaatttaccatgtacaatataatattcaaatagtgtattttacatgtgtataaaataaaatagtcacgcgtgcaacatactatttgaacgcaatttttggcgtgttaaacttttatgaatttcttaaaattttgcaggatgtcttaaataactataatttacataaccataagaaaaaatttgactaaaaaattatttcagatgctaaaatagatagagatgtatcgatgcattccttttaaaggggtgcattattgtaacgtcctcgcttcaagcttctattggacctttacacccacagattaatagctcttatacacgagtataatacgagtgtttccagtatgttttgtccttactcgcactttcatgatgggctaccgaaaaacaagatacaccttgttgatatatgtagtagtaatcaatctatttaagtcttctttaactgtgtagtctcatacctacacagatcactaatatagaaatggtaattaaattgattgacaacaagtgaggccatgctaaaaactaacctaatctaatgcatgcaatgtcctcgttaatttttgcctacgctgaaacacttcccaatcaattattttgctctttcagctattaaaattcttattaagcaaaaaaaaaaactattaaaactctcgagttatttatttttgtttgttcgaatctccatcatataattttaaaaaagaaaaaaaaatctccatcattttcaatcaacaatttttgtaaactctaaaaattacaattttttaaaaaaagaagaaaaagaaaaatcttattaagaaacagtaacgtgtaagactttgttaaaatgtaatatagtgactgacgtgttgaaatttcatctacgaaactcagcgtctccatctccatgcatctacgctcatccaaccaatcaagggaaagcaaccaagggtaaaagagtcacgaaataaaatatctaaagggtacgatagggacaaacgaaagagttggtgaacaagacagctcaacggcaccacgtggcacgatcaaaataatagtatccaaatccaacggtgaatgagaactgtttgactgtagatttgatgatgatgatgaggcggtgcatggagagtgatgcagtcaccgaagagagatatagattatatctgttcccattgtttggagccgaccattgtgtaatagggtctctcttttctttctctctcgaaaaaggaagacccttcttattatttttaatcaatcctttgctccttatcacttttctttctccctcttctgattct

SEQ ID NO: 8108 - DNA, 1120 bp, Cannabis sativa
ttataggatatcctataggcatgaaggcttataagctgcttgacctgaataccaacagagttttctgctgaagagatgttgtttttcatgaaaccttgtctccttttgtaaattttgttgctattccaccagattttcaaaacaaatttcctgtttctgggcttgtgtcatctacaattccatctcctcattttgaatttacattagcttcaaatcctagtgttaatcatcaacatgccagaccatcttgaactgttaccaaaccatcttaccttaatgattatcattgctacctacctgctaataatcttgctgttccttcacaggatacaatgccagtcactacacatgctctaagctatctcccaagtttcgagctattgttttatctatttccagtcatcctgatccagtttgctttggtcaagctaaaggaattctagcatgggataatgcaatggataatgagattgatgcctttgaaaagaatgatacttagatagtggttactcttcttgcagatcagcatgtcattggttgtaagtgggtttagaaaattaaatacaatgttgatggttccaattgaaagatttaaggtaagacttgtagctaaagggtataaccaacttgaaggtattgattatcatgatacctttgctcctgtcaccaagttagtttctgttaaactcattcttgctttagctactgttcatggctagtttttacattaacttgatgtaaacaatgcattctttcatgggaatcttcatgaagatgtctatatgactctacctcttaggtatagtcctaagggggagaacaaattaccaccaaatgttgtttgtaagcttcaaaagtcattgtatggcttaaagcaagcatttagataatggtttgcaaagttctctacaacccttttagaggagggattttctcattcagctactgatcattcaatgctcataaatcactcatctacttgttttgtcatcttacttgcctatgcagatgacgttatacttgctagcaataacattactgaattagaagcttaaagttgagattgaatgacgggttcaagcttaaggatttgggggatctgaaatactttctcagcttg

SEQ ID NO: 8109 - DNA, 750 bp, Cannabis sativa
tagatatatattgtcatgaacatttcactgatcattttattattgtttttcataggctggacctggtacaattgctgaggccttgattagggggcttcccattatcttaaatgactacattccaggacaagtaagtgatcattttcttctcagtttttctgtttttttgttaaatccatttacttttagatcttttattgaccctttttcatttggggacaataatttcaggaaaagggaaatgtgccttatgttgttgataatggagctggtgtcttcacaagaagtcctaaggagacagccagactagtagctgaatggtttagtaccaaagctgatgaactcaagagaatgtctgagaatgcacttaaactagctcaaccagaggctgttttcgacattgttagagacattcatgaactcgccgagcaacgcggccctctagcacgcattccctacatgctgacttcgtcattcacaagcttaatttaagttgattcattgtgtctttcctccaatgtttacagggaaattcactaatagaatattgcatgtacaggttgttattagttccaaggttattatcattctttggtctttagaagcttgttttgttttctttaaaaaagaatgctagaacaagctctgatgtttgtaaggcttgtgattgtttactttctttccaattaagttatttatttgaaaaaaaaaagtaggataattgggtcatgataatgttgtatgtaatat

SEQ ID NO: 8110 - DNA, 744 bp, Cannabis sativa
tctaatcacatagtagttttttaaattatacaaaagaaaaaagaatgagaatgaaatgttaattaataattgtaaaatatcgtgttttagtgtttatttatttattattattattattttaataatatgaatttttttttgaaaaataaattttaagagtgcaatacgaggactttccacgcttaactgcggagttctgatgagatccagtgcattagtggtggtatgatcacactttttctattgtcattttagtatatattatcatgcaattattttatttgaacaaaataaataattccattcaaaaaaggcacaagctaaataaatccagcaatcaatacaagcaaaaaaattaaggctaaaattaaagtaaattaggcaaaagattcagttaccaaactatcgaaaatcataaagagccaacttaactaaaaaaaaaaaaaaaagaaagagcattattaatttgcttataataaaggatagaaatataaaagaataactttcaaacataaaaaatatcattaataatagtactatactcattgtaaatctgtattttattaaacataccgaattcactcaacacaaatgatcagagaacacataaatgcaagaataccccaacttcttacaaagaagaagacactgtaagagggctaggagcttccgcaattccgccacatgaggtaatattaaaaattagtgatatttgttttaacatatatgctgttatgtttaata

SEQ ID NO: 8111 - DNA, 531 bp, Cannabis sativa
agagagagagaatgagtgttgttattgttgcatgcccaaaagagagaagggcaggggttttttgagctggccgacgagtctctcggcgcaccggacacgcgcactctttccttttattcttcttaactttctctttctaatttttttgatttttctactacactctctctacctcctattaaatctatattacttttcggacaagaccagaccaaacaattaaaaagataaatataaataattcaatattaaaattcgcattccttcttctctatttaaatatattttattttattacatttgttaagactatctttttaatgcacatattaaactgtagtactataatttatgagatagtaaatgtaaacatgtagatatgtgtgactgcgaccgattcgaaatctgggttaagaaaaacatatttctttttttttccttttttcttttaagtattattaccaccctatgattctgtcccattcgtttttccagatgttttggcgtttttcccgcctagttctttttttt

SEQ ID NO: 8112 - DNA, 664 bp, Cannabis sativa
taagtttaatatttatttttatcgaacaataatcctctctatagttcctactctttatcctttctaaactcttcatcctcctttctactctctctcattccgactaaacatagcctaaatgatgagaactagcttggggagttaatatgggaatgggatacactgaaaccaaactctctacatacataatcaaaagtttaaaagaaatgaagatgattacaacattccttaagtactagtgtatgattatgatcatgatcatgatgttcctcatctagatcatactccataaatctcttgagaaaataaaccccttttccttattcaaaactcatagaccattgaacaaatagttaaattcaaaactctctacatacgtgttgaaaggtatttgttagctaatttgttatgtcataggacaccacttgggctgcgtaacaggccaaatcccattcgggagtgtgcagcagacacttggttgaagagtgaagactgcaatccacttgcacctataggagagtaggagacaaggggttgatgcaagtagataaaaacacaaacacctagagcattgctattggatactaataccagtaatgtttagtactttctagatgtgtcgccttgcgattggttattaatactgcttaaaaattattatatt

SEQ ID NO: 8113 - DNA, 1014 bp, Cannabis sativa
cactaatcgactgcctaacaacgtatgagaagtggtcaggtcaatcttgcagtaaacacaagtcaagcgttcttttctcgagtaacatgagtagagataggaaggaattcattctgagcctcctccaaattgagcaatgtcgcggagaggaaagacatttgggtaatccttttgtgtttaaaagaaggaaaaaagatgaatacataaggcttaaggagagtatgcaaaagaggttagaagggtggaaaatgaaactcctatcctatgcaggccgcctaaccttaattaaatctgtagcctcagctatcccaatctatgccatgtctactaacaaaatcccaatctccagctgccatgagcttgattctttaatgaggaaattttggtggttggggaatgtggagaagagtagattcctagctctcaaagcttgggatcaaatttgtcaaccaaaaatgtcaggtggattgggacttcggaagtgtacagaaatgaacaaagccctcttgtcaaagttagcttggagccttgcaacaaaggaagatagaccttgggtctcttgtttattgaacaaatactgcaggttcgagagcttttggtgtgttaatcaaaaaagtagtgactctagtcaatggaagtgcatcttggaagccagggacacgattcttaaaggctcaatgagcgttgctgcttcaggagagagtatcaatttttggcgacaaccatggatcccatggttagagtatcaagaattcatggagttaatgaacaacttaagaaatagaggatacacggtccagaatttggcagatgtatcgttgaaccattgctggaatgaggagttgattcttcagatttttggtaatgaattgggcaatcggattctcaatattccaagaatcccaagcccgtttgaagatcaagtgttttggaagggaaatcagaagggatcgttctcagttaaaggagcgtatagcgtggacaactcttggagatttgcaccagtgagggaaa

SEQ ID NO: 8114 - DNA, 1014 bp, Cannabis sativa
ataaatagtctaataataatattacagaaaaaataacaaatagtgtattaatagaaatatagatatgagaaaaaaccatttattaagaaataacagaaataaagtctttccctaaaataataaaaaaagaatataaagaaaagaagaaaaaaataaaaaaataaaaaaaacacaaagagtaacagttgatatttcaagaaagaaaaaaaataatcaaaaatcatgtttttggatcaactgaaaacatggaaagtttgttttcaaaattcttctaataattttgagtttgttttttaaatcaattttcaaaaataataaaccaatcaagttttctgtataggtcccacactttttaagttttaaaacataaaatcaaattcaaatcctataccaatcacactctaatattttgagaattctacatttttccactctacatcactattgatttttcgaggtctgtcaaggtcttggatgacattgttgtgacaagttccttgtgtccgggaccctttaggcggtagacaatacgcttttcgagcccttttttgttttctttcttgtgttcttgattttgttgtctaagaactatatgttccggtaaataaggtttagtggggacctttctaagcagttaccgtgaggactcttcctatactcttactatgtcttccttagtttgggtactaattgcttgatgttcgttttcctttttaaatcttacaatgtcagattaaaatcttctcgtgggctaacacgaaaaggacattgaagaccgggcaagccaccgacagaatatacttgcatgtcttgagttagcggagggcccgcaaaaacaaggaacgatttgggaaatcgaagacattttgaaccatttccacaactaccaaatgttgttgaagctggaggatgattgtggcttcatgaacaccccttgtctcttttggattcgtctggcccgaaaggatgaaaaagccaacagtaatgccaatgggtgcttactatttttaaaag

SEQ ID NO: 8115 - DNA, 1180 bp, Cannabis sativa
atatgttcttgatgagaactcctcaaaactttctcaagccactttacaatgccacctggccacagtttcaaaatcgaataattccataggaaattccactagcagtactttttcttcatgtaataatgattgtacctctaattttgtgagcagtagctcacctatcaattgtacagatcatgctattaataaaaattcaatagtttctaagaatcaaccacaagtattgctatcttctgctagctgtgatatcaatatgtggcaccaaaaactcggtcatcctggaccaaatatcctcaaacagattatgtctactatgtcattaccaacatcattaaaggaactaaaattttgtgatgcttgccaaaaaggaaaaagccataaattaccctttactctgtctaacagcagggctgcacaaccgcttgaactccttcacaccgatgtgtggggaccctcacacacaccctctatagatggttttagatattacatacatttcatagatgactatagtagattcacatggatttttcctctcacccttagatcccaagcatatgaagtcttcacccgttttaaaacacttgttgaaaaacaattttctttacctattaaatctgttcaatctgactggggaggagaatatagggtgtttgctaattttttgcaggaacaaggcattctttttcaacatccatgtccacattcacatgagcaaaatggtcgtgccgaaagaaagcatcgacacatcacagaaaccggtcttaccttattagcacaagcaaatcttgatatgtcatattggtggcatgcctttcaatgtggagtgtacacaattaatagattgcccacaaaaatccttgactacagcagcccatatcaatgtttattcaacaaaaggcctgactacaagtctctaaggacattcggctgcatctgctaccctcaccttcgaccatatcactctcataaaatgagcttcagatctgaaccatgcaggttcctaggctactctcccaaccacaaaggatatatatgtgaaagttccaatggccgaagatatattgcaagggatgtcacttttaatgagcaacaattcacctttcccaactcaccttctataaaccagcaacccactacaaatttaccctccactcaatttcatacacaaccaact

SEQ ID NO: 8116 - DNA, 698 bp, Cannabis sativa
tttgcaaaataatattaaatcatctgcaaaatagagactaatcaacttgagattcttacaaagagggtgaaaacaaaaggtacctcctttagattattgcaacaatcttctagtaaggaattccattaccaacacaaataaaagaggagaaattagatcaccttgtctgagctccttgttgccgttgaattttccttgaagcctaccattcatcattagattataagatattcctcttaggcatgtcataatccacttcagaaattttgcaagaaaacaaagaagattcagccagttctgcaggaaactccagtcaaccgtatcataagctttgctgagatctatctttaaagcacaccaaggagaggaattctttctattgtagttcttgataagatcctggaatattagaatgttgtgagcaattgttctctattgaatgaaagctccttggttctgattgatcaagattggcaagacctcaccaagcctagagcacaacagctttgaaatataaatgtaagttgtacagcaggcaatcggcctagagtcaactgcacaagaaggagcataagtgtttgggattaaggaaattgttgtttcattgaaaacatcaggaatgctttctgtattgaggaagttctgaatagcagaacaaaattatgctcccaatgcaagccacatattcttatagaatt

SEQ ID NO: 8117 - DNA, 510 bp, Cannabis sativa
caagtcaaaaagcatcaaagtcagcaaaaatattaaataaaacggctacatgccacaccaatgttaatatcttatattgtataatgaatatcaagtgtaatttaatggagcattgctattaggtagcagtgctgtttagcacattcttgacatgtcgtgttgtgattggctaacgatacttcctaaaaattattatattaaattatatgagacccgatacttaattggaccaatagagatattgacacataagagggtgctaggtaccactggtgtcctttagcatttctcttacttattggtttaatttaaaatcaatatttcaataaaaaaaatagtaaaaggtgttagtagttttctaattatcatatcattattaatgtaaataattatcgaatcctatttaattaaaaaaatatcttttaaaaaatatcgttaattattataaaatatcacttataaaaaatagtgaatattattagtacccaataataatactctttaatttaa

SEQ ID NO: 8118 - DNA, 1142 bp, Cannabis sativa
gtagttgagctagctagaagtttaggtagagaatagaatatcatgtatcttgacttttgaataaattatttcattaattaatttattgaatctgttggttaatataattgtatactaggtacgtaccataatgtgggttatatacgttgattaactatctaaattaatatgtctcttacttccgagtacttttgactatctaaatttttttttatattttgaataagaattatatttaatacatatatatatatatatatagctcattgttttgtattaaaaaaatattagagcttcttgtctatatactatattaattttgcaaaatttaaacaatattaaaaaggactcagtgtacttattggaacaaatatttactaattaataaaaaagcaactcttaattaaattgtataataaaaaaatttagctaattaataattgtgtaattatttttggtaattaaggataataattctggtattttttttttgtgtcacaaaatatattacatggaattaatgattttcaccatatatatacaatgaatttagacatatatatatttgacaattttttttttgaaatgatatatatttgacaatttgaaagacaataattaaccatcaaataagaaaccctaatcagatatttattatattttaattatgaatgtctattatttccttttattattatttaaatccgaattaatgctgatattgtataaaattaacattgatacaacatatgtgcaaaaattgtatggacgtatatttttttgggtaaaatttagcctcatcaaaatctaattaaaaggaaaaaccctgatataaagctcgcactctatgaaaactagcattagcgagacaatcaaggttggtcagactaccatacatatagtgagacaacgagaaagctagtttttatagagtgcgagctttaaggacatcccactttgttcaataaaatttacaaaccgctcaattcgaataaaccgtccaaaccaaactaaataaatcgataaaaatacaacccgaaataatacaataaaaatccaaaccgctcaatgaatatattaggtaatttacaaattattcaaaacctcccaattaacttacataaatcgatttatacattttt

SEQ ID NO: 8119 - DNA, 1027 bp, Cannabis sativa
ttagtacacactttaattttgaggatttaattttggtttcagataatgaagagacaaaccctgacgaaacaatcatggaattgcattcttatgagggatgaagacatagcaggagctttagggatgttcttgtctataaaatcctgaacaattttctcagcttgggggcaacttttggaataaaaacccatttggagttgagcttgagtttgttgtacaaaagctgtaaggcctaaagtgatgaacacaaaacagtatagcccactcattttcattttctctctatttactctttttttagagtatggagataatagacaatgttactgtaaatgtaaagcttgaacttgtgggcttatctctggaatagggaaaggaaatgtgtatatatatagaaagatcactctccagtccagtactacttgtgttgcaaggtaagaagcaagacaggggatgaggatggcgatgatgataatagaaattagtattattatataatttaaaaaaaaacaacaagaaggggaaaaaaaaagattataaaaataatccagctatccaactgccacaaataattataatgtataaagaatacttggtcctgtttcttatcaaaaagaaaaaaaggaaaaaagaaaaaaaaaagaaaagaacaccttaaacttgacatatataattggcaaagaaactatatatttaaaaaatgagtagttaggctcgtccctcaatgacaaaggaagtaggttatgttacttgctctttgttttctttaaattgattaattttaattatttattagtatatataatattattatttttaaagtggctgtattttattatacttgcttgtgtcggcctcaatctctcaaatctcacccggttaattgggaatcttggttaataaataagaagaaaaaagatccaaaaaggtcacttgggtaagttttttttttttttttttgaaagagtaacataggtaagtttgactgccctatacttaccactgtttcatgtgcacgtaatatatt

SEQ ID NO: 8120 - DNA, 1271 bp, Cannabis sativa
tcaaaaccaaataaattgtcaattcatttgaatagctacgcactagcatatagccacaatgtcaatgatcaaactataaaagttattaattggattttttatgttgttaaatgataaaatagaccatgtgttttttaaaatagtaaaaataagacttcgagcttaattttcaataattttattttttaatataactaacttcaagacaatttatagcacgaatagatacaaaaaatgtaagcagttttatcataacatctctatgtcagattattattaagttttatttcgacaaaaaatcagttcaaaatcttatttgtacaattttaaaaattacagaatttattttgttatttattaaaataaatagtctaattaataatttttacaaaacataaaatttaaaataatatttaccctaaacataaattagaaacacttctaaaattaacttcaaacaacataaatgttctcttttcaattaaaaattatatatgaatttaatttttctaaaatacttaaatcaattaaatgggagtttcacattattaagactattaaaaatgataaaaataatttcataatttcaaaccaatcagaaccttaacaagttttctaaaacaatatcactaataaataatgtactcttttttgtcagagatattttaaaataaataaataaataatgtactcttttttttttttacagaagtatttcactcatatttaaaaaaaataaaaaataataaaaaagtactcattcacattatttagtgtatttatggatgtcactaaataaaatattaatgccgttgactataatgaatatcttccacatttgtaataaacattattaatttataaatactactgaaatttcttttttttttttatgagaaaaattcattgttattatataatcacatgtaacaaaataaggctaggaatttcactcattttaaaagtatttccatccaactttacaacatattttgttaactatgaacaactcagttagcattcctaagaaataatagtaatattattaaacgtcacacatataatatgtattattgaagtgttggtttggaaaatttattactttttttcaaactttcaataatataagcattaagtattattaagtaagttaaatattgtgttatcatgtacacttttacaaataaataattattttggattatgaaagggaaacaatatgattttctttcaatattctgatgattctatgtgtgatgatgttaattgtg

SEQ ID NO: 8121 - DNA, 657 bp, Cannabis sativa
tccgggtccggggttggagtcccggaccaggtctaggtcccggtccctgtcccggtcccggtcccagtctgggtccgcgtccgggtctcgggtcccggttcgggtttgggtccctgtttccaatataattcttttctttctaaagactcattaagcgaccactgaatttcactctcctccttccaatctcgtgtgccagcaggtaacttttacaaatagtcaagcttctgttccagctcttttatggcagtgtcaagattaggaaattgagatctattccattgtaaaagagcaactcaagtagccctaattttcttaaaaattctagcgggggccaaaactgaaccaccgagttccaggcatgggcaacaaccaatttactcctttcatctagagcccatctttcttcaaacttgaaactccttttaaatttgacatttgaagctacccaagtataaacacaggggcctatgattagaatttctcttttgggaagaacacaaaacaccttttaggaataagttgatccaaccaacattaactagccccttgtctaaggctgacttaatgtggtccttaccagagcaatagttatttcaagtcatcttatccccttggatagacaaattaattagacctcgagactccaccaaattg

SEQ ID NO: 8122 - DNA, 660 bp, Cannabis sativa
tggaatttagagaaaaacaacttgggacaacgcaaatgagtcgaacaaataaagcaaagcaaacaaattgagccaaaaagaagagctatcaagtgtatctgtctatggacaatgctaataataacatcccacactgaaagattttaatcgttttttactttgaacaaagaaagaaatccaaaatatgtacctttgagagcgaggtccaagcaatgcaacagagagatctttatctaattccaaggccttgtggaatttcccatcgaaatccccataaaactcaatctgcaaaggcagataattgggctgtgctaagatattcggctgactatataatgctaattgagcatgaatttggtcaaactaagaaaatttagcatagaagcattatagataaacaaatgtcacatggggactcaagtgttcacaaatgacttacagcatctttggcttcaagtttctctgcccagccatttaaagcaaacgggtcattcacagctacacaaattacagaatcaattcctttagccttaaacttgtcaatgttgttcttgtaactgggcacatgttgctgagaacaaactccagtatatgcaccctggaatgtgataaatgctaagtctggtaaattgaatttgaaacattaacattaaatgagat

SEQ ID NO: 8123 - DNA, 523 bp, Cannabis sativa
tttccaccaagtgctctaattcgtggaaggggtagacatatcagtttcttcaaggttaacagccagatgataccccgattgaacagtatactcactggtattagtgaagtgccatatccatcgatcagtaacattagaagtagatagaggaattgataggatgtactcaatgtcaacagctgagaaatctcgagtaagaagaggaagattccattctctatcggctgtaatgtaaaaagagactaaattttgaggagcacccgagtatcgaagaggggtgaactcagaatgccgaggtatccatggatcagaaagacatttgataccagaaccatccccaatttttaatcttaagcctttcacaagaagatcacgaccccaacaaataccttgccaagttaatgaagagcagccagatttttgagcagtcaagaaatcattatttgaaaaataccttccttttaaaacacagctgagaagagaattagggaattgaataatcctccaagcttgtttggcaagt

SEQ ID NO: 8124 - DNA, 692 bp, Cannabis sativa
tagtttaataaacaaccccatatataacctttatctctacaatattgttgtaaattactaaactagtatcatttaattctcaaaattttaaaatcataccattatacttaggtactaaataattttgtgagagtcttagtggactttgaattaattcaaaatgaatcatattaacatagcaataacacttttcttggttgaaatttaaaggaaactaaacaacattgtattgctccttagctaatattgtatgattattattgttattgaagagattgaaagaagtaattttagtaatgtaattcttattgtaataagtgagtggaaaatatagggtacacataattttatttacaatttttatttttattttttaattttttaaataaatttttacgtggaccaataaaattgtactatatgtatactatgttcacatagatgtatatatgggcagtccaacatggcacttaatacctaaaatagatagaaatgttaaattgctaacagaagacgagtattgtagattttccagctaaaatttgagttttaagagttaagtacaagtaaaataaaagtattaggagtgttacgacactctctgggctctctagcccctatcttcgtcactgtatataaatcataaggttcctaggcgtatggaatgcctctgccccatgaactggacctca

SEQ ID NO: 8125 - DNA, 1254 bp, Cannabis sativa
ttgaaaataatctctctgtttgtcttttcttttttgaaattgaactttctgctcatagtaaagataattttgatgatgaataatgtgattttcatatgtcatgcattgtaatatctttacattttttttagctagaactttcgtcgaacaagttatgtgcaatctgtaaaataacaatttgttgttgaatattattttcttagatcgttccaactgtatggaaagcattatgggtaaaagaaaatcagaaagaaacattaaatgaagcaagtgagaatctagagtttctagagaaagagctgaaaggcaaatactttggaggagaaagcattggaatggtggacatagcagcaaatttcgtagcccaatggattccagctgtacaagagcttgtgggaatagagatgttgatagagacaaagtttcccaagctctgtaaatggagccatgattttgctgctcatcctgtggtcaaggatgtattaccctctaaagaagaactcaatgcacacttcaggcctcgtttaaatatcacccattgaaaaatgattcagaatttgtaattaatatggataaagtttgtaagatcaaatatttgtcgatgttaatgctgcttaatattgggaattttggcaatgcaaacttttgttcaatatttatggatgttaatgctggttgatatttacgatttatctattttagttatgtccatagaatagtatagggcgctggtaagcacttgagccacactcaagtggccataagagataagagagtctgtatatgttagaggtcctaagtttgagtctatattgtaatattttttttttttagaaaacttgtacttcattagaataaatagtgagagtacagagcaatcaagttatatagaaggtaattatttcaaaccaattcattatttagtcttaattttaacttttatgagctaactcattagaatctctatacaataaaacgtcatctcgtggactaccattccaattacaagaattgagcttatctactatagttttacactcagtttttaacacatccacaggaaggtgaagcagttgaatccattgaacaacatgaaaaattgccttcgctttggctatgacagcagaaacactgccaatacaaggcttggatatcacagttttaactctatccaattcatccaaaactacaatgccgaagctatgtttcctattatgatgatcaatggcaacatcagtaaaaacctgaaaaata

SEQ ID NO: 8126 - DNA, 635 bp, Cannabis sativa
ttaataatagtactgcggctgcttggcaaattggcaatggcgtctctgagattttactagtagtagtatagtactacacctcattctcatttgctgagttgtttttactactacttggattggtttgtctttgtgacttgtgacttgtgactgttaccctgcacgtggctgttttattattggtgttgtaagtgagctttgaactggtcattaaataaaaacaaaacaaaacaaataattgcatccctcctcaatccaaattccaaaccacacttcgcccagtcacaatccagtcccctccacaacaactacctataccctacattcctaaacaaaaactacaatatcttctgttcttttctttttctaattatatactctaatcattcattgtaaaaatagtgtacaaatttgagcacaacatgacccatgtatatttatgatacgacaagtatttacacagctctaccaaaagtataaccatacaaataaacttaccaacaacccataaataaacattcacccattcaattcaattcatttttaattcacattctaaaatgaatattggtgatcaccaccattcattcttgttgacatgacattcaatttaggcctaattactcttccaacac

SEQ ID NO: 8127 - DNA, 705 bp, Cannabis sativa
gaagctttgtgctttaagacaaagtctttccaaaggccaaattcttacagctggtcataagggtaagtttaaagcttccttactttataatagtaccattcttcaacaactagtgttatattcaggtgcagtttggaatagagttaatatgcctaaacataaatttatgttatgacaagttttaaactctcatttgctcactagggatcaactaactcggtttagtatttccttgaagacttttctatgtgttgtttgtgggctctttaatgagagtcatacccacttatttttctagtgtagcttatctaagaaagttacagatgagaactttttgtggctaggtttttttgcctggccaaaagactacgagagttggaccacttggctggttagcaagacatcaggggtgattgctgctgttataattgccacacaggcagcttgtgtttatcacattgggtctaactataacaagtgtctttttgaaggcttcccaaaaaatattaatgctatagtcaaagagataaaacaggttattgtttacagattatagtataggaagttatctttagatgaaagaaattttttcataagattaaaatgtaaactttagtttttttgattgggcagtttttttttgctgtcgttttacttgtattgttttgatttttttgctagtgattaatgttttttttttttttt

SEQ ID NO: 8128 - DNA, 1173 bp, Cannabis sativa
atagaagtaatcactcgtagaaataatgctcagaaataattggttcatcttttttttttcacatgaaataaataagtaaatggaagcttaaaaaaaatctttcacacatattactttacaaatgataaatatgcatgggataatgatttttgttggataaaaaaagaggaagactatatcctttgtgttattatgagacacaattgcagacgcgatgatagttaaagaataaaagaaaatagggaaaagaaagaaaagtagaaaatgcatttcattgaagagattagaaatctctgaatctgatttcgcatcaaaagaagaccctttatatgtatatattttttgaaatgggattcactaattaggaaagaaatggctcatcaactcgaagagtttgacgaacataattaagggggtgtaatcccaatccatatagcactagctttgaataataaagcttaattgactaaaatgtgagccacaatattgacttctctaaaaataaaaaaataaataaaaaacaaacccaacaccttcaaatgaagcaacagtgaacaaatttggtgtagaaatcatcaatgtcccgacaactattatctttttcttgaatcagctgaaccgcccttaaacaatctgtttctacattaaatttcctagcactgtgttggatcccaactaataatacttcccgaatacccataaattcaacttccagcacttgtttttcttgttgcatatatttgggtggtgcaaataggagatctccacgatcccctctcgatcgccacataactcatagcaagacacccatctttgcaatgtagatctgcatcgacattgattttaagacaaccttctgttggccagttcagtgaacattttctctagtagcaaccactttattcttcccattggaatcttctgtaaaagcttatcacacaaatctaccatgtccccagctcgcgggcagacaccccccatggatcaacacttgttctaatgttccatacatttcaagccacaataagaaagaaatcaaatgtagtagtaggccatacctctctcatttcttccatgaaggttatcacgtctgtactacgtttatctttgaattgatgtcatagcccacactacttccaatctatcacactatagcgacaaccccataacaca

SEQ ID NO: 8129 - DNA, 819 bp, Cannabis sativa
gactatttctcaaaatggattgaatcatactcctttactcatatctaggatagtgaagtcaaaaaaaaatttctggaagaatatactttgtcgatatggattgccccaagatatagtggctgacaatggatcccaattcataagccgtaagttcaataattcctgcgagcagtggaaaaataaccttgtattttcaacatcacattatccataaaggaatggacaggctgaatcctcgaacaaggtcgttatgaacaatatcaagaaatggctcaaaaacaccaaagaaaggtgggccttggagtcctctgagtgaactagaaagcacccagggtcaggaccaaagagacccctttttcactagtatatggaatggaggccgtcatcctaacataaacataggtcttgacttgaataacaagaattaacaccaaggaaaatgcctttctgctactgcagacggaagaagacctagaagagaaaatggagcaggctttttattttgaatgcaaaaccattactcaaaagtatccatgcaatacaataagaaagtcaagcccaggaatttcctcccagaggagttggtctgaagaaaagtttttaaaaaaatcgaggaatactaggcgggaaaattatctaccaagagggaaggaccgtacctggtgataggcttgacgggaaaaggagcatacaagctagccaccatggacggaactgagatggcctggagttggaacaccaggtaccttaaaatgtttatgtgtaatcacttaaaacatataaatgagagcagatgaatgcactaaaactatgtactat

SEQ ID NO: 8130 - DNA, 771 bp, Cannabis sativa
aatgtttaaccttggcaattacaaaatgatttcaccatctattatttgccatgactcagtctaacctctcaaagatcatgttgttcttccttccgttacaccaagtaaagttgttgccctcaaactctagttcccttaaagcacaaacatcaatagcattgttaaaaattttcattaagtaaccaggttttccaccccctccttgtttctcatgaaggcctctaatctcattgaagttgccaccacataaccaaggccccatatatcttcttgctagacgctgcagcagggtccacgagtgtcttcgttgagagggatcggggtccccgtaaaattcggtaaatcgccagttaaagtcatcatccatattgatacaagcatcaatatgaaaatcattgaaagactttatctgcacagaaaaaggagctttacaaaggagggctaacccccccacttttgcctcttgcatcaacacaaaaacaaccctcaaaacccaaatgagcacgaattgtttccatgtaggcacttcttgaacgagtttcagacagaaaaaccaacccaatatcgaaatctttgacatgtgtggcaagagccgaaacagtccaagggttgcccaacccttggacattccaaattagggaattcattgttctcggcgaccctacaacgcagagtttgctgcttcataattctgctccacggttgaatcacattgctgtgaaacttccccggtaaggacgtcatatctggatccagtgatcattttccctt

SEQ ID NO: 8131 - DNA, 1099 bp, Cannabis sativa
tattgaataacactacaaaccctccaaagtactccatattatattgtagttataatatgcatcttgtctatgtttaagaaattttgaatactgtcgaaaataaaattcaaaataatttgttggacaattgcatctgaatctttgaattctatgttcggttttataaattatttagaattaaagaatgcctacaataaatataatatatattatcatataataaaataaattaatttaaaatttctttatactaaaaataaaaatgtccctttgataaaatatctttaatttactttattaatatgatgctcaaaatcttgtcgcaccaattaatcatgaaatgttatgttagagcatcttcaaggtgcacataaaatttagtgtcacactatcattaaatttagtgtcacactatattttatactatttattattatatttctttttaataaaatacaatattatttatattatattataacattaatattatatacattttaatattaaaaaaaaaaacaaagtttaccgtagctacagtacaactgcatatatggagtactatagcaaatcaacattttattgtcaactatgcaacttagttggagatgaatataacaacatatttaatgttttgctgttatattagagatgccctaacaggatgttaattaagtactttggagaactcccaacaactattcttatttattttttataatacatcatcgaattttacttttctattttacatcatacttttatacttttatgcactaccttttctattttgtttccttcatactcttatcatttagatcataattaataaaattagaatgaattataacaataattattaaaaaaaatgaataatgggtagtgtttttttagtcatcaagaaaagaatttaaacaaattaagatatttttaaaatagaaaattgatttacttcatctttttacgattattttaaactagatgctcatgtacaattacggagccactcattttgttagggatgtagccctccctaaaaaatgatatgaatttttatatgtatagcatgttaaaaaaatttaggctaattaggattttt

SEQ ID NO: 8132 - DNA, 734 bp, Cannabis sativa
ccctcttacaatatttagcacggaacacactacaccagagagctgtactgccactagccaagccccacgccagtttggagatgagggccaaatttaagtcaaagaatttcttgatacccaaaccaccataagatttaggcaaatagatagagtcccaattcgtcagcgccaggaatctatttttatttgcggacacaacccaccaaaattttcgagccaacttgtccagcgttgagcaaatagtcttgggaagcaagaaagtagacatagtgtaaatcggggtactagagataaccgaatttaacaaggttgtccgacctgcctgagacaagagtttactacgccaaccttcaaggcgtttcttaacccggtcaaccacaaactggaaatcattccttttactgcgggagaacaagaaggggttccccaggaacctatcctccggggatagaggcctataacccaactgatcagaaatctcaccaatagtcaccgcatggacatttttagaaaaaaccaaaaccgatttggccacattaatcacttggcccgaccaaagacaatatttattaaggcaatcctgaacccgatccacttcctcactattagccctacagaaaacgaaagtgtcacccgcatacattaagtgagaaatagcaggactttgggcacaaaccttacacccatagatagctccattgacttcctcacgaaacaataactgagataggact

SEQ ID NO: 8133 - DNA, 904 bp, Cannabis sativa
gactccaaaattgatgacagcagtggttttaccggtgtggcagtcccaaatacaaagcttaccatcgtagcttgttgtgtagagtttatctccagaacccgaatcaggtagagcaagaccagtcaccgcctataacgaaccaataccattttccattttccattttccaatccatgaatccaatccaaccaagcaagaagctaaggaaagaatcaaaaaaacactgtaaagaatgtagcaagaataccttagtgtggccatggagatttgcgaggtaggagtaaagatcaccccgagaccaagaatggagaaactgacatcgaccccttctcacacacctcccttcagcccaaaatttacacactttttccattgatccactctttacattcccactcctactctcactcgctcttccacgaagatacgtaatacccatatcttctctctcttctctctttctctttctgtttctgtttcttcgctttctttgacttttgctctctaacggtcctctgtatatattgtatagaaaggatccaccgcctcttcaatctttagtttattcaaatttaaatttcagtttcctttttttacaaaataaaagttattctattaaaaaaacaataagttattaggcaggggattctaacccgctttttacggctgtggaatggctcacgcccatttttttttcacaaatttaataaaaaaggttacgacttagacaatggttctatcagaggtattcaattgagtagggatggctaggctctctcgtctgttgtttgctgacgacctaatcattgtgggaagagcgaatgttgaggaggccaggggcttatgagattgtctggaaaaattctatagctggtcaggagttcacaaagtatccgatccaatc

SEQ ID NO: 8134 - DNA, 1663 bp, Cannabis sativa
ttaatgatttcataaatttcaaaattaaataatgtgtctattatatttatattattttttgttttttatatatataattttcaggcatagacatgataaccaaattcgatacccatctaggaaagtaaatgcagatgtgaggaaaagagtaaaagggcgttttgtgaagagagaaggctataattccgatagcgccgacgtcgcacgaagctactaaagaacaccaccgccgccaccgccaccgccaccatccgtttgtaaaaaatgccactgcattgcatgtaaattaaattaataagtatactatagctaactagtctctccaaaattattattattggcacaataataattgtgtacactactatatatatagtctcaattagtacttgtcttgtttatattaatataaatgtgaaatatatcaattcgattatcattttgaatcagttagtagttcatggctgagtccctttcatcttgtatatatagttttctacttaattattatgtttttgattcaccagatatcatatattagtactatttaaataattgaggttattatatgaatgagacttagaaaatatatatatatatatatataaattgagatgtattaagttatcattgctcgaattttttaaattattattgaaattgttgaatttaatgatttttatttaatttttaccaatgcagtaattatatatatacaaaattatatttttcgaattttaataaattatcaaatcatatactaaattatactcctcaagtttcaacaaaaaattttaatagtctaaaatattcaaaacacataatttttacatattaaagttgagaggaaaatatcgaaacagattttgatagaacaactcaactcgaaaatagtacaaataactagtgtacttgtagaacatattattatgttaatcataacctggtaattaattagctcatgaataatataatacagcagtttttacaagtacacataaagcaaataacttcaatattgttttatattaagtagttgtattatataattaaaaattaatggacaaaataaaacaaaaagagacaaaatgggatttgtaattttgtatgtatacgtactagagtacttaagaacttgtgttatcaacaaaccaaaataggctaataatatgatttgattaatttctaagtcagataaaagacaaatgaaaacatattaagatatttaattaatatggtttttaattattttattttgagtaataatttgcgacgtaaatacttaagtttaattctcgtttgcagataaatatttaagtttatttttttacagtaataacacttaattatatttctgaaactttcgtaggtatctaatcgttaagtgttaaaattactatctatatattatgttatcattggtatatttaaattaatttttaaatacaaaataaaaatttaataatttggacaaatcatgaattattacgtggtcattgccttaacatttaagtattatcactgttaaaaataaaaattagatttatctacaattaaaaattaaacttaagcattaattaatttataccacaaataaatcttttactttttacaagggcaatattagaaaatatattatgggaaaatgtaatgaaaatgaaag

SEQ ID NO: 8135 - DNA, 1595 bp, Cannabis sativa
gagagagagagagagagaataactgtaagaaaaagtgagaagtagagagagagatcgtgaactgaaataatgtaaaaccacaagatcttcattatagggcactgtaaaatcgttgatcttcgtacgtagtagatgaacgagctgatatgaggaaagctcgaagaggaagagtaacccaaaatttttgaggtgaacctctataatctcgtgtgtttattatctctctgtgtgttttctttttcattgtatttttttctcactacaaaaaactgttacttttagtgacaattttttagtcacagtataaatttgttgggattaaatgtaacttttaatcacaacaaaaacttgtgactaaaacatagtatttagttacaagttgtactaatttagttttagtcacaacaatattgtgactaagaacacatttagtcacaacaaattgtaatttttatgactaatatattttgccataaatcttttagtcacaacagaagaatgataatttataattaatcacaaatttttttacttttaattacaacttttgttaactaaaagtaaaaaatttgtagtgtcggttaaattattattgtttgtttctaacctttaggatttcttgaggttcatctcagaatatcaaagaaacgaactttagcatttgtgttggtactgttgttcacttggaccgaaagaatatcgtggaaagtttgtatccacacatgttactgtgttttgggttagaaagggttaaattttaccccgagtatatatgctaatgtgtgattaagtgtgtagggttaattgtggcctttaaaacccaacaatattatatgcaaatagaaataaaaattatagccaaccatatatatactgtattatatttatatacatagagaccaatattattataataacttattcccattcataaaacatcaatatttaattacaaattgttatatttaatatattgatcataaagtaaaccaaactccaaacaaaatctaagtacaacatatggactgataaagaagactatcttagtttcacaaaaataaaaataaaaattacacagaccacgtacgaaatcttatttattcttgacacttgatcaaaccatgcaaatataaagtacgcatacgtaaactaacacttgttccatttctccagctaatattaataattagctttcaaaacaagtaatatactaatattcactcactcactttccacccccatttctaccagatcccgacccggccctggacccggcataagacccagcagaagaacccgcttctgacccgccacgtccacccgagctagatgaagaagaagaggagctagaactcgaagaagagctcgagccaccggatccagagcccgaacctgctcccgcaccactgcctccaccacctagcccaatccctatcccagctccaattccaatccccaagtttcccaacccaccaaggtctaaccctaactcctttcttgccactattcgactctctgatgacatgaacaagcagcttgatgctactaaagctatgaaccacaaacacttgaaggaggccataatataataatat

SEQ ID NO: 8136 - DNA, 947 bp, Cannabis sativa
ggatgacattatattgtttggaaaagccttagtaaaagaagctaagagttttctaaattgctttgaagagtatcgtgcttggtcaggacaagcggtcaattatcaaaaataaactgtccattttactttgggagttctaagcaaaacagcttaggacattatgaatattctaggaatgaaaaggatgaaaaaagactctatgtatctagggctgccacttttcagatccttgaggatatccaaagaccttagcttccttgtggataaggtgatgcagcaagttaaaagttggaaaacaagattactatccaaggcgggtcgagcttgtctcattaagccagtaggatcttccattgctacttatgtagcaacctccgatgtaatccctaaaacaatagcaagaagagtggataaagagctacgagatttctggtggggtgatatggagacaaagaaaacctagcacacagtagattagagttcaatttgtcaatcaaagcattgagggggtcttggattcagaagaattgaaactatcaacttagcctttatccgaaaatggggttcgaaagcccttactgataaagaaagcatgtgggggacaattattcagaccaaataccttaatggtaggagtttcatggatgttgagattaatagtggagactcaagcttttggaaaactatcctaagtctaggtccctactaattaatcacgtttttagaaagattggcaacggtaaagaaacgtctatttggttcgacttgtgggtgcctttttccaatagatgtcctaccctgattttggatgcaacccatggagtggcatgagtgaatcagtttatgagtgaagaccgttgttggaatgtgtatatggttaaaacgtaatgatgcgaaggccatcgtcaacattcaactcccaaaggatggtgttaaggatgactgga

SEQ ID NO: 8137 - DNA, 644 bp, Cannabis sativa
ctttatattttttaataattaaccgcataaactgattttttgatggaaaaacctaccaaactaacattctgttttgttctttacacttccatccaaaagtctctgttaagtgtcacggtggattttccacgtgtatacaaatatacatgtgacacatttttagtggtacacataatattaacaaaacaataatttaaaatatttaaaaattcaaatatttgaaaaaacgaaagtacttttttacttttacttttttatttcttctttttatgaaaaccctaaatccccaacttttttatttctttttttttttttctgcgccttcttctattattgatatgtaccatcatcaccactaacttcacctatcaccaccactaccactacaaatgacagattaaattaaaaccaaacataagttaaaaaaaaccctattaattaaatggatcaaaataaaacatacactaatgatgacaagaccacccttgttgcgaaggtccatcattcgtttatcttttgatcagatgagataatggctccttcgactcggcccaaaagagcttcttcttcctcatcttcgtcttctgcctttagatttggtttagaaagttctccccgtcgttgataagcttccatcgttacaa

SEQ ID NO: 8138 - DNA, 848 bp, Cannabis sativa
tggaagaattccaaattggggaacttctctgttaaaggggcctattgggacgctcaacttcacaggttcggggatgcgaatcatctttggggctggatttggaatgccaaggtccatcctcatgtcagcatgatgctatggcgagtctgtgccaaagctctgcctactggggacatcttcaatcaaccgaatcacaacaactgttgcttctgtggtgcctctctcgagagtcctatggacttgtttgctaggggctcctttgccaatgccttatggtttggctgccccttccctgtgcgaatagataccatacaaatgacaatgtagcaggtatcctccgaaagttgtgtgaaggagtcgacgaggatttacaatgtaaaatgctttgctgttatgcagttctgttcgacaccatttggaataccaggaacagaatcattcatgataacgatgtggtttggagtgtagatcaggcacgaagagagatccacaagaggtatcttgaattttcctttgtctttccttcgcgtccttcgggtccaggggaagtttctgatacgaatgtaagtctccatatctctaccaatttggtgcttgttgtggatggttctttctccaatggcaggtatgggtgtggtgctttggcctttcgaaacgattcatcagactagttcttttgttcctcctatggtgcttgcggcagtgctttggctgcagaattggaagccattcttttcggtatcaagtgggcgttggacactggttgggatagagtctcgatcacgtccgattttatgcaattggttaatgctttccgagtcaagaagcctcttgattggcaactagct

SEQ ID NO: 8139 - DNA, 525 bp, Cannabis sativa
atacgtttcctctcaaaaaaaaataatatatttgtaaaattataataatctatatttatataaataaacaaataataaatatataattaatcttttgtttcaaattaaaccatgctatcaaaataaaaattcaagaaaagagaagagaagagccaacaaaaaagtatgttatcaatgaaaaggaagttctttcatactttattgaagagtcattacccaaatatagtatttagacattagttattaagttctactgttttagctgttgtattactagtagttattaccgtttgttattactgttatttttgttggttatgtgttagtgggttgttagccagttagttttcttagctgtctagactatagacttgtatatatagtccttgtttcttgtactcaacattcaattcattcattcaataagatgaatttcattcattctctctctgcaatatggtatcagagcggaaaagaaatactttccctgatcgatcttgatcttgtttcttcttctccggtgac

SEQ ID NO: 8140 - DNA, 512 bp, Cannabis sativa
attattatcttaaacataatttggctccattcatgttggcaattggaaagatgtgtgaaagatgtaggtttttttccaaattaaagcgtatatttaagttgttctgtctcctataccgaatgataatttttacccatttagattttgtatttaaaaataattttttagatatcgtattttgtaaaatatattgaaattattaatttggatataatttttactaaaatatgtatatatatatgcaattaaaatattttgtcgaaaatttattaatgttttccttagttaacaagtttctttgatttagttgttatttattttattttattttttttgtaaaaacacatattttttttaatagttctaaatctaatgactcaatattaattttagtgatttataaaaaatttagagtccaaagttaatttttaaaatacatagtccaaaaaagtataaatcatttatatgatgatttggtgtcagagcactcttaatagtttttctctactcta

SEQ ID NO: 8141 - DNA, 815 bp, Cannabis sativa
gatcactagccaatcgtgaagcaacagtctaccctctcgaaccccttgctccaacgaagctaatataacctaaaaatggaaaagaacaaaatatattttatatcccaataaacctttattcaatcattacattactatccagtacaaaagtagagactttgtacgataataaacaaaaatggctcggtaagatttacaccaaggacaggaaagtgaccagtgaggattaccttgtgaacaagtaatgataaaacaacttcgggaacaacactgtcgtagatttcattgatgttttgagcagttgcaaactgcactgttctaatccttagtcgacgtttgagggaatattttcctctacaaaatatatacatatataaaaaagaattataagcatgctcatatcaagctctgaacaaagactaaatataatgcataaatattaaaataacattgtcaatagagaaaaataaaaataattaaagaaaataactacaaaagcaagagtagcatagtatgtagattagacactaccgaaatcattagttgaggcgcaaaaacgaaaacatgttgtctacaatacaaagtaaatgacaaaagctaattttacagcatcttcatttcattctcaatgtcaattcaaaatactattctatttgttacaacatcacaaaagaaggcataatcatgataagtagaacaaaccatacctacttaaagtacgtgacactgagttttctagctcctcgggaggcacaacaactgtgtattgaaatacagtttgtacgataggaggaggttctgatccatgtctgcag

SEQ ID NO: 8142 - DNA, 1042 bp, Cannabis sativa
ttaatgagttgaatttagcaaaggcaaaaaaacaacaagaataatccaggaacactaactcaattaggaaccaaattctcacagcagcaatgtgcaaccgataataattataaaaaacatgatggtatgtactcaccaaaccaggtgatgtgctgagctcctcattgacttcgaccacctttcctgatataggagaataaatatcacttgatgccttgacactttcaacagcaccaaaactttctccttgtgatacagaagcccctacttctggcaattcaacatacacaacatcacctaaatgatcttgagcatgatctgttatgcctacagtagccgaatttccgtccactttcacccattcatgggagtcagcatacttaaaatccttcacaactgcagcacacaaaattgataaataaggcagaaacagcagaagctcttaatccaaaacttaaaaccggaatttacattattcggcacaatagctcacaatactgcctggagtttgtcatccctttaactttagcattcccaacaatatatacacacatacatgagagcagtccctaccaaaggacatggcaaccaaaagaataactattttaactgattttatttcttttaagtaacctcaatgtcaataatatatatatggttctgtgactatcttatgttggcactaattttcaataacaaaaggaagattatctatcctatattttaaatctctatctcaattttgaataactcaatgaaataaattctctctccccttacataatgtccttaaataatgggaactaaagaaaatgtgatatcaaagccatgttaatcaaagtaaaccaaatgaccataaaataaattcatgtttaatcaaaacccagttgagaatctcataagaaattttagattgaatggtattttatctagcttaaatatcaatccacaacaaggttattctatgataattataagaacctttgaagaactataatgttagaaatttgctgaatcaagaaataaatccccaccatgaaat

SEQ ID NO: 8143 - DNA, 501 bp, Cannabis sativa
attgtctatgtaagtgtttttttttcattgtttaataaaatgttttctcctcctccagaatattcctttttttgttaaaaatagttatgcctcattttctataatgccactcggcacagcctaaattaaaggctcttattgtattgtactcttatatgatgaaaagctcctctcttagtattctttgagctgagaaaataaatattccctttagtctaaatcacaacttggtatcagagttgtaccactctcccaccgatatgtctattagaaattctcaaactccccccacaccattacctaaaaatcgtgcctcacaagctcaccctcggccgctgctcaaacctccagtggtactagtactgcaaatatagctaaccaaatttaacaaacaattacacacaaccattcaatatcataaaccagcctttctctctcaagttatttcgaaataacttcaccttatggaagacaatggtgtctaccataattcgaggtcat

SEQ ID NO: 8144 - DNA, 766 bp, Cannabis sativa
aacaataaatttgtatttcaatttggaaatccatacaccatgattaatctcagaacttatgcataactctactagtttacataatttctctaagatttcgaataattcatctttgcgtcccttgctctcgagctaatgagtatgtcgaaaatgtattcttacagaattttgagtggtgtggtatgatcaagaacctacaatcatttttgaataatagggtccccaatttataggttagagtaaatgtggaatcgctctcttcctttgttccatttgattcgcgcgaactcaatctttttatttccttgcgcgaactcactcttcttatttcctcgtgctcttccttttttgttctgctctttaagctctgttcctcttgatatccaagctttgatatgctctttgagctctaacctgctacttaacttttctttttaatgaaacggtgtattttatattttttccaggcacatcactttattagttctgttgttattataagaataaaattacttttatatctcatggattattttaatcttttacaattttttatcggttctataatttttgagcttgtgacttctttagtttgaggacagatattgtggaaccggttacttaaaattattcacaaatgtcataataggccataatccatttaatgaagtaaccgtttcaaatttttgggaactttccccgcctttttaatgtactaatttttaattttgaatttaaaccactgatatttatttaaaaagaaatt

SEQ ID NO: 8145 - DNA, 622 bp, Cannabis sativa
ctgttgcaaatttagctagcatgtctgagaaggcattcttatctctagggatttccttcatataataatgcttagaatgttgcaataggtccctggacttagctacgtaactagccatcttttccactttttcctggtattctcaaaatacttggttgacaaccagctacaaatcactgtatagttcaatgttcttggtgccaacttctttagccaatggtaagccaacaatcattgcttcgtgtttggcttcattgttagaagcctcaaactcaaatacgagttcactttggagttgaagttagtacggagatattagaattattccagctccaaaacttttctcatttgtcactctgtctatgcaaattaactagacttctatctccaagatgggcattttaggattttcatttatcctcgtacattccacaatgaaatctagtaaggcttgacctttcattgaaattcttggttgatattgaatattaaattggcttagctccattgcccattttaagagtcttcctgatgattagagcttctgtaatacttgatggagagggtggtttgtccgtaccgtaatgcgcgtgagctcaaaagtatggtcttaacttccatg

SEQ ID NO: 8146 - DNA, 772 bp, Cannabis sativa
ctattttgctttagtatatagaaacatgcacgtgcaatatagagattttttgaaagactgggaatagagaagctaaactagtttcagatgtagagattttttttttttgtaccaggcaactgccatccagctagctggtgaaagatcaacacttctaagtgacatcaaaccagggtatctttgagccaatccattgatctatataaaaggcaaagaatcaaatgttgtggtcaattatatatatggaatcaacaaaaatatcattttgaaaaaaagaccccagggattaataagcagattccgtcacaaacacatatcatcagaaatagtggaattggaaatatatttatgatattattctctgttatcatataaatatattgtgaatcatgaaaaaacaagtgtaaggaaatgaaactaaaaaagatagtcaataagacaaaaaagttaataataataaagacgagagaacagatgctcatgatcaataattatcatcattattcgtacaagttcattgtctattaaaactaactcttgcttatagtgaaatatttctatacaaaaagattataaagcataaatatttatttcttcatggttgaaaagtcaaaaagggtaatatacagtttctatgaaagatgtgatctaaccaagaaaaagaaagagttctattgattctagggtaaaataaatccacaaatgttttcatatacttcacaagtctttgatttgaattaatattcaaggaaaaaacaaaatacaaagaagt

SEQ ID NO: 8147 - DNA, 690 bp, Cannabis sativa
acgagttctttagccaaggccttgtgcccttgggatacatatgattgcctttgacagttggagaaagtcccacaacaagaatagtgatggctaagttcatagtcattgatgtgccatcaatgttcaatgttatgattggttggccagccctatacgacctaaaagttgtgacattaatttaccacctatgcctaaattttccatcaaggtatggggtagggtgcctaaggggagatcaacagatttgcccgacactgctacaacttggctttgtctaaagctaaaaaagaaaatatgcctgccaagagctctaacgaagagtctagccaagggcaatgaagttcagcccaaagtgaggatgacctcatagtcgagtatcgtgatctggatgtggagatgttttatgaatgctacatccacaatcctaaggacgactttacttatatagaggctcctcttcgcgagagtatgattgcatggggcaaggagttgtttatagctaaagcaaccaaggagggtacttcttcctagctagctagctagattaataaggccagccaagttattatcgaggctcctatcagctagttttattgattctgctctagagactcatgtcatcccgtctgacacaaccttgaccctaccaactctactcattacccttgaagacatttgaggccttcattt

SEQ ID NO: 8148 - DNA, 1256 bp, Cannabis sativa
ttcatattagataaaaattattttgatcaaattttgcttccgcttttataactctaatgtgaaccattaaaaactaacacaatacacgaagaagacaacttaaaatttttacgtggttggggcgctaatgagccttagtccacaagtcaatattattatgagattggctagaaaagcctaagagattataatgagtatgtgcactctattctcttcttgagcaaataagtcaagaatttctaaccctttgcatgaagaattcaatgtgtatttatagagtaatagatgtctacttagttaccctttccctctcatggggaatttatagacaatatattagtttgggcttatctaatgatacctagcctatgaggcaatgcgtatacactgacgtagagatctgatcacagtaaaagatattcatgttgtatcctattaattacttgatcttcaatttattcagtttttcttcttaaccaggataatattctctgtcaaagattttaggaaagtattccctattttatatgtagagcagtaaatagaaaattgggactagcttctgaatatacattgagaacctcttccaagtacacagaattatcactcttctatatggtgactagtgttgacagaacttcgcctggcaagtcgtccgattgttcccggaaggccaaatgtcaattgagcttgatccaatttatgttatttgagttcactaatgaattttaaacttctagaatttatgtgtttattaccgaaaacacaaataacaattagtaatatatattttttgttttctatataaataattatcaagttattcctcattgtttgatggttaataattgcaccatccccaactattaatggaatgagtatagttatataaataatttatgaagatgggaatgtaattaagaattcgtattattatcattcttacgcttaacttaaaaatgatagataataatctatttaaattatagacacttatatttattacatacaaaatttgtttaattaaatatatcataaacataggaattgaatttgaatttgaacatttgttagtctaaatttcgacatagttataaatatgaattatcatttctacttaaatagatcttattttaacttcgtcaacacgcgcatcatgtcaaatatgtgtttagtgtatttttaaagaataattttggaatgttttacaagattaattagaaacctctaatttgctaacaatattatataaattt

SEQ ID NO: 8149 - DNA, 812 bp, Cannabis sativa
atatgtgagggcattttggacagtgacagcgtccacaataatactctttaaagcaaatactgtgttgaggagatttgtctaagaaacaccaaaaccagaatcacacagcaaggaccacatgattgagcaacgcatgcttgatctccattttggggtgatacaatggttacatataatctcaacaggatttgacagtccctgcagtggaccatatttaggttggtagagaacagcctcaagttcccttctatttggtatcatgttttttacaattgcttctattgataaatgaggaattggtttaatctaggaatgaaaagtgttactttagcactgttgaacctttacatgttttccttttcaaccacaaagctacaaaacgacatccaaattatctgtgattttttcaatgtttattaaacattaggaaatggatgacaatatgcatgtatgcaaaatttcactgtagatccaagaaattgaatctgtgctacgtaaagaaattatgacaaatgaactcctaaaacaaagcaaaaatatcaatcctcatttccagagcttttctcttctttggggggtgcatactgtctgcaaagcttggaccttgtccaaggatccatgggagctctctggggtggttgtggtgttgctggtttagattgtctgagttcattctctctatcgataaacctacacaagcaaatgaatatgataattaaaaggcaagccaacctctctcttgcatcaatcaaaaacataacttaacaaatggccacatcaatcgataaatagaaattcaaaagatgtcatat

SEQ ID NO: 8150 - DNA, 1355 bp, Cannabis sativa
ttagttatgtaattaaggctttttaacctatttttaaggtatagtggttaatcttgaggtaagctcaactatataaagggcattaatgaaaccctaatttcttaagtcttaagttttaagtctctaagctcttaagctctaagtctaaaagtaaactctctcttctctctcacaagccataggcatactctctctttcccttgagatttaccaactttattctcacattgtaatcttaagagagccacttcagattccataacctttgtgttctgagtggtgttatctttggtattattacacctaaaaggggagtaagaaattacccactaacaaaggaggccaaacctctataaaatcttgtgtctcatttacttttatgttcttacagtgtaacatattgcaagcatcagtaataaatacgaatctgctgtcagttggtcaaatctaaggtcaacacatttagttaatgtttctatagcctcctcaagacttccagtaaaagttgaacatcagcttttgagaattgactatatactagaaaatatcaaaaaattccagtattgtatggcaaaggagatcaccaaaaattgcattcatgagggcttgaaacatcactagggaatttttgagttagaaaggaattactaagaacttttagtggccttcataggtgtgaaacacaatctttcaacatccttttctgccatacgtatttgatgatagcctaacttaaaatctagcttggaaaacatttagctccatggaactcaccaagaagttcatcaatcaagagaatggaaaatttatcaaccaccatttctctattcaacactcaataatccatacaaaactaccaatttctgtcttttttcttgaccaacaaaatctagattgagaaagggcttgtgcttggtacacatatctcgaacttgagaatttcgcgcactaacttcttgctttcatccttttgaattttatcataaagatagggatgaaccaaaattagtccaacctcgcccttcaaagtaacagaatgctcttttgatcttactggaggcagctttcgtggcatatggaacacctctttgtactttggtaataactcaaccactatctcacacacctattgctcatgatcattatcctgtgtttttatagaccaaaaatgaatccagaaaccatatccttcttattccactgtatggaccataacctttagtatgattggggatttaaagaggttgggatctccttgtaatttcacccaagtatcaccttgttcaaacttaatcaccatagtatgctagttaagttgcatatcttccaaagtttctatccatttaacttccaat

SEQ ID NO: 8151 - DNA, 694 bp, Cannabis sativa
ttttggtcattttaaattaatttttacgttacgatagaacaataatgatggtatggcatgggaaatgcagggaatctgcagtttaatgtgatatatatgacaaaaaaacaaaactaaaaacacaattaaataataatattagtacaaaataaacacacaaaaaataaaaacagagtaaccgataaaatgaattactgatacgttaattttcgtgtaaagttttaaaaaataactaagcaaatggtgtacgttttttttcttacctttttttttcaattttaaactattgtggtcaaaatgtgtagctttacccaaagtttttatatatcttttggggtaagtttatagtaaaagtatgagtgagaacaacaaaaattatactaattttgtattatttatttagtgtataacaaaattttgtaaaaaaatattttagtagactttttatttattttgagattaaaagtttttttagtttaattttttttaactatatattgtagttatttaagatcaatttataaatttttaaataataataaatagtttatagtatataaaaaaaaaattatttatcatcctctaagaaaaaaaattatttttagtatgataaactactgaaattttgaatggctaaataaataaaaggtaatatctcttttaggagtgcccaattttgtctattttttttttt

SEQ ID NO: 8152 - DNA, 786 bp, Cannabis sativa
taggctctggccaatccagggctacaacctagtcaagaaggggcaataaactaggctcctacagtgtcaaatccttttgtgcaagcttagttggatcaaataagagacatgatcaaggatttggctggccgaaaaccatcagaccttgaactagataggtaaaggggttaccattctcgtcatacatcaatgccttggccttgcccaagttcaagatgctagtatgaaaaatgtgtatcagacgagaagaccctttgcacacatcaactactatgagatgaaacttcatctccaaaaggttactagtgatgtgcggtgtcggatcttctcgacaaccatgtcagaaacatatcaacaatggtacttcaagctagctccaggaagagtcaattcttggaatgaattttctaaagaattctacactcaattctcatcgtcaagcccaacaccattgcagctggaaaaccttgtcaaggtcaaacaacgacaaggcaaacctttgaaggtttataagcaaaggttcatggccaaggccacaaaggtcaaaggcataattgaagaagactattatacgaccatattggggggaatccttccgttgagagacttctagaatgatatccaaaggatctcaaccaacatcatgaaggagttcctcgatagaactgatgactttataaagctggaggaagtcgttcgacaagcccaaaagggaaagtcaacaacaagcagtctaagatagctatacagccccaagacctatcgaatgcccaggccaacacaagt

SEQ ID NO: 8153 - DNA, 609 bp, Cannabis sativa
tcacaaaattacaagttggtggactgagaagaacaagtccatgatccaaaacgatgacgggacatgggagctcatgaattctcaagagtaagaacagaaaaaatcatcatataataagcttttaccagaataactagccatatttgaattcagtgtcatgtattaccataaaataaaagctcaattctatgtccaatactatactaaataagaagagctccataacaaaagttctaatgaattctcatttctagtaccatgattctctattgggatgaaaaggttagatgtgttcaaaagtctttcagaacatcatctaaataatgaatctaaataagttatattttcattattttgtagatgtttgattggtgggaggaaagatttttgctttattttttagtttttctgagagtatctctttctcatatcagtctcaattttgttgttgagcaccgtaaattggctaaatatgcctctataacgtaattacccttgttatcttaacctttatcgattatcaattatccttactaataataaacaaaaaaagtcatattttgagaaaaagccataatttttttcccttcatttcttattgatggtaat

SEQ ID NO: 8154 - DNA, 629 bp, Cannabis sativa
atttaaaaattaatagagaacagtaagtagttatcattatcaattttttaaataactaatttgatactgttaattagttatcttaaaaattattgtggtattcaaataataataacaataataatgtgataataatattgtatttctcgtgtgtgtgtgattttccccaataagcaaagcaaattcaagtgaatatagaaatttaattacttttcacatagctaataatgtttttccacaatgttgctaagtactaaatgctactttctggagcaatggaggaggactttacaaaagtgggacatcaaacaatttcctaccaaagatttctgtatagaaaattcaacatgattaattgaattgaccaaagcccatttgagccttaacaaaggtcaccaaggaatcttcagtgtttttcttccaaaatcacccatcctttatttttttccagaaaggggatcttggcaatgaaaaatctcaaccatttgggaggatttaatactggcatgctccccatagctgtttggaaaataaatcttcagaccatatagattagtctccatgtcaatcgctcattggagcaccggaatgacgaagagcctcaatgctgaaatgaagttgcacaagtt

SEQ ID NO: 8155 - DNA, 1106 bp, Cannabis sativa
agggagctttgtcactcattttcttcctcattttgattcttcttgtcttttatttaaagaaaaaaaaatcattgttgacctccaaccctcctcccccttctttacccatatgctaatttgcatttaaacattatttttcatattttaattactaatttatcctttttattttgtctaatgtctaatcttgagtcaaattttgtgacaaaattatattttagataatagagttaagaaaaaatgtaatgttaaagttaaaaagtgtttaattttgtattattgtatatttattttgaatttatgacatgtttatataaaaagaatgaggattaatgatatggtattgattctcatacaattatttactaaattttgaaaatggagaaagtagtgaggtcacacaggagaaaacaaagataaatgttcttcccccatttttatagggaatacatttccctttcctaacttagtttattttaattttatttttattaataaaaaataaaaaagacaaatataccatttaaaaatttataaacagaaaataattacatgttttaataatgaaaattttgtcaaattaaaacattatctttcttagttatgtaaataaaatactataattctgattttctttctggacagtttagtaaatagcataataaaatattattttcgattattttctattttacatcaattcatttttttaattgattattttgattttagttacaatttaataaacgtgccattaatattattattattgtgtttatggtaaatttgacacatggaaccatgtgaactataatgcaatatgcatggataaacataatttcgagctactttttattttaaattcagtattcatattatattcaaattatcttaataattggtgggataaatataaattccatattcatctaatgtattggatcatatttcattatgataattacatttatatttatatttttaattatttttatgtggttataataacataaccacattcaaccactttagaggatcaactagtgttattgaaaaataaatgtcattcaccatcatcaaattttaaaaatagacaaacgaatcaa

SEQ ID NO: 8156 - DNA, 557 bp, Cannabis sativa
ctaagaaattttattagtattgatttaattttggcactaagcctttcccaatctttattcttctaggtagagaagttgtttcaacctccacttcctctaacttttctataggtctaatgctatctataggatccccaaagccaggatctatgtaagtgtcccctctttgggctggacttcatttccctttactgggctcttcatcagagctcttagcaggcattatgtctttcttggctttggacaaggccaagttttaacaatgatagggaaattttgggtctcctcttaaacatcccaccccatgccttgttgagaatttcaagcataggtggtaaagggatggtactacctctaagtcgtatagctctagttatactatcatggcattcaaggtcgagggaaccttgattacgaaaaactatgccattcgagtattggtggttggattttctccaatagtgagaggtagtctgatataccagatggatgcaatgccttggccaaagaagtcatacatcacttggttccagggtgccaaattggtgagttggagc

SEQ ID NO: 8157 - DNA, 879 bp, Cannabis sativa
ctatttggagtttaatcattgtgccaaaacacaaatttattttatggaaagtgattaactcccatcttctcacaagggacaagttaacccggtttcatattgagctgagttcaactttatgcctaatgtgtgaatctgagattgaatctcatgagcacattttttctcttgtgtgttgtcaagcagagttcttgatatggtgttcaactggatgggatatagaggatggtcggtagatttttctagctggtctaactggttagcagtgagagggcaaggcccattgcaaagattcaatacctccattttggcagccgtgacttgcaatctttggcttaatagaaatagatccatctttgagggttactcaaaatccatttgtggagttgttaatgatgtaaagaacactgttaagtataggttacaaattgtaaatacgaggaaactgactactcatgagaaaaactatttgctaagattgcaaagtagttagttttttgtgtggttgggtcttcttctcctatttggagtttgaagcttgttctcttgtattttattggtgcttatacttgttcagtcgattaatgaaattttccttcttgataaaaaaaaaaaattaggattgggaattcccttttaaaattttataaaagataccattgtggttttacaacaaagtacttatacttatcaaagtcgccataaatcaaaatcctgactactcgatattgctagctagataagctgatatgtaaatctgtcggggtacctttaactcatggttgacctagctcaatcattttcttacctgcaccacaaagcacccgtgactcacaaagaatcaataaaaaaagcaaaatataaacagtatatctcagt

SEQ ID NO: 8158 - DNA, 1136 bp, Cannabis sativa
tcttgatagcatctctaacacctcatgcactctcgatagatttgcaaactttcgtttccaccttgtcgaaaaccttagtgaccttggaatctcttgtttggtcccgtaattaatggatcattaggccatttcttacaatcgttagggtcaacactcttaccagaaccaacattagatgtttgcttccatgaatctcttctcatactatttctctttcaaatttgatcttttccacccttagcaacaagggcttgctcaactacctgagcataagtgcggacaacccttggttgtttggcagctacaattacatctcaaacaatatattcttccaatcctcgaataaacttggcccttttagccacctcagtggccatttcatcaaaagcaatctttgctaaccaatcaaatttggtggcatactctgacactgccacattaacctgggttagcagtataaattctcccgcttcaggagctcgaataaattcattatagtacttttcatagaacaaagtttggaaagcatcccgggttatattattaagatcatgaccctatgatacaatttcccaccagatgcaggcatcctcacacaacacataaacggtacatccatcccaatcgttactcttaacccgcatgaaatcaaaaatcgatgttatcatactcatccattgctctgcattgagtggatcagcatcaccctcgaacactagcagattctgcttcttgaacgctcgtacaacggctccagacaatttcccgcttcctatggcactaccagaagtgccaaaggatcaggattgagatttggggcaggctgagctcgctgctccttcagttctcgaatctaaataccttcctaccggatgacctcctgcatcacgacatacatctctttcccgtttggtggtggtcgaggattcacaccttcatcgccaaccccaagcccgaaaatctcgcagtaacccctaccaaaccgcctcgggtgcataatctaatacacatgcaatcctaatttttcaccatctaatacatctcaaatcatgagcaaagctaataaacatctccatgtatacacatacacatcaacccttactatgcttttctaataactagcataattcaaataa

SEQ ID NO: 8159 - DNA, 636 bp, Cannabis sativa
ctgctttgaatttatggaatgctcaatatagcctaggactgtttgaatgctgtgaactctatcaagaggaatgtaataggttgtagtgatgttgatgatatatgtgctcatattttgtacctttgtaatagttttgagtcatcaattaacatttgttttgagggtagagatgctaatcttttcgctcatttatttagctaagcatgtttcagtcaaaacatttgatagttagaatgagaatttgcccatgtgtttgtgtttctataacatggacttgtctttcctttgtaatttgttctctttttgaatgatttttttttttttttgaaaaaatcctcttgtttaacatttttcttaattttcaatcggatcttttaacaacacaaaaacttatagtacattgctttgatactcttgctatttattaatattttttcaatccaaacctttttttttcataatttttactttgtacttactcgaggctttcggtgaattttcaagttcgagtgacacccataccgcttgtactatttaaaagtataattttatttgattttcctatgaaaataaaatataaattagtgactaaaaaattaaaaattaaaaccctaaactaaatttagtcatctctct

SEQ ID NO: 8160 - DNA, 1460 bp, Cannabis sativa
  modified_base (80)..(80): a, c, t, g, unknown or other
  modified_base (282)..(288): a, c, t, g, unknown or other
ctctctctctctctttctcttcatatttccaagccttatagtgaaagagtacatgcacacccatagcaagtcaagtactnaatcatagtgtgtaagactgtaaagaatccaatacttgaaggagaatcaagctcagatcttgataatactttgcgacagaaatgaacaaggattagagatctgagtggaaggagacatataatattgctacaatcaatgtaaggtttcttaactttatatgtgcttaaattccattgttttaaaaaattcatatttaggatnnnnnnnaacatacatggtagtaaatcttaatcctggtaaaataatccccaacaccttgtagctttgccaggttgctcacctccccttgtctcttctatgcaagtgattttgagtattggtctagggaggtgacaatcgtattgtcttaggttcagtcaatcttgcctttgtggactagcatccagtctattcattagcaattttctgagtgatctcggggttgatactgattcattatgtccagaaccaagcaatcttactgtagagcaccaccttctgaccctcacatggctaggctgcaacaatgggtagggttggtatagtggaggaggccacacagcctctagacagtagagagcaagaggttggccatgcaaaggcgcatgtggccgatcataatgtgtagagctcaaacagtgaaattgaagttgaggaggttgtccctgttagggggagacagtatagaacctattttgttttctccaagagccctctgggctcatatgatggtgacagggagcctttgaataggccttgtcagcctttagtgatcgatgtagaccatattctgatacaggcttctaagccttaggttctcgattctgggtgcagggagactgttgggtctctcctccatctgttatcaatgccaagactcttgataagataagaatgagtggactggtgagaggcgtcaaaattgaggtgtcgtcgagggaccaacgagcgcaccggttggctttcaactagatggcatggtcagagcgccacattgagcaggggcagtactacctttacacccctactttggagacaacaaaacatactttggaatgtgaccaacacaaatcaccccagaaagtatcaagtacatttcagtgatgtttgttctttatgtagagctatgctggcctcagcctactccttataagattggatactattttgacttgaagtctgctctgaagcagaatcagacaagctacttctactttagctaggttggctatcagtggttggctgacaataatagtacgcctttgtcgatggtggggggatatgcccataactatttcattgcctgggatatccaagaagtttgacactgccattttcaaagagtgcccacatacaaacgctcaatccctacccttcaaatgagagatagggaaaaccac

SEQ ID NO: 8161 - DNA, 685 bp, Cannabis sativa
cttgctttaagccataaatggcattgtgaattttgcaaacataagtagggtgatatggatcttcaaaaccctatggttatgtataatgtctcttgaaaagtgtggttaagaaagacattagacatatccaaatgcctcacttcccagttagatgacacatctaaagcaagaatcgacctcaccgtaataatttttaccacatgattgaatgtgtcctcataataaatctctagttgttgaatatatcctttagcaactaatctaaatttgtatttatctaaagaaaaatttgcttttaacttaattcgaaagatccacttgttgccaataagagtcatataagacgcataaagaactaaagtccaggtgcattgagttcttaatgcatgaaactctttggatattgaggcattccaaattggattcttaagtgcaactttgactcatttaggatcactaggcaataaagactcatgcaatttatgcttggtagctatataagtcgttggcttgtaaatacattgctgggaactagttaccatagagtaagttctttgaggctcaattgcaggaacattatctgatgaagagggctcaaaaacagattccacagctgcaacaggaagagaataagatattgacatctcaggaagtggatatggcaaaggagtgttggaattttatg

SEQ ID NO: 8162 - DNA, 618 bp, Cannabis sativa
cagattatcgaaatctgactttgtccaagattatactatgccataattgttatagtgaagatcgaattctcaagaggagtagctccatttaaagggtgaacctctataaaattgctcgtttttactttcagtttttatgctttgaattcctattttttttttcctggttgttttatgattttaatattattatttagcagtatatattatagttatagtaaatttttatcactaatattttctaatttattgtgtcaaaaacaaagtcaacaataaataatctgttcctataaggagagttggcctatgcataataaacttagaagctattattaattaaatcagacttaagatttgtaccactatgtgaatttattcctgtgattgatatgagagaagaatcaaaactcattcaccaaatcataaatgcttgcaaagactatggaatctcttaggtttgatcttatcatcatcatcatcatgtcatatttcaagaatatttatctttaacaatttgtgtgattatattatatgaatgagcaagtatattattggagaaatgttttgagacacctttgtcctgttgaagcatttctccaataatgtacttaaataaaa

SEQ ID NO: 8163 - DNA, 1138 bp, Cannabis sativa
aaaccatttcacatttgttggtggaaactgcgccctcacaggaggctgcaaatcgaaatccttttcaagaaatgcagcatttgttcgattatgagaaaattttaaaccgccttaggagtaaggccttgtgcaaactcaactctgatgcagactcagcctcaaatcctttcaaggcaagcattatcacacagctctctgccatagggatcacaacaacacaaccccaggtaactaaactagtccaatcatgtttttttatagttgaaaaaattggattctgtttctgaactgttttctgtttttggaagcatgataatcagctgaagatagatgagctagctgagaagatggaaaaacagcaaagaaagttcttgatgggaaggaacaagtctttgattatgttgaagaaattgcctgcaataaaaaaatatatggcacaaattgaatggtacaaatattgggctaaggataaagaaattggatactatgatagctacaagaaaaaactgttcaaagctgatatggatgttgaagaatttcgcaaaaaacttacaaactattggatagacatggttgaagaagaggagaagaaaccccataaaggattgtttggttcgaaacgattccttttcgctgcaacaaattacagaagaatggtggaaccacttcatatcgccaagtactacaagaaggatggaagaaactatgaagaggaaggaagagatagacacctcatcctcttggagcaatggcagaagggatcgaaggaacagaaaaataccccgaatgacaagaaaaagaaactgataaatgatagtctcactgaagattcttgcttttgggcaaaggtagaggagtctatccttacatgcagactcttgaaggaaacagaatcatcaagtgttgaagagaaaaaatcttgcaaagaaaagttgaagctgtttgaggattatgtatttgatttactgaaaaactatgcagtttcacctgagatattcttgaaaggtagtagttttagcctttggtggaaagattacaaggaagttatgggaaggaactataactcacccctcactaacttcatgaatactcacaagtatgaagattatgccaagggaaatttctaaactagaagtta

SEQ ID NO: 8164 - DNA, 993 bp, Cannabis sativa
aaatccatccaactaccaatcaatatgaacacgtggcaaactagcttcccatgttcatgcaaatctccaatttttttcttttcttgcaatatgcagatctccgttgttttaatgcacaataataacttttcatttctgtatttattttaataataataattacagagagaaaataaatataatatgaaaaaaaaaaaaaaactaaccattgagacgaaaaaaaagggggcaaaagagagactgagactaagcgcgctcacccaaaaaaaaaaaaattcgcgtgaaaattttgaaacgcccaccaaatccaaatccaagcccgcgcgcactaaaaaaaaacaaacctcaaaattgaaaacacaacaaaataaagctccaaaatttttcccccaaatttcacaaatccctaatttttcattcttcttcttcttactactcatacttctgctacaacaatattccaaattcaaatcctttttccctttctttttggggttttcctgttctttccttcctgactccaaatcttagggttttggatttgtttccgactgtttgttttgaggtgtaattttgtttgatttagttatggcttcggaaacccttgaggaggtgaagaagaagcctgaggaggaagttcctgttgaggaagataaggaggacaataaagttgaagctaaagaagaggagaaggaggtgaagaagaagggttcggaggaggaaaaaccaaaggagaaggaaagtgaaggaagtgaagaggaggacgaggaagaggagaaagaagatgaaggaggaagtgaggaggatgaggaaaaggaagacgaggaaggaagtgatggagaagagaaacaaggtgaggagagtgaagagaaaggtaagaaaagtcgaaagacgagctcgaaggtgaaggatgagctgagtgagtcgaagaaggagcctgttacgcccagtagtgatagaccgactcgggagaggaagatcgttgaacggtat

SEQ ID NO: 8165 - DNA, 1048 bp, Cannabis sativa
gatctgtttcttctagaagattcgggaaaggaagcttccggcaaccgggaaccaaccggctgagagtttgaaccttcttttgaataggcggtaaccttgttgttttggttctaatcggcggtggtttctgtaacctgcttttaccggtaaccttcacctttctatgtttcctattcgtcatcaacatgtgtcgactcgccagaatcgctctactccaccgagtcgttcctttggcagccacagccagaactcggtccgcagtttccctaactttcctcacctttcccggcgaagaagaactccgtttagtcttacagagagcctcaacaagtttcgttgagtagatctgttgctccgaatcggatttccatctaatcatcgagcttttttcgcgatcatgagtagtagtctgagtcaaactcgaactcgaactcggaatctcatctcctcctcctcctccgattttccgacgcttttttctactggaatctcccgatgcgtcaatattcgattccacgtttgaaatattatacgaagccattgaaaaattatataataagaccaaaactccaacacctcaatcaacctctaaatatatatatatatataactttgttatatacaacacaactgcaaaaatataaaaaagcttgatcagtcaatactcgaagaacaaatttattcaatacatacacatatataaaatattaaagtaccttcgaagaagaagaaggatgatgatgatgaagattatggaatcggagaagaggaatggttattttggggatatttggtaacgaaatgttgaagaaggaagactatctgtattgcatatatgtatatatttgtgtgtgtttgtgtttatataaatatttattatatatataaagaaataaataaaaaagaataataataataataatttaattattatataaaaataaataataaaaaaggacgagtcacggggaaccacgcgtcctttattaccctctctttattatgccctccatctttcctgcgccgaggttttttttttttttttttt

SEQ ID NO: 8166 - DNA, 1694 bp, Cannabis sativa
ccaggttgacatgatgtgccctgacttgcatcagtttcagtttcaaacaaactcctatgtgaaatcttcttagccattacactaggacacatgagagacatgccccaaccaagtttcagaccctagagacatgtttggaaaaaaccctacctggaaacaccaggtgcacatgggtgcctaggttgacattctgtaatgactgcatacttattgtatgaaattagtagacaattaatattaattatttacattatatgattatgtgtgtgtatcatgtcatatggtacctatttttaagaaatagtcatttgatttataatttctcaattctagagattttattaaattctaggtgtatcatagaggatatacataaattttaatattttcataattttatgcccaataacaatggaaatacaaacaaatggtcgttaaagtcacatagatatgggtttgtatcaaatatttaacgagacaatattagtagacattattaaatatcaaggtttagtggggtaatgaaattggatcgtcttatccctagggttactagcttacttagcaagcaagtaagggcattttggtcatgggttaggaaacctagtcaccttaggcatgccatttgggctggtgactcactttgtgtgtgaggagggttttgaggtgtttatcgagatttttagaaacagaatgtgaataataacaactaaagaataaataatcaaaagataaagtgtaaaatgagacaaacaatttttaatgtggttggggcgttgactagccttagtccacgagtcagtattattcagtaagcctttttcttgtaaattccttaggaaatacacagaatgtatgttctcaagtttgcctgagaaaagtttgtaagagagttcaaccttaatccataagatttgtggggtatttatagtagtttgagaattacattaggttttccatttccctctattagggagtttatagtaaataatactcttgggctttctcatgaagtccagcccatagagaagacaatctgctgactaggcagatcgaatttagattgatctggttaacaccgcgtacacttattgtgagcaattaatctagattaattgcataatatttattatagaagtttcccctataatcttgatacgatactctgatgtgatctgacaactggaatttccttagttgtgtccaagaataaaaaaggaaaccaaaagggtcttttgggaacgcattgcctcgtctctccaatctcgtggtactagagatgtcttccgagtacatattgtcgaaggcagaaggctttgcgattgcagaaccaagatacgatcttggaaggacatgtccaggtgggcttggcccaatttatcttggctgagggttccactggtgggtcttgggtgctgacctagagtccatgtgtccaatgccagaaatacggataacatttacaaccccaagcctccagaatgttgcgtagggcagaagcttgcatcactctcttaatttggacatgtggaaattaaggaatgaaattatggaattttgaatacttctcgaccgcggaaggtggcttccgtttgtgatgatgatatgtccatgtgtcaatcgcgcatgagttacaaggcacgaccatcgaggagttgctttttaaaaacaattgcattttttacggctattca

SEQ ID NO: 8167 - DNA, 1013 bp, Cannabis sativa
acaattaattttaaaataaaagtccctaactaggaaatgagctactctatttacagattgtttaacaaatacaacatacacgttacataaaactgacaataataatttagactcgtcaactaaaaaatatgagaaagcatatgaattttactattgatagtattaataacatttaggcaatctgactccaccacgacattgcaacatccttgtattttgatccaactcagagtttctttgattctcaccactttagcaatattcgcatgaacaacccatagtttacttgctaagattgcttaaatgaaagtcccatcatgatcccttgccacaataccatagacgaagcttttgttttgtgcaaacatagctccatcaatattaactttgatcatatataagtttggtttagtcaactgctccactcttttttcgtttgatgaattgtgagaaagaaatactgacttgacttaagtagatttccattagtatacgtgtattgtatacacaattttactgtttagtatagaattatttatctgtacataaattgtgtatatgtgtagtgtattgtatttgtatttatatttatatgtatgtgtttatgtatacaatatgtatttagtgtaatgacaatgataatactggtaaattagctccattttagtattgtgtaattgttttgattatattttggaatgacaattgttatttgtattttttaccaaaacacgtggcaattagagaatagaccacacgttcacatgattcacgtgagcacatggatgattaattaatataataaatatttagtattctcttcaaggcacgaagagcgtttgagagtgcacgattggccccaaaggagatccgaacccaaagtccaatgttaccctccgagaagatgcaagcctcccagatcacatagcatctgggaatagcccatgtgttcaacatggttaccaaggaaaaatgttgtaggtgactgcgtcaacacaggtaaatagtaaaaa

SEQ ID NO: 8168 - DNA, 542 bp, Cannabis sativa
gaaacaaataaaaaatctactgaacgaccatttaagagagtttactacataaatttccaaataatatttacactcttaaaataacacttaatgattagaaatgttaaaagacaccacataatctaaatgtgtcacatggttattggtatataattaaatatcattattgttatatatattatttttgtaattttttaattaaatattacaaaatatataaataatttttataacaattaagactgaatacatttttaagagattgtcaccatataaacaaaattaatgtgaatattattttcaaagatttgaaatgaatttcataacctatgtagctatatatagctttgacccatgtctctataaattctttttttttttatatatatttttaaaaagaaaaataaataaatagtgtgattttacatagaaggtttttttaaaatatatatatttgtaataattattttattttgtagctagggtttccatgtcaacaaatatcacaatcaaaccaactttttgatagaaacaattttaat

SEQ ID NO: 8169 - DNA, 769 bp, Cannabis sativa
ttttttggaggaatcctttcatttaaactctacttaaactaattacaatgtataagaggatcattcccaatttaaacaaaccaattcaccatatataaatgagttttcacatgtaaaaatgaatcaatatctattggctaagcaaatcacaatatatattgcaaggtatgtatgacatagccatggagtgacatatatatgttttttttaggtgagcatacagaaacccacttatgatttctcttcataattggattatcaaaatgcatttttttccctacatttcttaagtctttctcgtttagtctttcactttatttttatctttaaccaataaataaataaataaatgtaagtctttaattatttgtttctattattgctttattccttctaccttttacttttttttttcttttagcttttgtgaggatattctttataatttacgaaaaggaaaaagacatgcatacattccctaagttgatctctatttcgggctacgtgttatctaattggtctttcaagatcatttcaggatcatgactatatatgtagtgacttgcttctataaaaaaaaaattaaaaaaaaaaaaagactgtagtgactttcagattgtgttgtgattattgtaaaactaacaattttaattattccaaaataataaataaaaaaatggactaacaagattagaataccctatttaaaaattttgattttgagtttttaaaacatgaaaattgaattacatttatttttttttatttt

SEQ ID NO: 8170 - DNA, 1432 bp, Cannabis sativa
  modified_base (639)..(655): a, c, t, g, unknown or other
caattttctttctcaagtagtaattaatagccttcacttcttttttcacttttacagtactcaattacttgaaatataaaaagcatgccttaaaccgcctacactgctcacactacataaaaataaggtttaaagccagttatttgcggtgcggttggagtttgtatttttgccaaatcctcggcgtagtttgcagttttaattttaataattacggttcaaattgcaccacaataacaaagttactaatttttataatatgttttttattttattttttatataagaataaatatatatatataatatatatgtatattatatcatttttttttaagacaatctaactttataattagtatatatgttagagcatcttcagtagaaatacaaataagtgatgcaattgcaaaatatagctcactttgttcaaaatttgctctaattgtgtgttaaattatgattcaaaaatctcacataatcaaaaataatctaaatttacatcataatatagcatgatgcaaaatttgaatcacaataaatgctatacttatatatttactattatgctatttttaatattttattatttaattttaactaaacatactattaaatgactagcattattattattannnnnnnnnnnnnnnnnattattattattaaattttacatttaactttgcattattattattttacattttttagtaaattattaagtgagcattaaataacatattaaatttacaatagtaaaagttaatgtaaaaatatcacaaaattactctttgtacaaaatatagctcaacttttacatctcctattggaaatggttaaaactctaataagattttttttgtattgttaaaattttattagattgatttttaaattttgattacaatgtttgataatgttgatagtgtaaactgcttaaacaacctgtgccacactgcattttcacgatatagtttttgcagttttaatatcttgcagtgtgattgcagtttaagaaattataaaaatttcaaatgtagtttagtttaaaaaaaatattacaacccgcactgcaaacatccctaacttttaatgcttttgtgccttcaaattaacataaggatgtcataattactatttatacgacgcatatgttgttgcaacaagaagaataaataaaaccatatattgtcatatatttgtgacgaagatttaaccaatttctaggttgccaaactgaaacattatgaatgttcggcaaacaaatgcaatcgtggattaagaattactttgagcaccaaaaagttcatatttaaaaaaaccataatcatgttagtgtgcaaattactgaacttacaaacttctagtagtacttgtagttgtaataacaaacaagagtagagataataagtcaataaccaaagtaacaa

SEQ ID NO: 8171 - DNA, 1697 bp, Cannabis sativa
ttgatgcaaaggtgttgagtaaggcattaagtaagattcctaggggggcattgaagagagattgaagtggagcttgagagggctttgaaagatccaggtatatatttgatttaaagggccagttctcagaagcttttgaaaagattggcatttctgccttttctgtgattgtcttgggtgcgctctttcttctccaaatacggggtgaagacagggactggttcgggcgtgttgcggttgtcgaaaattttcctagccctaggccgtcgacggttgctatgttgggcagtactaggatgacctcggcgactcgcggctcgaggcggttggagacagggacatctcgacctcgacttgggtacccgaggaacggccaggtgaggagattcgaggaagttctagtttgggtaataagggtaagtctcttttgaatttggaaagaaagacaactgattatactcccagtttagagttgttaaaggtggattccaggagtgaaccgttggtctctgtagacccttgtccttgcaaggaaacagtggggattgtgccaaatctttgtgtaaagtttcctataactattgggccgaatgttgggccgaatattgggctggatagtggtattgtacatggattaattagtgagaaggtgttcatgtcttgtgatattggatgtatggcccgattggataatgggcttcctctaatggactctggagtcaatgttgatagggccgaaagctctatagatgtagtcgggccgttggtttcctgtggtacgtcattatactctactgatgtgggagttaataagaatggcattaataatagtctttgtttgggggatcaggcgggcccatcccagaaaattaatagctcgacccctagtgtttatgatggttcttctatgggtctggttggtgcagtggaggccgagcccatctttggtgaagatagggatttgtctcttttcgttaaggcccaagatcatttgctgtatgatctaaaactttttgggaagatggatttgtttgagattaagaacaaaggaggggattttggtgttttgccaacctcagaaaccaatgagagaacaacgccatttaagaagaggaagtttgaaggttttgcttcgctgtgctctagacctcataagattattagaacacatcctgtcgttatttgggacttcccctgggacaagaaggatcacaacaagaatctaacatggcttttaaagaaccttatgagaatagctccagctccctgaattgcaatgatggaattatgaagtaccctctggttgggtcttttgtgatggaagattctgattcgagattgtcggtacactcccatacccctgtggaggagaatgtcaaatctcctccacaggagccatgagaggcgtggcctagaactgtagagggttggggcagacctctacagttcgtgaactgaagtccctgatcagatctcgctctcctgattttgtctttatttctgaactgaaagttgatgctactaccctggtacgcactctaaaatccctccatttttactttaatatcattatgtcgcctgtaggtacagccgggggaattattttggcttggaaaattgggtttagctttcaatgtatatcttgctctggcaatcaaatttctggtctggtatattcggatccccccactcacccc

SEQ ID NO: 8172 - DNA, 1358 bp, Cannabis sativa
tgtatatttatagatttgatcaaaaaaattaaatattcaatcacgcggggttgatatagtagttcaaagttaccaatttaataatgctttgactaattattttgtgggcttttttgtacgagcattgggtactagtggtgtctaataccttctagacatgccgtcttgtgagtggctattaaaattcactgaaagttattatattaaactaaataggactcgatacttagttagaccaatagcgatattaatacgtacgatagtgttaggcaccactagtgccttttagcatttcttttttttattaatacgaattctatgctcttaattttttttttttgattaattaggatttttgttctttaaattttaacatgtactaaattatgctctctaaacttttatgggcgttaaaaattcccattgagattgttgtatttaaggattttttccaattttagtaaagaaagtctaacatgaatgaaagtcaagggacttgatttggtatatgtgaaagttcaagggatatgatttagtagatatcaaagtttagggagcataatttagtacatggataatcacacagagttagtaaaattgaatgaaactggacaaatgttcttaaatgcaacaatctcaatagttcatgggaatttttaatggctagaaaagttaattaccataatttagtacatgtcaaacttcaagagaattttaattaatctttttttaacaaatacagtacctaattaaataaatcaattatatggtatataagattttttttttacaaaattacaatgatcaatcaaagagtgattgggaataacttaagagaaggaagaagaaatgttgcaatttgagttgcggctagaacatagctgagattgtaacatggtttgatggtaatttaagattgcaattgcaattgggcatagttcagagatggcaatatagttagatggtgatttaggttgcaatttgggttgccataccggttgcaacttcagttttgttatggagatcatggaagcttcatatggtggtcttgcgatttagattctgattgggatatggctgagattgtgatatgatttgatgttaatttaaggttgcaatattgattacgactttagtttcattatagaaattaatggaagcttcacatggtggttggtctcgaataattacagagagatgataatataacctagagtaaaaagaaaggggttgagactactatatggtttgatcgtggttataagttgcaagttcaattttgattttggaagaaacaaagcttcaattttcatggtggagagtaactaggaggaggaagaagtagaagaaaggacaac

SEQ ID NO: 8173 - DNA, 652 bp, Cannabis sativa
ttttttcaaaactcttaaaaagtaaaaatttctaaaaacgagattcattatttattatttaatatatttgcattaaatgtaaaaatttattatttaatatatttttaattaatatcaattatgatagtgtgtatatttatatgtattcttttatgtaaatttatatatgtattgaaatacaattataaattttgaattttttgtactaaatataatataatatttgtgtctttcattggagatactcttatatcaaagcaacaacaatttaaaatttaagagagaattattggtcatataataatagtatataatttgtgacctactcttaaataatgggataaaatcttgatataagatcatatctgcatatttcactagtaaagacaatatattaggtgcaataataaaattactattttattagtagtagtatattattattgctgttattataattatttaaaggattgaagaagtgtagtgtagagtcatctctagcaatttcaataaaattttgtgttgggagaataattttctatacaatatggagagagatgatgagaaaattgatgaaattttgacaaaacttgaaaaaattaaagacccggttggtgatatctatcgttacaactatcaaggattttggatt

SEQ ID NO: 8174 - DNA, 705 bp, Cannabis sativa
attaacaataattcattatagtattttatttattttaaatctattctaatacgattccatgacccatgatcatattgtttgtcatattgcatgtggagtcaaattcatgattgtcgttaggtgatgatgaccaaagagagtgacaaatatagtttgggttctattctgtcttcattacctaaactgagaaggaatggatttattagggtaaaaagatctctctattttctaaaattaacatagacagtaaaagtgagttaaatgggtaaaaaatattactatagtaggaagcatttctgtactctaccagacaatattaccaatactacttttggtccacgcatactattctcacacgtgaaaatgtattcaatgattttgatatacatataaatatatttgtgtcagtgtggtgtttatatttttgtccaattctaacattgattcattggtgtgtgcattaatatttgaggtcttctattctaagacatttgtttgtattattagaaaggaaatggatttcattaatataaaagacgattaattggaagataacatatataataatattcaagataataatgtgatagtctaagagataattcattcttttaaccggaaaaatagcagagagggatattttacaattaaaattgatcttgttaaagtctatgataggcctagttggagattcattgatcatgc

SEQ ID NO: 8175 - DNA, 875 bp, Cannabis sativa
aagcattagaaagtatgctttaccagagaaccttatgttgaacactttagaatttcaaagtcttttccacaaggctagagagacattgcacaaaggagcgtgatccaaaacttgaaccgaataggcaagcttagtcgagaataattcattagattctttggtctaggtctatctatccctatcattagtacaaggcttacctctattagattccttgcggcttttatttagttagaacttactattactaaattttaaatagtttaggattcaaaaataaatttgaaattaaattatttctagaatataaattatactttaaaataatttattttatgtttttacatattatttattgtaaatatttttaaaatttgagaagataaataaatacactattcatagtcatacaaatattaggattatataatctataaatgtgttaaaaatatatataaaaaaaaatatgttactttaaagttgttttatatgtacataaaataagttattttgaagtctataaattatttaagttttttttttaaaaaaaaaataataaattttcaaataaatatccaatagaataatttatattttttttccttgaattttttataccaccaagttgtgtctcatatagtatacaactcattaataaaatctctcgaaatataacttttacagtaatgggtcttttcattatattctatttaattttatcgacaaattagtgtggtcgtggatagtagttgataaataaatgcaaattaaatacattttatattttttatttttaatgattaaaaaactaaaactaaaaatataattattataaaaagaaaaaaatattgtattctattattcattaacgtaaa

SEQ ID NO: 8176 - DNA, 932 bp, Cannabis sativa
ccatcccctgttaactggtcaaacactggactcaatcctatttatcccccacctgagaccaagcttctagccagacctaaaattccagaaaaagagaacttgatgaaccaccaaccgggacaactaaagtaaaaagatatggataagtgaagacctgtagcaattgcaagcagaaaggtgacaggatagaaacttgcaataatcaaaaattggttgaggtgagatttgtatgcaataaatatttgttcttaataatataatatacaatttaattgtttgaacatactattgttcttttttaataaatcgttcaattgataaatgtaaattacgtaatgatttgtgcagcaaccaaacaagaaaagatctggtcgtccaacatctactaatccaagtgaagcaactattaagagaaaggcaagactggagaaacaaaaggcaaagagtcaaaatgcaggaacaagtagtgcatgaaaggaagaaatttgtaatgtcttttgatgtggcaagaaattattttttgatataggcatactggctgtcatgtaatgttttttatgttgaaaatctgccaatcacttcaatgtattttgaatgggttttctaatcttactttttgttggataaaattttagttttgcttgaacagagatgtaataatgacattacattttcatatgtgcttcaagtgtatacaaaagttcattttaatttagtttttttcactgtattatcattatagattatgtcttacaatcaaggcaatatatttacttttgatacttcttttagtgtatctctataaacataattagattcacatgctgtgataaaacaatagcattatgtccacatatacaatatctgcatcacatgatgacccaatccatatatacataacgtcgttcagttcttattcaaaaaaaaaaaaa

SEQ ID NO: 8177 - DNA, 805 bp, Cannabis sativa
aaaaaaaaaaaacgtttgtgttgtcctactagctaaagcacgttatggtatttttttaaatattgtactaacctttactaattaaagcattttaacataaaagtatgttttatgaaattttttaataattacaattttactaaacatttaacatatttataaaacatttacaatttagaatcttgaaatctatttataaaatatataatatatacatattagtcaaaagtgtcgcctaacgacatatttaaaactaagctggcgatgtctcaaagatagcaaccctccaggtctaaacatctggatatttacaatctttatcaatttttgctctcattctggttcaacattggttttgtctttacctacacatagaaacatattcgtgagtaaatagacttagtaaaaaaatcataacatacacaacatatatccgacttgtaattgagcgcccatacactcaattactataagtctactaatcgcatccaatgtgtatgtatgagtctcgaacattcttaacatagtataattaaccataatatcaaactgcactcagtgctcttgtcatactagtgttggtagcgttaattcatacttttcagtattgccaaatatatatttatcggtatcccagtgcaactctatgtataccgatattgccatttctcatatgttaactacatggcaattcataatatatgtatactaaatatgtgcatatgggtattacatattaatcttacttcaattttgaattcaagtttgttagtcaccctgattggaaaactacttgaccattgaa

SEQ ID NO: 8178 - DNA, 822 bp, Cannabis sativa
taccatcatttgtagactataatcgcatgaaattgcaattttaagatcattaaccgaattttcttttttcaaattaaaaatactgtatgaacacattatatttaatttgttcacatgaacgaaatattttttttcttaaaaaataattcttgtgattttctaataaaataaaataaaataaaagtgaagtatcatgtacggcacaactgataatttaaagaacgcggaactctaccctcttaatttttttcattttttcagaatcgaagtacaaaattaaaacgacatcaatacataaaaaacggcggtgtaatttgagcccactaattgtgatgatgcaaatgcataaactaattcttagtaaatgtttgcatcataactaaaaaacaaataattaatttttgaaaacaatttagtttgttaaaattaaaaaaaataagaattttaaaaataataaaatattgttttttattttaaaaataataaaatattaattttgaaaaacactaaccaaagatcttgtctctaaaaacaatgttttttgaaaataaaaaaacacaaaacaataacaaacaattatttcttactagttcccaagacattttaactgggaaattaaaaatgaaaatataactgggcacagacgaaaatgaaagatcattaaatttaaaacctgatttaacaaattcagaccaggatctctgacaagaagtcaaaataaaattgggaataaaattgggttatttaagcaaaaataataataattaaaaaattaaacgtagtgattttgcatagaataataaatggaaaagtgagagatgc

SEQ ID NO: 8179 - DNA, 1032 bp, Cannabis sativa
  modified_base (419)..(419): a, c, t, g, unknown or other
ttcctttctgatttttctttttgtagacatggcaacaaaacaatgttttatgttaaatacattgttagcacactatatatttacttcttgatgttctcatcaatcattgagaaccaatgatttttctcttttgtgttaacggttgtttttttcttccaaatatgtgacttataggggacaaaagaaaagaactttttgtatgatattgttgctaatggccgtaatggaattgatgttgataagtgagtgttttcatcttatattttgcttttccacttgtacattgtgtagtattttttttcaactgggcagtttcaatgaaactccatgtttttatttgtatctataacagcttaatgttgaattgtatttgtagtactaatatgaaatttatttttgtatataggtttgattatatngtccgtgactcacgagcctgtgctcttggatgcaatttcgagtttgaaaggtcttattgagatcttttacgcaattgttagtttcactaatacttaacttttcaagtaaaagtaacattatacatatcatgacttgcaggttaatggagactatgcgagttttggataatgagatatgctatcgggccaaggattgttagtattctgctaaattcatctattagtttgcatttttctttccctcttgatcatatctttttaacatttggatattctagaccttactgtccacaaattatttgccactcgagctgatctttaccgaacagtgtatacacatccaaaagtaaaggtatcattcagatgatagatcattacatttgtgccttccatatctatttccccttttattatttgattatttctaaattcactttccaaattccaactccttaagtttaatatttacaggccatagagcttatggtagtggatgtcttggtgaaagcaaatgagtatctacatatttcttccttcattaacgaaccctcagaatattggaaggtttcatgatcttgattcattaaattcattgtcacagttcatgaaatgt

SEQ ID NO: 8180 - DNA, 621 bp, Cannabis sativa
ataaaagattgaaaagacttattaggaaagagagagaaacatgattgccatgcctttttaatttttctttttttatatatattttttattaaaaatacctacagtgacatgcaaggcatgtgaagacacattttcctagtcactcatgagtgactaagttagtttttgtaataaataaaaaaatagaaaattatgggtaatacttttaagtgactcttcatgtttttagtggcatacaatatgagagactaacaccgaaagtttagagtctatttatgcatgtcactaaaaatcattcttaactatttagtgacccacaccaaagtgagtgtcactaaaaggctaaattgtagtagtgtgtatctgtattctttatattttctactcagattaataatatcacttgtcttttgtggagtaagcgaattgtcaaatcacgtaattctgtgtgtcttattatttactgccttgatatatatttatcgttatcttttgctatttattacttccacacacaataaattagtatcagagcaaaatataatgatattatatatattagattgaagctcttgacgagacaaatttaacactgtaagatttacctcaattggaggtcta

SEQ ID NO: 8181 - DNA, 683 bp, Cannabis sativa
ggaatagtcgagattttaggaatgaccaaattacccataggtgtcctgttgactcatgttgtgtactagggataaagaggtcttttgccacttgaatttttgtcattttgtgggattaattttagagatttattctgatattagttgattaattaagttagtaaaacatttactatattcattttattcaaaaagaaaaacactctttctctctccaaattctctctctcgagctccctagaaccaactagggtttgtgatttcttcagttcaatttagggaatttctggcaggattgtcgtgttcccatccaaggtgtaccttcctttgttcttcctctttgatttcttatgttctatgttgggttttatgcatgttttgagttctaggttgttgtagttagtgtttgtttgtgtttaagtcttttgtagtttaattgaaggtatttggattgttttggagttatttcaaggcttggttttgtgtttggataaggtttgagctttagagctcaaactttggtctttaatggtgaattgagtttcaggggttgtttttggtttttgttgcatgaattctcttcattatgatgttattaggtattctggaagtttgggtgagatttggggtcgaattggggttgttgtgtggttttgtttgtttcctacactgaatcggaattc

SEQ ID NO: 8182 - DNA, 860 bp, Cannabis sativa
ctctctacctctcaatctttctttgaatcctatctcgacttcagctctcaaaatcatcaccccttcttctgttgttgatggtggtatttatagatttaggatctggatcccaatggcggtggctgcaacaattacgtagttaagtcagttatggcttaaccgaattaactaattccttgtaaagagatctccactatagcttcggcatgagcactttgaatatgaagcacacttcatagaaggatgttttaagcagacgaagctcatttcggaaggatgtcccaaagccagctgaagcagcctatctggcaccctttccaggaggaaacaactagccttttgaaactcctttccggatggcgactagctttcataaggactccttccagatagacaggctagagttccgaaactcctttccgaaagacatctatctttccacaagacttcttctgggtggacaagctagagatttggaactcctttctggacgacatctagctttccacaaatcttaccttgagaccttttcatttgaaaaactataccacaaattctacctagttccttcaaattaaaagtcatgctgatgaagaaagaatgcaaccatcatggttggtgttccatgtatctcaatatgataatttttgagattgatcaagtctaggcaatgcctgaacttgctaactgttaagactctagtcccaacatcagcaagattatcttttgatctaacattttctaactcaactagtccttattctatcttttctctaatacgatagagccttatatctatatgtttgctctttttatgataaattgagtttttgtaaagatggatggacgactagctattt

SEQ ID NO: 8183 - DNA, 886 bp, Cannabis sativa
agggcataaaacccaacaagtgctagggagaactatttgagaaaaaagatcaatgttagatgcaccagtgtttagtttgtgaaagggaagcacattcacatggaagacaacattacgagaaataaaaaattatttattattgatattatataatttgtctcctttaatttcttgaggatagcccatgaaaacacaagtacaagcacgaggtgagaattttgttctgtgagcagatagggtagaagcaaaagcaagatatcctaaaaatcttaagttattgtaatcaggtggctttttaaaaagacattcgtatgaggttttatttttaagtaaaggggtaggtatcctgttaattaaaaaagttgcagccattacacacttactccagaatttaatgggaaatttggcttgaaaatacaaagcactagccacattgagcaaatgttgatgctttctttcaacaatagcattttgctcaggtatttccacacaagtgaactcgtgcaaaagagaagtattacattgcaaagtatctttaagaaaatctaaacgtttgtgggacaaatgtccaagtgaaaatcctaagtttcagctgagacagatagagcttggggggatctggtgcgtatcaaggatgtaaagaccattgacagtgctacctcttccaatcatcctcttgttggcattgtcctgaacataaaaaatatcaaaagtgaaatttatcgagacagaagtatttctagtcatataactagtagaaacaatgttgtacttaaagttaagtgcataaagaacatcagtaagcacaattttatcattcaaaacaactgtgccacattagttaacataaaaacatgttgcaacttggaggtgcgggttatttata

SEQ ID NO: 8184 - DNA, 666 bp, Cannabis sativa
atcattaaacaaaatacaaccacatacttaaattatttcctaattattaaataaatggcaggattctctaattaaacaaacaaataaatagcatgataatttattttatatataaaattttaatttttataatatttacggcgaagcccgtttactagttaaataataatgctacaaatattttttcaaaatatatgataaaagcatttacaacttgaagaatctgggaacagcaatatccatgtggatttttttttgaaaaaaaaaaaaatcaatccacatctcttttattttattatttttcctaattaactaatattaaattgcaaaaaaaaaaaaaaaaaactaatattaaattattccatacaagactgttgtcgtgacttgaaagttggaaggtaatcatataaatctcaatactaacatttcacatctctaaacttatgcttaaaaaaaaatgacatctttaaactttaatggttcaatacccacaatttaatacattttccaccacacaattcttaagccaaaaaagaaaaataaaattattaacagaaaaaaatctaaaattataaattcacatccaatttgtacgaggatattttattgggtgagcacccaaatcccattaagggagagtgcatttttataattacttattattat

SEQ ID NO: 8185 - DNA, 1710 bp, Cannabis sativa
atattaatagattcacaaaaagatattaccttatcaactaatttattccatccatcttctattaatctttgaatgagaattttagtagatgaaacaagatgtattgcttttaaaatatcttgagactaaagttgcaaaacttgacagagtaaattagaaatttccataatttttttcatgagatgcaaaataaaaacaaatttaaaaatagttactacctcataagttgtatctgtatctcgtcgttgagcaaaagtagtgttgtcgttattaatatttaataaaacttcacatgttatgctaaacatctttatcaaactagaaatagatttcaagtaagaacttcaacgagtgtcaccaaccatttgtaaataaccaatttgattaagccatttaccactttctagttcatccatctcaagtaaatgagcaatatttgcgccttaagcaattcttaattggtcattgcgcttacatgatgtaccaacaataataataatagagttcaactttgtaaaaaattgatggacaggaataacttctctagatgcagcatctggtgctacttgcaaatgatgtgcaaaacaatgaacataataagcacaaggacattcatttaagattaaagcttacaaatcactccattgaccacgcatgttacttggaccattataaccttgcccacgaatataatgaacgtaaagactatgatttaagaggatagagaaaatatcttgttttaatgttaaagcaatagtgtctttgacatgaagaagcccaaaaaatgctcttgcacacaaccatctttgacaaaaaaatctcttccttttatagattcatctcgtgcttcatcaactattatagaaaaatttgcatcgccaatttcttcatgaatcacattcctcactttattctccaagacatgcaaatgttctttttgtgttgttgatgatgtatatgtgacatttcgtggagctttatctaaaacttatgctaccttattattataagagcttatgaaactcaacaaccctaaaaagtttccacgattaattgaagttttagattaatcatgacctctaaaagggtatgcttaaaatggaagccatctaatttcctcaatttaagtttttatcttttataatttcttgtgatgtgaagtttgtaaaccttcttgtaatatgtgttgattggttcataagatcaacaatcgctttctcgacatttctataatgagaatttatacctataatgtttcaattttaatgtgagtatatttaatttactatagaactagtgtcttgtcgctgaaactttgaattcctaaatggaaaatagaataccaaaaataacattaaaattaatcttttttttttgccacttttttttcttatttttctaaataaaagataaagtggtgcgccttggatataaataataatagctaaattaagtataatattaaataataaattgttatgattgattatataggatagatatgtagtatactctacatgataaaactacaataatataggaatagtattcaacttgtaacagtaaactataatgattatatacatataaatgtctgtattctcctatatatatggaagtttgataaagaattgacagcaaagtgaagagcagaaaagagtacaagtattattactcatagttgtctaaatttataacatgttatcagca

SEQ ID NO: 8186 - DNA, 799 bp, Cannabis sativa
acctgattataattttctcaaaacctttggttctgcttgtttccccttacttagaccttataacaaacataatttgatttcaggacttctatgtgtatttttcttggctacagcccatctcataaaggatatcgatgcctacatccttctggcagaatttatattgcccacagtgtcacttttgatgagtcttgcttcccttaccctcaattttttccatccaaatctacttcagcaactgatgctactgctgtacatcagatccctataccagctggcctctttcccacccaaactccccctcacagatacatctcagctccctcccagcatgtttctgccccatcttcctctcccccacaaaatcctgatatcacaaatctcccaatatccaattccctaccaagaaccaatgttagttcttcaagaaatccacctcctacttctgtcaatgccaatttacaaccaatgtctcaaaccagctgccccaccatctctgctatgtcctctgatctacccaccacaacatcatctcctaccatgattactagatcgaaatctggcatatataaacctaagattcttgtagctgaattactatatgactgctctttaaaagagccaacatctttaaaaatggccttaaataatcctttatggaacaaagccatgggagaggaataatatgctcttaaaagaaataatacatggattcttgtaccttatcaagatggaatgcatgtacttgacaacaagtgggtctatcgaatcatattaagagccgatggcacagttgaga

SEQ ID NO: 8187 - DNA, 578 bp, Cannabis sativa
aaagagctttgaagagctgcactgctttcccttcctaggaaagatgatgattctgattcaaatctcaccgatccagctgccttgagaccagtaaaactctgaagcgagttatgcgcgttgaccttcaaagcacaagacttcgaattcgaaagtgagctcattcttgagccatgggaagcagttgccccaaatgacaaggtagctgctgctgatgttgctgccatcttagacactgtgatacatacaggaattcttctattacaacaaataaaatgtggtttatcttacacatataatcttgaacatccctaaattatagagtacaaatatgtatgcatctaaaatactcataaaaagcaatctttttattacaatcactaagcgtttgcatatataaatcaaaaaacaaaaactcaaacgctcaattgtacatatgtcaatttattttaaaatcaccattttcatattacaaaaacacacaaactcactacatttcattcaaaaaaatcagttttacttataccaccattcaaatctaacagtatactgcattgaaaaattacaaattcaaagctata

SEQ ID NO: 8188 - DNA, 1177 bp, Cannabis sativa
atgagtctctctacttgggttttagaaaaacaagacagaagacataagtaggcaattcgtcttagctttaacataaggttttgctaaataacaatacatataacatatactctagatagaagttgcactacttctataggtagtactagtatgccgacttcatttcacccgacccttacctataatctaaataaattagataacaacaacattatttgtctactttgcgaagatacaaaaacaaaaataaaaagtagaaaagaaataaaaatgaaaattggatgataaatatccaccaatcgatgtgaccttggtggtctttgtggtctacctatgggatcattcccacacagatttggtgtttgtccatcgatttggatatttgggacatgagaaatcttatgccaatccactcttgggcctgcaatgcaacgttggctgacaattgtacaattattgatggttaaatgctgcagttgtgtcattctttggaggaagtctggtagttcaccaaggttgacacaatctgaaagttgcaaagaagcaaggcaaggcatcactactctgtccctgttattgggtgtttcccacgttccccaactaggcaaggaagcaaaatgtagttcttttaactttggaaatgatattgatctctctcctctactattatactctgttcccaagaactgaagattcacatttgccactctactcatgttttctattcgaagtgacacaagtgatggtaaatttcccaatgcaggcaatgtaggccaatttcggcaaccacatagtacaatacttctcaaacaattcagcgagtttatccaattcgggtattgtaagcctctagatcctctgatctctagagacatcaatcctacatgtggctgcagagtattgagtatgtcttcgtcggcatggtcctcatatcttctttggccgctgtcttcgaaattcaacttcacactgacaaacttgatatctcttaatctaggagcaggtacattttcaagatttccgcaccaatatatatgacaattcccttgaatacttggtaactggttcaaatcctcaagcatcaatgcctcatagttttgtagatactcaggggaaggtacaacaaacatatccagcacccgaaggcatgttaattttctaatctctttgggcaatg

SEQ ID NO: 8189 - DNA, 2145 bp, Cannabis sativa
gtgtaagagacagttgagacatctccatcaaaaaactggtgtcgattcacaaaagttgtatgaagaagagcaacataaggtttatgggattctgagtcaaaaataagttttttggaagcaaaggacgaagcagttttgttgaaagagagtgataagaatagtcgttattttcatgtagtggcgaatactcgcaaaaagaaaaatcatatttctaagctacaagattatagcgcctgatttacttgggatgatgggcttccacagttagtaaaagattatttccagggtccttttagtgccttggatgcccagtggggtaacttgcttgattatattcattcttcgatttcaacttttcaaaataatgatctgctgcgacctattttggaagaggaagtttgcagggccttgtttcaaatgcatccgaataaggctccaagtccttatgggatgagtttggagttttatcaaaaattatgacatattgtgggggcatatgtggtgaagttggttcaacagattttgtcttcgggcaagttttcaataggcattaaagacgccaatattgttcttattccaaaaaataaaaaatctcatgaagatgggtgatttaaggtcaatttctttgtgcaatgtgtctacaagattgtttcgaaggttatggccaatcgatttaaagtggtgctaccacatgtaatttttaacacacaaagtgcatttataccaggttagttgatttctgataatatcatggcgtcgtttaaaatttatgcactatttgaagcgtaaggtttcaaggaaggagggggctatggcactaaaacttgatatgagtaaaatatatgatagggtggagtagaattatctcaggtttatgcttaagaaacttgggtttttacaatattgagtgcaactggttttggattgtttttccacggtgagattgaaggggttcattggatcatatgcaatatttttaggcctacctagatccgacccaattatatattggatgatagatttaccatctgatctgatctaattaatttcagtcatctaatcaatccaacatccaatgaatattggattgaatcaattatatcaattgaatatatttcatgtatatctattagtttaattttggtttatccaatattttagacctagtatttattagatcggatcagatccatacaatattttagatctagtatctataggattgaattggatccatccaatctaataaaaaataaaatttgaatgttaatttttatatatacatatatttttttttacgtataacaatataaaatttaattacttattcaaattgaaattagttcgattgaatgttggatgtattgaatttttggacacaccagccaatatacgatctgattcgattggatattcaaaaataacatcaaatttgaactaatcacaattagatgtccaatgtttggcggtcggttgttattggattggatcaatttgtgcacaccttaggtgagatattaggttgttcatggtggtcataggatggggcctactattctttcttaagggatacaacaaggagaccttttgcctccttatccatttttgatttatgctgaaggatttttggcattacttcgtcggtataagcataatcagttaatgaaagagtgtcgtatggttagggttgctccgtcaatttctcatatcttgtttgttgatgatagctatatatttgtccaagctaacacaagaaagactcaaaaagtgatagggattcttcacaagtttgagaggatgatatgacaaaagattaatttgactaaatccaccgctttctttagtaggaatgtgagtggttttatttgggaggttgtttttgaatattaataaacccgatgagaataatatgtacttggatctcccgagtataattggtcaaaataagtcttttatattgggctttctgaatgagaagatgagaaagcatatacaaagttagaatggtaaactcttgtcatatgttgataaggaggtcttggttcttactttggctcaaagtcttccaacttacgctatgagcggtttccttttgccagcgcgaacgtgtcatgatttgggacaacttatggttaatttttggtg

SEQ ID NO: 8190 - DNA, 504 bp, Cannabis sativa
gtggttgagaacttattaaaaaaacatggacagcattaaatacatatttacttaaaaaaaaaaaaagcattgacttaaaaaaaaaaaggcattgactcaataaaacacataataatagtagtgtatcatatccttttcctatataagtattactcttctaaccggcccttctccatattaatcacaagagagttgttttgagttaaaagagaaaaatagagtattctcagtctcttatcttctctcaaacaccttcttcactttttcatcaagagctagctatatagcaacataatggggttactttcaaacatgattaaacaaagtcagctcaaagaaggggatcacatttactgctacaggagagctcacacctactctcatcatggtaataataatgtattaatttcatttgtgactaaggctttaatttttttctttgtaataatgatcatttgttaataagaaataaatattacgatataattgcaggaatatacatgg

SEQ ID NO: 8191 - DNA, 732 bp, Cannabis sativa
atctaatgtgttatttggcgccttgaaatattaaataacagtgcttctattactaaaaaaaatggacattttaagctactattacaaaaattataattaagactaaattgtctagtttattattaatttatttaaatttaagattatattttctaatacatatttttttttacaaataatacatatattttttttatatgcatacatatataaaaataaaaaatgtaaatgaattaatagtagaaaagtaaaacctgtagttagtattagaagggaatctttaacttgtagctaatagtactagagtcattctattgtaactaaaaattccgtaactaaataataaatatattagttataaaaattataatttattgtgactaaatgtgtttttaattataatatttattgtgactaaaattaaattagtacaatttatatataaatactatattttgacgagttgttacagaagatagcttcttttataatacatttttatacatgatattgtcgtttttcaagtatactatgctatatcaattgactggtattgtcgtttcacaaaatatgttattaaaatatgttattttgattctaaattatatatatatactaaagaatttatgccgacgacaaacacaaactaccacgaattggcaataataacatgaaacttatacaattcgaaggcagcgacaatggtgaaaaggcaagtgaagctgaagaaga

SEQ ID NO: 8192 - DNA, 611 bp, Cannabis sativa
tataaataaaaaatacatgtataaatagtaatttaatgataaattatgacaatatctatatgtttaaagttaatatttatatattaatattaataaattaaatttaaaatatagcttaaaattattaaataagtggtacataactgatagtaaattattaaaaataaaatgagcataatataactggagtttttacaaatgaattttgggcaaaaatttattattaccctaatttttttataaaaatgttatctttttatataataatagtaaaacaataaagtagtacaattaaaacaatagtaaaataactaaaaataacgaacaacagtacaaatttaaccgtatttttcaaaaaaccttcacttagaaaagaaaaaaaaaattaaaactttagtaagtgatgtaaaaattcctaaataatatttgcatctatttgtataatttaaaatttttttgcaacaataataattcaagagtaagaactcaacaaagtctgtacttgcaagcaaaaatggaatttattccgttattagtcagtcagtcagtcacaaaggtttaaatgacataaattacaatatataccaattctagttatatatatatatata

SEQ ID NO: 8193 - DNA, 1687 bp, Cannabis sativa
ttctaatttaaattagaaaaggtgatgagaataggtttgtttgacagtggtagatgataaattacacggctctctttgtcattattattaaaaaaattataaatcaaggtttactggatcaatgcaattgtacttcaataaggatattttagtttatttgataattaaagttttatgtgatcaggtgtggacgtttttagctttgccttaaaatcttattaaggggtcccggaactttttaatattactttaattatttttaattgaaattttataaattcaagatcttttgacttaaaagtcatttccatttgtgactataactttaatttagaacaaattcaatcccattttagtaaatctaccaaattactatgtcatctccaactcactacaccaaaaataatcgtatctttttttttttttcttttttaatctcaacaattaatttaataaataaatatttatgtatttaaatttgaatataaataaattaagttatgattataattgtagtagtatttaattttgtttaaaattttgccacatatacgtgataagtaactttaaacaaaaaaaatgttaaagaatatttatagtgtttcgtattatatgagatgtcatatcattgctactcaaatttaatatcgaattttacttattttattttaataataattataaaaaaatcactaattatttatgggacattacctcatagtggtaatgtgcatcatataatgcttcataataatgctcttcaacaaatggtacacattttttttaaataaaattgttgtattaaatcaatggccaattattaccggagcacaaataaaaatggggcaccatgatcataatgcattttctctccgtacaatcccatttgtacaaaagttttttcagatttcagggtttttgtggtctaaatcagaaacagaaacagaaacagagtcgaaatcagggaaaaaattttgtacgaatgggattgtgcggagagaaaatgcattacgatcatggtgccccatttttatttgcactccatgagtctagggtgaccctaatttcattctatattattttttcttgatttcgaccctgtttctgtggtttagggtgaccctgtttccatgagtctatattatttttgagtttgtttctatggtctatattattttgtagttaatcctgtttctgtggtctatatttttaaacaatatagactgtgtataattaactacaaaatcacattaaaaattctgtgtcatttatttattactcgacattatattcaatgcttaattctaaattatatatattcaaagtattaattatttaagtctcatgtaatgttaataaaattcttagttaacaaggatttaaatatttcttcttgcttcttcctgctctagtagagcatgataggtagattctgatggggctttaaggccaagggtcggtccattcattgagaaagatggaacttactctgtggcaactaacaggaaggaggacatgggtgatcctgaaattattcttgttgagaaagctctcacctatctacaggaattccaccattacactaacaagcaaatggtatctatagctactagccatggcagccacctcctataggtttgttgaaacttaatgtggatgtggctattaacaatgagaggggagtgat

SEQ ID NO: 8194 - DNA, 1567 bp, Cannabis sativa
gtgtactgaaacatctattttataggtgtactagtagagacttttcctatacgttataaaaaaaatgttaaatgattttaaggtgccaaacattataaagtatttatatcgttatcattatataatttgtaatattaaattcatataacagtgactctttctcagaaaaaataaatatatttattatgtgtgaattagcctccccaaataatttatcaagtggttatatagttgtacacgaattatgtgattagctgaaatatacaaacattttattaatataataaataaaataaagcttaatcaaacaaattctatagccaacatagtagagtccgtgtgttggaggttttggattcgaatcatgtttgtaaattatataaaaaagtatttttattagccacaatagtggctagtacctctagacatgtcgcattgcggttgactagcaatactgtttaaaaattattatattaaattatataaacttaatacctagttgaactaaaaactatattaacacataagaagatttcagacactactgatttgctttagcatttctcttagatttaccaaatcatgctaccaaatcatgtactgatttgctttagcatttctcttagatttcaaacacataagaagtatttttgtcccctaaattttaatatgtaccaaatcatgctacctgaacttttctgaccgttaaatttttttcttgaactattgaaattgttagatttaaggacttttatctaattacatttaattttactatttcagtgattgtttatgtactaaatcatgctccctaaattttaatatctaccaaattatgcctctcgaactttaatatatattaaattatgtcccctgaactttcattcatattagatttttttattaaaattagacaaaattcattaaatctaacaatcttaatataattaagaaagcatttttaacaactttaaaaattaaaaagatataatttcgtacatattaaaattcgaggtcaaaaattataattagctattcacttatataaaaggtgacatggcacgttgaagacaccctataaatcataaacctaacctaaccccttcttatctcactttctaatctcctatcttttactactactactgactaaagataatacagtctctgactttttcaaaccggtcccacctctctcatctcactcactcacacccacgatcacataacaacgaccgttgatgccttgatggtcgttaactactaccctcacaccaagggcattttcgtaacttcacccacacacacacatataagaaacacaacctctcttcccccaccatggctattttctcgtgaagaacaagcgccaggagcgttttctctctcacattcatcaccacacccccccactcctctctctctctctctaaaaaaaactcaaagcccatttcatttctctctctataaaaaccacaattcaaaacactcaaaaaaaaaaaataaatcatgaataatcagtctgagctagaaaataacagtattattatggaatcagtaatattac

SEQ ID NO: 8195 - DNA, 1196 bp, Cannabis sativa
ggcaccacatttaaatatcgggccacataataatatttaaataaaaaattattaatatatattatacataaaataaatatataatatactttatttttacaatatatatcgattgtatttatagaaataaaattataaaatataatgtataatttttataatctgaacatttaatataaaaaatattatatcccccataaaacaaatatttaaaatttatgaacataaactatatacaaataattaagaaacaaattatatgcaaatatctactaaaaagatgaaatatattattacaaaaagaaaaaagaaaaacaatagtttatgaagatccttgaaccaccgatcggaacacgacacatgtcaaagtcttgaacaccattggatcctattatgcctcatcgaaaacccatgcgccaccaaatcagagatgccttgaacaccaatccactactgtaatatcgtctcgtcggacatccaccgccactgagcgtttcttgtcgaactgtgcctcgcgctctacaaccacggggtgtaccatgcttaaattgcttgagagagattacatcgaggaggtgtgacgtcttcgtagtcgttatatatagaaagaagtgagtgtataaaacttataatgaaaccaaaaagagatgagttgtagaagaaaaagaaatagaaaggggaagaatgtatggtgaggcggttagggttttctttgagagttagaagagttagaagaaaagaaaatgatgcatttatatatttatatttgtaaatataataataaataaaaaaaatataataaaagtaacatgagaaagaaattgggagtcgcgcgtgcgtagtcccaatgaaaatttatataatatataattttattattttaataataaatatagaaaagtaaagagagagaaaatttgagagaattgaaatttgtgttttcatataagtgtgtagattattaagaaattggacacgacccattgtggtgtcaaattgtatcgtgccaataagttagtattcttgtaatgacgtccttcacgacaaggggtggcagttgggctgatgagggaaggctggcgaacgtctttcacagcgattggccgagtatcccaatgacagtagatggtggctgtaaggattttttttttatgcaaagtggttcttgtcatatgggttagagagagagagagaga

SEQ ID NO: 8196 - DNA, 562 bp, Cannabis sativa
ttaagagtattgatgcagctacaagtgataaccaagatattaacacttagttttttagtttgtacctttctattatatggttgaaaaaatagttagcctttttactgtataactcttcttctataaataaaaggtttttagctcattatcaatagacttaattttgttgcaaagctcgtgagatttttaaagaacaaaaaaacatgccatatgatattacacacaagatttagttagtcttttcaattaagaattgcttaccatatttataataaccgaaatgttatgtcacttgatgattttcacttagcttgaatccattaactaagtagagacttatcaggaattattagcaactaagttaatttggtatctggtgtagagtcttctgtagtttgcttccttatattggtgatatttcaagcatttttgttatgttgatgcagagccattcaacggtcgagctgttacaacgaaggaggggaacaagcaacatgttcggacggacttagtctgtacatgttgctattcggagctcttcagattatagtgtcacagattc

SEQ ID NO: 8197 - DNA, 1021 bp, Cannabis sativa
aactagaacttagatgaaattaaataagaaaaacttaattactcaaaaatgaatgaatcatggatcttttattgtttaaaaagttagtagtacacaatgagatatgcccaataataaaactcaacattgtgaatatttacaaagaaatgtctcacaataataagggaaatcactttaacagtgatactcccatctctccacacacactcacactataagaaatgtcacttttaccagcgcatgcagttcacattaaataattacttttattttaaatgtattctttggtgatggtaaaagaaatatttatttctcacaaatcaaaatgattaacttgagaagtagattgtaataatattattttttattcaaaataattaacaatataattgttattttttttaaattataaaaaataaaaatagatatagaatcaaaagaaataataaaaaaataaattaaaaaaattagtcaccataaaaaaaatgataaaaaaaaatgtggcacttgaatctaacactaacgatagaaagtgaatagcatatatttgtttatatacttattgtaccatttaaataattgatggtatatatttgttaattattttataattaagtatataatttaaaatttcccttgttcttaacccctacattaatggtagcatgaaacaacatctacagtgaattttaccaaaactaatacaaaaaggctttaaaaaccggctctaaagcccaattttatcatagtgaaaaggtaaagtgttcaataaaaaaaaaaggtaattaagttaatgttgtattgattctgaacacaaagcttattacaaagtgtaattttgcagaaccttttctcatggaagaagattttacttatagtgacactattggtcgtttggtcttgataaatacgtggttctaaacgttaaaacatactctcattggtacctacgaaatcgaccagaactggtggtcgagtgtcagtttgtattgatacctgcggatttggtatccgctagccc

SEQ ID NO: 8198 - DNA, 1265 bp, Cannabis sativa
attagtctctcctctctctatctaactctgttttttctctttcttaaatgataaaagactatatatagattaccacatgtaagcctatacaaaaatgataaacaaaccaacttaactaactttgtccaagtccttgctgatgtgttcttatcttatttgtctttatttgccatatcattaatgaattggttttatttaggactgatttccaacagtaataataatggtttatgcttttagttttgaccaaatttttaccttccccaaacatgtcctcgtgacactactagtatgcttcgaggttttcatctactactgtcctcctgccaaactattttggaataaaatgttaatagacatagaaaaagaggactataccagataacttagtaaaattgatggtgaagaaaaaaattcaattgataaattgattgctacaaaagccatctctcagaagagaaaacatctctagcaataaatccttggtaagttacatttaagcactctcacgatcgaataatgctgatgaagcatttacaaattgtagattcatcagcacaagttgtaaatcttcattagtttgattgagatacaagggagctagtcaattgagttttagtgatatttacaaacaattggggacccgaatggatgttgattggcctagacaaagtatttggcactattatacccctaattaaaattaggtacatctctaagtaaatcactttctctttttttcgtttatttaaggaaaggaaaagaaagaaagaagaaaaaaaggttagaaaatgaatatgacatgtaacaaaaagcatagtgtaaaatgtgatctaatgagcatgaataacctactcagctactcttatcttactcagtatataaaatatgaagggcacacatgtaaagaaataaacctaactctgctcctcgtgcttctgagtttcgggtcataatttacacccacccgttcaaaacatcaaatagcttaaatgggtaggtaaactgggtacccgtttcactcttattctataatgagtaatgatatgtgcaataaattaaatactctaaaatattacacgtactgacattattttttaaaacaattaaaaacagtaggttctagttcccgtttgcgtaattacaaatagttttttaaaaaaatagtcatgtgcaatgttttggtgtaatatcaattacacattgcagaataattgagccataccaaatgattagggaacaaatatatatataatataaaatat

SEQ ID NO: 8199 - DNA, 729 bp, Cannabis sativa
tatatatataaatatttgtagaatgcagagtacttctaggctggcccttgggatccaatatagaagttgtgtggaagttgcttaactttggatttgtgcaatatataataagagatcctataatcaattattggcttctgatattactaaaagtggctctacacaaattagataagactatatatttacttatggccacacacacaactccatacaacttttcaatgcttgatactatttaagaatttgactatcaacacttactccattttgttattatttttattttttaattttattatgttacaatatgaaatgcacataataaagttttcaacatgctaattatcatttccaaaatttatatgatcaaacctataagaatattcctagagagaaagtgcctcgaacatttttataataaacgagaacaaaattattaaacagtaaataaatatttataaaatgcttttacaatacactttctgatgcactccctattagtttcatggaggagaattttttgatttattttttttttattttttataattgtatatattataattatttaagatatattttaaaatttatataatttctcaacatactaaaaaaaagtcagagaaatagtgtgcaacctcttcatgataaaaaggaattaacaaaactattaaactgtcaccttaggagttgggagactatcaatacttcaataggaaacatata

SEQ ID NO: 8200 - DNA, 859 bp, Cannabis sativa
tgtattaatttattaggacaattaagagataataatttaatagttgattagttataataacatttttttatatctcagtctcaagcctcaaatatcattatagattggagctcaagtaatattttaaaataatattaggacacatatatacttttatactcaaaatatacatgctgatgttgatgttgcaaacttttgaacatttggagaaaagtagttagcatttcctagtgtgttacaagaaacttcatcttgttattgtattgaaaatttgttttactttgattattatcattagaatgaattgtttatttgtataaattgttggtatcacaaacaatgacgcctttgtttttttttttttgaaacagaatgacgcctttgttaaagacgagagagtaagtcaataactataaaataataatgattaattgatcattttaatgagaattattaaaataatatatgtcagaagatcccaaaaggtacttacgtttagtttatagatcaaacccaaatcccaatcaaagattggataagatatatattatttgagttctgctaataattttttaattaattttttatttttttattaataaagtaaaattatttttcaaaaaatattttataaaactatttttattttttaattttttttaattgacaatcaaacttttaaaaaattttaaaaaaaaaaaaaatcagtgttaaaagttttttagaccttgggaccagatcgaccctatttttggactcgaatcaaggctccgctctagatttaaatctaaacttgacttaaataaaattaaaaaaataaatattaaaatcaaagttagtttttaaaattaaaaaataa

SEQ ID NO: 8201 - DNA, 1233 bp, Cannabis sativa
tccctaccttcattaaccttgtcaaaaatcagtacaatgcgaagattaagaggtttaggtctgataatgctagagagcttcaattcatagagttattcaaatcccttggcataatacactaccattcttgtgtccaaaggcctcaacaaaactctatggttgagaagaaacatcaacatttactcaatgttgctagatccctcttatttcagtcctatatcccattagtctactggggagaatgtgttagcactgttgcctatcttatcaataggataccaactcccaatctcaaagacaaatccccttttcaaatattaaaaggaaaacccccttcctatgatcatttgaaaccttttggttgtctagcatatgcttcaacattaaatcaaaacagatctaaattttcacctagacctgtctcttgtaattttttggggtatcccatgggaatgaaagcctataaattgcttgatctcaatactaatcgaatattttgctctagagatgtacaatttcaggagttcattttccctttcgtttctaatgaggggctacctgacaattatgctgatttttttcctttacaacctgttcagcataattctgatgctcctgctgcagcagaaagcacacagcagcatagttttgataatactacttcaaatcacacaacaacctatcactaaaactgagtcacattcccccacttctagacctgttaggaatgttactaagccatcttatctacaagactatcattgtttcttatccaaagcttattgtgtttcacaaaagtcttctaattcctctactatgcattgtctttctcaggttcttgattactccaggttatccccaagattcaaagctttcatctgctcaatttctagtcaatatgaaccaaaatgttacaatgaagctgctggtatacctgtttgggacaatgccatggatattgaaattgaagctcttgaaaggaatcacacttgggttgtggttagtttgcctgcacaccaacatgctataggttgcaaatgggtgtacaagattaagcttaatgcagatgggtctgttgaaaggcacaaggttaggttggttgctaaagggtacaatcaacttgaaggtgttgattactatgagatatttgctccagttacaaagcttgtaactgtcaaacttgtcttagccttgggtgctatatatggctggcatttacatcaattagatgta

SEQ ID NO: 8202 - DNA, 704 bp, Cannabis sativa
aaaaaaaaaaaaaaagagagcaggtattatcagagtccttaaggaatttacagagcctcacaccttcgtcttttccttttctcgtgatcttttctctctctaaaatcttccctttctctctcctctttatctgtgctttaaaattcttcttcttcttcttattctttttgttctttaaaaaactctttcttcttactcttcattcactgctgcctacctatagctatatatatatagttatatactatacctgaacttttcagactgtgttcccaataaattttttcaacccaccttggtgttttgtgaagattttgtttatttatacttaaagaggagatcgttaaaccagtagttagtgggtaagaaaaacccatttcaattagagaagagtatattttctcttttcattttctgtttggggagagaaggaaagaaaaaaaaatatgagtagttgtggaagaagtggtgctgtaagacagtatataagatcgaaggtgcctcgtctgagatggactcctgagcttcatcactgttttgttcatgcaattgaaagacttggtggccataaaagttagttcatatacatatatatgttataaaatacaagatatatattattcaattactgtaatttgattttactctaattaattttaatttgtgtagaggccacaccaaagcttgttcttcaattaatggat

SEQ ID NO: 8203 - DNA, 1309 bp, Cannabis sativa
aaagaatataaaactcatgcgtttgaagggattaatattacgataattttaattaaaaaagtgaaacttatttagaaacataaatttcttatcattcaaatttaatttaaattttacgttttcatttcaatcaagtctaaaactcataccaaacgcttcaaaatgggtaaaaaaaactactcttatgaggtttggaaaaaaagattaatatttgatttttttcaacaaaaaaattcaaaattcaaaattttgtacccataccatcttccatcattattatgcatgggactgtccaccgaatatcattacatttaatataatattcctataattattcttgatgtggtactatatatgaataatgttaggcttaaggaaaatagaaattatataatatatatttgagaaatttggaaagaaaataaaatttgagggaaaaagttgagcccttcaattattttactttcaaattaagagaaaatagagaaaaataaaaatcactattatggaaaattattatatcttgccttcaattttaaacaataaaaatgtatattttctttttaatattagtaattcatcatttttcttccctttttttcccaacaatataacataattatatatgtatatgtatatgtgtcactctcattctctctcaacataaatgattttcattaaaattcataaaagaaagtacaataaatagattaataatgattttttttacaacaaaaaaaaagcacacaaaataatattcataatgacacaaacaaacaaacatagccattaaacacacacataggagaaatatttcaggctatttttaaacaacaatttttttttatttttttaaagaaaaaagaaataataatagtaataataattaattaattaaggtggtgtcttgacaagaagagtggggaaatcaaggaccacaatgttgtctattgcaagtgaaaaagttgatgagaattcaacatgtttgggatgcccttgaaatgatgtgaagtcttctttcttctcaaatgtcattaagaaggcatgagtgaacccttgtcttagcatttctaagctctcaacatcttctcccctataatataacacaaataattcattactaaaaaaaacaatggttctaaaatatttgatcttaggttaaattcaaaagtagttcgaaacttctgattcgatattgtaaaggatcgatcgattctatgctaataattatgtttaataagtagtgaataaatatattacatgttacttattcagacgttaattttatgatttatatgagacatcagga

SEQ ID NO: 8204 - DNA, 791 bp, Cannabis sativa
taatggtgattatttgatgcacctatcctctcttcacaatcatgctcacttcgaattaattatttgcaccatgtgggttatatggagtaattgaaatagagttttccatcgtggagtgtgtagggaaagttccttaatttgctgcttatgcaagaacatatcttgataatttcctaaaagttaaaaaacctcagctgatgcctgctgctacatcaacttcaacatccaccatacttagaaatgaaatgccaaaagaaggtgtacttgaatggcctgaagttaaaatttgatgctgccgcaaactttgatgaaaaaaagcttagtataggtgcacttgtacgtgatcatgatggtaaagttattacaaccttttcaaaagttgtacaagggtgtttctgatctggaggctaaaaccctttttcatagtcttaattgggttaggcaattacaattctctataacgcatgttaaaacttatgctttgcgagtctctaatactttaaatgcttcatttttagatttatcatgttttacagatttaatttctaatgtgcattgtcttttattctttttttttttgagttattgtttctcatgctaagagaaatgctatgctaatctagtcgctcataaactgacaaaatacgttctagagttggatgaaaacttttgttaaataggagaaattccctattcaattttctgaattattataaataacttttgatttataataacatcaaatcttctaaaaaaaacatactaatattaataatttaatttaatttaat

SEQ ID NO: 8205 - DNA, 1201 bp, Cannabis sativa
aacctccgtaaaaatgtctggatctgtaggtgaagagtggaatatattcctgaaatactcttcaattatcttctgtaccatgcttgtctcagttcgccaaatgcccatactatccatcaagcctttaattgtattcttcttcctcctagtcgaagccttgcgatgaaaatatttagtgttcaagtccccccacttcaaccacattgctcgactacgttgacgccaatatttctcatctttctccagcacacaattcagttgtctctcaatttttttaacttccacccacaccctaggatcagacaacgaggacaaagaattcaatgttgtcttcaacttcttaattttctgattaagcatcttttttttcctcctattccaactatcaagagcagtaccaaccctctcagttttcattttaaagtcaacccccgatcctactaccacatcctctctccactgctcctctatgatatctttccattgatcctcctcacaccatgcttcctcaaagtggaaccgccccttcttccgaccatgctcctccccttgactatcattacccaacggcatctcaaccaccaaaggccgatgatccgaggcccaccaatctaaaactttaatatccgccccatcaaaacattgtaaccactcgtcattacaaagccccctatccaagcgttccattatcgggttggactcatgttcattacaccaagtgagatccgtcttactagaactaaaatcaatcaacctacaatcattgataacctcccgaaactcttccatcgcacccgcactcttaatcctacccccaaccttttccgccaaactaacaatctcattaaaatccccaatacacaaccaagctccttgaacttccctgctaatattcctaaggagctcccaagaaaatttcctttgagaagcctcaggattaccataaaaacaagtcaaagcccaagggagaaagtccttaccagcaatcatggcaagaatatggcctgctgatgatgagtccactcgaaccgtaacctcctccttccacataagtaatagaccaccactcaatcccacccgatcgacagaccaaaagttctccccaaactgcagagtggcactcaaacgctgtgcctgagacctactaagcttactttcagctaaaaacacaatactaggatcaaattctctaacatgggac

SEQ ID NO: 8206 - DNA, 1329 bp, Cannabis sativa
cttcttatgccatttctgcacaattcctgaaaagcgtcgtcatcaacaatatcttttcagggggagtgtaaagtgattcatgaaatgtcactgacctctttgggtgtatcaatggctgagtaggtggagctagggaatcttgggtagctttcatctttcctttcccctacaacaaaaataactttaattaaaaaaatttaaaattttcaacataagtttaattaaagttacataaattacctggactaaacgagcgggaggtaatttttattagtttctttggccaaaagacgaaatgttgcacagctaaacccacttggtagaagccttcctgctttagaggacatggaagacttacattttcgttaacaacctcaaagggaatctatatatacaaatccagctaaagatttcatgtaaattaagatcctgttatatatatatatatatgttacttagtatttatttactctcatatatatgtacaggatttagggaggggacttggtgaatatacagagtatgaaagcatacttcaacaagtaaatgcacacacagaagaaaaaaaatcatctcatagtatttcatctcaatcaaacctactaatacagatgttcaagtctccaccaaacttattaacaaacttcaatcaaattccacaacaccaagcacacaaggacaaggcaaaaaagagagcaggtactataagtacaactagcaaaagcttacaactagtttaggtgagaatctagaattactagaattatggagtagaaataacacaaaccctaatgtccatacagagaaataaatggctatctctgttttcatacatcatttggggcttcctattcggtttctatacattagaatagaatccagaaacttattttgaaactcggttgaaatccaaaacaaaaaggattaatcaggtttaacttgaataagagatacgcaaatcactatagatggaataattgaagcaaaatttaacaaaggcaagtagttttttgtttattggtttttcaatctaaaaaagattttcaaaatatgtcagaagtgggtcacatgaagaagggtaaaccaaacaaagattatgtagtttataactaacatcctttaatcataacagaaatttaaattaaaaataaatgaatgtaactttaaataatggtatagaaaagtatgaaattaaaggaatgaataataaacttatacacaaggaaaacacatacatgtaattatgtttggagcatgttaaacaacatttttatctgtatttttctaattaaaaaacttcacacctcacatggggagttggacacaagt

SEQ ID NO: 8207 - DNA, 1459 bp, Cannabis sativa
tctctgttccagtaccttggtaccgatactagattcatgtggcagtcatagaaaactccaacctattagtcctcggttcaaatgcttatgtgatgatataaggtccctccctctctcattgggagtcttcagtgtcactttcttggtcactatctttggaagactcataagaaacatcttcaatactgctcccctactcttgataattgttagaaatagaatgagaatctttgtcactgccccctttcctgagtcatcttgggaagtagggggagactcttcatcactgttttcttgctcgagatcttcttgagaaatagtaggggactcatcatcactatctacctactcgagttcatcttaggaaatagaagagcagtctctttcaatagaggcattagttgttaattcttcttcaccttccttgtcaatgtaagttagagactcaggaaataaatgagtagtgtaattagttgctcttttttgagcgactcccttgatcttcttgacggcttcttcgagctttaatgaaactgtcagctctgtctagaagctcttgaatggtgtatactaatttgagcttcaagtctttccagaatggactcattactgttagtctagctgtcatttcaatgaccttggcatcttcactaagtatcttgatctacatggtgtcctctaagaattatcaaaggtaatcctttagaggttcgtcttcttgttgcttggtgcacaccaaattattgggcttgattggtttgtgccttgatggagagaatcggtcttagaatgctttcttaagcatctcccgggaatcaatagatcccagggagagcttgagatgcaactattaagttgtttctaatagcgtggctggaaagactcaacaacgagaatcatctcgaaagtcttgcaggtcaatttatactttgaacttgtgtatgtgggagagagggtcttcttttctagtgtatggatgctacactgaatttctgaactttgaggggatctccaaagaattaattttagagaggaaaacaccactctcgatctaattcgtactatgttgtcttttgagtagtcaaattcggccctacacactatggtgatgtgtgtatcagttggctgcttcaaactgatgtagttatgtaggctcttttgtcctctaagtggatcaaaggcattgatcagccttggccttatggttgtttcctggtcgtgtggccttgatgaaaactatggggatatatctcgtatgacgatagtgttgtctcttaagtgtttgcttcgtgagcaactgctcgtagtactataccaaatatttccttcaaaatagtcttcctcttactgacatgtgtggagggagttggactaattgctcttgttcaacatgtctccatgaacccatgggaagtatttgtattgtcgactgccaggacctcaagcaaagtacctacac

SEQ ID NO: 8208 - DNA, 526 bp, Cannabis sativa
catttttcgagcaacaaataaaaatattttcaaagtcccgggagacatattggctggaggcatcatgtcggctagagcatgacaaaagtttgtattttgcaatttatttcttgagcatgtgacatgtcgcccaatgattggcaacatgtcgcttggagctttgcatgaaaaatttcaaggtttcttaaacgaaagaaatgacccaaataacctcatcaagtaacctaaccatatgggttagtattaattatggttcctacactatataagggtgttaggagagcaaaaatgattagatcattcatttttactctctctcgaaaatccttctctctaaatgttccttagttctctctaagatttgttcttagggttttgctaatcctaaacaactaaaatgcttgaagttgcagatcttattctatgagagaggtcattagcaattcaatgaaggcttggagtaaagatttttttggatagcattgaactaatgtggcaagccttctttgaagaattgatttcacag

SEQ ID NO: 8209 - DNA, 515 bp, Cannabis sativa
aaagtgtgttattagatacaaaacttccaaattgaccagaaatttcattatcagactaaaggaactaaaatcttgaaaacaatccaatattgattgactatgaaaaattgaggataaatttgcaataacatttaatcatatcaacttaaacactaaccaaaaagattttcactagaaatgaagcaaggtttcccaatttcattgcatcaattcagatacaaattgagataacgtgtgtcattgtaaacaaaacttcaaaattagtatccaaataaaaattgataagaagcatgagaatctttacctttgtagtatagactttatcaccattctcgtttatgtaaaactgaagatacattttcaatgattgtagggaaaaaaaaacctgttataataagaaaaacaaaaatataatcccatcaataaaacataatattcataataaacaaataaaaaaacccaaaagacccttttccctaatcaaatcaaccgaaacttgaagaacagaacacaaa

SEQ ID NO: 8210 - DNA, 1071 bp, Cannabis sativa
aaacattttcttaaaaaaaaaattacaaaagcatactacactggaccaaatgcatatttctttgtaatggtatatatatattatttagaataattaattagtattttttgtcccttaaactttttcgacattacccaaataatatgtttcttaaaatataggattagataaaaaaaatattcatacataattatatcctattaagttttgtttcttttaccgttaaaaattagcattttcacacctaaactttgatcaaaaaatttttttgcccattttattaaaagaaattaatttaaaatttttaaatttttaattatttcttacctgaacttatggacatctatttatacatagttatatatatatatattaattaaaaaaaatttaattttaaaatattttcaatttttttaattaaaattaaaatattttataactctacattaaatcattaaatatatatttttacataattatactattattattattttattttaaaaaaaattgtgtcaaacaaaaaaaaaaaaaccatatcaaacgcatgatgtgtcaaatttgtattaagcagattgtgtcgtgtttgaatcgtttttatttcgtatcaagtcgtgtcgacttgtttttgagctgtgtctaatttttacgactctaacccataaaatttgtatcgtatttgtgtgccttgtcaaaaccgtttgaccaatcttatgtgagggcacatttaagaattactaagttttatttttattgctatttactgtagcaaataaaataactaatgaaaagcaaaacaaaatttataaaaataaaaattaaataaaaaaaatttcctacatcaaagccaattgtattaaagtgaaactcaaatttatatatgataatttgtcaaaaaaaaaaacgcaaatcaattaagatctactgttaaaaagttgtgtgtcatacaatgttaagccaatctaagtttaacacgttaattaatttttcatttattaaaaatttaaccatttatatatatacagttttttttcccttaaaatactctgtgtcacaataagattagtttaa

SEQ ID NO: 8211 - DNA, 740 bp, Cannabis sativa
atatacttttgtagggagctttcaaagaaagctcagaaagcaaataacagttggtggcgtttgagtggtttgcttggggaccaaaaccgcccgtttatgtacattttgctacaaggccttttcacagtagcgactatggcgcttacagttcccatcttcttgtcttatgaattacatctcatttttcaaatactgaaggtctctgccactgcttggaatggagggagctttttgctagatgtaatgcctaggcaggttattctcaaggagaaaaagaagtcagagatgcagccggcacaaactgaacaagagccaccccatattgtgccagaaaattcccactccgttgaggcacagaattcagtcgaaagctagtgtctgtcttgaaagtacaccctgttctggtgtcataaaaattactagtcaagtttatacctctaatcctaatttgtcacctggtttgcccacaaactagctctttgtagtttgaatagtgttggtttccataggttttggttagccagaaaatgttcttcgattttggacatgtcattttaatcttgtttcttatgtgcacgatgcacctttgcaccaaaaatagaaattaatggattgaaatatgaaaattttctgaagcatacatgaaatgtcgacaatgttggagatatatatcacgagtgcacttctgtcagtcggtcaaatatttttatggatattttatgaaagatatattgtcacac

SEQ ID NO: 8212 - DNA, 1289 bp, Cannabis sativa
taataaaatgggacatgtatatatacgtaccaacagtatattcaaaaacgacaacgacagtcattacagcccacatagctgagaccccaaaattgtcgtaaagtggttgatagtagtagaatattgagactaagcttagagcaattccaaccttaaccgaatgaattactcttcttgggtcatcttttcccagctcttttgtgtcctttccaatcttacaaactttgcttatgaatttttgtaacaacagcttcaaccatgacaagaaagacccaaatatcccatttttctcattattattattattattattattgtgtttagcagctgtagtagaactctccatatccatatacatataaatgcaatgaactgatcgagagagaaaattaatgagatattaatttatatatatttagctatatctgttgctgatataggctcttatttataagagatggagggaaaaagaactatatgccaagtgggcttattttattttattttatatatgaataaaaaaatcaagtgtatgtgtgtgtctagagacacgttttggtgggtttttgttttttggcttttgtacgatcaaagtacaaagaaaatttcatttggaaaataaagttggggttgacataactgcatggaaagggaaataagtggtatatatgtacgtatgactggagaaatattgggagcccatggtttctatttcattcaatttaaaggctaaagtgatcactcaatttgttttcataaattttatccagttctatatatttttactggttatgatcagtaaaaaagtctccaaaatccactttgtagtgtgttgggcaataacttatatattgcaatatattgtagtatagtaaccctatatacatagctatatatgaattgtttccaggcttttaattataagtatttatatatataaaaatatatatttatatatagcatcgatccttatctattctattccaaattccatttcaatcacatttttcgtagaaaaggagtacatatccagaaattaatcacaagtggtttcacgttccatttttttttaaaaaaaactagtggttttttcacgtgaatatatacatacacttagtcaattcaattatgataaatcatacttaatgtcgacaatattgaaattcttataatcttcatgagatcatttgtttctgttggaagaggaaataaggccatggagagcatcaggttacttgatgccattttaatgtcacctcaatataatcaagaaatgataataaaaaaaa

SEQ ID NO: 8213 - DNA, 754 bp, Cannabis sativa
ccgacaaggacctaaatcgcttctgagaggttattgccgttaaatggtaagtcgatatcttcgctagagaaaccagctctaaaagggattctgaaagatgatatcgtggaaagaatcatccataatgcgttcttttccaatgagtcactaaaaccatatcacaaaaagctcacccccttctatcttgttcaaggtctagcccacaaaagaaaacattttgacctaatttatcaagatgatgggctaaacatttgggacccaggtaaagctcaattacatgtttactctttgtgtaaaaggctccaaatgcatcacttacttgttagttgtttcatcaacaacgaatttgactccaaacttgcacgaacagtaggaagaatcaccactacaaaatcggttcaaccagcaaagaagaaacaagagaattggtctcctagtctgatctacaatttgcatgggatttcaattttttcaaattggtcgtgcattaattttatgggtccaaaaattgggaccctaacaagatctacttgcccatttttcgtcgactatgggaaatttcttctttcctttgatcagtattttcaaagaaataaagattccttaaccaaaaaaaaaataaaaaataaaaaagaaagataccgttaaattttcttgtaacagttgtggtcttcgaagatgaacctccagcgtgttcttagtggtgggaagactaaaaaagaacaaagcaaattttctccaaaagtcgtgggaa

SEQ ID NO: 8214 - DNA, 610 bp, Cannabis sativa
gagagagagagagatagagaatcacacaccgttaagggtgttataactatatttgtaaattgtatttttgaaatcaataaatattataaatgtttgttttttccttatgattgtattaatgttattgtttgagattgcttgaaatatttaggcatcatttctaatagtagctgcctatgttgttactatcattttagatgttttactgattattatttcactcgcatcaagcttgattggattggaatgcgaaagctgataatgagatatgggtgtttagaagcaagctttcaagtccaaaacaccaggtattaaactgaccttatggccacggattatgagatttggagagctaaaaatgtttccttttgggagctgtgagtggtggttgatgttgtgctttattttttagcccttttttggtttttcttctagcaattgggggtgagtggggttgttcctttttacttgtaaagttttggtatcaatacaagttttcttgcttaccaaaaataaatagttatatttttaaatttttttgtttaaccgtgttcattgtagtcaaaacaagtctctttcaaatctaattctaaattcaaatcaacttccc

SEQ ID NO: 8215 - DNA, 833 bp, Cannabis sativa
taaatggtaacaacagatatatctgacatgtcgcttatcatgttttttagcttcatctttgaggaaagtttgaacgttttaactattttatttaatgaacgcttaatcctgaacactaacgggtcatatatgcgcctaagacaataagatccataccctacttaataacacactctcaatttttaaaatgaatattgttattgggcacacctagcatcttctatagtaggcacattggtcaacgatattttctaaaaattattttcttaaattatatatgacctaatacttaattatatcaatagcaatataatacaaaaaaaatgtgctagacaccaataataccttttagcatttctccttaaaaatatgtttttgtttatacttaataattaaatatatatatatataatttaatgcttagagaatatatacatatataaaaagaaaagaaaaaattggacatagatcttgaacaatattaattattgatacacactactctccatgctgtgtggatgagaatttattttattcaccttatttatttatgtttgtaattattttttttatttacttgttatattttatattgagttatttgtagttattcacttcttcatctattatatatagatttggagtacatatagttgtttttatttattattagtattagtcgaacaatagtactaatatttagaaaaaaatatatatatcatatggactattttttttcatcgtcaatattaatattgagatgaaactcatccatatttaatcactcttctcctaaattctaaccatatcaatcatattagttagtatttttt

SEQ ID NO: 8216 - DNA, 567 bp, Cannabis sativa
agggcctattacgaagaatctcagcacaatcttcaggcaggtcaaagaaaatgccccatacacctggcttcatcgtcttaaatttccaatgtgcctttagtttccagatctgattgagaatgtcctttaatctagacatggacacccccttaccgtcgaagaaactgactagcacccccgtactaacgatttcagcagtgagttcaaaatttggttccaaatcaagagtcatggattcgaggaagttgctgcgtaaaacttcaaggtctttgtttgacttttcaaatataccgttgggagtgagactccaccaacccctcatctgtggcaacatcatttatttccatgttcatcgcaggatgttggggtggttgagatgaatcaatattcgtatttacttcaggggccccattcaaagattcagagctgacattctttggttcgtgtgagtttcctaggttgtcccccataatagccacaaagacaagtgtgactgagagggaaatttcagagcttaaccgagaaagtagaactgataacttgaagaaaaggcttcaaagtaaagtc

SEQ ID NO: 8217 - DNA, 585 bp, Cannabis sativa
ataaattgcagactttttcttgcagaaaacagagccggttctttgtaggaagagcttcacttagaactctccaaagaaacacggaaattctgggatgtatgcctggttcccagatccatttccaaagcttcttttctggtgcaaatctatcagaattttctgtcaaataggcagctttcactgaaaacatacctgctggattctgcttccaaaaaatctgatccctgtagggagttgggattctaggaatgctgataatacgcctccccaactcttctccaaaaatctgattaataacctcttcattccattcattaccttgtgagacatcccccaaggtttggacagtaaaacctcttcctttgagactttccattagagcaacaaattctgtataatctagccaagggatccatggctggttccagaaattgattgtaaaacctgatgctgcgactgacaatgagccttttagaatcgttgttctggtatccaagatacatttccattggaaggagtcactactttttggcttgacaccccaaaaattctcattgtagcagttctttccaagtaggcaataaa

SEQ ID NO: 8218 - DNA, 691 bp, Cannabis sativa
aattaattcataagaaaagattggagatggtgatgtgacaagcctcttccccaagaaattcactatttcatgaaaaatccactcaacacattattattgttatattgaaatgaccccaaatagtgtagaaagttgttgatgttgttgttgttgtttcattacaatgttatgttagttacaatcataaagaccaaataaaaatcattaatcagtaaatggatcttgaattttgagtgtactacaatctcatattgtcagaataaacattaattgttctaagacaacttaatataaaaaccaaatatcatacaatagtttcacttgtcccacatgattcctttgtcccctctttctcccactaagatccactcatgatttggattgttggtccactaaagattttaggtttgttttgctgaaaaaaccaccactgcctctcttattccaatttcaaccaaaggtgtaaatttatcatcacttttcactcatgcacaaggaatataccataaacagaatagggagtgagaaaaaattaagaaaaataaggttaacacatgtagtactattattatccaatgcactctctcaatcatttcacatttgatggaaaccataaaatatatattattagtttctcaaaaccttgtacaacttggttcttgtttatatggtcacatggaaacaaagaaaa

SEQ ID NO: 8219 - DNA, 1873 bp, Cannabis sativa
  modified_base (124)..(124): a, c, t, g, unknown or other
aaataaataaataaaaaataaagttttcatcaaaattaagtcagtcaggtactgtttaaatgtattatatcatcattaatacaagatttttttttattattatttttatattttaatttttttntttttatatttttacaaaaatttaaataaaaatccatataataattaacaggacaatttaaattataattaaaattcatataactactcatatacattaaactataaattacaaaaaaaaaaattgaaaaatagtatataaggtaattttcctattaataattaggattttttttttttaatttttacactttaaaatagttttgttttttggttttttatggtaattcacatagcaactcacacttaacaacctaaatcgcaatcaaaattcacatattaacctaaataaaaaataccaaagcaacttaaactataaatttgaaaaaaaataattaaaaaaaatagtatacgaaataattctccatataattactataaaaaaaaatattacactcgtagaatattatctcaaagtgttttgacatctcctttaaaagaaaaagtagtgttttgacaccttattacaatgtctactaatactagcaaagttctatacttattgaagtaattaaggtgatgtttgattatggtaataataattaatatatctattatattgtttatttttctattttaatttttgcaattcattacaatataatggttattaaattaagtattgtaatgataattacataccaaactaatgtaatcttcattataattacaatccaccataaaagtaaaatactattttaataaaaaatatagtaaaaaaaattcaaaagtccatattactttttcttttgaatattttataattataaaataaaaataataaaattattttaattcatacgcattttattttattatattttcatatatcaaacttaattttgattacaatgttcattacaaatcaaacattataattaatttttattactgttcttattccattataataccattacagttactattacgattctcttacaccaaactaaataccacctaatgactaaataccacctaattaataagtattgattataatttgaaatttaaagggatataagaacacaacaaataaggaaatcatctaaaaagaaagcttatttatggatcactaagaattcgatgccggtctattcccatttcccatgtttgtgtatatatataaaatataatatatggacccacattaattaataatcttatacctaacatctttagagttaataaaaagtggtctgaacaaaccaacaaaatagggggccatgctcatgccattctatatttgttgagaaatactaaaaagtatcagtggtgccaaacactctcttacatgttaatatcgttattggtctaattaagtatcgggttccatataatttaatataataacttttagtaaagtatcgctagccaattgaaagacgacaagtcttaagggtgctaggcaccactagtgcccaataacaatgctcgtatttgtttcatgttaattgattacataacataataactattcttcctagttattttatcacaccttcaaaccatgacaattaaatggtggatatatcatttttatgttatgtttgatgtgattaaacaaaaaaaaaatgtatctattgcatcacacatttttgtgttattattaatgtaagaaaaaagaaaagagaacactcaccttttgtaatagggtagactttttatgaagcaccatcattgacacccatggaacactacctgatagtattcccatcactatagccgcccacgactgaaccaaacctac

SEQ ID NO: 8220 - DNA, 565 bp, Cannabis sativa
ggaccactaatcttgctttgaacttattcaatgacccatctttgttatatttggccctaaaaatccatttattggataaaatgtgcatgtcagccgttctaggaaccaaaatataagttttcttctttagcaaagctgccttctcatgatccattgccttttttcaatgaggcattgtaagtgcttgtttgacagattttggctcttcataaatttcctgtttggaagcagtaaccaaaaacactttgggtttatatatacctgattttgatcgagtctgcattgggtgaccttgaggtaatggtggaagagatggtggaatagcaggtgtaggtatttttgtttctgtttctgcatcattgttgaaaaactcagcagatgtagtaggatcagcaagattgtctgttgcaagtgtaggtggatgagtattttgatgtgatggagaagaaatattggtagtgtttggggttagatcaagatcaatatctagagagccaaattgaatgggaggggaactgacagaggagtgagtttgtagaatgacaaaggcaggagcaagaagatt

SEQ ID NO: 8221 - DNA, 1176 bp, Cannabis sativa
tctcttggttgtaatttgggttgctgtgtgagtttagattgctaggtagattgcacaacatacatatctactaaaatgtaaaaaataataaaaactttaaaatgtataaatgaaaaaactaaaaaaaataaataaataattacatcgcatactaaaattttcagcttttttactactatactgtggggtaaattttttttcaaaaatattgtgtaagtcttatactgtgtactgtgttaagttttcacttttgttctacggttgttagttgttccactgttgtttttagttgttttgttttgtgttcaactgttatcttataaaaatacaatattttttaaaagatttccgtgtgacaatatttttgtaaaagttaatttaaattttaatatttttgtaggtttctcagaaaaaaaaatcttaaaaatgtttaaaataatatacaattttaaagactaaaaaattttaatccaaaattagcaatcatttaattttgacatccaaaaggatgagaattccaaagaagacaactggctgtttataatgttttggtgagtagacataataaaacttaatttcaattaaatcatctcaaaagataagatacacaataattttttaagtaattttaaacagtgtattgactctattatattctattacatagattatgggtttgatttatttttcttgccggaagctgctatttctcataggtggaccactccttcagtggattggatcaaagtcaattgtgatgtggcaactggttgggatttcatgtgtggagtagctttagctagggatcacacaaattctatattgcgagtgaccactataagcttaacttcgttgatcctttgattggagaagttgcgacttgtcagttggccatggagaaagccatgattttgaaacacccttttgtatcaattgagagtgatttggagatagttatcaaggaactgaatgaaaccagttccagttggagtattggtaactatatttaccaatgtaatatgctctctaatttatttttgagttataattttttttttttttcaaactttgtaattttgtagctcataatgtaattaagtgaattttcgcaaacaatataattggtatagttgacccatcaatcatctcagtaatattatttagggtttttttttt

SEQ ID NO: 8222 - DNA, 888 bp, Cannabis sativa
ctatttataggtgtttggggtagataattattctcttgggatcttatcctcgtaattgctcatgaaacatgaataattacatttcatatttataacacatggaataaatagataactgccataactatccttgtctttatctaaaaccagttatgttgactaaccttttatgactcgcagtatcgataatcgtcttttgatgtttactttgaagacagtttctgagcctaagtataatttctaaaatacttctcgcactcttctgtgatgttaggaccgattggatatatttacgcgagacgttaccatcctgtgtcgtttgtgattattctgaggtgaatcacattttgtgtatatcccttaatcttttaacatactcacgcgtatgtgggtcaatgagttgcatgctcttaaagaactcattatctacactttccaactaactgttgttctattgtttaccctgtgtatccaaagatggacattctgtatttgttattcaagatgaatctcccttaagtttttaaggagaggtttaaatatatctattgcttgtattttctgaggcgagtgattgaacacatttatttctttataatccgagctagttcattttcccgcttccttacacgcgtcgtaaccatattggccatcgaaatatgggtataacaatcagtataattagagataatattataattttaatatttattttagtctccatcattctaactttataaataataccaaataatacaaaagagagtaattatcatctcaatccatcctactccttatcatttctaaacactacatcgatcctacccttatttttttcttcctactaaatatagagttggtgcttaagttaagagctttttagtttat

SEQ ID NO: 8223 - DNA, 636 bp, Cannabis sativa
taatttatccaaaagaagtactattctatttctctcacacttacaggtgggttgccgaaaagaaaagtatgctctacggcatccatatatctaattaataaaatcaatcatggcatgaagagttttttcttttttctttttaacaagaaaaaaaaaagaaaaaaaaaaggtatacttgaaacttgaaagtaacaacttttaatatgcaatttcatttgacaattaaggttgtgacattaattaattaattaattaaatcaactaatttagtttgcatgttttttattgtttctaatttgagtttgcatgttttttattgtttctctttatttttttatgaccaaccgtattcttatcagttacattaatttcactaaaagaaagaaaatatttttctttttttcaaataaaaaagaaaacattcatagattaaacttaaattaaacttctcgatgattacataaaaattttctcattatataagatatatccactatgtcatacctcttgtaggtgaaaggccattttgtcacattatgggtccaaaaataataaattcttacaatcttaaaaaaaaatacaactaacaaaaaagaaggaaagttttttacaaaagttagcataattattaatctt

SEQ ID NO: 8224 - DNA, 812 bp, Cannabis sativa
tgaagggatgagggagaaagggaggaccataggaattctggacatgcaataaatgaggttctcggtaatgagaaattggaggttgcattaaagaattgtaatgattaatggaagatattaaatgaaatagcattaattaagaagtgagaggaggagaagagaggaaaaatgacggttgagaagctggattaactagagaagaagggagaaccttagaaagtttcagagcagatttcaatcctcaaaaaattctgactttgttcatagctatagccttggaaaagataaagatttttagtgtcatatgctaaataatattcatatttggtatggaaaaaattgtatagttgagacttgactgtattaataaaattttacaattaaatttaaatttaaattttaaaataagaagatcaaaataattaaaggtaaatgttgtcaacagtttatgttgctaatttactaaaggagatatgaaagcgtaaatacggtgcaaattttggctatgtttataaaattgaattctaataatagtatatattgtggtttaaatttgatatatattaaaaattgtgctaaatttaacataaaatataacatgaattaaattttacactacaataaatattattattttttatttaattttgttgccactcattaatgcttttaataaacttttacattttatttatatatttaataaaaattttatacacgttcaattaaaatttaaattatttattgacgacaaccatcgatccagaactgttgtcgagaaccacagcataaacaactttccatcttgatca

SEQ ID NO: 8225 - DNA, 1305 bp, Cannabis sativa
cttggctaagtattgtaagagagacctttccttttggaatgccccggtccctcccttggcttcttggggtgctaggggaatctttgcttcccgtgatcttattcgtaaggaaagttgtcagatgttaggaatggcttaagtattgatctttggagttctccgtgggttccgtggattgagtgggacgagtttctagctaccttcaatccaatgatccgtcccaagcagccgatctctttggcacagttcttgttggggaatggggagctgaatatctattccttgtcttgctggctgagaccctctttcttggatcggttgaagtctctgccccgtctcccccctactcagcaagatatcctattttggaaagactttcaggatgggaagttctctatcagggctgcgtatcgctcgattactaagaataggcatggtggggttgatcgtctttacaaaaccctgtggaaatctccctttggtggaagagttaaactctttctctggaaggttgggagagatattctcccttgtgggcagaggattcagtccctgtttgggaatgcctcttcttgtgttctatgtgatggtgacttcgactctttagtccacttgtttatccattgtcatgtggctcggttttgttggtttaggagtttgtggagcattcgaagtgatcttctccaattcaactcctcgagggatattgttgaatggattctcttccctcattttcctgacaatgtggatttagataggttctctatctttgctgctcatctttgttatcatatgtggtccacccggaataagtgcttccatgaaggggtgcgtgatacccccgagggtatcttcaaggggattcttcattctgtgagttcttttgatcccaaggattgcgagtttcctctcccggtagcgtgtgaccctcctgctttgtttaatcttggctcagtcaatcgagtcaacctgtttgtggatgctgcggtgagaggcaatatggggttttatgctattcttgctatcgatagctcgggtaaggttttggaggcgtatgcggggaaggaagttgttgtctcgcccctggatgctgaggtgcgagctatcctcaacgctttctcgagatgcctttcttgtggttggccggcggcaatgatcttttcggattgcaaggtggcggtggatgctattcttgcgagacatgtcccttcttggctgttgtatcctacctttctgcaacttttccatttgtgtgatcttagtagttcttgtaatgtttcttggatttcccgtgtgaacaatggt

SEQ ID NO: 8226 - DNA, 600 bp, Cannabis sativa
actatttgtttaccgaaaattgacattggtgattggacagcaatgtttgacatgtgagaagaaggaaagaatttacggagttgagtggcctcgagtcatagtagtcgacctgggagggtcctagccctacccccaggttgactctaggaactccaaaatgggtgtttggatccaaccaagttgtttctgactcaccaaccttgagtattctgaaccaagaagtcaagaagaatccaagtctgaagcttgagaattgaaaaagggttgaaacggcctcgtaaaagtcaacccgggcacctagggtttcgcccagcccctagggtttcacctagtccctaggttgaaatcctagctagggttctagtttttgggcccgtcttagtgcaaatggctcaaactttgtacttagatatgaataagacctgttacgaacatgttagaggcacccgatcagaatcagaacacaacccgtttggagcacatatgcacctagtgcctgggtcacctggtaatgcacctagtgcccaagttgacatgttgtcaatctggggagcttccaaccacatcactgaagatgtatcccaagaattttatttgtct

SEQ ID NO: 8227 - DNA, 503 bp, Cannabis sativa
atgtataaatggattaaatttactttggtgttatgatcaaataacattatgagagaatgttcctcctccacctttaaaaattaattaagttgttttgtgctaattagtggaatgtttggtttttttttttttttttaaataatatattgatagcgaaaatgctttaaagtacttagtttctttttctttttctttattttttttgataggaaaaggcttgattgtgattgttaaatagttgtgtctatgcattattaatttgtgtgattgttatttagaatgaattaagatcattgttagttatagattggagattgtcattttgaaatgatttagatttagacttattgtccaagaattttaataatctactatttaatttttctgaaatgtccctaatttttatttattgtacaattaatatgattttttataaatgggttgcgtattcacttaaaatgaatgatgaactagtttggatgaatgattttttatttcttctt

SEQ ID NO: 8228 - DNA, 1205 bp, Cannabis sativa
tcctcttcgctgatgacagtctactattttgtgaagctaccaacacttctgcattggcaattcagagagcacttgacatatatcataaagcttcgggccaaatgctaaatcctcacaaatcagtaatgtctttctctccaaacactcctatggcagcgcaattattttttcagcaaacccttagcatgcccattagtgagtgccatgaaagataccttgagctaccttcttactctggccgcgacaagaaagttctattcagccacatcaaagaacgtatttggaagttgatgcatgcttggaatgaaaaattgttttcagttggtggtaaagaggttctattgaaggttgtggttcaatctataccaacttatgcgatgagttgttttcgcttaaccaaaactttttgtcaacaacttgaaagcatgatggctaatttttggtggggttcaaacaaagatggctctaaaatacattggaaaagatggaatttactttgcaagtctaagtttgaaggaggaatggagtttcgttcctttatccattacaatcaagcgctacttgcaagtcaagcttggagaatcctcgacatgcccaactccttactaagcagacttctcaagagccgatactttcctcacaactcttttttggaagcgagactgggttccccatcactcacatggcaaagcatccattggggacgtgagctactcgctaaaggacttcgatataaagtagggaatggctttcacattcagagtggtcttgacaagtggattccgggccatacggagtttcgtccaatcacctacacgggttccccatcccagccggttgcgtgtttcattacagatcaaagagaatggaaccttgatgctcttcacaactattttggccagatggatatcgataaaattgtctccattccattgagtttctttcctatggtagaccgtctaatatggcaccacacaacatcgggtgagtacactgtgaagtctggttttcacttggctgctaccttggacgagcaacaaaattcatccacttcagatttacataattcttggtggaaaactttttggcacttatccctcccatccaagatcaaaatttttgcatggaaggttatgcataatgttcttccaactgcagcagcattacatagacggaaggtacttgactcggctgcctgttcgatg

SEQ ID NO: 8229 - DNA, 1189 bp, Cannabis sativa
  modified_base (666)..(670): a, c, t, g, unknown or other
gtaatttgtggttgaaatacttgaatttaatttatgattgcacataaacacttaaatttaattttttatagtaataatacttaagttatatttttaaaacatttgtagttacctgaccatgacaatttttaattgatctaagttgttaaatttttattttttatttaaaagttaattaaaatatacctattagaatatgatacgtcataataacttgaaacttaacaattatatacttataaaaatttttaaaatataatttaagtattatcaaaaattaaatttaatttattttttttgaaaaaaaaattaaatttaattatttacaccataagtatgaatataaatattaaaagaaagataaatgtagtgtgggaatataaagggaaacaaaacagtacggcaaactttctaaaatagggatggattaattgaaaactgtttaaaattaaaaaccactttaaaattaattagtttagcatattaagcgataattagataagagactattttttttgtaaaaaaaattatatttttatgtttaaagaattttttttatatttttacggttaataaaaatataatataaaaagaccgtattttttgtaattaaaattataaatatattaaaattccgtgaaattatatttttataatttttttatnnnnnttgtgtatttgtaaaataattcaaattaataatcagcagaactatttactgatataatccactacaatacaaacactcgtggaagaaggaataaagtgttgtgtttgaccttttacagtgaagaatactacaacaaaccaagtattaatagagactagtaacaccacaccacaccacctaataaaattataaataaattatttattataaataaattacactgctcaaatatatactcgtaaaaaaacaactatacatatactcataataataaacagtcaggatcaagtcaaacccagcttttcttatattgaatgaaatttaatatctacttgaacaatgaaaaccatacaataaagagagtgaccctttaaatatgtgttatatcgttattagtataattaaatgaaccaatgtgatcaaagtcttgtagacgacattacaaaggcttataggacgaaaatctttcataatttgaggctttttgactttgagaatcaatgtgatcaaagtcttgtt

SEQ ID NO: 8230 - DNA, 2992 bp, Cannabis sativa
attattaataatattataagtaattatagtaggaaaccacgttaatctaccttctgagtatgctatgcatgtttttaacaaacaaccagctgtatgaattaagtctacattaagtcaaaaagattctcatcttctgagaaaagtggtaaggagtgctaattattgtgcttgtatttacaatcagttttttaacttttacaccccagaacgtatactacactttttttttttttttgaaaatttatgtaaaaaataaatttaatgtttcgaacgtatgaaaaattaaaatatcaaatattttattattaatatggtaaattattctaaatttttaaaaatttatagaaataatattgtaattatataaaattttgctatgaaaaaattagaaaaaaaatatttggacatttgtttttaaacatggaaattaaaaaaaaaaatagattgcaatagaagattgtaaataacacttttctttacagttttgaattttattgtgtaagagataaaaataagcctcaagctaattaagtaatttttggaaagtataaataacaatataaagatgatcctataatgtgggagacttaatgtaaaatgtatcatttcattaaaaagaggcagagttagaaactcaaaaacggaagagcagaactctacgaaaagagaaatgcagagtagagcttgaaaaaggaagagaaggagcgatgaacaacaaaagaaaattagcgcatgtggagaaatcaagaaaggaaagaagaaggaattaggcatttcttcccccctataaataccagatcctatcattcaaaaaggggacgacgacgaattcttgaccacaccaaactagctaaaactctgtcggaatacactctcaaattcatatttgaattcagagaatcgataacctagacctgaccaattgaattgagagaaaaattatttaaaccgattaagtgtgtaaattgactagatcgaacatggtgtaaagaattcaaagtcttaatagcaatttgttgttgagctaattttcagcatcaacaactgtcttcttctatggaaacctcttgaatgaaaagctaaagctaaggatacgaactaagatgggattaaagaaggtatcacaaaaagcaacagttatgagtgaaggtgatacatttaatccatggctgcatatccaactattgtattggcattagagatgagataaatgaattagagaatgactgcaagagacaagctcaacaaaaagatgtcccgacttgaagatgaaagattccagcaggagcaaagaaaagcatcaataggatcaagatgaaattaggcagcatcaagaggattttcatcgcactatgcagaagttaattgctcaaatgattgatatgggagccaaaatagatagaactcaaattcattaggagcttgggaaaacgagtgggtcagatcctcaacagacaacagatcaaatgtagcctggcaataacacagaactctaaaaaagaaattataaatcagtcagtgaaagtattcaaaggaaaataaattttagttaaagaaaggaggaaaaaaaaaactaaatgaaaattgtaattccatgctggaatcagctaaatttgcaattgtagaacatacattccataagtactttaatgagcgtgttagaattgagcaaacaaggatggagtgtgatctagctccacccataacactacagagaatgccaactatcaatgcacaaatgtagcctataaaatatgaattgagaaattataactctaatggccatttctagaaatgggacccacaatatagtaaattcataaacatttatagaaatatcaataattaacgctaattgcctttactaatccatattctaaaatgcggtcattataattatccccccgttaaaaggatttcgtcctcaaataacttgaatagctttggaattgagtcatttcgacatacaataccaacccagagtttcgattaaaggttaggctttaactgacttcgcagtagaatgcactagaataaatgatgaccctaaaactttgaccctgaaaagagaagtttggagggtatacattgatggagcatcaaacgaaaaaggtgtcggtgctagaatcatactaatatccctgcaacacctctagcttcagagtgtacttcgatttgaattcgaggcatccaacaatgaaattgagcacgcagccatgattgctggtttacaactggcaaaggaagttggtgcttagtacatcgaactctatagtgactcacagctggtggtctaccaagtgtctggagaatatcagacaaaaggtgaaaagatggcccattatgtagctaaaactcgagagctattgcagcatttcaaacattattctgtaaagcgaatctctagagataagaatgtttttgctgatatgctggcaaaattagcaacagatccaaaaatagaaaaatatgaactagtccccattacacatttgataactccaagcacacaaggaatgagggtctctgccatcgaacactcaacttcttggatggcaccaatactctagtacttgaaaaaaggtacacttatgaaagatagagctacctcaaggaaagtccagtactaggcccccaggtatgtaatcatggatggaaggttatactgaagaggtttatcgatgttgtaccttcggtgcatagccaaaacaaaaataagcgctgtcattcacgaaatccatgagggattttgtggaaatcacacatccgaacccagtctttccaagaagatcatttgtcaaggttacttttggcctaccatgaagaaggattgcattgaatatgtccgcaagtgtgaacaatgccaatgttatttaaaagttcctagggctctgccaatagaaataaccctcattggtagtccttggccttttgcaatctagggaatagatttagtgtgatcacttccaactggaaagggaggagtcaaatt

SEQ ID NO: 8231 - DNA, 1034 bp, Cannabis sativa
gatgtaggtgctgaagactcagaagatgaaatagttgatgaattaaaaagatgagagggaaatgatttttcatcaaatataacatcacgggatatatataaacggccagactgatctaagcatttgtagcccttatggtttaggctatacccaatgaagacacaaggagaggatctaaattcgagcttatgcttattgtagggtcgaatattgggaaaacaactacagccaaacactttgagcttggagtaatctggggtgataccaaaaagaacctctattggtgacttaaaggataaaacagttgtgggaagtcggttatggagataaacaggcgttcgaaaagcttcatcccagtatttgagaggtaatttggcttgagctagaagtgttaaaccattttttacaatatgtctatgttttctctccgctgtgccgttttgctcatgagttgtaggacaaggttttctatgcactatacctgctgcttgtaaagtatctgtaaaagatcgatattcccctctcccatcggattgaaacattttgattttggtaccaagttgcagctctacttcagctttaaaaatatgaaagcttttaatggcatctgatttgtttttaagcaaatagagccaagtaaaccaagaataggcatcaacaaaatggatataatacttgtttccattgtgagatgggacaaaggatggaccccatagatctgagtgaatcaattgtaaaggagctgtaaagttggtttcagaatatttgggaaaaggaaatttatgtattttgcccaaacaacaagcattgcacacaaattgagtcattttattgatattggaaagattacaatgggaaagaagagacttgataaccctctcagaagggtgaccaagtctattgtgccaaaggtcatattcattattggacttattacaattgacacaaacagaattatggctggtttgagaaacttcagtggagactatgttgacactggcaggagtgatacaatgcttgggaacattggatgt

SEQ ID NO: 8232 - DNA, 543 bp, Cannabis sativa
gagagagagagagagagagcgatttaagtgaagatgagaaggtgcccaaaatgaaccttatataggatctgataccctgtttcctccaaaaatttagtgggcagttactcttccaacaaaatggccatgaaggatactatgatactagagcctatgagtgggatcgtgtgaagcaatcaaaatatatatattcccataatgattggcaaaaagtcattttttgtcatgaagtgggtatgtgaaatgccaaatatctggccaaaaaagagatgctcgattaaggttttaattgccagagctgaagttgaaaagtccttatccatacagacatctgcacagggacttgttggaaaatggtatcctaatttttgcccacatgatgtggcatgtccacacaggcaagattgatgccacatggaatacaacgtgccactaggtaggccaaaaccctacacaacacctcaattaacaaggaatccaagaaatcaaacagggttaagttacaaggaaatggctagccaggacggccatgtgccagccaac

SEQ ID NO: 8233 - DNA, 778 bp, Cannabis sativa
gaacttgaggcagccatgaactaaggaataccccccacaatcacggccatgtgacaattcttggagcactttagagagagctgggtcggcggcaatgtgagcttgcaagtcgggaatgtagaaaagattcggggttgtaatggcagcaagagaaactgcggattcaactcgtgacaaggcatctacagcccgattctcaaagccaggcttatagtgaatatcaaagtcatatcccaagattttagtgagccatttttgatgctccatggccactaaacgctgttctaacaagtacttcaggctacgctggtccgtacgaaccacaaacttgcggccaagaaagtatggccgccatttttgaatcgctaacactatggccatcaattcccgctcatagactgactttgtgcgagcgcggggagacaataccttgctgtaataagctatgggacgcctagtttgcatcaacacaacccctaatcctacacccgaggcgtcggcttccaacacaaagggaatggtgaaatcagaaagtgccaagaccggaacggaactcatggccgacttcaaaagttcaaaagcagcctgagcttcttcggaccaatggaatgcatccttcttcaattgatccgtgagtggccgagcaatgctaccataaccttgaacaaacttgcggtagtagccagtgagccccaaaaaaccccgtaactctttaatagtccgaggaactggccaatttctcatggctgctactttactacggtcagcagccactccc

SEQ ID NO: 8234 - DNA, 849 bp, Cannabis sativa
tttattataggaagatttttattaaacattaccatactttttcttgtagaaattataatatattttttttaatatgactttttatctatattatagttataatattatttcttttattttaaaaaaatttaaataatttatagtattgaaaatagaatttacataatcaatttataaatgtgacttttcttttgaaaaaattgatttactatgcttaaattaatgtgaagcatggtcttttaatataccactcaattaaatatagagtatctatacttttactatcttttcctcttaaaaacacccttacattttaaaaaagcttctctctctaactctcacactctctgtcattgaacctcgacccaaaacccctatcattgtaccagaccctgaacctcaatcacaagccccagtcggcatcttttctaatggcctctctctctaagtttcgctatctccaccctaaagtcttgaaattcacgagctcaaccactccaaaatcctcaaaattgccagagtactcaatccatcactcatttttagcatttttttcttggttttcacgatgtcgctaaacaccactaaatgttgctaaaacacatcactaaatacatcgttaaatgtcactaaaacatactcaagttttcacgatgttagcgatgtgcttttcattttagtctcataccgtaactacatcactaaatacgcaaaatatcgctaaacttcatccataacctcatatttggtatatcattgcaaatacatcgctaaatatcataaaaattggaaaaccagaagaaaaaatgcaaaaaatgagcgattgattgagaactctagtgatgggtg

SEQ ID NO: 8235 - DNA, 812 bp, Cannabis sativa
attattattattattataaaaatgtcataacactaaaaataatgataatattattaattagaaaaattaatatataatcatgaatggcagattcacgtggtccaatcaagtagctattaataaatattaaaatatataactaaatattttagaaaataatgggtgaccatatatatcactcttaataaactcattcctagactatatatatgtacaccattttggtagttcatcaattagctattataattagtaaagtctcatatattttcttaatcataacatatataatgtccaaccaaataatattggcatcatcaaaaaatgagaaaatacataaaattgttcgaccaacaaaaaattatcatccatgtatttggggagatcgatttctacattacaatatttcagaagaagagttggtaagtagtataagattaatccatcaatacttttatatatatatgagtaataatattgtagtagtatccctaaggtaaaatagaatcatatatataaatatatatatatatatatatgatatttctaaaataaaattataaaactttttttttttggcggctgactctatttacggattacacattcaaattacacacactataaaaaatcgttacctttaattacaacataatttatttttttttagctaaatgtgacttttaatcacaatacaaagtattgtgactaaaaacacatttattagtcacaacaaattataatttttgtaattaatatctttagtcaccaactcttttagttacaaccaggggcggagccacagccaagaa

SEQ ID NO: 8236 - DNA, 590 bp, Cannabis sativa
aaataacatatatttttatcttaatcaaatctcaaacattaaacaataatgtttcattcaaaatccaataattttttagtttaaatcaatgatgtaatgaatagattagtatgtttaaattaataggtaaaccaaatttattagaactaaaatataataagtgccatcttattaatcaaccacaagcatcataaacaagaaatttattttcttaaaaatatatgtatataaaaagtaaaaaattgaatcagatcgatcagtgttttaggtccataaagaattatacataaaatggtatttttaaaattaagaacatgtatataatataatatttttttaaaaaaataagacctacttagttggagacaagttggagtctctaaagaaattcccacatgaggcttagaagacaataacaaataaccattttgttattaaagttaatgctagaatttaggatgaaagtgcataagttttaatctcataattaattaataatgataatcttataattaattgataatgagagaagtagtctatatattttatttatggtataaagtttttatacattagtaaacatatcaaaa

SEQ ID NO: 8237 - DNA, 629 bp, Cannabis sativa
atgatgttaacaaagcttttgttatcgacaagaattttgaaaactcttttatttgcaatctgcgcttctatcaccaaaggatcgttgtgaggaaaatgcacatgcttttcatcatctttcgtgaaggtcattggaagattcatcatttgagggtgctgagtaggtgattgtaccaaactgcgagtttcatcttgatttgactcattcaggtaccttttttgtgcattacgggtgctttcgacaatgtgtggtcctatagaaatggttgccacatggccatctatagttggctgagctgctctaggagggtatggatttttaggattgggagcagtgacaggtcttgctgttggagcattttgtatcccttgaggggcctgtgcattgggagcttgaatacaagaacttgtggatggcctgcttccttaggagaattaatggctccatgtttcttggaataaaagctgcctatgtgctactacttatctaggataaatgactagtatccttacccaattgaataaatggccatttcagaataatccttaaatctcatctctcagataatcacattcattggtggtatgctcgatgtcactatggtattagcactgttggaaattatttta

SEQ ID NO: 8238 - DNA, 731 bp, Cannabis sativa
acattttatatagaataaatttatatagcatcttaaaaaatctaagcacattcactcattcaccaccctttcaagctctttctgctattgttatttcagattagaaattttatatatataatatttcggatgggctgtgaggttggtgggtggtagcggtttggtttccttcgcagcaaattagaagaagaagaatcaagagggaaaaaagaaaatataaaggaaagaaagaaaaaaaaaaaaaaaatagaaagaaagggggaatttcctatctttttcgattttaaatcatgtttttaaatattttaatttatctttttaattattaatatattaggcggtccaataaaattttaccacgtgtacacttctacgtacacagtgacacgtctatttggtacttaacaactaaaaattaactgaaagaaaactgaccaaaacgattgtgaaagttaaaaattagcaataatttttccaatataaaaattaaattgtgacaaacttaaatgtctaaagagtttagccgctaccctattttctctggtgctaattagatccatcaaatgctagctagaataagtggcaatatattattaggcaatgtgttaaatagttaattattaataaaaatcacattaaattaatcaatataattctgaatgattatagtatttctttaatataatatgtaaccaaacaaatttaatatataaacaaaaacacattctctt

SEQ ID NO: 8239 - DNA, 683 bp, Cannabis sativa
agaaacccctccaccctcctcttctagtttctcatatataatacccacatgtcttcgatcattgtgaacggaagcgatgtccacttctatcttcactttatcgtagcattctcagtctcaagaacagtcaaatcaaatactagttagacctaaactaaactgtaatatttcggaaacctaattatatgttatgaattaatgagcatgaatatgatctcactaacctaatttaacataaattataaattttgctataagtggataaataaacgtaatttgttaattacagatatatatattttttatttttcaggatcggccaccctagagacccgattggaggcaaaaaaaaaatgtcacaataattttagttagtaatattcatgggattattgagataagtcaattttagaaatatcagggtattttgaggaacaacttcattaatcacaagcaattaaagcaatggctaagcaataaaagcacactcagccaaaccaacccctacttacaatataattgctctatatacattctctcatgtttattcaagtttctcttttttgcaatttttaatctatagaaagtaaccttttgaatttctagtacaagattagacaccatgctcgagtaatcattaaaaatatagttgttcttgttgatccaaatgctattatatagca

SEQ ID NO: 8240 - DNA, 851 bp, Cannabis sativa
aaaaaaaataggcccctctcactttattctaggtctgctagcgtttgttacaatagttgtggaagactcagctggatgaagagttagttacaactgaatttctaactaacgatctatcctagcaaatattatgttcggataaattatatcaattattacgatcaaaatttttaatacaagatattttgtattatttaatacataataaatagtctatattaatttgtattataatatttacaaatgattcagggtcaattccaatctccgacttggattcgaacttgaacctagacccaaatctacaacatgtatctggaacaagacctgacccgtagtcggtgttaagatcgagtgtattgaaaatatattataacattacacaatctattaatacaaatcaaaccaaacataatattgtattaattaaataatattaatataatataatattaagacataagcccataatcaaataatttgtacgtactaaaataataggtatgtgatggcatttaattataaaaaaaagggtatatgttagttttaaacgctggcggccagccccgatatatgaacttcttttcgtgtattgtttaaatgctcaagttcataagttatttagttgaaaatgatgtttttttataaatagttggttaacctatttttatttaatatcaatgttcagattatctattaatagaaattttatttactttaaagagaaaggtacatattaattttaaaattaataaaaatagattcatatataattttaaaattttaattaaatgcgtttggttgctgaaattttatgaatttatgggttagaaacccaattttacgaaatg

SEQ ID NO: 8241 - DNA, 1022 bp, Cannabis sativa
gctttcttttgagcctgctccctgcagtcacacagctccttcacctgaacagtaaggttggctgtcgttttcaagtcaggctggtgcagctcctctagggcttcatcttggcactcagttcttcagccgcctccttcgcctccctaagctcacacctcgccttgatcacggcctcatctcgggtccttagggcatcatcctttgcctttacctccttagccttggccttcagtgcctcctggtgactccgctccatctgagcctccctctgctgggcctcctctcggatagctttcctctcagccgccaagtctccctgactcttcatggcctcatccatgcccctgaactcggtcatgatgtacccatggtcaattaaagtctatgagaggtgacccgtctctacagcaatctggcgacacaagagaaatatgtaagcatgggaggtcaagcgccataaatcaaagcccgagaacaataacaggtagacttaccgcggtcatggcagtgctaatatcctgaatttggtagattgagttcgtggaatcgcaggctgcatatctcttggccgggagctgggtcaaattggagacaaagtggctcgtcaactctgaggcccgatgaagcggttgaaccagtctgtcaggaggtccatattaagatcccaggtgttcccaaagtaatcactgtgtgaggaattgtcatgggcctcacttaggacctttttcaaggcctccacctccgcgttcccctttatgtattcggccatagcataattttgcttggaaatctggagctattgtctctcctcatcagcaggaacgggagtgaggactatgtcgggaggcacagtatattcctctgcctcaggttggatccctgagtcaaagctaggagccggagtattgacccttctgggcttcttggtagactcaacctccaccatcttgcccttgcgcttccaatccagagaggctagaatctcgccttcttcatcctcttcaccctccctatcctcatcg

SEQ ID NO: 8242 - DNA, 967 bp, Cannabis sativa
catacctactttatcaattttatctttctaaattcttcttacaaaaccttccaggactaccaatggaggattggctcctaatatgtaacaaacaatcgaagaattctagaattcaatcacctcttgaatgtcatctgcagtaatcttcactttgctcttagtttaataacttgattccaggttttgaattatcccttctgacctaagtacaggaggtataaccttcgaaccctaagaaattgcagaagaacacctttgatttgattctaagaacatagcaaagtcttccttgatctcatcttgtctctgaattgacctcagagaagacttcggggacagaggaggcatgaagacatcttttaatcttgcatcttcctcattcgattttgcatcatcatcatccaattttgcatcagcatctgagaattctaacggctccacacctaatatttcttccattgtttttgttttcttgacattagctcaagaattaggtccttgattcttcttcttctttgtagtagcttgaatctttgtctgaacttttgcccttgttttcgccatggcactagcttgagagagagctgcaaaagcaaaagtttttttttaaaaaaaaaatcaagtaatttcaagtatatgtatcatttacaagtaatagactcacaagagtgaggccgatcccacaaggactatagttaagtaccaagcaattaaatttttaattctatatggtgacaataataagaaaattcgattttaaattctatcgacaaagaaaaaacaaataaataaagtaaaattaataatgattaaagcttagggtgattaaatttcggttgaatctactttatatggtttaatataatttaattctcaaattctaattttcatgtgatagcggatttgctaaagaaacttatatttaggtttggacatataaatctcaaccaatatgtaaattttctac

SEQ ID NO: 8243 - DNA, 812 bp, Cannabis sativa
cgattgagatatgagtcatccgaccgaccaactgagatataagaattatctcaactgaccgactgagatataagtcttcctcagaacgatctaagatggaaattatctaagatcgattcgaattaaatataactttgacacatttagtgggatattaattttgatttttctaatctttcatgaattttatctgtatttatttattagatattttttatttttttaacaccatgggtctcgtgatggctgattgatttttctcccaaagaagtatcatttctcatatatttatatgaaaaaagtggatttattatttatcattgcattggcatatatatatatctacttccctaaatggacccactttaaaagaatgagtacagttatgcatgctatatgtttttctaggtttttggagccttggtagcatataatataatagaatagatatagatataatataatagatgcaaacaaaaatttgcaatccattgcataatcacctactcaaataattgtcctaataattctttctagtatcaaatacaagtcattgtcaatgaataggagaacacaaatttaagctaattaattttacatcaaatagttaaaggagaaaaaagaatctgaatcccagtagttatttatttattttataataataatataattataaatatgaattattaataagaaaattaaataaatgtccagaatcaacatttacatgtcccatgccttgcttgtcgacttggaaatattattcaacaagtaagttggaacgaacacacaacaaatatatatatatatat

SEQ ID NO: 8244 - DNA, 696 bp, Cannabis sativa
aggcgaaaatcgtaattagccttattaatatggtttaattttgataatctttttttaatgagggtgtaaaataaagtgcaagtatttttctttttcaaaaaagaaaatgtcaaaaaaaaaaaaaaaaaaagaaattgtcaatttgaaaaatatgaagtcattgactttaggaaatgaagacttaatgagatagagtgaaagatgaggtggacggtgaggatgattgtgaagtgaaagagagaatattagaaagtctcttctcttctcttcatacaaaaccctcatttccttccttcatcagccgactgtgacggcttaacttttttcagatctcctctcttcccaaatcctttaatttcattctcaaggtaatctaaagcccatctcttgttttcattttctaatccattgatcttaattttattgtttaatttattctcttattcgttataatcaaagttgtgatcttttggaactgaaattgtttgtttatgttgaatgtttctgatctgtttcattttttattcgaagcggatttatacattgaaattcatggggttttatgtgttggttatgattagtttttatgtaatttggctagttatggatgatatatctgatttgaaatctagattacggatttttgtttgtatttattttattaatgtggtactgtattgctgcatttgatttggt

SEQ ID NO: 8245 - DNA, 1106 bp, Cannabis sativa
tacattgtttctttggtggtgtgatcaattttcacacaatcttcaacattaaaaaaagtaaaagaaaaattgaaaagtttaaagcaactaaacaaaaattgtttttctcgtgttgttttaaagctttttttgcattgtttttgcaacattttatgcaacttgaacataatgtataaaactaagatgtttttagggtgttagagtttgttatgaattgtttacactacactatttatttaacatgtgaaaatagtcttcaattttaaaacaaaactcatgtcgtatctcatttttaaagttatgaaaaaataaaataaattttggtacatagttacgggaaataggaagacaacaaatattatattgatttttattaaaatgggagttgttaggaaaagattgcatatattaagaaattttaggtatactaatgtaacaaatacattttaatggtacaacaacacacatagaaccacgctatcaattaaaaaacacttaccaccatttaaaattgaaggtaaaagaagcttcatgttttacatgcagttgaaactaatatttaatagtttactccatttttttttgaagttgtaatagagttgtgaagatattatttggttctcttattattgcttttattttatttttacattgaatatcagttattacaattcaaaaattcattctaaaagcataaataacataattattataataaaaccaataatgaattttagaaatagaaaagacaatattaattgattttcaatttactaaaaatataaacaaattaaaaaaaaagtaattggcggcaaaactctcttatatttaatttttatacacttaacccttttatcttttttcttggtggcaaaacccccttaattttacttttctttacaaatttaaggcatcagttaaatattatcgttaaatatcaactggatgaccactgtgtgcacttgtatatacatgaaagtaaaatttcgaagccaatacaataataatttagttggtatttaatggtaatatccagctaacatcgcaaatttgcaaaaaaaaagttaacataagaaagttttgccccccccccaaaaaaaaaaaaa

SEQ ID NO: 8246 - DNA, 872 bp, Cannabis sativa
cgtcttttggagtttgccaaaccctgtctcttcccgatcatcagtcattcttcatttaccacgacctccatcatcttggatgcttaatttctccataaccactgtctcagctagcttttgtaacactaagttagtcctgggcaaaatttttgactctgtcatactgctaagttggccccttccccttattgcttcactcaacattgtctttcccttatccacttcttccattaatggttgaaaagaattcaaaaggtcgcagccctgctttggactactcaaatgagtgttttccttttccttcatctctatttcttttctaatacccctcctttccccatgaaatccatctcgtgccctattatcaactttcagccatggtccatatgcattagctatctgtcctttcgcccctttaattttcttgatatccaatgagcaatctttttgactatgtccgatccacccacatcgaaaacacatcaacggtagctcttcatacttgaaggctacccatgtcttggatcccccacatggtaatagaaagcctgggaaattttttttattgattgtcattcaaatttgaaatcgaaagaacccatccgccaccattctcgacacattcgaattgtggattgtaattaccgtccctgccattgaagctaatcttaatgtgttcttttcagtcagatagtccactggcactccaaaagctctgtcccaaattggaaatactgcaaggtcattcttccaagattcactagagttccccatcttttccaaaatcaataaaccatttgttaaataccacgacattcttgctaaaattcttgactgggtatgttcagaggcaaaagaaaatgtgaggaaca

SEQ ID NO: 8247 - DNA, 1487 bp, Cannabis sativa
gagaaatagagtcaatggccattgtaatgttactcgggagagagttatgtaccttgtcattacgggttttccatataatgtcgacgacgattgaggcataaagaaacagcttgtcagagtccaccccattcgacttcaagttccacataaatttaacccaatcataaacttgacccctagagtcagggatcgggtatatcccccagggggaggacctccagagatggtaagcaaagctgcaatagaggaacaggtgttgcatcgattttgtactcactccacataacgggcaaacttcatcgtcaattgggattctcttagccaggataaccccaactggcagagcattcgaaaggatacctcaccaaagaaatttatgcttttctaagattttggagttccagagtttgttccataaggacggagcagccacacaggcaagggctctctcataagcctgcaccagataagcaaacttagttgtgaatttaccgcttgcttctttggtcttgacccatctatcattcccctggcaactcggtctccccccttttttaggatgttggtaatggtatcatgctcaaatagtgaattgagcatggcaatgtcccagttcccctcttcatttagcaaatcaaccacccttacagccctctcaggcttagggttaacgggtcttgggtagaactcattaccatgaataacccaaggatccgaccaaacattcgtgtcttccccatttgatacaagtttacaagccccttttctgagaatcactttagatttaaccacatttttgcagaaccaagagtctgattttttgtaggtagcctccatgaatggcttacctctcaaatatttagcccttaacaccttgcaacaaagggtttgctcatcagtaagaagggcccatccccatttcgccagtaaagcctggttcaattctatggacttacgaaatctgagtccaccttttgatttaggaaggcataattggtcccaagctttcaagcacaagccacggttaccctgctcacaaccccaccaaaaatctctgatcataccatcaattccagaagcaagatttttagagagcttggtagtttgcattgcgtaaactggcatagccagccccacagatttgataagagtggcgcgaccagctttcgaaagtaatttcatcttccaaccatgcccttttgagaccaagttgtcaaggatgaaattgaaatctgcatccttctgattagatcgaaacagagggagccctaaatagttgatgttcgtagtggccatgttaagacccagctcctgcatgataccccttttcatcctgtcactggtattatcgctgaaacaaatagaggttttgagcttattcaaactttgtcccgaccagctgcagaatttctcaaggcagttccaatagcctttggcctcctcgaaagttgctcttcccacaagaatcatgttgggttttgtgccct

SEQ ID NO: 8248 - DNA, 1617 bp, Cannabis sativa
  modified_base (371)..(379): a, c, t, g, unknown or other
tgacgtgagcaaaatacgacacaaattcaagcatgatacaaaaattttgggcctatgagtgtgttgtacctaccttataaaaatatgagttttttgcggctaaatactctcaactatcactctatttgcacttaaccttcaaagcttaaattttgacggtaaaactctcaaaactactgaactgcttacaaatttaaggtgctatccattttttttacagttaattgccaatataaaatacgtatgtgtacacttttgtacatgtgtcaaatttatattggtacacctaatattattattttaaaagtatataaattatttcaaaatttataatatttattattttttaaaatattttatttttatttttnnnnnnnnntttaattttaaaataaaatttgaaaataatttttaaataataatattaagtatatcaatataaacgtgtgtcatgtgaataagagtgtatacataagctacccatagtgacagttaaacaaatgacactttaaatttgctactaattcagtagtttagagagtcttaccatgaaaatttgaacttcaaaaattaaatacaagtaaaattatagttgaaaaaattttgccgcaaaaaactctaaaaatattagcacgataggattttttttataattctataaaatactactcatattttaaaaacacacaaaaatttgagtcgaccagcacaatacacattaatttacagcataaattaacttctgcaccaggctgtctctaatttttattgtattttaggtgggactaggggactaggattcttgtgtccaattttcatattaggtatgctaataggtctggtaataccgaggcttataaatttgctaaatatgcttttaatgtatgtatatgttgtattatgtctcttttataatatgatgcattttatgtaaaaaataaaaagaaaaagaagtgggtgagtgtggtaaaagattagaaagggcgaagagatcatagaatggacgaaaaagcgaggtccgttcatggtggcggggaccacttgggagcgctcttttgttggcttggagacgacgaacccaaacgtgtgtgggtcccaacacaccccaacaccttctcatgggccctctcctcgctttcttgtgcgccaccgaagctcactatgctcatctccatactcttctaatcttctttgtattctcaacggctattttagccggcttagtcgaatatcttaattttctccatttctctttttagtattaatgtatattgttttacttttaaccatatgttatatattttgctagttagtatttttattcttagaattttaacatgtactgaattattttggtcgttaaaaattcttctaaaccattcaaattgttgaatttaaagattttatttaattttagtaaaaaaagtctaatatagatgaaagtttaagtagcatgatttgacacatgttaaaatatgagagacatgatttggtaaatattaaagtttgaggaacctgatttaatagattgaatgaaattacacaaaagtctttaaattcgaattttttttaaataatttagtaagggagcacaaaattctaattaagttatatttt

SEQ ID NO: 8249 - DNA, 1161 bp, Cannabis sativa
agaaaaagacttaaatctaaaaggtcaatataaatatgggaggacagtgcaaactgtaggaaggtgtgatatatgtccctgagaggaggaaaatgagaccaaaacagagatgataaatgatatacttgacctagagtacacgcgagactaaagacctggggactttgagcaactgaccgaattaaagaggggctgtattgacctggagattttatcaaatagataaacttaactataatgcaacaccagaacagagagctaaatggatcggtgggggagacacttgggactaaatgcaaaacaagattcaagagtatgtgagggataagaggctttgagctgctacagtgaaaaatatgtatatctaagtaaatacggctactataaagactcttatgcagagaataattcttaggaggaataaaactgtaagtgcaagaccaaacgaatggtctgcccttatatagaaaaatcctagtgaaaaggttgtgaaccgatttggtaactatcacttcaggagcatttactttcgaacagagttgctgcacaataggattacaaaacgtactaggcagatcacacttacagattagtataaatgctaacagttgaaaattttgggcaaaaggaattatgacatttttgaaaattattataaaaacatttcctttacccaaactccctttcagaaatcgattatgcagaggtactttaatgggcaagctgaatttatatctaaaataacctaaaaaatacccatttctctgatgggatttgacagggaataggaaaaggtgaaagaaggagttaatacctgtaagaggctgattaatgcttgtacggttcgggcttctgggagactgaccggagttatggctgaagcgacaggggtggttgggacagggcagttcgacgcggctgaggcggcttgggtgagtcgagctgtgctgggtgtctatggaagacgagtcggagccacctagatcgatagatctggggcttgagaaagattccaccgaatgggaacgcagaggggatgagtgtgaactcattggggacgaaggtgagggtctgttcagattatgcatgtcgagagggaggagaagaagagtctggaagtccatattcaccaatttttctcccttttccactcatcattta

SEQ ID NO: 8250 - DNA, 960 bp, Cannabis sativa
aaagttttttctaagagccctgaggtttaaggcttaaggacggctgaaagtttgagctaaaagtcctaaaacattatgaaaagtttagatttttagataggagaaggtcctcaagaaatttgtattcctcactactcactatccacgtgaataagctttggttggagtttttctaaatttcattttttctttcattgcatttgtttcatcattgggcaggattgccaataaagaaggccatggaaaagcttttttattagaagctgtatctatatgtgtatattggtatttttcaaaaaaagaaaaatctgtgtatattggtgaatagttagtcatgtattctacaattttttgagttaacaatgatgagggatttttacttcaaaaaaaaaaaattagcaactaccaatagctaaattgattaattcacaaacataagttatgagcaaaatacataaagagtcagttaaatgaaaaactagctagaaattataaggcattgacaatatagtatataatgacccatatagcatatccatgagtgtttataaatcaactggatggctattcaattatataaacaaagagttcacacacagtcattttattgaatagtatatatgccaatatatcatattgtcaaatgtaatgaagttcacatgcaatttgcatctataaaagactgattttaagccaatcagctttggcagagtactcacaaataaatcaacatttttttctaattataaacaaataaattgacaatttccaaagaccaaccatccacacgaccaaatttagtggactttttcatagttcaaaatttcaagttgagatttgtaaaaatcagatgagtctccttttcctcattcggtaaagcaaagcaaattctgaaagtccaaccataccatttcctcatcctgagcctcattttcctcatccccaatctcatcctcccac

SEQ ID NO: 8251 - DNA, 614 bp, Cannabis sativa
attattaatattacacataaaataaatcatataactacaaatattatactcttttactcatatatggactaaaacacccttatattgctccttttcacaaggacataaaaataaaccgttataattatatttaattattagttaattacctagattaaactcaattcaagttaaaatgttagattaaaccgttataattatatttaattatatttatatatattttgtggagggggttgggaataggttattctttcttctcctaattcctctcattttctttgtcttgagttttattgttgattattgacccaaaagaattagaatgtgactttgtaattgattggaaaggtgattttgcttagacttcaaaaaacatgagaaaaataaaataatgcttctattaccataccttttctatttttttcccctcatgcacctttctatatttaattaataatttacaaatataaccttatgtgtgttttaatttgaacttgtttagaaaaagtgtaaatttgtgtggagttttactataaaaataagaggaaaaaaaacacactaaaacaaaatacaatgaaatttgtgatcaaatctataaaaaaaaaaaaaaa

SEQ ID NO: 8252 - DNA, 1071 bp, Cannabis sativa
ttgagcttggttgaactgctgttgatggaggaaaagcgcctgttgctgctgctgatgctgctgttgctgatgttgctgttgttgagacattgctgcttgaggatgatgctgcaattgttgcattgttgactgagcttgcatctgcatattttttttaagggatcaaacacacacacaaacattatgtttcagaatcacatttcttcggtcaactcacttggggttgaggaggagacaccacatctggttgttttgttagtgtatcagcaagattgcttagaaacatcaagttgttttgaagtttagctcgatacctaacatcttcaaaaatgtcataatattccataaccaaaatagtactcactaaatcataggcaagactaaaagaacaatggatatattcatgacttaataattgcttccatttctattactgtattttactcctttgagatgtcagatattccaaacaaggagggaaagaacatcaaaccaaataatcaagaaccaacaccaaatgatctattattactgctacatatattgaaaaatctctttcaatatcctaaacatcaacaaatatgtactaccaaaagccacacagataataaatatatttctcattcttacttgtcctgaaattcctctgttctaagaagcaagcattccaatcaatactaattagacttgacatgtcaatcttactttatcttttgctcaaaactgtaaatttaaaaattgcttttaagaataaacaacactagttttcaaaacaaaggaaacaaatatactcacggggcacattcgttgaattttccctgattttgattctccattatagctagaatcaactctttattctcctctaagcactgcatcaatcaatcaatcaaacacaatgtggagtctctccaccttttaggttacaaaaaagaaaacaaaagactgattttcttttcttttcttttttccttagtctataagaagtttcaactttcttcatccataataataccctttaagcaatcaaacaataataacataaaccaagaacacaaaagtaacccaaaa

SEQ ID NO: 8253 - DNA, 1237 bp, Cannabis sativa
ttttaatctatgattattttgttttttataattatgatttatatatatgttaatctcaaaaattaacacgtctaatttttgagattatttaagcgacaatcggtagattaacgagaacgtgcccaaagatcacgcggcatgctgtgcaaggaagtcactcgacatggtcatcatacaagtcacatgacatggttacaatgcaagtcacatggcatgccattcttgcatgtcactcaacatgccattaaagaaggttactcagcatgccattcaagagagtaagtcgacatgccattcttgcatgtcgctcgacatgccattcaagaagattactcagcatgccattcaagaaggtcactcgacatgccattcaagagagtcactcggcatgccattcaagaatgtcactcggcatgccattcaaaaaagtcacttgacatgccattctggcatgtcactcaacatgcactctaccccaagtcacttggcatgcattttatgcaagtcactcgacatgaactttatattgtcaatcggccatgaccacacataaggagatatgcttctgcaacaacataactatacttagtgaaattttctaaagtatgggaaatggaggtaacaagggtacggtcacatgcgaagtgtgtacaatcacgtctcttaaaagatctgaaagtaaggaggtacaagtagcgaaagcaccacacctacaaggcctgatcacccgaccaagggtacacaacatccacaacacataaggagatatgcttccgcaacaacataactatacttagtgaaattttctaaagtatgggaaatggaggtaacaaggggtacgatcacaaggacaagacatgcatgcgaagtgtgtacaatcacatctcttaaaagatctgaaagtaaggaggtacaagtagtggaagcaccacacctgcaaggcttgatcacccgaccaagggtacacaacatccaccacacataaggagatatgcttccgcaacaacataactatacttagtgaaattttctaaagtatgggaaatggaggtaacgaagggtacgatcacaaggacaagacatgcatgcgaagtgtgtccaatcacatctcttaaaagatctgaaagtaaggaggtacaggtagtggaagcaccacacctgcaaggcctaatcacccgaccaagggtacacaacatccaacacacataaggatatatgcttccgcaacaacataact

SEQ ID NO: 8254 - DNA, 1036 bp, Cannabis sativa
tataaaggtcttggatgtgaatgaccacgcagatgaagttgggggacagcggctgtgaaactttttttagcaagtctggtcagtaatggccaagcatctcctttggcgaaatcggttctataacgatcataagatgaagtaggcagagcagaacctttgataaagggctggtactccaaagcaggttcctcaccattatccaatttctcaagaaaaatggaacacttgttatatggatgaccaattactccacattccatacagtattcaggcagcctctcatagcgaaaatcaacccaaaatttgtccttaacatggcccaaagagatcattctccctctcttcaaaggtttagtaacatccataagaactcggatgcgtaaaaagggtccccatccttcatttaacgagtcgtcaaacacatcctcatacttgccaataatattgccaagagcaacaaccaaagttttggtcttactgagaaatggaaggcggtatacttggacccaaaaaggagtgtacttaagatcatcagagttaaaattctgaccaacaactggtgtatgaagcacaacatgatggttatgaaagtgaaatggttctcgatccaatacacgaagtttatcaccttcacagccgaaggtaagcatgaacgaatctgaagattcagagattttaactgggaatcgaccatcccagtgctcagccatttgctgttgcaaagttgaaagccaaacttttttcttggtgaggatcttcgcatataaaacagtatcagcactaaccgtagatgaaatggctgcagaatcgtgaaattcaaagactgattcctcatcctcagtgagatttatttttgatttcatcttatctaagagaggatccatgaagaaacaaaggaaaagaaaaatgaaatagcagtattataatgcaggggaataaggaattgagaagatgtttttagatgagggcagatataaaagagaggctttgaagagtggaagataactgcataaactgtatctaaaacggttgaaat

SEQ ID NO: 8255 - DNA, 1125 bp, Cannabis sativa
gttattggctctttatcaaactcctggtatacgtacaggcactgtatataatgactagacactatattgctaatgatgttgttctcttctgtaattttttcttttatttatttattattgaatttgtatgacttgtgacctagaagggttacctcaattggcgatgttcgaatcatctcttgtagtaattgttatagtttcttggtttatattgtaaacaaatttgcagttgtcaacacaaattcttcaaaacatcgatattattaagttgattttgcctagtgagatgtaactgtaatcaaagtcctatgttctgattgcagatgctgatgtttcgaaacctcgttatgttcgagtaaatactctgaaactggatgttgaatctgcacaacaagaactggagaaaaaattctcggtatgttctgctaatgggattttagaataagtacagaatagagtaagatcatttcactatgttaagatcatctattttattgaacctcctaagagaaaaactatggtgcattttcctgtgctgattattttctatcatgtacccgactaaactattgagcattcttccccttgtacttgaacaatcctttgctatgtcattttttttgtattaggttcaaaaggatgacgtggttccggacttgttgatacttccaccgggaactgatttgcataatcatcctctcgtcatgaatggaagtatcttcttgcaagtaaggttttaactagttaatgaaattaagtatgaacagtattcccttcatgttgaaatgaaatatgtattacttcacaatggttgttgggattctctctgtttgttattacttattcttatcattttggcctaataactgccatggtgattatttgtacgagcagggaaaggcaagttctatggtggcagcggctcttgctcctaaaccaggatgggaggtagtttcttatcctcttcttttatatactgatggctgggaaatataatactggaaagatgcaataaattgaaacatcaacaataaatacactagatgttactttagaacagtagcttaaacgattgaatatacctattgctataattttctaattccataaatgatattttctggt

SEQ ID NO: 8256 - DNA, 956 bp, Cannabis sativa
attagtaatcataaatattttagtatgggtagatgaagacattggtgaactaatatcaaacttctaaaaacgattttactttattcaatatttaattaaaaagtttagtgaaaatttttcccttaaaaactactaaacgatttgtaatatttatttttgaacgttacatttctccaaagaaaaagaaaaatggcttcctgttgttattcaatctgctcactcaagtctctcttcatcttcttcgtcctctccgccatacccatcgcctacctcgtctcccttgaacacgccaccccagccacccccgtcttcttttaccgtggcccaggctggttccgcgagtgcgccaagtgggacgatcaccaccgtcgattcctcatctcctccttcgccggcgccgtgtcccagctcactgcccccgacgaccactctccggagactgttctgagcgaagttccgttgatcaaagatgctgacgtggccggtaacgccaccctcggactcgtcattgaccgccctaggaatcgcctcctcgtggtcgccgctgacctcatgggaaatcgctacgctgctctgctcgcctatgatttgactacgttgaatcgcctctttcatacccagctcagtggtccaagtggggttcgacttttttatttgatttgtttttgcctctttcttcattcattttttgcctcaatctaactttacatgctcaaactggtatggttaggtcataatttgttgcattaactggtttggggaattgaaaatctgaaagctaggttcaaaagggtactaatgaaagtagttatttttgggtcttgatttgttgaaaagctattgttagttagtatcacaatcataatgcaaaagtttggttctttaataaatgccatgtatataggaataatcagtttgggttttaatttgttgaaaagctaaagataatgacactg

SEQ ID NO: 8257 - DNA, 668 bp, Cannabis sativa
catcataatatataatatatattataaataatattgatataaaatctgatttgaatggaaggtgaaagtggggtcaatctgcaggcatgcatggaatttgctgttataattattagaaactgagaactaataaatgaagtacatatatagttacgcatgattgagctcatgtgggagaacgtgatcgaggccacagatcaacagatccctttacttttaatttctcagttttttttttctataattagtagtatagtagtaagtaatagtagtagtatactaatactattcatcatttatatttatatatactattgagagaaaaagaatgtcatgtaatatggtgggcatttcaaaagtgaaagctgatgatatcacaaagagaaaaagaaagagaaagagaaagagatagagcatggtctatataggtcacacacaaacacacacttacccatgtgggatgttttgtgatcgatgaccaactgatttattatatttttttggaaaatatttatgtaaatgtagacatatacatatatgatgcatggatttccgagcccctttggtaataaaatcaaaataattctcaatttatatacgtatgaatgtgtatatacccgcgtatacataatgtttattttgctcgactttgggcgtctcttttgaga

SEQ ID NO: 8258 - DNA, 645 bp, Cannabis sativa
caatataatttaggactgaccatcctagaataacattgtatgttgtaggaaaatctactaccataattttacattatttaaagtaagaggctatattacttctggttacacccccatttagcgtaactagaatttgaatcttccccatcggtaatacggagtctctattaaagtcgtgaagtttgataggacaaggcattagattggtctcaactaacccaatttcttggaacagggttttcaaaagaatgttgactaaacttccattatttaccaagattttgcactccctcttgtctacaatctgggcttcaatcaccaatgcattgttgttagagaaatgcacgtgcttgacttaatcttctatgaatgtgattgggagactcctcgttctgaatgttgggcaggtttttgtacaagagcacatgtttccacttcttgatcgaattcattaaggtatctattctaagaatttcttgtacttttagtagtgtgtgggccaccagatatggttccaacatgaccacctatcgctagtgcaacaactcctaacagatatgaactttttggtctgggagctggaaagggtttttaggcattattggtacccctagaggggcttgcatcccaagagttttaattcct

SEQ ID NO: 8259 - DNA, 533 bp, Cannabis sativa
tttttgacccaaaactcctaattaacttgagataggcctgatcacatcaaacataaatttaataatataattattatgtcacccggaatatatatatatattttttaaagaaagatggaaatataatctattacatgatgatatatcattaaaaaataatcaacaaaatagacaaatgatatcgtttgcagaaataggaataaaaactctaataaaaccttcaactaaaatataaataagtcatcagtgttgaagcatcaaagaagcgtgaatgctagatctccaatccaaataaacatgtgacaaatcacacctatcaatgactattagtcatagatcttccaataaaaattaagaaatgaaaatcctattattcaatctagaataaaaagaaataacaaaatgaccaaccacatagcgataacaatcgtaataaataattacatcataaattacagggccaataaaactatgagcaccctccagatctgaacatagacaaggatagccatgctactaatacaaacatgctt

SEQ ID NO: 8260 - DNA, 505 bp, Cannabis sativa
taatgcacatatccacattttattttcattatatttcttttaataattaatgtattttgtaattaataaatttatgaaaatggtactaactattatatgttattgaaaatttttatttagtagatctttaaagggttgttttggtagattttttatctttaatttgtggcatttaaaaaaatagtttaacttttttcatgatcgcggatgttgtagctatttaagatcacttgtaaatttttcaaaaaaattaaatagtgtacactgtctaaaaattaggcttgaacaattacctaccacgcgtataagaaaaaaaattatgtgtgtaataaaatatataaatcttatttttggtattataaactatttaaaatttttaaaaaatttacaaatagtcttacatacacaattataaaagaaaaaaaattaattaaaaactttttcctatgtctaaatagataagggtctactgaaatattattttttttgtaaacttaacctatat

SEQ ID NO: 8261 - DNA, 585 bp, Cannabis sativa
cactcctgcttaattttcatattcagtagcgagctatgaaaatcagtaggaatatctctaatgatgtccttattaaaacttttcagcatcatcttgattccctttagcttatgaacaacttgaaacacaagagttctcttcataaccacattccaagctagtctgagtaacacgccccaaaaattcaggatgggaacaccaaaaattgaagaatctaaatactttcttacaagtaatgacctcatgatagatagaaagaagttagggttgtgatcaaagtcattttctatagttgtatatttatccacccaatattgattagcaacaaccctatctaactttgcatatatcctagccttcttgcttattattccaagtataaaaatttctatcctccaatttttaattttccatacattgtttcaatgccttgaaatctttagcttgcactttatactttattctttcattcgactgtctcaccgcattaaaatccctcaataaaatccaaatatcattattatttctagctatacatcgcacctcattttagagcttttctcagcttcccgcctcattgaaaag

SEQ ID NO: 8262 - DNA, 773 bp, Cannabis sativa
tatcaataaaataagagtttccagttttttgtaatattagactaaacattaatattattctatatcaccaactattttgataagtgggaagtagggggaagattggtttattaattactataattttaacttatgaagctaataagctatatagctagcttaccaattgtgtgcctagtgcctatacttgtacagtggattaatgctgaagtcagggtccgtaacgttttccaagttggtgagaaaggggaataaaaaacacaagagatatagattaattaggattaatgtacacattgaagaaaatgcacgatgaacctacctcatatatatctcagtttctatttatctctagtgtattctaattaaatattaaatttcacaaaatttaattttataattatatataaactatccttatttataaagttttacctctagataacctaaaaaacctctaataacaatgctcataatttagttatcaaaatcgtataaattcgtatacaaccattgagttagttgggaagaaaagaaaatgagtttttagtgtctaaactctttcaattattgtttcagttatatttaactctctaagtttaaattttggcaataaaatcctctaaactagtaaatcaataataaatttaaagtattatccagtacttaaatgtctctatatgtacaacttatatatttggttcagtaagtgaatttgtcattcccttcccattgaatgaattcatatttcatatttataggaataaaataat

SEQ ID NO: 8263 - DNA, 1983 bp, Cannabis sativa
aaaagctttattcaatattgaatctaagagtcttcaatttgtttctgttttaggttgtgttgtattgtgtgtacaacacaacaacacaacaatcctaggtttggtttcactaaagagattgcttggaaagtttgaatgactcttctttttttaattatttacttatattttgctagattttataaggttgtgagatgattattaacatgtttgacacattcaacttatgatgtgtaatactaatcagagtttcatcctctttctatactgaagaataacttgattgacttttgttgcttcagcttttctttgatttggtttcaaaaaccttaactaaagactaaagaggctgcttggaaatttggattgactaattggttgcagtactaagtaaatagatagaataatcatatggaattaaggtacaaatgtattcacttaagagcccaatttagtctataatggtttattgtattggaaattcaaagaagcttaatttgctacttttttctactgcgcatttgcatgcttttgggtaaaattacatataaatatgtaaagtcatatttctgattctcagtccataactaaggtagtcatgttgattggaaatatgtcatgttggttgggaccttaggtacaaatgcttttctactatttttcttaacattcctaccatttttgaaatctatgaaccatttttccattctctgttacattctgcaggacgatgagaattttctgggataatcgagttagccccaacattttgtactccttgcaacacctaagaaatgactcatcaactgttaggattaaactcacttaacctgtcaagtcaatagatctatctatatgctcattagatgaatctgaagaaagttgttgttagttatagcagttggctttaataccaccttaaaggggaccccaccaacaactataaataggtgttcttctattctcaaagagagatttgagttctgatccctaatctccaagctcatattttagttttagattcaagtttaaagagagaggttccaagatcatagtgagtgtgtgtggagggatgtaataggagtatcattcttgaagtgatttccctcaatacgagatatttctttgtattacttcccaatgttgagttgtaattttgggctcattcaattgtgtactactgactattcctattcaataaaatctatcattcattctttgtctaatttcaattaagtttaagttttgattttggaattagtattagttttgtttgtgcattcttgaatattattactgttgtaacaatatgttatgagggtgagaattcaccacatcaacattagttgtgggagggatagatggtgtattgcgtgttctggaccagaacacaggtgaagttgtttcaagaattgttttggcaggaagcatttcgagctcccaagacaagaatggagtcgttgcgaggcttggggaagatgttcacatggacagtgttcagaaaattattagacctcccataagttgcttggatgttgggatgaaaaaggttgtgactacacataatacaaagttcatatcagtataatgtacaatctaggagtatttgaataatgtacttttatggttattgtaaacacaaattggataactaaatatgacaaacagacataaatagaccaaaattgggataccaaaattcatgcatgtattgttgttgattatactaattaattaattatctacactttcagttgatacattaaagtatttagaatatagagtacataatactaattaattaattatattactgagtatatcttctcaagataatataaagggaacaagacaatatagaagagtttttcatatgtaaaatgaaaaagtgtaacaaataacttagtacttattaaagactaaagtgtgagattatctttagccataagtcaaaagtaattaaaagtgtagcagtggatatat

SEQ ID NO: 8264 - DNA, 681 bp, Cannabis sativa
tggcagtatattaaatacacttgaatcacataacagattatgtttatgaaaaaaagaattatatcattttagtttactcatcaagtgtcatgatttcaacaactaataatgtttgatcacattttgaattggtttagcatgtccttagttaggataatgaacttttttttgatgtaagaaaccctccacctcttttgtaacatttgtttacctttgtaattttcactttttatcggtattcccctaaaaaataaaggtttgatcacattttgtatctgagagtggtttgagagtacagtttttatgtctccaaggttctaacatcactatctagcaccatttttatcaagacttctttctgattttcttcttaatcaagtcttacgtactttactgacataggacgaaactgatactgtctaattgatcgcaggcacccagaggacaagaagcttctcgtcttgagcggtcaacatttgcattatttatgcagcctgactggtaagtattcatttctaattaatacggcagtattgcttgtattgaattgatatcagcaatagtggagttctattgtggttaacgcctctgataagttattttctaatactttcttttgaggaggtgattctactggaccgaaaattgtctgtccttagtgataaatgtagaatctctata

SEQ ID NO: 8265 - DNA, 1339 bp, Cannabis sativa
tacactaataataatattacatttgtgattacaagaatacactacgcgtacattttaaaatttctcaacaatataatgatatgtattatgcataattaacgtgatatgtctaaaataatgaatgtaaaaataatgtagaaacaatacattattattcgttaataaaaaagtaataagagtgtttatcaatttcaattcgtactattttattcatagtgtattcgatttgcactaagtgattttatatttaaatccaattcaatccacacaataactcaaattcaatctaattcaattcgtaaagtgcgaattagatcgattattttttaatattaaattatttaatatttatgaaaaatatattttttcacataaataggaataaaataaaataaataaaataaaaaatttaaagaaagaaaaaaaaaattgtatgcataaaaaaatatttaattttgtttaagtaatattatatataagaatgaaatatacatttaatttattaaattttaaaatatatggtattatgtgtattagatttttaagttactatttttattatatcaaaattttaattgtatatataatttttaaattttttttgtaaatatgtatggattgattatttttacatattaatcaatatttaatttgcacaagtgccttttttaattttttaatttaatttaatctgcacaaatacaaatatctatactttaccaattagattagattgaataatgcgaattaaatttgactatctagagtagcattttatgaaacgaaatggttaagagaaaataataaagcgctttttatttatggttgtgtgtgatgacagttgacaccacttacttattggcagtgccagtatttactatttagttcatttcctttttctctttttggaaaagagtatctatcctcatttactattaagaagaaaaatgttttgttttgtttgtacactatcattatattgtgtagttttctcatttaaaaaaatataaataaaatatcattgtttagttttatactacgtggattttttacttatttttgaaattgatattttatttatttaaacctacttaagaaaacaaaaataaaaaaattataataaaaatgatgaatagtgaaataataaattattatttttagaaatggtgttggaataggaccacttcactcttgaatgttgaccaacataaggagtagattgtagagtagtcgtagtgaaatgtgattccacttctgtatgtctttgtttaatattcattgattaattctgttcatattacaaaatacataatacatattactatttcgggtttgagtt

SEQ ID NO: 8266 - DNA, 533 bp, Cannabis sativa
cttgatcttgcggggtagttttagcttccgaaatcgattccaccagccagcttgagattgagcgtgtgaaggagatctagcttcccttagagaggttgccaaatgatacccactctttactgtgtatacacctgaagctgaatgatgccaaatgagtttgtcctcaggagcatattgacacaaaggtaactgcaggatgcgatcgatgtcaatgctgaagaagtgccttttgagagctgcaatattccaagtatgattcgaagagataaggtccgagacatgtaaattgttgtcaggattcatgatatggatcggtttaaaattggtatttcccgggagccaagagtcattgatgcaaacagaggaacctgtaccgattttccaaattagaccgtcaagaagaagctctttaccccaatgaatacttcgccatgtataggagggattgttgcccaaattagcctgtagaaatcctgttcatctaaaataacgatgatggagtatacaggaaagaagggaatcaggtttatcaa

SEQ ID NO: 8267 - DNA, 1688 bp, Cannabis sativa
atagatatatatgtataaacaaacaaatatatcataataaactaattagaaagaatgacaaaacatgaaaaataacaagtgattgagtatgtaaagcaatataaataaaattaaatagatgcctttgttaaaaagaagcaagagctctgcaatatatgaatttggatggtgagaggagctaagttcgttttgatataaccaaggctatatacctatggttggaaaaattgaagaacaatatttcattatgtgatttttctttaggtaatatataatgaaaacaaacaatgaaattcaagtctttaatgtatttgaaagttacacttatacttacaaacatatcataataaattaattacaaaaatgaatggaaaaacttcactgtaaacataaaagatacacatgccttcactatacaaccttacacctatagaaatcatcaaatccaaaattttgggcctgcgattagcaacaaaacaatggcttgcttgcttctcaatttttattaggaaataggacaattggctctatgatagaattaaataggaatttctagctatttgagggatataagtagaggaagagaggttagtagggttgtggaattattttgtaattgtaggaattcattagaattcattgggaggcttaagggatcctcaaatttctccttctatcttgaattttctgtgtttgagtatcaatagagaaggcttaatagccattttcagatctgagttcctatcaatttcatgtttaattgagcaaaaagcaccaaacaatgagccataatattacaacaaatagagcatctatatttaaattatgaaagatttatattagttgtaaagtttaatatgcccaatttctcaaaagtgaaattagatgtatcatctcaaatcacaattgtaatatagaaaccagtgagcagtaaataagcttgcaataaatgtcagaattagacaagcacaaacctttattggtggaatgtgaagtgataagaacttaataatacaaaacatagcacaacacaacaaatggagccattgatagaattttatatgtgtgggtgtttatatttatgttgttcagttgttgcatcccccaaagattctcattttgtcaattcagcgaacaccttagctacattattttaccaaaagttgactacatcatatattgaatatacaaagattaacccattaaggagtttcccttgacagtgttaaaattatcatgtgtatacattttaatagagtcaccactcatacatcttttttcattttttacatgctataaaatcaataataaggccaaaagaatccataatttgaaaatgcactactactactgccatgaccagaggcaaagcaagaaccccaaataacttttttccttaatgatggtaatgataacaaaattaataaaactaagcttcctcctgactcgaatgtctacaaaatacatatcatcatatataatactgaacctatagatagtaggtgattaattaaaatgttatcaaaatccccaagtaaaatactatccttaccttactatcttacaaacgaaacagtcagaaacccatttcactggacaacaaagcattcttaattctcaaattcttccactaataatcccttaattaggttcagctcataaaatattttatacttatcatatagaaa

SEQ ID NO: 8268 - DNA, 643 bp, Cannabis sativa
agaaaattttaaagacaatttctaagtctagaattcctaatcatgttaaaatcaaagaatacagttgaattaattaatatataaatatctttctaaaaatgaggtttgatcattcaaaaacataattaagattgtactaatgaacactatataactattctctcttcttttacaagaaaacatattgcttattcaatcgatagcattatggttacacattaagacccactattaagtattccaacagtcaatagatatgtagatagactgattgtataataataaccatgtagaaggaagaaatgtgtccatttttctttgtacactggtatttgtgcaaaattgtgcaatatttgatgagaaaacaagcatgactgcttgacctacctgtcctgtcatcagtaactatcatagttgtcaacattaaaaatattaataacaaatatatcaataaggacttaaggccaattcattggttagatgagtctatgagagtaaaggatatgggtataaaagcagtaagagcaatttgtgaaaaatatacatttaatgtttctaaaaaatttaagagtaaaccagaaataattagtcatgatcaacctaattaagtgaacaattgtgtaaaacaacacacaatattaac

SEQ ID NO: 8269 - DNA, 730 bp, Cannabis sativa
agttgagctagggggaaagtgggtagccatagggatatcactagggatgtctctatttttagcatttagagaaattataattcaaattttcttatatgactgtgaatattaatagttatagcacacactccacctatttttcaaaaaatttagaataatttttagtgtcgaaaacaagttgatacaaaaacaaacaaagcacgcttacaactgaatgtttaaactctatttttgatattgtaaattgtttagaatttttcgaaaacgggtggaatgcttactacaactataatgtaaaccattatataaataaaacttggttataattttttcaaatgctgaaaacattgttgtctttactggtattatcatgcactatatttattatatatttataatcttatgaaagaaaaatggcccctataatgttttcatactggctttgtcactggtagtgtctttttcttttcctgatattttctcttcatgagaagtaaaaatattgtgtttaatgtgtatcagtcggaacctccatctccaaggagtccacatagtccaaatactggaactgcacttgcagcagcagctaatggagtgacttctttgtttgaacttggagtcttaggccctgactcggctgcaacaacctctggaaactttttcgagcatctgactgcatctgaatattataagaatacaacggttatattactaacatttcaaaccgaga

SEQ ID NO: 8270 - DNA, 587 bp, Cannabis sativa
ttgaatatgtttgtttcaaaagaatgatataggttaaatgatttcttgaataataataataaaaaaaacgatgtcactcaaatctttcgaagctctttaaactttctactgattacaaattcttatatcaatgttctatcattcgtccattgaaataatttggtttatcgtatcgaacaagtgaacgttcccattcatataaatttttcattctcaatgccaaaattgaaattggaaaaaaacgaaaccataaaaggtagttaaacagatataataccccttggtgcaaaccgtgagcagccatgagcatgatcttggatccattcgtgacctctgactccctaatcgtcattccatccaccaaaagtttgcctaccaaaacataccggaccatacatgatttcgacgctcaacaacaaacaccaatagagaagttatgtaattctgaaaaactcaagttggagagtgaaaagccaagaaagaaagaacctttggaaatgagcttctggccacggggaagaacgttggtgagaggttggagaagggacttgagttctttaatggtggaatcgggagatatgaggatc

SEQ ID NO: 8271 - DNA, 579 bp, Cannabis sativa
tacatctcatatttttagctttcaacatggtaggggtaacacaagaaatcccataattccatttttctttaacaaccatctcacactctacctcctcataccaggtctcttcaaaataaaatctaaaatgtttctttttcaagaaccatcaccatactgaacaatattctaacaaaaagaaataatcattgctttatgattagaacaccaccaatccaagtattaaaaattttcatttagaaaagtatcacatcaatccatgttagcaaataatatatcaaacttttccaatacaaaaacagcaacatcacgatgaccattacaccaagagaaggtattatggtccttccataaatcttcgaaagaagaataatctagagaatgttagaaccttgccatcacttcaaaaacttgtggcgaaccaccctgcttttagaattagacaagatttcattcatatcccctccacatatccatggcccgtgcacactatcaccaatatgctccaacaactgctaggttaaaaaccttcgagaagcatctggattaccatacactctagtgaatctaaaacatacg

SEQ ID NO: 8272 - DNA, 512 bp, Cannabis sativa
tgagtgggcaactcaaagtcttgttcaattttatcaaccttgttgtccaagaagacccttgcatggatacaacttccttgggcagatatagtggactcactttttctcgcttccactatcataggttctgttaactccctaaccatgcgagcgatatcctccatgaataaggattcttgttatactgcaatattaggagatgcattgtctgatagcgacatgggtataaaattgtcactctttggggttcatttgcaaatgttcccccttgagattcttactcctagttgtctgaaagatcgttcatctgaaagataaaagatctgttcagcgtgttgtgcatgcaatttcaaaaaagaggagtgttctcacacgtataaatatttataatttcattcaaggaaaaataaggtattctaggaaaatcatgagtcttcatacagttctttgttttctaagtgaaaacatatatgcatgtgcgagtattcaaagtgttctaacgataaacatgc

SEQ ID NO: 8273 - DNA, 994 bp, Cannabis sativa
gggttcggtgtctcagccgcagccatggccatgggcctcatcagcttagtctctggtactttgtattaccggaataaacctcctcaaggaagcattctcactcccattgctcaagtaaatcaatcttcctaatattttttctaattttttaggtgtgatttaatttttctatattttataattaattaagagtacataatacacacagcggcacacgtgttcaaactctttttaaaatagtattagtccaagatttaatattgtctagctaggtgtttggttcacatatagttacacccctattttattttatataatgttatatatatgtatattttggtaaatacgctatgtttggtttggttggaaggtaaatttgagtttcaaaagttgatatagactttgatcacatggacaacagtactgtatggcttttgaacttgtggtcgacacatatttactaagattgaataagacaagagactgtttgaaaataattattgacagtcagctctctactgactcaatcgtaatattacatgttggattttaagtatagataaagtattattacgtgtatatatattaacttaattaattttttatttattaaaaataatctggttaatttttattttcaaggtttttgtggctgctatagtgaagagaaaccaggcttatccatcaaatccacaaatgcttcatggaatccataacatgaactacaacaacaacgttggcttttcgtctgatgctgacactttatttcctcacacccaaaagttcaggtataatataaatacgtacgctacttaaaaataattcacttttattatatatgatactttcttgtcatgttgtctacaccaattactttggtcatgcatgcacttgtcttatatatacatatacaatgtatgacctttatatgaaatacatacaaagctatatgtgtacgtattgaaaattaaatatagaataaataaatttcgtc

SEQ ID NO: 8274 - DNA, 501 bp, Cannabis sativa
ttccccttttgtcaaaggaatttcgaaaggcatttttctgagtgataaccattctgtctggctgttgtgtatttctgtgagtggtcttatggagtcccagaccatacccggtgtaagtgtgtcaccgctggaggaggtgatgagcctggtggaaaatgtttcagtggaggacttttcgttggatttggttgctgatgatgagacggcaaaggagaccattaaccggtcgctggtgggaaaatactttgctaaacgtaaggtggggaatggtagactccgggcggtcttatcggagatgtggaatgttactcagggctggagtatgcaggaaatacaccccaagatcttcattttccgctttgcgaaagaaagtgacgcgtccaaggtggtgaataagggtccttgggccccttgtggtggatttcttcttctcactcagatgccgaaggatgggaaatggaagtcagctgaccttggccatgttaatatttgggttaagat

SEQ ID NO: 8275 - DNA, 1211 bp, Cannabis sativa
ttgggagttcttaacgatggacaggaaatggatatgctgaataaatctattatcactcttatcccgaaaataagtaatccaactggtatgagtgattacaggctgatcagcttgtgcaatgtaatctacaaactgatttcaaaggtgcttgtccttcgattcaaagatgttcttccatttgtaatctcagaaagagggcttttttatcgaaccgtcttgtcatagacaacatcctggtagcatttgagttagtttataatttaaagcataaaactcaaggaaagaaaggctactctgcactcaagctagatatgagtaaggcttttgatcgtgttgaatgggcctatctagctgcagtgatggaaaaaatgggatttgcaaaccgatggatttcattcatcatgaaatgccttttatcaacaagcttttccttttctttaaatggagaaatcgttggcaatgtcaacccagggagaggattaaggcagggtgatccgttatcaccctatttattttttatttgttctgaaggattatctcgcttgttgaatcatgaggaagccatcggtaatcttgaaagccttcgtctaacacgacatgccccatcaatctcacaccttttgtttgcagacgacaacctcttgttttgtcatgctacaaaaaaatcggctttagctatccaaagggttcttcagacttatcacagagcttccggtcaactgctaaacacacaaaaatcagtcatgtctttctcaccaaatactgaagcaactattcaaatgtttttccatcaaacattgaacatgcctataagtgattgccacgaacgttatcttgggtttcctgcttatttaggcagagagaaaaaagaaatgttcagcaacataaaggaacgaatatggaaatttctcaatgcttggaaagaaaaactattttccttaggcgggaaggaagtgcttttgaaagtagtggtttagtccataccaacatatgcgatgagttgtttcaaaattccaaaaaaaaaaaaaaaaaattgcaatcaatttgagtctatgatgactaacttttggtggggctcgaacaaaaatagcaacaaaataccttggaagaattggaatctgttgtgcaagtcaaaacttgaaggaggtatggggtttagatcttttatccattttaaccaatcactattggctaagcaagcttggagaatt

SEQ ID NO: 8276 - DNA, 760 bp, Cannabis sativa
gtaacgtcaaactctttgaaccctatttcgatgtattaaattcttttgaatttattaaaaattctcagtatattttaaataactacaatgtatatgatcattaaaaaaaattcgaactgatttttttttcttaatatcgaaacagataaagtgcattcattgattgtggaattttctaaattattaagtagacaaataaaatttgtttagaaatttaaacaaatattacatactaataaagaaaaaactataatcattaagattctatttagcaatgctcatcataaagaaggctattttgtaccgttctcataaattattatttataataattattagttaatatataattgtggtattaattataatataataagtatctcatacaaaacggcatcgatcaaaagtctctaattaacagcagattctaatgactttaattataaggatatataatatgtaaatacatgcatgcactatatatatttatatcatgtacatgcactacatacatgcatgcactatatatatttatatcatgtacatgcaattctcatatataagatatgagaatcgttaaaaggtacttagtgtatattcatactattattagtttaattaaatatcagattttatataattttaaaaaaatagtttttttaaaaaaatgttgctaactaattatagagtactacctataaaaggtattgagtaacactgtaatatattatagaaagtatgtaactcaaaaattaataaa

SEQ ID NO: 8277 - DNA, 836 bp, Cannabis sativa
gtgaacaagaattactcactgctttaacgagaattactcactacttgcatattgttaaatgcacttggacaacttcagcaaatcaggttttcagaataaattcttcgaaggatttgagtgaaaaggaaaatttgctctggttttttgagaattaaaattgttaaaagagtgtaggaggattgaatcccttttcataaatgctttgatgggtaattcagtaatagacaattaatactcatttaagagtacaaccatcaagcatgcagtaccgctcaaccgtcattgtgtgtctcgaggtccaattctcaagatagggcattaaatggccaaataacaaagagacagccttatcttcatactccctccatcaagtcaagttagagaaagataaagcaggaagaattaacatgtgtcacccatcctaccaacttaacggcagaataaggtcacgtgcgagcaaatggttcccacacgaacttagggggcaaatattatcctaaatgccacatagggtgatgtgatctctagcatggtgacacatggagaatattcagcccagccaaagaactctctacttaaaactgtccaagttacatcttcagcagggatcatctaggcaaaacttgtacgtgattgcccgtacagatccacattatccaaaaatgttgactctctcgtgtagggtaattcactgtaaaaatatctctagagatactttccataaatgttctaacatttacatctcgatcaaatctatgattttgtgggattgacttccaccaacaagaaataataggcaaccttcctagtgtacctttttaattttatctgttttg

SEQ ID NO: 8278 - DNA, 1105 bp, Cannabis sativa
ctcccccagagtatggctagccagaccctagcatactcgagcctataacccctctgaagagggtcagtcaatcaagtctctacaacaacagatacttctgtgtaagcatagttggatcaaatcaagaacatgatcaagcgcctagctggtccaaaaccttcgaaccttgagctacataggttgaggggatcattattcatgacatacataaataccttgcccttgcccaagttcaagatgccaatatggaagatgtataatgggatagaaaacccactggaacacattaagtacttttgagatgcagctcgatctccagaagattattggtgatgtctaatgttgcatattcgtagcaactttgtcagaaacaactcagtaatggtacttcaagctttccccaggaagattcgattcttgtaatgacttttcccaagaattctacacacaattctcatcctcaaggcttataccatcgtggctagaagaccttgttaaagtcaaacaacaacaaggagaatctttgaagaactacatcgagaggttcatagcagaggccaccaaggtcaaagggcttacaaaagaaggccggtatacgaccatacaggggggcatcctcccactgagcgacttctagaaagacgtctaaaggatctcaactaacaacatgaaggagttcgtcgatagagctcatggctttattaaactagaagaagatgtctgacaggcccagacagggcaagtcaacaataggcagtcacaaggcatcttgtagtcccatgacttgccaggtgcctaggcaggttccagcaactctgtcaaaacctccagtggcaagaacactaagagcaagcacaacaataatagctctggaagaaacagtggcaaaaaggggaagttcagcagttctcccacaccataaaaccagaagaacaaggaggagaagtacacatgcttcaccctcctgacggagaaaactgaggccatatttatggaaactcaaggaatccatatagaaagccctttcccatcaaaagagagtttggaaaaagggacatgtcgaaattctgttggttccataacgactttgaagagggagattgaa

SEQ ID NO: 8279 - DNA, 1692 bp, Cannabis sativa
actaaattactaattagtaactaaatctcaaattgtaaatattttttttgtctttattaattgagatgcataacccctacattttgaaaaatggtaacaattgagataaatgtttctttcatattactaactagtaactagttactagttatataagttgtaactaactaatttcttaaaactagttactattaatatattactctaatattgatgactttgttttttttttttctaagaaaagtaaaagataatagtagaattggatgaagatgaatgggaggatattgatggtggaaatgagagtgagaatgatgagagaaatttacactataattcgtcaagagatgatgacttagataatttctaattatcattgcatttaacattaatgttttagttcgagttttagaagtcaagtgtgttcgtgatatgctatttttatgagatattttatggtatatttaaaatgtatgtgacattttattcatccttaggtgttctaaaatttatttcaatataatttttgaggcttacgtctcaagacttatttatgttattttaaatattgtaactaacaagtaactaatcttttcctaaattactaactagtaactaattatagtatattaaattactaagtaagaactagtcctagttctactaaaatttcagcagcataacgactataactgaacgttttcaaaatatttaaagctatcaataacaacaaaatacaatctaaaataatataaataatcacaataacattaacaatgtaaaaattatccacacatccgatcgcagtacatgtatttataaaatctactttactgatgaatatttaagatattcaaactcatttaacatgcatattatttcacccatccgatcgtagtataatatatcgcagaacctacttcactacatatgaatatttaaaacatttaaactcttataagcattgataattaattaatatcaaaagttattaaatgtattcatgtagctagctaaaacccaatcaacactaaataattagaactttgcaaattgcctcacaacctacaatataatgaaatactacaaaattaaaattttaattatttaactacttactagttatatcatttatgagtaaccggttactaactaattaagttagtaataaattactaactagttactaatgagtaacttatagtaaaattaataactagttaataataaaaacaatgaaattaataactagtaagtagctagtaaaaaaatctaaacacatgaatataaatgaaaaaaaaattaatatggaaataaaagagttattttttttaaaaaaaataaacatatacatatataataaattatatctcaaaacaaaatttctaaaattcaatttataaactaatttctaaacttttattttaaaactcgcctaactcattctcagtcacaatatttaataaaattattagtttaaaatcatatatacatacataatacataaagtatatacaattacaattataatatttttatacatacaatacaattataatatatatatatataatacatattcaattcaatataaaatacatacatatataattaaagagtatattttaattttattatcaaaatatagccaccaataccgatcaaaatctggccaccacacacaaccacaat

SEQ ID NO: 8280 - DNA, 619 bp, Cannabis sativa
aaatatgtgggctcgggaccctcgatccttctgggtggtgaaggaagcttggcaagccagacgccatgccaatcccatgcttaatttccacaagaaagtcattgcaacgtgtaaaaagcttcagatgtggaataaaacccaatttaggttggtctcccagcaaattcaacaagcgaaactcaatcttgaggatgcggagagagagaacccagataattttgaagaaattgacaaagccaaaaatcatctttcggaagctcttttaagagaggagatacattggaaacagaagtccagagtgcaatggctccaagagggggatatgtgttcaaaattcttcatggcctccactataattcgaaggaggaggaactatatccaatgcattaaggattctgcggatggggattggttacgagatcaagatcagattgctcactgtttccttaccaaatttaaagctattttcagcaaaagctccatcggtactactcctctggttgaaggtctaattgataaaatgatcttggaccatgacaatgatcttctcaatgctataccgaaaggagaggtggttatggcaggcataaatgacatggggaaagacaaagccccgggg

SEQ ID NO: 8281 - DNA, 702 bp, Cannabis sativa
ggtttatgaaccttgcaacatttcctactcttgtggcgtcgatattgagtcttaggcatgcttttccagatggaagatgctccctaacaaccaaaagtgcagaggaaaccccaccgcttgatgcgagtttgtcatagtcttgatgccgttttcttgcttccttggtagtcaagagctcaccttccaaaagcaaattcaagttcaagaaattctcataatttcattatcaacttaagaaagggaacaacactgtatattcctctaagaatacagagttgagtgtgtcctcgcaacacagcatatatcttgtcagttttcaccattgattctcaaccaacacaaaattacactaagtgacccttaaacagctccaagagttgatcaagtgaccttaaatttacactgatcaactctcactcaatgttattattattaaaaaggaagttatttttgcaaatttcaaacatttctaattgttgttagctacaaagacaatgcctttagcaaaaccaaattccaaactcaaccatacataggagcactgtgaatcatctcagaacattactaccttaatcttgtcataatttcaaactacaaacttgatgtcgttgttagctacataggcaatgcatttatttagcacaccaaatcaaactccaaactcaacccaaaatattcatccatagcagcataaagaaaatc

SEQ ID NO: 8282 - DNA, 1063 bp, Cannabis sativa
aagatccaaaataatatttactaatatatttataatcaatgttagccaagaacaatatttttgttttcttaggagtagggatgtaaacgggacggggcgggtgcggggattgctcccccacccccatactcgcttcttaaattcacctcatacacgtcccaatactcgtttaaattaaagcggggacaggacggggattactcgacgggggaaggattcccatcgggtacccattacatgtatatttttgaaaaaaaaatgatgtctcaaagagaattaaaaaaaaatcataaaaacttagtaaaacaataaacttaagtagaatagtatgtatagtaaaaaaaaagagtataatcaataaaaagcctaaagcatgaagttattttaattgtagtaattatgattttaaaactttaatatatacatatatcatatcagggcgggtatctattcccctgccctcgtcccgtttccaactcgggtatgaatctttaaacccatacccgctcctcccctcgaaagtcaacccccatacccgtcctattaggagcaggtatccccgggtacccgaatctacgggtacaattgtcatccctacttgagaggaattgtatgagaataaagagattggacttggaaatagtttaaagatattttatgaaaaagttttagcggctaaacactcctaactataacttcacttacgcttacttctccaagatcaaaaccctaacatcgactttaatggcttcttgctcggttaggacccttctccaattttgtgtcactgaaattgaaatccaaaagtaattttttatttctaataatggaaaattatttttgtaattttaaatgaattttaagattttttttataattgttaaataataatattaattgtactaatacaaatgggtcgctatgagagtatacatatcaatattaaccgttttttaatttgaaaaatcttatcactaaaatttaatagattaagtgcaaataaaattatagttagaaaaatttggtcaccaaaaactctttcacgaataattaaaaaataatc

SEQ ID NO: 8283 - DNA, 1128 bp, Cannabis sativa
ttcaatgaagacttatgagtattaatattgccaccttcaatggtttttgagaaaccatattcatttgaccaaaaccctagctctctatacccctttccaaccacatttataatttgaaatatattttggtggttagtagtactagtacttaagccatgaaaatcaacacttttcaaaatttgacctaacagttcttgttcatattctttgcggttactagaaaaaaactttttggtggtgatagctagagccattgccctagttgcatcatatgcttgggctgcaaacataccgggctcgtggctatactcctttggatacatagagctaaattttttatgaaatacttggtagaagtgttgccaataagggttctgatcatcttcttcttcttctcgaaaatagctcttaagccctaaaacaccttgcatagaggagaaagttgaggcattgaaagaatgaacaaagttagtaatggaatcggttgtgatccatacatattctgtttccatcattttcatttctcttgccttatcaaacaatttgagtgcaaattcgaccgatgaatgaaccacaaagactttactttggttttgtttgagcctttcgagttgatttgttatcgaaaaagaagaagagaaaaaaggtggaagtggcactagttggctaatcctagcaccaacttctttgagagatgaagatagatgaggtaaaacatcattgatgcttattgaatcttcttcatagattagagtcacttgatgccactcccaagattgtactatggaagctatggctttcatttggttgaggttattgtttggtgacaattgaataagagaaggccacatttgagttgcccacattggaagtagattagggttagttaatgagagaattggaatgtgatactcactaccaatctttgctaccaatgaagtctcttcccatgaatgtgaacccattataatggtttggaccccttttttaatgatgaggtaccttgctgcaatgccaaaattcatatgtataataaatagataattgatttaggattataatataacttattgtgactaagtgtttttagtcacattaatacttatttttattgactacattagctac

SEQ ID NO: 8284 - DNA, 526 bp, Cannabis sativa
atttcatcactacgaaagcatcctagaactcgtttagagagggcagctatcacttctcctttatagttgcgaactacagcgccaattcctagtatttgatctttaaaacttgctgcagcatcaacattcattttaagctcattcatagctggaggagtccaagtgatttcgtctaagagcttttgacgtgggacactgccttctgtatcagaagtgttatgtggaagtcgtgctactgttgctggttgctggtgcgagtcagtttgaggttgcatatcagtatggttctctctaaattgttgacatgtggatcggcgagtagcatacatggtttgtggtgttggcatcccttgagagttaatagccgtgaggtgaggaccttgaactaattcttggttggatgtttggtgtgcatgtcctgattggaaagtggcagattggtgtgtaatattctgctgcaactttttgcaggataaacccttagcaattctatatttctcaatataattcaatgcaaaggaagcaa

SEQ ID NO: 8285 - DNA, 530 bp, Cannabis sativa
gaagcagccaaagttatgtacctatggataagttgacgaggaggaatctcgtaaccttactatattttctagtttgggtattgactgcttgatttttcttcctcttttttcaatttctaccatggtagaagaaggtcgattcgcgaaatagatgatcttagacaacaaagaggccccaatctgggaagtcgaaggcttagaaacgaaagtggttgccaatccaatataatgggagatggatcaatatacaaacaaaattttgtaaatatttgattttgtaggcgctatgaggaaagatgtgacctacaaaacattccgagtctatttgattttataatggaccatgttgcatatagccttgtaaatattttcttgagtatcaaccaaattggtgtacttaatatacttgtctaaatattgctttcttcttttctttggagccttgctctagttttggctcctccaacccctcttattctgggaatgactcacattcgattcttgaacccccatttgttgccttgattgtc

SEQ ID NO: 8286 - DNA, 659 bp, Cannabis sativa
ttttttttaaagaaaaaaaataagttttgaaaaccagcgtggagttttcaaaattgcagagagcaattaatatagtataggggtggtaaaatgcacttattacttctagttttggaaatttacaatttgatgggacaattttagccttgtccttgtttaacgtagctagccacaataaagtagtataggtgaaaatagccgtaaatctagcctaataattaacgtcaaaattaaaaaactgtaaattggcaactatagaggaatatttattgtaataattaataaggggaaaggaaaggttctgagattccaggccagtggtgctgactgatacacgcaacctgaacaagaaaagatgtaaaaggaaacaaagtcctggagaaaactttaaaccaaccaaaaaaggtgaccaaattctattcaaaaataaaaaaaaagtaaccaaattatcattacagtagtaatagtactactgctactagtacaaacttacaaacttcctcatatagatatctacatagatacagtcatacagatgcatgaatctgacgcccctagtaatagtaaactaaattaagtccatttatttgtctgtcaccttcccaatttaaccaaatctccttccacgtgttaccttgcatgtcggcttcaaattcatt

SEQ ID NO: 8287 - DNA, 679 bp, Cannabis sativa
tatgccacccatgtaggaaactatattacctaggccacatacacttgcctcccatgcagaattcggggtgcaattcttcgattccaagtcgtctctcgcaattgttgaaccgagacctttggagagaagatcgaacgagggaattaaactaattgtttcaacaacttaaagattctctccccaggtataaacctgtgcgacatacaacctcccctcgggtgtagatctcactactaaaaaaaaggcattcccagccagtccaaatgtcagtttttttaaaaactattaaaattgagtgacttttctaaactgatggtattggacatatttagtgtcggtttataacatatgctaaaaatctgattagcgacgacaccacaagcaacgagggcgagatttgggcagagctgatggagatgaccttgcgaacaaatctagatagcgaggactttgtgaacagatctggcggcgacttgcaaacggatttgggctgtagtatagatatccttgttattcctcttgactttttaaagattagtttttcttttatctaaaatattggttgttaattttctaggaaaaaattggttgtagtttggatattaaaatagttatgtgatttaattcaatattttatataattatttgtgtgatttagttttggatgttgaaatattta

SEQ ID NO: 8288 - DNA, 808 bp, Cannabis sativa
gatatatacagttttctttggtagtacattaaattaattttagtacatgtagttggaagagtaaaatagtgtggttctaaaattacacaattttcttataattatttatgaattggagagaaagacaacaaactgtcaaaagtactggaaatgagttgtaaaaagagtaaacccacatatataaaaataataaaattttcatttatggttccaaaaaactaaagagaaaaaaaaaagtcatatgtatatactactagggttttttctatttgtcaaaattattgctggatatggttatggatgaccacactgttccagttgttgttttattatcttggtcaaattcatgcaaactcatctcaagtgatctctctgtcttaaattattgagagtttttaagatattattgttattattactattaggtatgaaatggtactaatattgtaatggtgtgttctaaagtgtttgaattgaattgatatgaaattatttaaaagtgaagagagcttgagattgattcacacgttcttcttttctcatcaattcaaaacccaaatctaataagctgagtcagtcttgagtgtgaataggtcatcatattgaattaatgccacacttttggaggttacaagctttttttttccttttttctcaaatgaaatttcttttggttctaaatagaatatttgttgaaaattgtagaaatgtggcgacaacagaaattgttttttttttttaaaaaaaaaaaataaaataaatgttaaatgtgactattatatgtaaagtcctggtatatttggtaaaa

SEQ ID NO: 8289 - DNA, 1154 bp, Cannabis sativa
gttttaggttagtttataccatgaacaatcatgtagttatctttgttctggtccagtacaaataacttgaaaatcgcgtacacttcccagccagtcttgtgcgagttttcttcagccatggccaagtagacagagaggtgttccttcacatttctgttcttgtttccactcgggtgtataaccaaattcctgtgaatgaacatagaagtgagaagagcataagaaattaaaataaagatgaaagattcgcttaattggtcattataagaaagaaaaatgcaccatttgtagccaccagcttcgaaactcctggattcgtatcggtctatcgaattcttggttaacaatgaaaatgactgtactttgattgtgtaatgagtaggtggaacatccgagattgatctacaaatgtctgcaaaaaatacaaatacaaattttaatgcaatgagatcatagctgatgaagtgtaactggtctaatgtttgagacatagcaaaagctcaagcacaacataccatcagaatcgttgaagataaggctggccattgcaactagctagtgatgagaattccaaggattgaatactgattctttggttggaacaagtaggatttttctgtgctttttaaagagaggagcctaatcccttgcttcaacaagattgattgtcttataacaaggaagaggtattgattccccaacttgagggtgtttgtgcagaagaccatgtttgtttgttcatgctcaacaatttagttgtacaagaaaaggctattaaaatatgccttgtgtttcctagtccttccatcctataaagtaaggattccagccatctctgtacataacattcttgacacaattgcatattcttaaaccaaatgttttggcaacacaactgctcactttatttatttgtttgttttaactaaaatacctattttccttaaataaagatcattatttgtatcaacaatattgagtgaccattcaacgaggctcacttcacatcaaagttcacacaatgattgataaacgataaataccatgctgcggatgaccataaaggtccataacaaagatcatatacattacataacatatatatgtatgttactaaatttttgtttagttgaaacaaatgtacgagtgtgact

SEQ ID NO: 8290 - DNA, 1619 bp, Cannabis sativa
tatattttttttccttttttttcttgggaagcaactgccctgtctcacttctatgtggacccgcccctatcgtgccgaccctaccctataaaattatcgacacgacatagcacgatatttatattttttatggcacaacatgatcatgatttatgttttttttggctcggcactacatgacttttattttaaaaagcttgaaaaatatgagtcagaccagtataacatgcctacctatttacaactctagttacaaccaaaaaaaaaaaaatgaagaagatgaatgagtgggggcagaagagggatagaaagatcaagtaaactattctattttgatttggtttagattaattaattaatttattattattatttttttttattgattttatttttttgtcataaaaaaatatatattttagcttttttttttttttttgaagaaaagtgtgcatatatattagcataaaatcaattagacctgacagtcattacagaaaagagtatcgggcacagaggaaggaggcaagctaccaaacctctgatgggaaaatgcccacttagcgacgttatgggccgcgtagttacattgtctactaacatgttcaaacttacaaccgataaaaaagggagagttgcttttacaaaaagagacatagttctcaagctcccaacgggactccttcccgttgagggcattgatcactaccctcgaatcactctcaacaattataaaatggataccaagagacctggccgcctccagggctaaacagcacgccaccgcttccccgcagagagcatcagcaaactccagcttagaagtagaaatccagatcaccttgccaacatggtcccttgcaaccacagctgcacacatgcaatccaacccgactctgatatcacagttcagtttcagccaatcttgagggggaggacgccaaacatctgccgagcataaattggggcaagggagcaagtaagcttggtgatctgcaaaagaaaatcgaacagtgtcaatgcttttaaaaatgtcaacaagactattattatgtaccttttcattccgagttcgccagatcttgtcaataattagcgaggcataaaggaacacctcctctgcattaatgcctttgttttttagatcccataagaatttgacccaatcccacattcgaataccagtatcacagataggaaaaataccccaaggggttgacctcaataagtgaaagacaaagtcacacgataggaattaatgctttaaggtttcgaccgccattccgcacaatgggcagctgtcatcctcaatatgaaattttcttgctatgaccgcacgaacagggagggcctttgagaggatacaccaccaaagaaccttgagcctctcaggtattttactgttccagagcttgttccacagggatggggaaacctcagaagaattcactcgatcaacaactgtggccctataagctgatttgcaggaaaagtaaccatttgattccaaagtccagaaccatttgtcctctcctatgcccgaaggatttcctcctttcatgatagccaagatagtctcattatcaaacatgctgttaagtttttgggtattccatcca

SEQ ID NO: 8291 - DNA, 743 bp, Cannabis sativa
gtaataaacataattttacttcacaaattatgaaactaattactcaataaattgaaaaattgaacaattaataatcatcataaaactagtatataatttgctattttccaaatatgaataattccaaaaaaacaatcataatttgcaattggtgttcattttctctacaatgtaagttaagtacattttttagacgtagcgctatcgtgcgatgcgatgcgttaagcagaataaatttaaaaaacaacaatatccactcaccttggaatatatataatatttttatatgattaacattattgaaggtattgtattattattaataataataaaaaagaagtaaataaattaatttttttaatgtacatatgcatggactcaaacaaacctgaatgtatgtcctaccttttcttttcacaagtgtgtgagactaaacattttaactagtttaacacaacaatacaattacaaatccaatactaaatatatacttatggttatctagctacgtactacaatgtacattctacagaaattgataaatataatatttatcctagaaacattaatatagttaagcacacactgcaaaatgttgctctttcaagtcttcattataattttagttgatctggacttgaagctcactatttattcagttaaatagttttatttttgtgatgtgtgtgcagctaccaaagtcccaaactttgtgtttggttttaatttaatttggatttttt

SEQ ID NO: 8292 - DNA, 815 bp, Cannabis sativa
cagatgagtttttctctagttctttctttcattcttgctaattaataattatttcaacttagacagcataactaagcacaatttatatatgatttgatcagatcaaagctagctgttacgaataatactcttctttccaactttgttttttgggtagcataatgggttgggagttgggactagtgtttactttagaaacttttttttggacagttaagaacaaaggattgacttaaaacatatattcttattattactaattaatatgctgcttgtgcaaaaacatgaggatgccatctttaattagaaggcacagattgtaaatttaatccatatgctgaattgattttgagggaatttttgtgaaccagtttctagttaccctaatcttctttatccaattcatgtgaaaaataaatagtagtaatgaacttagatgttatttggacaggtctttgaggagagttaaaagtgaatgagagattgtggccaaagtgactgaattcaagtctactgcaattcttttttttttttttttgacattgggaagaggggatcgaactagaaacttcttctactgcttgtgagaaatgtgataccattggactaagtctattacttcaaaatacttagcaaaacaagtttagccattggcatgaaagtcatgtattcttttaatttttgcatatggaatgaacttgtcaattaaggcctattgacttgtctgataatatcatgaatattcttatgataaattacacctgattctctgtgtattatacagtactaagtaggatttttcttaggtaggagcg

SEQ ID NO: 8293 - DNA, 1448 bp, Cannabis sativa
tttttttttgcttataacacatttcaattcaaagctggccctgattactaatacctaataacaataattttttttattatcatatcatttaattaattaataaatcataaatcttttttcatagataattagtatttaattataatcttgaagctaggaaatgcattccactatggatcaatatcataacgaaatgtcttgcttgttataattgacttgattaaattttgtatgtatattcagatctgaccaaaaatattacttccttattaatgtttgattatatatataatagtattggaaaacttattacttgatattattaatttaaatatattgacaatatatatatacacgtgcttcaatgtcagatatagattatatatgtacgtgtaatcatcatcactttatttgaagttgaatttttaaaattatataagtcaaattaatactcgtgattttatttgaagttgaaatttgaatacatgtaatgtagtaagagcatattctgtgtatttatattaattcacttaaatgtaccttatcaatgatataaaattagtttttttttttatggaagatataaaattactattaataataattaatcaaaaactgcttgacaaataaataaataaataaataaaaaatgaaaacctgttttatagtgagtggtacacatgcatgcatgtatgtaatcataaaactagtaaatttattagaaccccttaaatcatggccattattaattatgattataattatatatataggtattgttaatatatatattgattggcagtactgtgtgtggcagaaccaaatgcttgagatcatggggtcatcaaatatataatcccaaaaattaagggtatttgtcttaattgtctttatatatatagctagtgtctactaataataattactaataccaattacttatatattaaccttaatacatttctttctttctttatcttttgttattaccttacttatatctcaaaaataaattagcagtaagtacttatagtaacttatatgcatcttatatataaaaggctaattaggattttgtcctttcaactttgataaatatcaaattatgtttctgaattttgttcactgttaaaaatttcccctgaactattgagattgttaaatttaaggacatttgtctaattttattcaattttactaatttggtgattgtccatgaactaaatcatgctctccagactttgatatctatcaaatcatgctctttgaactttgacatgtgtcaaatcatgccccttgaactttcattcatgttaaatttttcttactaaaatttcttaaatccaacaatctcaatagtttaaaaaaaaattttaacggtcttcaaagttgaggagcatgatttaatacaccttaaaattcgagggccaaaatcctaagtagcctat

SEQ ID NO: 8294 - DNA, 560 bp, Cannabis sativa
tagtttcaaaggcaaaactgaaacacagatgacattcctacccaagcaacgaaatcaaaagctcattaatgaccataaaatttatcattgaaagttcatgataaatattccagatgctaggtttcataagaagctggaaaaagacaggtcttcctatctgctgggactgagtgcataggtgtcattaagtggttagtgagacaatgacaggtctgcctaggaaagtctctaatgtgttttcatttctttcttttcattgctcttacccaattttccaacataggagagtcaaacagacgaaagtttttgtcagaaaaagtctgacagtaataaccataaaaacatttctccacatattaacacaaaagagagtattaggcacacgggtgccttgatcttggaaatcccatctaatgtataggcagataaacccaaatgaaacaagtgatcattttatctaacccccaaaaaaaagcataggactttgctaaattccaattcctaaaacaaattttacagttaattatataaataaaaccatacattcgcaatcaaaaacg

SEQ ID NO: 8295 - DNA, 1196 bp, Cannabis sativa
atatatatattggttgtcttaacctaatgaacactcagtactctcactctccacggcctctccctctattgtccgcatcgatcatcgattggagtatcctgctctgctccacacctttcctttccaacaggtaataattctaaaactgactcattgggatattgtgatctcattagttatgcattaatgtatgttaaagcttgtatttttttttaagaaataattgtgtgtagtgtatatatacactcagatgtgagtttagttagtatacacagatttatgcttttatcacacactattataagtctccatttgaggggtttttctgttttcttttcaaaaatgaaaaaatataaagaaaaatgaaatctttttgggttaatttgagtatttgtgctctaactttgttaatcatagtatagtttatagtagttttgattttgggtcctctatatatacatatatataaataaacacacacttttggttgaatacagggctattgggctttgattgagcttttatatgagagttgctaaaaagtattatcggtgcttaccatttttttcggtgtcaaattactattggtgtaattaaatatcgattcgaaaatagcttttaaagaatatcgctaatcaattataaagcgctactctttatataaatataaatataaatatatatatatatatataaacatcatgcatcaaactttaaatgtatatatctagtagattataagaatttatttgtgtatttatatatatagtggattatataggacttgtgtatatgctctaatttcttgtagtggaatattgggattgtgttatagtttgttgttttgttgattggttttgttgaaattactgcattttcaggttatggttatagatgaaatggtagatgagagtactccttcacctgaagttaaccaatcaccaactgaaaccccaaatgaagatgaaaacaaggataaatccaagggtaaaaaaaggggaaaatctcctactgttgttagggatgaaaaagggacattgatttgggaacatttcaccaaattagaaccaactgaccctgaagattttgatgaagatgttcttaagtacatttgtaagtattgtggcaaggatttcacttgtgattgtagagactttgatgctagtcatttatggaatcatttcaacaatggttgt

SEQ ID NO: 8296 - DNA, 1671 bp, Cannabis sativa
atttatcaaacacttagcttaatttttttccatagtaatgccacatctgtttttttttttttgttcacagctgatgctttttccccttaacacggctgtgacaaactggtcttaaattcagtattatatattcttactaattttagtaaatatttttaataactttttttttttttgtaaattctttctttttaaatttgaaatatatataaaattgttaaataaataaaaagagaagaccattaatataaaaaaaaagtcttgtcatttgacatgttgtgtgatgttttttaagtatttctaagttatttgctattcgttgttttgcttatgatggcttcgagtagccgtaatgattttgatcttaatgaacaatatggacaaatcagtttggaggatgaggaggaggggattctaattggtggggaagatgaaggggaggaagctttgtttgatgacagatggtgcttagtgggaaagtttcttacgggaaggacttttgattttgatgcaatgagacatatgatggcctctctttggcaactgggaaagggggtatacatcaagaaactcgacaccaatcgacatctttttcaattctaccatgaattagatatacaatcggttatagatggcaacccttagacgttcaacaaatgtcctcttgtgtttcatcgtctgaaaaaaggtgaggatccaaaatctgttgttttgaataagattgatttttgggttcagattcatgggttaaaaactggttttatgttggaaaaagtggtgagaagtgttggtgcgtatgtgggaagttttgttaagtcggatcctaaaatttttaatggtttatggagagattatctacgtgttagagctacggttgacatagataaaccattgaaaagaagaatgaaattgtgtaaagagaatggggattggatatgggcattccgaaaggttttgtccaagaaggtttgatcaacctctggaacaagtggctaagccttatgggattgggatgagagctcaaatgaagaagaaaaactacttgaccggtgctcagtggcttcgtacggggaaggaagacggtggagccgatggtggtggcagtgtttccaagcggaagagagatgttggaggggattcaattttgcctagaatcatggaaattgatcggatttattctggagttaattgtgatcccatgaattttggcaagaataaaggtattatgggtggaaaggaaggtgttgttaatggcaaagatgctatgggggtcaaacaactatggctggaagtgatgaggattcaattaatgaggaagtagtggtcctggatagtaagaggaggcgtatggggaatgaggaaggtatatatgaggaaagttttcatgggctgaatatgggttctgatgtagaggaagtaaatggtttaaaatttcttggaattgccatgggcttgggaacccatgggctcaacaattcattaaggatcttgtgatccaaaagaagcctttttgtttttgtgtgaaactttatctcgtaaggatgttgtggaaaggttgcgtgttgcgatcggttttgaaggcagttgatgtgtagggaaggagtggaggaataactttattatggagatttgaaaaagaagtgaagatgctggaatttggaagtatgttta

SEQ ID NO: 8297 - DNA, 1911 bp, Cannabis sativa
ccatttgaagcataacagctcttagatagccccactcgactcggtcataagccttgctcatgtcaagtttgagagccacatagcctttccttccatgaaccttgtatttcagatagtgcatagcttcaaatgcaatcatgatattatcaaagattaggcatccatgaataaaagcgctctgagtaggagagattacatgatcaatcagaggttttattttgttggcaagaacttttgcagcaactttataagctacattgcacaatgctatgggacggaggtcactcatggtggtaggggtctttttcttaggaatgaacaccaagttggtatcgttgaggcttgctgaaagtgagcctaaagcaaaaaaaaatctctcaccaataagatgatgtcttgacccataatgtgccaatgtttttggaagaaaccaggctccattccgttaggctccggtactttatctaggtgcatttgaaataaagcaagacgaacctcatcatcaccaatcagctgcaataactcggcattgttggaatcagaaatagaatgttttatacttgttgtaactttatcaaagttagtattcccattagtaaaaatatcatgaaaatactcaacaataacatcttccaaactattgtcccatgaagtccataaactagcagcactttacaactcttgaatgctattatttctttttcttgagctggccatggcatgaaaatatttagaatttttgtcacaattataaaaatgtaattggttggtaccttgtatgtatggataattaacatttttttctattttaaaattaattattacctataaaatataataataacaaaaacaaatttcaaaacaaaagatgatgactgttgtagatatgcagtgtttctgttgatataaaaataattagaatggactaacatatataagataatatttttgttgataaaaaaaaaaggataatatttttgtttatttgtaatattactgtaaaataataagcaatttacatttaatataatcatattgtgtcaaaatattaaatactatatcaagtttaaatatatttatatactttttcaatcatcaaatgtagatgtaaaagtaattaaagttatgttttaaaattggggaggtctccttttcagtattttcgattttggaaggaagctccaaacaatcatgcgcaattatgcctatgttggcaacaatctttctcaaggacatatatattcaaagtatagttcagaagcttaaacaagtcaagatgatgttgaaaatatagaatatgaaagaattaagtaatttataggctcatgatcaaaagagttacaaagaaatgtcagatttctagaaggaattacataagaacctgatgtgtggtgagttgattgaacaagaaattcaagccaaacatgtttacagtgaagtacacaaagctttttcgtcattttcgtagcaaaaagcaaagatacattgactgaagaatggagatgaaaatacatcctttgtttcatgctagcatagaagagttttcactagaatactcagtcacagatattttctatagtactacaagaatcttcgtggttcatcaatcgtgaataggaaatcggttaaggacagtgttgacgtaattttttgttaactgatctatgaagatcgtaaaaaataagaggactgagatgaattaatttggctaaataaaatcgcaataaataataaagggcaccagagagttatagtatttcatccccatgtcgcgatagtaatgagactacatctactttatttttattattgattccaacatgtgcaccagagttattcttaagagtgtgtagataatagtacaaaaaagattttgcctagaaatatctatatcaaagcttgtgaataaaa

SEQ ID NO: 8298 - DNA, 767 bp, Cannabis sativa
cactccatacgatcataggccttggacatatcaagtttcacgccaacgaaagcttccttgcccgacttcttatgaaaggaatccataatttcatgggccatgataccattctccgctatccacctacccgggtgaaagccgattggaagggggagatcaaacccgggaggatggattttagccgattggcaaggagcttggagatgaccttgtaaacaaagttacaaagagagataggcctaaagtcatcaaacccaactgcattcatctttttaggaatgagaacaatgaaagttctattcaaacattgaacaaattcacccgtcagaaaaaactccctaaccgtatcgacaactgaatcccccaccgtctcccaatgggtccgataaaagcaacccggcataccatccggtccaggggatttgagcggccccatggaccagaccaccagacgaatttcctccggggtggggatcctagacaagtcagagttaatctcagcagaaatacacggggcaataagttcagagatagcattacccgaatgaggattggacgatcgaaagatatcaccaaaatgattagagaagtagttaccaatctggcttctacccgaaatccaattgatcccatcgtccgaaacagccccaataaaattcctctttcttcttatcaccgtagaagcatgaaaaaatttggtattgcggtcaccatcttttaaccaaagttctcttgatttttggcgccagatagagcattggcgcttg

SEQ ID NO: 8299 - DNA, 2363 bp, Cannabis sativa
  modified_base (808)..(810): a, c, t, g, unknown or other
ttatttggtttgaaattatataactagatggcttattatatcaagatgagacactatttccttttaatttttccctgggtaatattgatatgtttggtggtttagttgggagtcactgcttaggtgactgatatattaggctttatatctagtgttactgctttagtatgaatcgccttattatttggtttaacaaagatgttacctaataagtaagcaaatagtacaccaaatggagttactccatcacactgtcatgtctttttgcttagattttctttcctagttaacatcttaattttttttattgtattataattcttactattcttatcactctcttgtttttcttggtaaaatttggtttagatttattattgtttaatattgatgaggaaatacctaatgaaatggatggggttgtgttatttttcataagttatccttgatcaaatacttagacgaggctgaaggcgaaggcaacataaaccctaagggctgccaccattttttttcttgaaaaaactctaaacaacttcattaattagaaaagatagtggtgaacacaaggtgattcacctccaaaagtttaaaaaaaccattacattcattgttatttcctaaactccagtttagctgaaatatgtgcagcattgttatgttagatcccctaggaatccacataatgttaaagtcagtcagtattttcaagagcacgcctcagcttgtcaaaagaagaatccaccatttattgatgcttatttaggatttttgatttcaaactgttattttttttttatttaagcgnnnatatattacaatcatgttttacttgggatttgaactctaggatctctaacacacactcataggagctagcctcaagtggttagatttcaaactgttattagttaccaagtcgtgtacctcacaaaaaaattattcacaagtttgaagtataagttttatttcatgtagcttaagaacatctctaatagagtgctaaattttgtagtgtattactatattttagtatatgtcaggaaaaaaattattactctaatgttttaaagtgtgtcaaatttagtacatagttatgttaaatttggaattgatataatattgtgataaatttaactcatagtaaattttatttttttatctattatagtgttactaattattatgatttattaatttttatacaattttattttttttatttaccatattaatgctatttaaataataaaaaataagagtttttttatatatttattatataatactaaatgatgatcaatgatattgttttttacttattttacatgatgcattggaattgtagatcaaatataatataattttttttttttttttttttgtgctaaattatgcataaaatttatatttttgcattggagatggtgtaagaagtggctaatgtttaattttaaaatgaatttaaatttgtagaaagaattattttctagtcaacaattattaacaagaaatttcaatttaatttctttcgtatttgttaattcttaattagaaaattgacttttaaaatttaaattacatgaaaacatccatgctgttcttaaaatatataattaacctttaactaacaatatatctcaagcaaattatattggaagtaagtggttataactaaatagagttatacttgaaaaaataaattaaataccaaaaatattaatattacaataataacaataaacaatacttagtacttgttaaccacgaaaatttatcaagtgtatattttcaaagacaataaggaaagaaaaaagattctcaagctaaattaaaaagtccaatagaagtacaagtggtaggctgcccatgtctccctagcgctccccatcacctccccgctcacccctcacgctccctgctcacccctcacgctcctcgctccccctcgcctccccgcacctccacacctccccgcgcccctacacctccctgcccctatctcccctcctcactcactcctcacccctccccctcttctctcttttcctccacttcaatctcccaaggaaaaatacatctaatgccttccaccaaaggcgagtgagaacaaatgtaaagcgggacacttagtttgttgagtgtcttatttataattggcccaaattagaacttaatttttttataacaaattagaagatattcttaaatagagtatttttatatagaagttctactgaatcttgtaagattttgagaaattcagaaaaatttaacacgctaaaaacatagctcaaactgcatgttgcatgattgactcttctattttatacatgtgtgagatagactatttgaaccttatt

SEQ ID NO: 8300 - DNA, 1412 bp, Cannabis sativa
aacattaatggtgataattgatttagtgatttggacatacatatataatatttcataaaactctcccttagatgttcataaaaactatctcattaaacttgctgaaaaacttgatcaaaagaaaatgttagtgaatgtgtataactgtattgggttagttataagttagttatttgctaacatccacatataatatttgctactttacttctttgtaacaactttcaattgtaaccataattgtattttattcaagtttatataaataatacttagtgagctttagctattcagaagttaactcactcattcaccatatctcatctttccaacttggtatcggaggctcaagttcattttttttctttcttcctctccttcttcttcaagcattcatcaatggcgtccacttcaaactctgctcctagagctgctggttccacctttgctactggtatcactgatcttcctgctgcagctcaagttataccaaactatattgttcctccgaatctctgtcttgatcgtgctaattacttctactggagatctcaagttctttcgacagttcgcgcccatcaactcgaaagattcctcactggtgctagagcgcagcccccagccactgttccagatcctacagatgcttcaagattcatccctaatccaaatcttgctgactggatgcgcttggatcaattcttgatgagttggctcttcaactccatctcagaagctatgttaggacacgttgcgaggtgtgctttttcatcaaaactatggaatgttctgatccagctattttcaaatcaatctcgagctagagtcttgcaacttcgtggaatgcttcagtcaacgaagaaaggttctacacctgtggatgaatacatcctaaagatgagatgtttggctgacgcattatatgctgctagtcatgcaatcagcgatgatgaactcatattatacattcttgagggtcttggtagtgaatatgattctgccatagttgctcttactaccaaacacgttatcactctctttgaggttcaattcttgctgcaaacacaagaaatgcgaattgaacaacaacactctattgctgccttggatcttcaaaatctaacagccaattacgcctttgccttaaagaaagcaagtagctcctctacaccttctaacaacactaatcatggtcgaggatcctccaatggtgcacgaggcagaggaggacgttccaaccctaacaatcgtggtggcaatcgtcctatatgccaagtctttggtagagctggccacatttctcttaagtgcttccatcgatttgatcttagctatcaaggtgagccaagcaataatacaccaaaacctgttccagatgactctcaggcactgcttgcctcagcctccatagt

SEQ ID NO: 8301 - DNA, 677 bp, Cannabis sativa
tgaaaacctttgaattatgtatatgcaatatataaaaacagttccagtctgacgtatggaccgatgtataagaccatctatgacgatcagaccctatcggcccatacattggacaagtatcaggccttttggaaaatattaaaaacaaggatctataatcaccatcgggccctatcagtccatgcatcagaccaatatcaggctagtgaaaacttcttaataatttattcttttggttgtgctttttgtctaatacttcttaaaaaaattaatcaagataaattgctaagaacataatgaaaccaataaaaaaataaagttacattgtcatcccaatacattcatatatatatatatgtatatatatatattagaaaaagaagttcatgctaaattttggtataataaatctacacactaccgctctctaaattatttcatattgtcatcatatacattatcaaacagaagttgtagcatgatatgcttgacatactctattacatacatcctgcaatcactgttgtatgagacaataaaaataattaaataaaatattgaaaattaaatcaagttactatataaaaatttacatgtaattaagttaccttaattttgtctgtcgtacaatgttgcgatcgatgacttttgaggtaaaatttctaacctgactctct

SEQ ID NO: 8302 - DNA, 784 bp, Cannabis sativa
tgaagggggaggagagagaagtaagggagtgttacaatgtcttgctagaccttgctaccaaacacaaggagccaatggcaatggtgatctcggaaggactagttgaaggtagtggagtgaagtctgcaaagaattgagaaagcaccagctgcacaaaaaatatatatcctttaagcatgactaattaaggagggacccttggggcaactccagtagcataacttcttttctttttccttttcataagcattacaatgtaacaaaaaaccactatatgaatgaatattacattggaactaccatgtttgccattccaagtgaatatttacttcctttagaaatagcggagaactcaagtatacaacaccataaatgagtaaaaaaaaaattaagtcatcaaggattagctacccttgatttataaaaggaaatatgctcctccatggaaaaactactaagctaaaagaggtcttaacaaacactcatactctattgctgagacgagaggggcgcctcttaagcataagaaaacattaaaaaattaagaggggatgcattcaagtacaataagtcccctcacatctaaatcaaaggatgaataaatgataacaagatgagactgcttaaagagccatactcccttaaaataagatccacttgccatagcggggaaggttgtttggccaaagattggtccgaagagacactcggtcagcatcatcttcaaaactaaaagattaaaaaaaaatcaaagtggatggtccacttaccaaagtaaggagaa

SEQ ID NO: 8303 - DNA, 861 bp, Cannabis sativa
tttagagccatagacaaatagagaagtatcggatttggaagccttaaaaccccactgcagtagtgtgtgcagtaatttttcattccaagctgtaggagcttgctttaaaccatagagagctttatgtagtttacagacatgagttgatttggtaggatcctcaaagcctcttggttgtctcatgtacacagtttcttgcaaatcaccatttagaaaggcattgctaacatccaattgtctaaccggccatgctgaagttacagctaatgttagaaaagttctaacagtaactagtttaactacaggactaaaagtctcttcataatcaataccaggtgtttgtaaatatcctttggcaactaacctggatttatatgtgtttagagagccatcagcattgagtttaatccgataaacccatttattgtcaatgacatgcatgtgaggttgatacggaacaagagtccaactattggatcggattaaggcagtattttctttctacattgactgaaaccactttgggtctttgagggcttgctgaactgtcctcggttcagtgggaatgagagattcaaccaatggatgtcttgtagataagtaggcctttggtttgtagattctaatttgagaccttgttttcatgtgataaattctagataggatacttgagtcatgtgttggtccactaggctggaggatagagacatcagaaggctgaactggattctaaggttgctggtatgatggaactgcctgctggtgtgtttctggtggctggtttgggtgagtagggtgctgattattgtgtataggttccgggtgtggtgtttctggttgctggtttttgtgtattggctg

SEQ ID NO: 8304 - DNA, 1341 bp, Cannabis sativa
actataattttaattcttaacttcctcataacaaatatttttgctcgccgcgtaagctaatttaaagtaatatttgattataatagcattgctattgaaatgctctatagactggccctgagctaagacgaaggaggcagtcgccttaggccccccaccgctcagggccccatttcgaaaaaataaaataaaatatagttagtaataaaataaataataatacttttaatgctaaatatgtgttgtagcttagtggtaatttgattagtttaacaattaagagattgagagttcaaatcccaaattaacataaggtcggccctgatattagcaattttgtaaataaaaaaaaatgtattaaaagaaaaccccaacacctcgcggtagaataaaaaatgaatatatatataaatattatgttatatatatttttttttaagtaatgcattaaagacattttaaaatattatattcttatcttaaataaataaattaaaaaaaatatatttttttacctaatctctaaatttttttaactctctaactatctacataactatatataaaattcatttatatacctaaaacttaaaaaaatttaaacatccaaaaggatcgaactcatcaccctaagtctataaccaattgagccagaatatatttatttaatacatcacactaaaaataatatattacatatttttttggtatatatatttatattaattttttttttcggggcctccaaaattgtggggcctggggcctaggccccgaccgccccaccctctggccgaccctgaatacatcgaaagattgtcttttatgtaaataaaatcttaaaaaccgtaaaaaatatctaaaatttcatacaatcgtatttttgtaatttttttttattgtttttatatatatttttttaaataattgcaatttcttttgtagagcaattttgatatattgtaaaataatttatagaaaaattaaattttacctacatcgttagtagtttgagctcaaaattagtaccattgtgatctatttttcgagatgaacatttgatatgtgtgaagcataaattttttattattattaaataatatattcgaaattaaacaaaaaaacaattttgtagtttcttttgaatttgttaataataataaaaaaaaagtagccaataatttaaacaaaattcaatatgtactagttatagacttctaaaaattatttgttatttcatacctaaaagttatcaaaggatatatattttagaaaaaattacataatatactattaaaattacaaaaattcgtcaacataattttttttttcatttttacg

SEQ ID NO: 8305 - DNA, 659 bp, Cannabis sativa
atcagatcaatatatggtcttttttcgtttttcaattcaatgactccaaccatgatcctttttatatataaaaataatgtaataattattataatttaaaaattaattaaaattatactttctttttttttttttggttttttgagaaacaaatctgataagattttatgacattaatgttatcttattacgtagtttttttcagacatagtatacgtataattttattttgatatcaagtttctgttaggatttatggcacgatttatatattataataaatttatttatattttaatgttttaattaagtattaatttttttttatgttacctgtaacttgtgtatatttttttattaaatttttaattttttttttcaaaaaatatatatttatttgatcgatacgtgatttttggtttaaataattactttccttttattttattttattttattgtactaaaaagcataattacttttattttatttatggattattgataatttgatagagagatttgtgtgtaaaaatgaaactcagcccaaataaaaagagaaagaagcatatgggtgttcatatgcatttagtgtcatcctatctacattaaatgtgatatttatattttgaattccattaattcagtccatataataac

SEQ ID NO: 8306 - DNA, 970 bp, Cannabis sativa
agaccaggtaaaaaaagaacccgatctttgaagcaaatctgcaagccccaaggctaactagttggttgcatcttcaatttcatttttggtaactaggtttcctccccttctatctctaaactcaaagactgcattaaaatcccccattattagccaaggtttaaccggaaaattaagccctgccagaccattccaaagactcttcctttcttctaaggaattagaaccatacacaaaagtaacacaaaattctttagtaagactgagcatcttcaccagacagtgaacatattggttagattcctccaaaatgtccatttttacaaacttattcctccacatgactagaatcctgccttcaatcacattactggtatagtaaccccaaccaatgaacatagatttcatagcttgagctactttatcccccttcattttagtttctaacacagcacctacacctatgtttctcattctacaaacatccgcaacagcctcttgcttcttattactattgaggctccttatattccagcttagaatattattgcagtccataaacactagactcaatgacctctgtcctttgttcacctccctgttgtctttgtaggacctcaaatgtattcaattgttgagtcagaactgattttttctcccccaaactcctattatgagcagctcttctaggtgttagccaacttccttttgagtcaattatttgccccttttgtcttccatccttctctccctcaactatctgcttctccgttacatctatttttgttccagcactaatattctctactggtttaatagttttagcaactatctcagccgacttctccattccaactccatgttctaccccttttttcacttctgtgctgctcactttgttactttccttctgatctggttttttttttttagctttcctacattcagccgttgagtgaccatagcctag

SEQ ID NO: 8307 - DNA, 718 bp, Cannabis sativa
caagaggatagaccttcccctccctaaagacggtcaaatcttgcgaaacataccatatgacaagagtagccagccccttgcacctagaggcgttgggggacgacaagacattcttatagtagatgcatctcaaattgctagcatagtgatgctcctccacgaaatattcgagaacaagttgttctaaggcctatctttgacacactaggtctttggaagagcagaaacacacatgataacatcaacttgagttgtgagaaccgaagtaactttgttctgccactaaacaatcattttaggttggtacatccgtctaacccacccaattggcacgataaactagtcaggcgagctaagggagttaaaccagctaaagcctaagccttgccggctatagccaactacccagtctagggctgccgaccaaggccagcaacttagcaaaggcatgaccggctagggtctgggcgaccaagggctctagcccagacaagaaaggccatttgggaaagtgtccagcacttcaaatacatttgtgccagcacaattaaataaaattaaagaaatgataaagggcctaaccggcccaaaagccatcagacctagagctagacaggtgaagaggatctccattctttgcatacatgaatgcattacccctgcctaagttcaagatgtcggtatgaaagatgtataccaagagagaagatcccctagc

SEQ ID NO: 8308 - DNA, 1002 bp, Cannabis sativa
atgcaatactcgaggaatacaatgatgaataataaactccaagggcgaaattaaaacgccatcttttcaactttctatctgtcaaatcaaagtgtacttttagaagaagaaatccaaaccgtttatttcaaattataaggattcgggttggggtataaattgatttgcctacttcatttcttctttttcatcactttagattttcaaagtctcctatttttgaactccagactagaacttcttgtatcctataaaaaaatttccttcgtcgtcgtcttaagagtgaatgaaagaagtcttcgactacttgatccaaatcttttcaaacctccattcagcctgttttccagaagtagagtgattggacctcgagttgttccacccccaaattgacgaagacttcaacgctcaggccggctacgattgaataattgattggttcaagaattcttggataaattaccacaacaacctcactctcccaactcgtacaataagtaagtaccctgacgctttgttgactatttgctatttagtatctaagatagaaattcttagttcaagctaggtctaggatatttgcatgtatgagtggcaaagtattgctcatagaattttgtttctagagtagggttatgtgaaaatttttgtgtgccctggaagtgctgattctgtttggatggtttgagtagggctatttacatttctataaatatttccatgcttgtacaactttggaattagggttaaatcaggtaagataaaactttaaacgaacattaggccagtttgttttcttcatacccattaggagttactaaattctgagggaattttatttctggacttctgctttaaactttgttatggtagctttcccctaggctccctacctgtcgcgttgagtttctcatgaaaaataggtttctgaaagtaacaaatccagtagggacctctccaagaaattttaagggaggtcttccctgatacccattttgtcat

SEQ ID NO: 8309 - DNA, 757 bp, Cannabis sativa
ttaattaagtgtctggttcttaatgaaaaaagaatggtggtaataagaaaggaatctttctttgaaaaaaagcaaaaaaaaagtagacaaaacaactttttgtttgctcttttttattggaactaataatagcttatcaattaggggatttaatcaatctcttaaacataatgttaataatccttataaaaaatgattattaccatattaaaattaagttatttttttaaagtaaacataaacatgtgataacttatctcatccccaccttttttatgctaatgtatagcaattttgagtacggttaaaaaaaatcttgccaatttctttcgataattttttgcaaatgtgtgttaaaaatttagatgtgtgttaaaaaaattggagtttaatgtaattagagattattttacaaaaaaaaataaaaataaataatgtatatgtttcaaaagaaattattatgcaaaaaataactataataatctaaaattataaagtaggaaactttgaagtaactccttactatgaaaaatatatttattaagggtatattttttttttatcttaaaatatataacacaaaaaacttaaataacaaagtctacacctcccttggagaaagacaaccaaaaatattaggggtagaaatagatgatagaaaacccaaatgaggaatccaaatattgttacaaacacacacacccatttattaattatgattaaaactataatgttacaaatgttacatattattatg

SEQ ID NO: 8310 - DNA, 714 bp, Cannabis sativa
ctccaagttaccacttccactaggtaggtgaaaaatgcataatgccaagcaattgatcattttagatgagaaatgctcaaaggtatattcattttgtctaatattttttgtaaagtataatattattattagtacaattcaatattatatcccacttgttttaatttataaaaattatataaaaaaaatactaattacttataaaatatcatctcatagtagtgctaagcactttaatattctatagcaatgctcttaaaagatacacacaatcatattatacattttttaaaaaagttatttacagacaaacccctttatattttgatttttttacacttaatctcattatttttttagtggcaaaatctcttatatgtttgttttttttttttggtaaatttaaggtaataactgaatattactgttaaatactaattaaattatcattgtatcaacttcgaaattttactttcatgtatagaaaggtgtacacagtaatcattcaattgatatttaaaggttgtatttaaccaacgcctcaaatttataaagaaaaagtcaaaaaaaatttgtcaccaaaaaataaaataagaaattacgtgtataaaattaaaatataacaaagttttgtcaccaactactttttaaaaattaactagttttaaggtgagacttacattaatgtgtgaatgttttgagtatataaaagga

SEQ ID NO: 8311 - DNA, 1062 bp, Cannabis sativa
gacacacagttgtgtccccatgcgagcgtggaggcatgctcccttagaaattttgtttttaaaactttaaaaaatcataactaattcataaaaaatctaaattaaattctgtaaaagcctaaattttgctcatttcaacatcaggatgagaatcgatttttctctgctcctcctcctccttatcttcaattatatccttctctttagcacaagaggtaaccatattttctgcttctaatcctttgacttctgttttgcaccagcagtaccttctgctactgaagattttttacccaggttggtttctttcttgtcagccactatttttttcttccaaacaaagcccttctccttgttgcagttagtaactgtatgacccaacatagtacaagctgcacgtttagaaggtaaccactcacttaatggattgctccactaattgttttttctcattaagaaatgtaatagccttaggaagctcatctgtgatttcaacatccactaaaacctgagcaaatttgatcatcattttttcttaggtaaccttatccatcatgatatatttactaacagtgctaaccaaggcacttagactattcttcccccaatattgcagccctagaccatttagtcgaatccacataggtacaaatttcaccatttgtgcagtgtccatatcagtagaccaaggccgaagaacaactgacaattgttaaaatggataacacatatttttaggattaaatctcttgtatcttcatccctaaaactcacaagagtaaatcctgaatgcattctttctattctttctatttccatattttcccaaatcctcttcacaaatccttcaaaaaccttaaaaggaggattggctcccaacacaatacaaacaattgaatatttccaaaaggaagcttcagtttcaatttcatcaagatccaatttcgttattatttgatctcctactttgagtggctctgtgaaatccaatcgtgtggaaagagatctaacctggatggtcttgaattttctccaagtctcttttgcattcgattggaagtc

SEQ ID NO: 8312 - DNA, 970 bp, Cannabis sativa
aattgagatcttgtgtgttttcaaatgtactatatatacctaccaataattataatgtctcactttttaacatttaattaccagttctcatacacagacaaaatatacggagtaggcggcaaacacatttttttttattattattattttcttgacacaaattaaaatattacttcatatttttaatactatgaacttgtcctacttaacaacatcatgatgcacataattaaatctttaataggaatcatctatcactcattaggattatttaaagaaattctgaaatgaaataagttcctccattattaataaagctggctaattaaagttttgcaaatccatacaaattttagacgattaataattaaggattggtaagttgtaaccacaccaatagtatatatctatataaaaatattgtaaggtatttgtttactatgtactaaaatactgtaaaagtggtataaatcaaatagaaacataaggatgatataaatcattaattgtgtatattcaaatgggtagattatctaattgatttaaattattgttattgtgtatcagtggtgcgtagtactttttaggcgtatcgttttacgattggttagcgatactccataaaaattatttccaaattcatttactattgtctagactatatatttaacacatgaacaaagaaagacaacacaatatttatagaaaaaaaatacacataattgtaagtgaagaaaactttttgcgcttgaaaaacaaatacacataattgtaagtgaagaaactttttgggcttgaaaagtattaattaagacatttttgctttttcatagctacatgctatgtgtaattaaaatctaaaaaatatgtccaaaaagaaaatctaaaaaaaaacagttttcatcttttaaaagctatttacttatttatatattatttagtttaacttttgcgattgattcttttccaa

SEQ ID NO: 8313 - DNA, 798 bp, Cannabis sativa
cttcacgtaagtaagttgcatgtaccgtccatgggtgcgagttaacaatttcagagatggacatcgttatttccaagcttgcctgtcacgaaaaaaatccctacattagtgggataaattcataaatttagagaataaaggcaattagcctagattttctaatctctttattgtaattatgggaatatactagttttctattttatttgttatagattaagggaaatcatcttcatgtaattagctatagcccctataaatagtggtttaacttcactatccagggacacaaaatctaagagtgaattactcagaaatcattgtaagagctttcgagagaaattagagtattctttctaattaacttttctcattattagttaatacaataaaaaggaaataggctattaccaattatatataagggtcgggcctttataaatttagtattttctttactttatgttgtttcttcaacaataaacaatccttaataatataattataataattatttttaataaatataatatttatacatgtattataatttatagtaaaattattaattttatataaataaatttataaactatatgtttatattttattaatatatataattattctcagatatacttttttaataattgatttatgaaatgtataactaattataatttagagattttttttaattataaattaataactcaaattgaaacttaagttttttataagaaattattatttttaaataaagtatttttagataaagattctactttgtttcctttt

SEQ ID NO: 8314 - DNA, 566 bp, Cannabis sativa
  modified_base (361)..(362): a, c, t, g, unknown or other
gtaattcagcttcagccttaaagtgctgaaaggttttaagtgcatcggacttatttttaaggaggtagatccatgtgaaccgagaataggcatccacaaagtgaatgtaataatttgtacccattgaaagattgtgtgtgtgaaagtccccaaagatcagagacaaccaactgtaggggttcagatatgactgtttggtaggctttagggaagggaaacttgtgaattttcccaagacaacaagcagcacaaacagagaattgaaaatctttattcattgctggtatattacaacttttgagtacagtttggacaatcttttcagagggatggcctagcctattgtgccacaaagtaaagnnattttgtacatttttattacactttgaacaactcgacatagtgacagaagagtcatttaaagtaacaacaaaagtacatttattatttggctgagaaatgaaactactgctggtttgacagagtgtttgctgctgcaaaccgtgagagttgagagtgggttgtgggctggaatgaataggtccaagttgagattgatcaaaagt

SEQ ID NO: 8315 - DNA, 551 bp, Cannabis sativa
ttagggaaattttatggtgcacctataaaaataagtgtaccgatgcactattttttaatatttttttttttgagaacgaggtttgcacagtttgttatacaatgtgtattttttatattattatacgcatatgaaatagattgtttaaatcatattttttttgtattgtaaataatattataccaattttttaaaatctactttgaaggatatgttaaataattataatatatgctatcatataaacaaaaaattaaaattataactcttcaaatataaaaattatacagttatttttgggtacattatagaagtaacctaattttgtttttgtactttgagcatcttttattatatgagcattgctattagacacattaaggtgtttaatattaattatactaatgtgatatgttgtaattagttagttgttttctataatcaaaatatgtaggacttgataattgtactaataacagtataaccctcttgttaagtggtactttaacatttctcttttatcatttataatatatcatgaacttccttga

SEQ ID NO: 8316 - DNA, 1267 bp, Cannabis sativa
acttgcaatttgaatggaccatactgttaatataaggaagatatagcactattgactataccccttctataccaattctttttgcatctcttaaaaacaatattgagaaaagttcttttaatggttaattttctgactttttatttattttatttttttaagaaaacaaaattaaagttaaagtgatggatcgagtgaaattgtttaggttttttctgaatgattatcatgatcaatcttatcacggaatctcttatttgttctccattgaaatatattgctaaaataaagagattgactaataaaacaaaaggagcattttcaactatttaactattattttattattacataattaatatttccatattcacacgtattattttgcatgtttgaatatcaattcaatacgtacacttacgagtcacttaatcaatcgaatcaagatcttaattaattaatcgagtcacgtacgagtcacttttttatcggagatcttaattctaattaatcatatatatatatatatatataaataattaataggacgattataaatccttacgaaaaaataggacgcttataataaataatttagattattaacttaggcatgaaattaattaatttatcatgattacactttgatccaatttgtttccaaagtagtaaaagtagtgataaatactaaaagaaagcatcaactaccgtcgatgtatgcatataagaatgaattgaattaaatttaaaatgtttaaaaaaaatagacaaaaaatttattaaaatttgtatctatcttatattagaatggtctttccatttaatattttaaactaatatagtcattccatcaaagtaatatttttaaaatataaccaaacaaataaatggaacaaaaattatttctttttaattacattaacgccaccttaaatattgtatgttgtttcttataatctaatatatatagcaatgcctttggatggctgctgaaactactgaagctgctatgatgtgttggtcgatatggtagcactgaagccaactggtttggaaagcgaaacaggactgttgatgatgtaattctgttagctaagctaagttttgagaagtggagtaatgcttaaaagttttcaataattaccaaccttgcatctcgacaggttgagattgagcattggacgaaaccgtcttatccttgaatcaaagttaatgtatagatagcaggcgttttggctatggttgtgtggctcgggattctcttggt

SEQ ID NO: 8317 - DNA, 633 bp, Cannabis sativa
tcttgacacatgatttcttgctataagttattcatctatttataattagaaggtgtttaaaaatctcacctttgccaccaaaggctccaattttgagatgtcaaatctgtactcagaaagaaacctaaatgcaagcaaaataacttgttcaaacacctcaagaacaaactccatttatctaagttatattagagagataaattttaattatgttcaatgacataaattaccttgcttgagcatcactaaacacaggctcatagggtacagatgtcttatcctgtgaaaaaaaaaaagacggattaaaataagaaagagaatcatgccgcaatacaactcgtaagtgaacatctatgatgagttatgcatgtatataaaaaagttagtaaattgcaccaattaagcaattgtactcacctctaggtacttgtatgtagtgctatctgcaggaactataccattctttcctccggcttcgacaaccatgttgcacaatgtcatcctttcttccatctattaaagagaaaatttaacccattagatacatattctatcaagaaaaaaaaattgaaaacaaacaagctttcatgtatgcttgaagtgaatatcttttttacttacacttaaactttc

SEQ ID NO: 8318 - DNA, 614 bp, Cannabis sativa
tggtttgggctcttataaaagatatctatggtttgggccttcctatcataccaaattcactggcctcaaactttaactggacctaaatcgtttaaagagttatttttataaggtaattttagaaaaatgaaaaagatatcatataaggtcactaagggtaagagaggtgatgggttagaaggaactttaagctattgagctaatatatgattgtaaaataccattaccctatactaaaaaaaaaaaaaaaaaggggagtaagggtaactggttacaattggtacctatacttggttttctcatattttttttaattatttcttgaatttttccaagataatatttttgaaaagactattttttttcacaagtagattaaaaattcataaaatttgtaatttccactaaaatcggtaattcattatttttttaacaaaaaaacaaaacaaaaattcgttgatggattgaataagaacatttcaaatatatgtttggtggttagattttcacaatggaaaagaaaaaatgtagaaaataacaaaaaaaaaaaggtaaaaaaatttattcaacaaaagagttaataatatcataaggtgtagtcatgatgtaagaga

SEQ ID NO: 8319 - DNA, 666 bp, Cannabis sativa
tttctacaagactccggccacgacgttacttggatcatctccgacttcgtttgtcactggctacctccactcgccagcagattcaggatcaagttggttttgttttccatagtaaacgccacttcatttgccttttatttaccgccgtcggaaatgggtagcgattaccgcagcaaaccagaggatttcacagtggttcctaagtggtggaatgatatgccttacgacgtcgcttttaagttgcacgaaatggagaatcactggaagggcatggactcagatgtgtctgattttcagcggttgatggaggtgactaagggttgccatatcatactcatcaggacttgccccgacttcgagcctgaatcgcttagtcttctcaagactcttcacaataaaccggttctaccaattgggctgttgccaccgtctgaaccacgtgacgatgaagatcacgagagatgggaagctctgaaactgtggctagatggcaaaaaagacaagtcagtagtttatattgcgcttggttcggagtttagcctgagtcaagaattgatgcacgagttagcttttggaatagagaaatctgggttgccgtttgtttgggtgattaacaatcggccattggtggaaggaaaatttggttcggacataattccatctggg

SEQ ID NO: 8320 - DNA, 1040 bp, Cannabis sativa
cattcaactcaactgtttcattaaaccatttattttttctatacaaaattcttcaaagacaaactataagtttttcaaacatgataatagacatacaatccaaacattcaggaaaaataattcatagctatcccaacacaaaaaattaggtacctaaagattatgaatgatcatctcacgaatagaattgagtttatcacaaccctacaaagcatggaaagaatattcatgccccatgaaacatcagggaaaatcagtgacagcaggaacaccatgcttactaaggttagcataagagggaagccagttgtgagaagctttccaaagaaaatactttacttttgttgggaggttcaattgccaaactatattccacaaaactaatcttaccattagaagtagagtattgcccaaaccctagaagacgaatagagttccaatatccactcttaacagagtaaagacccaaactcttaaagtgccacaccagagtattatgtaaaggaatatgatcctaacaaatggaaagaatagcattcgcctctttatcagaaaaaaatctcaaaaccacaaaattgttccaactcccattcgacatgaatacgaaattcacattagcatcaccaggcaagcaacaaaagaagacttattaccatccacactaggaatccaacaatcattatagagtgaaacttgggattcatcactaatgagtcatcgtccaccaactttaaaaacttccttaccccataaaatagatctccaaatgaaagatgttttcttggatgcatcatcctttaaaagggtagaattaggataatagatagccttcagaactctaacaaccaaagtgtctggagcacaacacaatctcctacagcttgcttagccaacataacttgattgaagatggccggataaattttaaaagtccatactgccatcagacttgtagcaatacagtttctctcaggtacactaagggagcttctttttactcatatttccaccccgccaaaaatgtgcgcacaatctatgac

SEQ ID NO: 8321 - DNA, 513 bp, Cannabis sativa
cataagtgcatccgtctcaatgattgaaaccggtagatcttgttgtaatgctcaatttagactatggaagagtgctttgggctccatttcatgagaagagaaattctcaattgcaggcattgaaagagcagccataacacatccatttgaatcacgaactaaagcactgacaccaattatattgtttttatcatccacagcagcgtcgacattcagtttaaaagtaccagtaaggggcggcttccatggtgctggaacagggatgacttgtggaggtggtagcgcttgagtttgagaagcttcaagatgatacttgttgttggctgagtgataattctggcagtagatggatgcaaaagaggctagatcgcttgctggttttgctctttgtccatgaacaatcttgtttctttagctccaaatcgaccaaagtgtacaaaaaatatgttccatttcagatttagagtgaatgaaatggagatgcagcagatagttgttggaattaattttacc

SEQ ID NO: 8322 - DNA, 2376 bp, Cannabis sativa
  modified_base (1967)..(1968): a, c, t, g, unknown or other
tttttttagcgatggtcccctaaaaatagcatttttaggaccgtcgcagattttgacttttgtaatagtgtcagcatataagtgttaaaccttaagttccatttcctaggtgcctacttgatgccataaagagacttcttgagtagacatacctcattttgattcccattgtcaaagctctcaggctgttgcgtatagatttcctcttctaattcaccatgtaagaaagctgttcttacattcatttgttcaatttctaggtccgtgcttgctgtctttgccatcatggctctgattgaagcttgcttgaccactgaaaagaaaatctcattgtaatcgatgccttctttttgagtgaaccccttgacaactaaccttgccttgaatttgttaggttcattccctgaaccttctatatgcttgaaaagccatttacatcctaccagcttgagaactcttatttcttcacaacaatccaggttctattcttcctaagagaccgcatctcttcttgaatggcctgcagccatgctgcagcatctttacttcacatgtgaaagctaatgtgttctgaactatcaacctcttctacaatcataagtgcatatgcaatgaatttagcataaccaaaacgatcaagggcttttctctatcttctctctctctctctatctctaactaattgaaagttgcttagttcctgctgatcttcattatcttccccttttgttgtctcagttccatctgaaacaacattagttggtgatgtaagagcaacctgctccacctcaatctggacatcctcatcttatacagcttcactgtctttggaagtgctcttggtttttatggccatttcatcttccttgaaaataacatctctactaatcaaccacttcttgaatccaggttctaaacactgcactctatattcgttaaccccttgatggtagcctagaaacatgcatctcaatgctctaggttgcaacttatcttgtctaacatgcacaaatatagtacatccaaacactttcaagtgatctaaatttgagggtttacctgtctataactcttgtggggtcttaaaattgtttggcacagagggtgatctattgattaggtaacatgctattttaagagcttctccccaaaaggttctatccaaaccagctcctaataacatgcatctaaccctctccatcaatgttctattcatcctctcagcaacacaattttgctgaggggttttgatcacagttctatgtctcttgattcccatttcctcacataatcccttgaactcatttgagcagtactcaagaccattgtcagttcttagtaccttgatttgattcccagactggttttctagtaggctcttccatatatcaaaggttcctagagcctcatctttgcttttcaacaaataaacccacactttcctgatgtagtcatcaattatactcataaagtagtgtgatccacctttggttggaatcttagatggctcccaaaggtcagaatggaaataagctaaccattctgtggtggtgtgttctgccttgctgaacttcaatctgcaagccttccccaaaacacattcatcaaagaattcaagtctttctattagctactctttgaacagtccttgcctattcatttcctcaagtctcttctgacttacatgccccaatctaaggtgccatagacttgcttgactgtgtttagttgagtccataacaagtgttgcacaacctgttattgtctttccatccatgaaatacaattcattactcaaccttactctcatcacagtttttgtgccttgtacaattttcattacaccttcctcaactttgataacataccccagtttatcaaacataccaatagagagaagatttcttttgagatctggaacatacctgacctactgcaaggtcttcatgacttcatcatgattcttnnacaagattgttcccacacctttgatctcaaatactttgttgttcccaagaagaactatgcccccatgactctctaaaagagtcctaaacaattctttttttagtgtcatataaaatgaacaacctgaatctagaatccaatctccacctaaatatgatctagacatcacaagtgcatcagatgacactgcaagtgcatcagatgactcatagctatcagcaacattagtaactccatgcttcctagacttgtgatgatttctctctttagtttaaccttcaaagccaaataataatctctaaagtggtcttccttcttgcaagaataacattgctttcctgcagctccattagagcttggccctccagtggagtttctagaaacggatcttgaatgattacctttgta

SEQ ID NO: 8323 - DNA, 936 bp, Cannabis sativa
ttttacaacttattaggtatttattaggtggactttaattgctggaagaattcctggaagaacagcagaggagatagagaagtactggagtacaagatactccacaagcgaataaaaagtaatgatatgaaatgaaagaaaggaatatatgtttggtgtttcttcatattgtggtgaaatttttggaggaactgttaggatcaagttttggtgttacttcatattgtggtatctctaatatttgtagtttgtatgatcatatggttcttggtatgtaaaatgatgtaatggttgaactttttcttcatcattgccacttctaaatctcttctatgcctatgtgaatatgttattaaaattcttttataatttgcaacaagttttctctgttttttttggggggtagagagatgctacctaattttgtttgatgctctttgctttcttgtttttgttcctacctagaatcgagtaaaacgaggcaaaatactagccttcactagctatacctgtgctttttttagtgaaaatatgaagaaaaatactggaattggctatatattttaggagtaatgatatctgattaaatattgtggcacttaaaacaataatgtccctacatagataaatgtaaaaatcgttaattaatatttaggtgtgcacatttcagtactctatttatattgagaatcatttttgaagactactgctgaaatataaaatacaaaacattgataaaatctataatcttaaagcatttctagtggagtgcagaaatgtattttaaaaaatatgttaaaaattatattaaatttaatataaaataatatattattctgtcaaatttagtatataataacatgttaattttttatttttacatgatgtactgtttcttttttttaatttttcacttttatactgtaacgcgtttat

SEQ ID NO: 8324 - DNA, 591 bp, Cannabis sativa
cagggttcattacggcctttaacaaggctttctccatcatacttctctttctttttagaaggccaaacagacttgacaaaagtatttccagcatgagtactcctaatatcacaatatggagaatctgtctcaatcattagtttctctattggaatgtccctcacaacatcaaggttttcttttgttttaagagaacaaccatttacacctgtttcataccagaagggcaaatgagaaaaagtgatatattcatgacgaccatctgggaccttaaacgggtattaaatgtgtaattatatgagagaatactccaatgtgtacctatatacatatttttaaaggaaagaagtttgtctctgtcttctgcactgtcagtaaatgaatgggtgaccccagaagtgaacctacagaagagcaacagccaaaaaaaaaaaaaaaccataaacaccatatttgcaattgccattacaaaaagtaaaaaaaaatgtttgcataaatctatcaggaaattcaaataataagtgatatgatgagaacctgcaactcagttaacaacaaccagcaaccaaactacacacagcagcagtaagg

SEQ ID NO: 8325 - DNA, 866 bp, Cannabis sativa
tggttaagaatcaaaataaaactacagagactttttacttgggaataagtattccacattagggagtctccttgtccaaaagatggagtggcaagattattattgcatttgaattggattttgaaagatttctcctttggacagagagactgtctaatctgagagtagggtgttagcccaaaagaaagggccacttgtgaaatgtcagtttgtcttaagaatctatccttcgtaaatgggtctttgatgaaattagaccaaccaaattacattattgtgcttcataatttaattttgatgataataatatttaagttatattttttaaaaaatttatagatacgtcaaattttaagttaatgaccaagtaatcattcttgatatattcaagttattaaaattttatttttcatttaaaaattaatttaatataccataaaaaatgatatgtgaataatataacttgacatttaacttttaaatacttacgaaattcctattaatataacttcaaaaattaaacttaaatatttaattatctacaactaaaaattagatttaagtatttacgtcacaaattatttcagaaacaatttaaatatgtttggttaattattttaacacgactctaagttatattatataaatgatttggtgttttttaaaatatatttatatatatatatatatattgtacagctctaaatagtattacatcatgtagtttgtgaaaaaataaatgataaaaacttaactaattttgtttgaatttgattgcaaaagagaaaaaaaaaatcttaaggactgaattatcaaagctatctatgtgctaagacctcatcatattaattttattatataggatg

SEQ ID NO: 8326 - DNA, 760 bp, Cannabis sativa
tttgccagcgcatttggccaaatgttccagtaaaagttatcggtgaaaggggatcctaggaaatggaaatttatttgggcattacttttaccagcgcactattgcgtcggtaaaggaaacatataccaacgcaattcaaaacctagaaacttaatagccatttggcacaaaaagttttagtgaattatttacttttgtcggtgcataaatgcgtcgggtaaaggtcccaaaaattagagggaaatttcccgcgtgaaaaaatcttttggcgacatgctaaggcttttaccagcacatttatgcactggaaaaagtcttttttggtaggtgggaagtttcccgcatatttttttatcagaggaaaacctttttatcggtgtatctttgcattggtaaaaataaaagtgaaatggtgcttaggcttttgctgacgcatatatgcaccgaaaaaagcctaaaaaaagttggtggaaaatttttcgggtgacttttcggtgaaagggtaacctttactgacacatatttatgctggtaaaagtaaaagtgaaatgatgcattatattttttgggggatttttttcttttaaccggcacaacaaattgcgccggttaatttttttgaaataaattggggaagacgatccttctttcccattttctctggtttttgaagctctctctcccctccctgattctcacacacactctctctctactctatgttcgaatatctcactttctttgttctcactctttcccc

SEQ ID NO: 8327 - DNA, 774 bp, Cannabis sativa
ttttttttttttttttaatcttatttcttcgatatttttatcttcttctattttaaatttacaaaaataaaagataaaaaactaaaattactccaaacaaaataaaactaaattaaaactactctaaaattaacctaaaaatagtactaataacatattaacacctatacaaaatacatatactaaaatattacacgataatatctaatataaaataataagtgaatttcctgacatactttttttattattaaaaataaattttgtgcataaaatgagtcgtttgtgtattttgctatcaatattttggtgtatattttatgttccatgtatttaattttttctttttgacaaattttatttattagcctttgtatgacaaaagcattgggaactttgctgtcacaacagcgtatagcaaaaacccacaaagataagggcaaaaaaaaaaaaaattgattggaaaaaaatgaaaagagcaacccaacccaacccaccgctccaattttgttttctttcaaattgtccttttgtatagcttcttctgtcgactgaaattgaaattttgttaaaagcttttctcacctatggggctaagagaatcaagaaaagaaatcattatgcattacatagcaaaagataaaaagaataaatataatgaaaggaaagaggaaagataagttcacttcctagagaggttgtataaagtgattaaagtaaaactgattgattagcagtattattattattcagttatcgttaaggatgaccaat

SEQ ID NO: 8328 - DNA, 566 bp, Cannabis sativa
tgacaagttggtttggagttgttactcctaccacctcctctacctctaaacctaccaggacctctgcctcctctctaatgagttgagttgccacaatttctagtgccaaatttacctgtatggttgcctctatttctaaagaagttgggatatttggttgcaacaacattagcagttggagagaagagatttagattttttgtcgctcctagcagtgttgttaacctatcaagtttgttattaaagctcaaaataatatcctgtaattctttccaggttgtagacattctagattcaacttgaagcacaatgggtagatactcaatatcaagcctagagagaatatttgacaccaatggtttttttagataggggttacctactagggccaaaacatcagcccattgacatttttgttgaaggtagtcattcgtggacatctaatttcacgcgagaatgagccccaaacaacgtctccaaagcctgccataagcttaaagatgagttacgatccattacttcagtggcgatactttctattattgatccatagagccatcctagta

SEQ ID NO: 8329 - DNA, 550 bp, Cannabis sativa
tctaaggcacccacttgatttgttgttgttaaaaaaggatttctttaaaatctccaattgctagccatggttgaaggggagaaatatcaacaaactgttttaaaagtgtatatcaatctactttgttttgaacatttggagcaccgtacaaagactgtaaaatgaaagctagcttcaccatctgccatcatataacaatcaaagaagttatgtccataattaagaagagtaacatcaacaccatcatgccaaagaagcattgtgtcactactgagaccaatttgaggtgattcaagaccaatattaagattaagggactgtcgaaaacgggaaattgagttaatatgaacttttgttttcataagaaataaaacatggggtgattgttgtttgacaagcaatcgaaggtgtttgaacgcattcggattccccaaaccctgtgtattccaactcaatatttttatgatgttgcaggattgcaatgcaatctccgttgagttgttaacaaacccatctaaatccatgccatcataggaaacaaaatgactag

SEQ ID NO: 8330 - DNA, 850 bp, Cannabis sativa
ttactattcagtgcttttgaatacctatttttttgcaatatgtatcaaacacatcattgcaaaactgtaggccactatctatccttagagtcttgatctttttgttagttagattttcaattaagactttccattcctaaaacttagtaaatgtatcatttttatgttttaagagaaatatccaaaccttcttatagcaatcaccaacaatagatagaaaataactacaaccccatgggtagatacctttcaggatcccataaattagagtgaatatagtctagtatgtctttagattatgagttccaaccttaaatttaaacctatgatgcttaccgaatatgtagtgttcacaaaaatccactttacttactttatttttgtacaataggttattatgttccctcattacttgcaaccctctttcacttatatgtcccaaccttctatgccatagggtagccttagaatctttaggtgaatttatgctgttttgtgatagcttgaaactaattctctcattaggtagtagagacctccttctttatagcatttcgttatggtcatggaatccttgataagttttattgtacttgtttcaatttttctcgcaataccaaggtcatttagaaaactaatgacactaagggtaaagaatttggtaacttaccattaaatcaaattacacaattcatgtgaataaatatattattaagtatataattgatgatattaagggtctcataattttaagttgccttaggcgcgccttgttttcttaggcacaaccctagtttttagttgagccttggacaatcacggttggggctggagagagagagagagagag

SEQ ID NO: 8331 - DNA, 2164 bp, Cannabis sativa
aaaaataaaaataaataataacaccattaatagtgtataatttgatggataatttagtgtatctaagtaaaataatttaaaatctatattaatttggtaaaatgatgtaccgttggagatgatttaataaatcaaatttgtgaaaacaagtccgtcatattttcaaagggcaacgtttaaatttattttattttattttcgattaaaaaaaagcattttaaataataacaatgatgtgtttcaaaataataataaaagataatgcaaatcaataatagaagaaaagctttcccattgtgaaaaatatataaaagcatttattgaaaaaataaagtaaataaattacaagaataaattaagcttaagccaaaatcgctctggatccctattccctccatagtttagagtatagaaatacaatacaaagactagagaagaagagagagccctccctctctccctcccaaaacatcttctacaccctttgattctggatccacccaaccttcttcacctactgcttctaggtctcttcttcttctcccgatttagggttttatttctcttctttttttcggagaaaatttcttcgctctttctgctttaggtttttcttcttttatatacgcataatatttgtatatgttgaattctcacttttgctttgttgttgcaggttgtttctcttcactgcgtggtttctggactgttttaaaagatggtatgttactctctctctcgagaaataaaaattactctactttctgtttggtttctaagaaagtaaacgaaatctaaattctgaacaacagtgtatttattaattggctcttgtgtggttttgatggtattttcattactaaacaactcgagtataagaaaattttcttgagactatttgtttttttttccttaaagctaatttttttttttgtattcgttcacctaataatgtccaatgcttgatgccctcttttggtttagcagttcttaatatttttgtattgacctttttaatgtttcactgttttcagcttcctctttctctgcttaagacagcccaagggcaccctatggtaagatcactgttccttttgtagaattttttgaaagcattgtttactcattataaattgttcttttattttgaattaactctgatgagtgattctctttcttgtatatgtgataaaattagttggtagaactgaagaatggtgagacttacaatggacatttagttaattgtgatacatggatgaacattcatcttcgtgaagtcatttgtacttctaaggtattatgccatttaccattacctttatgttgttttgttgtttatcaatatttttaatatttttagctctttcacatggaagggattagcttcttacctgtcttgaatatgaaaacatttaggatggagacaggttttggcgaatgcctgaatgctacatccgggggaatacaattaagtatcttcgagttcctgacgaggtatgcttgtttttatttttatgctatattcccattaatgcaagctttgtctcttattcccatgaaaagtttgttctcatgttatacggatgctgtgttgatatgcttatttacttgggtattttggatattgtggatgataagtacattaatattcgtcaccgcttgtttatttgtctcttttccgactttgaaggaggcatatttttcgcactttatttgttctcggcttgtagcctttatgtttaaaaaaggaattcttgttgatttgattgatggaactctagttgtctttgcttttcaggtgattgacaaagttcaagaagaaactaagagtcgatcaggtacatgattatgtgattgtaataagtagttctacaacactttactctatctttgcctaaatatatgcagctttcaagctcttggaccctatagattattttttacttgacacaaagttatcatcttctatgttttcagataggaagccacctggagtaggacgtggtagaggaagaggtagggacgagggtccaggtggacggcaacctaaagggattggccgtggactagacgatggaggtgctaaaggccctggtggaggccgtggcaggggtggatctggtggtagagctggtggaagcagaggtaaatatactaatat

SEQ ID NO: 8332 - DNA, 540 bp, Cannabis sativa
taccacgtccttggttcccttagaaccttttgttttggcttgagccaccagatgtagatggaattttctcttcagatcattgcttaaatcacaaccaaccttgcataactagaggtaggaggagcagtggcttcaccaacaatctgagtccctcaagactcctgaacacactcaactgcgccctcaacttgcaatgcctttcctacgatatcaacttaagtagttgcatcatccattgtgatcatcaaatcatgtttaatataggaattcaacccatccatgtatttttctttcttgtcaaaatcagttggcagaattcctaaggctaacctagccaatatatcaaactgtgtcgtatactctgtaactgacatattctccttttgagtcaactatgtgaactcttttgtttttacactataggcagcctcattatagtacttcgtattaaacaactcttaaaattcttcccaagtaattctggtgacgtcccgggtgagggataccataaaccactctattgttgccaatgactccaat

SEQ ID NO: 8333 - DNA, 589 bp, Cannabis sativa
gttacatatgaactggtgcctcggctaccgacccttcttctacaacctccttagatgagtatagcccatatcgaaggaaattctcctagtagccaacaaagagatgttttgtgctttactcgatatttgcaaaatggttaaggcccttgtccttaacccaagtgtgaaaggaggttggtcgtaaattttgactcactgaaaagataagtggttggcgttcatcccctgcactatgtaatagtctttaatgtacacacctatcttctagacatccttgtttgtcatgctagttagcgaggagcaatcaacttgggaaaaatagcaaaaacctgagcggtcgttcactgggatagatttcgtgtcaaataaccaatttgtatcatgaggagaaggcgcccccatccccattccgtatacaaaaaatacatccaaatacttgatccccttcaaagtaaactgcgtcgggcagatcttgtagtaatttgctagcttccaaaagtacagataaaggggtaaaagagtccactatttggcatgtgagccaaaccacgcaaaagaacatccctagggtcattagcaagttggtcat

SEQ ID NO: 8334 - DNA, 539 bp, Cannabis sativa
acggtcactgcagtaccaaaacacaagtagtataaatttgggagtagggacatcccttaacatttttatttttagagaattatagtacattgtaattataggacacattctatctattttcaaaaaaatttaaaaatttacaatggtgaaaacagagttctaacattcactgtacacgtgcaactaattatttgaacattaattttgacatcgtaatattcaatatttctcaaaacaagtgaaatgtctgctatactataatgtaaactataaaaaaaattgattataatttttttcaatgccgaaaaatatagatgtccctcctgctgatatgtacaaaagtagtgttcctactatagttacattcaataaatttatatctatatctaattaattataacattgtcgtttttgatccaatgaattaaaatagtgaaaataaatacaagtttttttttaggttcaaaattaagacttgaggaaatgaagaaagggggttcacgtgcatattgattatatgagaagctgaaactaaccca

SEQ ID NO: 8335 - DNA, 677 bp, Cannabis sativa
agagattgtgaccaaaattactaaagttgtgtttggaagtaaaaatttgatagggaaagaaaaaagtgaggaaaaaaatgtggaaaggaaaaaattctaggggctatattggcttcataacttaaaactgttttcaatttttaaaaacagaaaacaactttcaaaaactaataagagaagtttggccaaatatttaaaaacaattttttgaaaactgagttttaaaaaattacaaaacaaaaaacatcaaaatattattttctattttcaaaaatatttttttttgtctaacataattttttttttttacatttttgctcacatacttggacttggatctcgaatctagaccctggacccgaacacggatctagactgaacctggactaggacccaaatctggctaatacctggatccgaacttggacctggaccacggacccggatggacctcgagatcccaagtgtcgtacacaaccccagccctaataattttttagtctttgaagtacacaaacatatattttgtttgagataaaactcctacatatttaaatttttatttaattttcgtattattgtaaataaagaaatatctctcaggatttttggttgtgagtcgtgtatggtttgggtggtttgaaataagtatcaataatttttttttttgtactttt

SEQ ID NO: 8336 - DNA, 1137 bp, Cannabis sativa
gagcaagtatgtctctcttgcgacgagtaaagatcatttcttcatataggtttggtccgaatgactaatttgttcgatgactcgttagggactcgcatgttccaagttgccaatgcatagaatgtccgacaatgcaatcaagggtgaatgtagacactaaatgaaataggcctaatggcccatcctgcgagtacgacatcgtagagcctgcgagctcatctatttagaatatgcatagacaagctacaacttatcaagtcgcatacattgttgcaattaagtaagcgacaaaagtgttctttattaattctttaaatgtttatcttgatttaattatgttatttattgtgaaaacaatatgatctgatcgattatgtaatcttaaaggacacttactttctttataaagggatgatccaaaataaataaactacgctgaaactattgcctaaagtggactaagcagactaagttctagctaaaccactataattctcttatcttctcaatgttttgctttcgttttttatttatattttgtagcttacactttgagtacttgctattctaggtgagcactcgcataactcctagtgagtgtccttgctatgcttgaatacttatatcatttggtattgtctaaatttctcccataatatttggcgtcgtttgtgggaaacgtaaatatatctaagatttttggaggagaatcaaaatgaatacataatagaaaaacacgaacaataaccgtgaaactatcaacattagcactatcaattttccaatttttagagggggagcgacccccattgatgttgttataggtggagtagggcataccaatgtgactcccttcaacttgtttcctcaattttcaggccctgttgaagaacctaaacactggcagctactatgggacaatttccactaataacacatgcttagcctcagacggcatcatccaactaacaacttcgcaatacttgactatgcattagtagatgcatgcattataggcaaatatcacaggaagagatcagattagagattggtgtccaccatgagtcccaaaccaatgtcgttctaataatcaggtaactaacgatattagacgttgtaattgttggaattatttta

SEQ ID NO: 8337 - DNA, 585 bp, Cannabis sativa
gtctaatatatattgacattttcaaacacccatttcacaaagaaaccggcccttaaatttataaacaacaaactacactttcaattaattactaaaaatttatttatacatatgtttacttcaacaactagccaaaacaatatatatcattttacttttttttttcttatgccaaatatattaaaataatcttatttcatttcattgacttgatctctctttaaatataaatatacattatatataataatccctaaaggtctctctaaaataaacaatgccttcattattattacaattatcaacaaccaaagtctcttctaattctcttccttttctagctaacatcttcaccgatcaccgccgccacgtcatcatatcaacgagatggcggaaccatcggactacaacaatcagccgggaaagtcaccgagaaaagaactccaagggccacgtccaacacctctaaagattaacaagggttcacacaagatcaaaaagcctccggtggtcccacaaccgtcgcaaccgcccgtcgcagctcatcatcagcagccgctacgtctgcccgtcataatatacaca

SEQ ID NO: 8338 - DNA, 972 bp, Cannabis sativa
taacttgaacaagtctctgaagtatcttttcacacacaaaataaagatcaagttcaatgtgcttggttcttgcatgaagaacctgatttgttatgagaagaacggtgttgagattgtcacaccatatcataggaggtcgtatagtcttgattcgcagttcagtgaacaatgagtgaatccaagtgagttcagcaactgtactggcaagacttctaaatttttcttccgtgcttgatcatgatatggtgtatttctttttacattgccaagcaacaaggttatctccatagaaaatggtgaaaccagaggttgaacgacgatcatcgatattagtggcccagtctgcatcacaaaatgcaacaacttcttgtaaagaagacttgttgagatgcaaaccatgattgattgtaccacttagatatcgtaaaatcctcttcacggctaaccaatggcttaattgaggatccttcatgaactgacagactttattgacactgaaagaaattttaggtcttgtgatgaggaggtattgaagtgcaccagcaattaatcaatacagctgagggtcaggagttggttcactaccgtatgctgataatctactaaccattggggtaggagatggtttggcatcatgcatttgagctttaaagagcagatcccgaatgtattttgcttgggtgagatgtaaacctgaagatgtaggttgcactttaatgcctaagaaatagtgtaaatcccctagatctttgagtgagaatcgactgtcaagagcaacaaccaaatctttgattgctttattgttgctaccagttacaagtatgtcatcgacatacactaacactaaggtagagtatgtggaagtgtgttgtatgaaaagagaatgatcagatttagatggaacaaatccaagttgtaagagacaatggtggagcttgtcacgggggggcttgttttaagccatataaggct

SEQ ID NO: 8339 - DNA, 578 bp, Cannabis sativa
acgcgaaaatcattctccaaagcccttcttatatatttttggaaatcaaagttggttccttcatcaaaatgtgcctagaagatgttcgtacgataatataatttcattaatctttataaatttataataatacttaaaataacataagtacaaccagagagtataactggtgattgggacagtagataataccgatatgaatccatgtcttagagtcaaataatccacctttgatacagatttatagaattgtctaagaaagcagatctgcaatttagtcaaaattttattaaattctctttaatttaataaaagtatattgaatatattttttttttgaagaaatattattaattatttagaagaaaaattggtttgatatttaattaccggccaccgcagaattcgatgttggctccaatagtgcaaatgcctcttcccaaatgatgtttgatggattagcttaaaccttcgtggatctgatttaaattgtagtcatttaatttaattaattataacaacaacaacaatacaaaaagaaaaaaaaatatattaacaatcacaacagtggaggaatc

SEQ ID NO: 8340 - DNA, 769 bp, Cannabis sativa
tttttttttttttttcatttcacgatggtgtgtaacttccgtcctagtcagttattttttttaaggataattgtgaaaaaagttccaaaaaacttagggttaatacaaattaatttccaaccttgaaaattagtagtaatagtctccaatgtttcgtaagtctgtaggtacctaattaacagttctgtttgttatttttaaatttttcatgtgttaaaagtttagtggtccacatcataaatattatttaaaaataaaaaaaaattctttcttttctatttcttattttcttatttttcttattcttcttctcagttgcccatacttgactgttcaattggttaccaaaaacccaccaccctctacccacgatatgttcatcaacctttctcctgggtttcatcaacttctcaactaaatgatatcagtgaaagtttcaagagtttttgagaggttgaatcccactgtggggtgagatctcatcaacttgttgtaactgtggccaaggaagtagcagatgggaggtttcatgatctggaacgatgagattctatcatcaaagatttggtttgtaggtgcttaacagagatggatgaggcttttcttgagctgcgatttcttaagctgctatggaggaggcttgtcggttgagaagttgcaccatggaagagattggtgaagcataggcagagctgcagagggaactgtggggataaagtcacacccttggggttaacgatctgccatctttcttttctctctctctctc

SEQ ID NO: 8341 - DNA, 545 bp, Cannabis sativa
taataagaaaataataaaatttaaagatacataggcttcttataacttatttgtgaaatttttttctccaaatggtaagagcactccttaacatacatattcttttatttaaagagtagtcatttattgaattcattgacctcctatatgtatttgcagcatatatacaataaaatttaaattgatatattataatttatcgtaattaaaattgaaaaatataatatatatatatatatattagaaaataatttcaaaaaaaaagagaaccaaaacgtaagtgatgataaaattaaaaaagctaataaataaaatattattttttaaaaataaataaaataaaaaatgagtgaactaaagagtgaactaaaaaatgacaccaactttatatcaaaagtgttggagcatagttgtgggcgatgttattagttgtgtttggaagttttttgagaatggttccttcgagaatggttgtagtgaagctaatgttgttttgattcctaaaaagaaaaacccagatggaatgacggatctcggatctatag

SEQ ID NO: 8342 - DNA, 790 bp, Cannabis sativa
tcaaaacccatcaacccaccaaataaaattcaattgaaaatccaaactttaagataaacaagatcactccctcattcactcatcaattactcatactcatagtataaatttcaatatgatcacctatctacaacacactaatctaaatacaattattctcaaaaacaagtagcttttattttagttttaatttcaattcaacaagccaaaaatcaagtactaaaaaaacccaaccttaaacaactcataaagaagaaaaccctcttaaatcacacatgtttaatcattcaaaacccatcaacccaccaaattaaattcaaataaaaatccaaactttaagataaacaagatcactcactctatcaaatcacagatccccaaattgaaagaaccataattacacacctgcagaagagcccaccaacaaaatcctttgcccagatagatggtcacgaacccagttacaaacagcaacaacatctttgatttcagagaatccggtaagagaagctcttccggtggattttccggcacctctagaatcaaaggtgacagctttataacctttatcagctaaaccagaagctattcctctcaaaagggcttggcaaccacccaatatagaaaaggggtgaacaagaacaacaacaaggctatcattatcttggtggtctttgttgatctcttctttggggttaaaaacctttgcttggagttttactccatcactggtttctactgtacatgaatcccttgtatggttagacatgagagagaatagaagagaaga

SEQ ID NO: 8343 - DNA, 1043 bp, Cannabis sativa
gataatcaggatataatataaaggctttagtaaaaatatgagttattatattaattgattatttaacaaaattaacagaaatattgtgtacatcaacaatgattaaacttttacaatcatttatcatttggccaaaaatagaaattatctgaatagaacttcgcaaagcttgtatagccaccaagcaatcagattcaagagaaacatgttaatattaatgacctttaatctagctaagcacttcatgtatccccattgcctcagttaaattggtgaaactgactcatgaatgagctttttgcatccttccaataaaaaaccttaaatctactttttttttttctctgaaattattctaactactcaataaaatggattaaaaatgagttaacacaagcataatacaattatctacgaattggaaaattagatgaaagtgaaaaataaatcaaataaaatataatacatatatatgttgacacttacttttgctagctactcatattattatatattgctataaaatagttttatttttttcaaaaaaaaaaaaaaaagcatgatctgtccatatatgtcttatatagtattgcaagaccatttaaatcaaatgtcatcaggattcaggataggttggttttgccagcatacaattgcgtcggcaaatgctaaggcccttcgtaggagcctctttatgctagcaattttgttggtgcatttggccaaatgcgcccgtttaaataatatttcttgtagtgtctatattatgtgcatttacgctatagaattgtaatattattttatcaatatcattatccttgtattatttttgttatagagttgtctttctagatttggtatttctattgaagcagaataatttttcaaaaaataaaattgaataaaattagataaaagttcttgaatctaacaatcttaattaatagtttgaaaacaaaaaattaacctcttgaaaagttaacgggtacgatttgttgggaacagaattaattcttaattagtctaatatatatatatatata

SEQ ID NO: 8344 - DNA, 691 bp, Cannabis sativa
tgtatctcttgttgtaagtaataaggaatgtcatatctcttagttgtcccaatcttcaagatccgagaaggtccctggatatgacagtcattagatttgaacatggtgttggagttgttatgtaataaagcactaatagataacaaattgaaattgaaggttggtacatatagaacatttatgaagaccaaatgagaattgagtatgacagtgccaattttttttttttttattattttaactaaggtgccgtttggtaaagttatagttttatgacttggagtgtgtgtgaaagtgttaaaatatttcatgttacagcaaacatggtgaatagtaccactatcaataatccaagaattaaaggagagaggattgatattactagaaaagttgttgacacctggtgtatcatgtgatgtaaaggcatatgttgcaggttgcaactgttgtgttaacgtataaatgatctgttgacattgagctggggtgcgctgagattgtttggcatcaatattgggattggagacttgtacaatttggggtggaatctgtgtgttggagtgatctggtttgcgattgttagtgcttaaattagtagacttttatgttaccataactaggagggaatccatgtagaaagtaacacttgtctttgtaatggccaaaattttggcaatgtgaacacatggga

SEQ ID NO: 8345 - DNA, 602 bp, Cannabis sativa
cagttttttgctaacaaatacaaccaaaatatttttttacggtaatattcgttatagttataataccatctttataaatttttgaaaaatattttataatgccgagaataagtttaaagttttttaaacacatgtgatagactcaaatatcattaattctgttttcggtactataaactattcaataatttaaaaaaaaaattaaaaataatattataattatgacaaatagatttatgaaaaaataaaaaaaaaaatattattgtaatccctaaataataaaatagttacatgtagatatatggagagagaaagtgtaagagaacaagtgggcccacctatggattttgttgtgttgtaaacattacaagaataatgatataatatctatgattccatacttcaaacggtcggatccgtcggtgcatcccattcaatccaatggccacaattgctccacttcttcatccaagtgcaactataaattcatcccaattccttaatacaataaattaataatcattaatgatagagtaacctttcaaataaataaataatagagtaatagtgtcaagtaattgaagtgatatattcttattaaa

SEQ ID NO: 8346 - DNA, 586 bp, Cannabis sativa
gagaagttaagggtccatgcatgttggagtgacttgccaaaggctgaggcatgtgaggttgagacggtctagttgaatgcatatccactatcttgttgtcctttggcaaatgttctttagttggaaccttttcactaatgtgttgaacttgcttttgcaatttaattatcagtccctctaatctttgtatttcatcagcagattgtagagtacgtgcatgagtgtaacgggaagaggatttacgtttccatatgtggccccttcctccaatgtaaccactcctctcatcaagcaattttttaagtttttgaatatgatcaacattaggaagtgattctgtattttttccttttccctcttctgatgttagctcaataccagagccttttttcttgggagcaattgattcttcttttgattttgaataaccaaacaaatacattagtatacacattttaattactttgttagtgtaattaaaatgagaaaaaaaaaatacctgaagactcgcacgtatttggatcactagtaggatctgttgggtccttgccgctaccatcaacactgtggtagcttgcaacatctg

SEQ ID NO: 8347 - DNA, 1031 bp, Cannabis sativa
ttttttttccccccaaactattaccactattaaattttactctttaaatttgtttgctagttaaaaattaattcctccaaactattaccatgtcgaaatgtaggattttttgttaagttttatctcattgtttaacaaagtgttgatatgactagtgtcttattgccacataagtgtacaattcgataaaactactttaaaatttaaaaaatctatcttcttatggaaaaataataagaaaaattaaaattacttattatttattcatatttagttagaaaataaattttcaaaattttaaattgcaaatgtagcactgctatagtgaagaataatatcagcatttttttagtcaggtgcgattaaacttaacacactactataaaataggctttttgcattggtccacgccaaaaactgatgcaaaaaagtacattaaattttttgtcgatttgggaccaatactactttccgtcagtgtattacaaacacaatgttgcgactattataaactgaagcaaatattataaattaaaaaaaattccaaaactaaggcccatttacactaaaaaaattcctcctatgtaataaacattataaccctaatcctaaaaattacactcattgacccctctctctctcttagagttatgtcgatgatggagccaacccgcatcgccgcgataaagaccgtctaattttaatatgtattattaaatcgggtttaattatgagattgaattaataattatgatttttatatttgtggagacttatttaaatttagcatgtataaaatatgctatttatgtaaatttcttgtttttccgtgtttgtgtcaatatcagtggaatgcgatgttgggctattagagagtcaagttttcacatggtttagaatggtttattaaagaagcatcattgttaggtattggactataaggaattcgacgggacttggaaatgagcaaattaccctttggtctcattagtatatgtgttagtggtcaagggaaaaatggtcattatggt

SEQ ID NO: 8348 - DNA, 686 bp, Cannabis sativa
tgtagtgacctaactttacaaatatttactttacttgtatttatttaattttttttttttatgaagagaaatttactttgttttgtacttaaaaattgtggaaggttgtcataatttttgttgtatagtgtttgatttacttctttaatggaccaaacctagctagtacctattttatacctcaatgggttcttaatttttactggaacgagaaagttcattaaaaataatttgcataatttgtaagttggaaggttctcttggcctggaaggtttcaatggtctgattcgattactggtttattggacaggatcagaactaaccccaagatttacaaggtcgtacgtatatatcctcaatgcttattgttgcaactttatatcaattatggaaaaatcgtaatagatgtgtgtttgatcttacttgttcagttgttaaaagtgttagtttggaagttaggaatgttgtccagcttagaatattaagcaagggtccctataaagattgtcaaaaaaacaaatatgctcaataataggatttttgctgttgctgtttgtttttgctgcagcagtttgtattattcgtttgttttgttttgctgagttttgaataaaattttcctgtttattcaaaaaaaagttatagaattaaattgattggagttaatgattatgggaatgatcta

SEQ ID NO: 8349 - DNA, 721 bp, Cannabis sativa
tgagccatgggatcttccaggtatgcatctctatacatatacattattattattactgaaaaattgggattttccatgactacactgtaaaactgtcttggcaatactaagaagaatttatggatatagtttgggataataatatatgaaattaaaataagtctatagtttgtggtatttatcaaattaatatgtatatatattctaatttgtgatgattaaatctttatatatattatacaacaaaaatatgtatatttttttattatgagaattaattaattttgatgatctatagttatggttttagtggacttttttatttacagaaagagaaaacagtggactttaattagaaaattaattattggaaatcatatattgcacgtaaaagataagacactgtacagtagtattataatattattactttccattatttgtacataaaatgattcaaaatatatagatatttttctaatatgtatctgtaaaaatttattaatcttgcatatataattatatcttagagatattattaataataattatttgatcaatttaattaagaaaatattttttttgcatgcatgtgttcgtgttttcagaaaaggcgtcaatgggagaaaaagaatggtatttttttagcttgaaagaccgaaaatacccaacggggcttcgaacaaacagggccacggaagctgggtattggaaaactacc

SEQ ID NO: 8350 - DNA, 1157 bp, Cannabis sativa
  modified_base (606)..(611): a, c, t, g, unknown or other
gacggtcaacctcttctttcccttttaccagatgattgaaagagatcctcaacattcattattgcgagataatacagtgtgttagcattcattcaaaaacaagtaaaaggggaaattggggcataatctcctgcctaagggatttaccataatcatgagaagatgaagaggaaggactataatatccactaaaatcccttcatctcgtgatcctgaatatatcaaaggaattaattggttctaaatcccagatcgcatctaaatgactttcctatccagcatggtcccgtactgctcggctatcccatagtatgagtcagtacagctaatttagacgtggaactgtggttaccaactttcaaacctatggcaatgcgatctatggggaggggattccaggtgtagaaattataacgactatctcggaacgatactaaagtgttacgctcggccctaagtactatgggtgacaacccacattgattaccttaggatgctccttcttcggcttctcgaggaacggcgttccaaagatagtgtgcctgagccacgcgatcttgagcttcctcatcggctgggataggaacctgctactaagaagaatannnnnnatatttataatcacaagtaaactctttatcagtaaggagatccacagacctcaggttgacctcacttaaaaggaactcagttgaccgaagaccgaatggaagacccagtaggagcctgcgtcgctcagagatctcgaggtagcaactgctcttttcgagacagatgtcgaaaaaaaaaagcaaaattaaagtcaaaaaaaccagagtaaaagacatggaataatttaaccaagtcttaagcaagtaatcacttacgtattatgcggaaggttgttgtgccgattggggagagaccagtcgtccaggagaattcttctttaaacttgcgaggattctgtatgaaataggaaccaactagaatagggcaattctgagatggtttaggaagtccttttagtagtctcgcagggggataatggctctagccctaatgtgtttgaggctttaagtgcctatccctatcgagccactcgtactagcctcgccactagtcccctcagatgcttcacgaataagtcgttttggtggataatagctgaactcgcc

SEQ ID NO: 8351 - DNA, 807 bp, Cannabis sativa
ttttttttttttttttgtacattatttaaatattgtttcatgttattttcatatgatctttttattatttttatagaacactataaaaatataaaaaaaatatttgaaagtacaagtgtcgaagttttgccaaacttttgaagtataatattaagatcttcaactctttttaaattagaacgcttagattcttcctcccaaagaaagactcatgaggaagattttttgaaactcgatgaacaaagtcaaagtgtattcaacatgaacaactattacaagaaaaataatacataagtacattacaataaccaccaaaaactttctggactcaagttctccaagcaaaaaaattatgaaacaaaacttaaaaagtttttgaaaaataataaacaagagagatactagtataaactcacgatctaagaatttctacatacaccctagaaacgtattaggtcatgaaaaagagaaaataaaacaattagaaagtaaatacaaaatatattccaaaaatagtcccaaacaatattccttaaataaataagaacacaatattcttatgaatttttaagttaaaaaatagtatataaaatgatgcttatattcttatctgcacaatatattttaaacaaaaagtcagattaagaaattcaaactaactaaataaaatttacataaatataaatatcaatatatattatatagaaaaatcaaattttccaataaaaaaatggttgaattcatatttatcaaacttccttttttttttctatttttatcacattatacttcccagtccgaacattg

SEQ ID NO: 8352 - DNA, 678 bp, Cannabis sativa
tctaatgtcaagggtgtgatcaagaactttgtccctaacaaagtgaatatccacctcaatgtgttttgttctttggtgaaagacaagattgtaagcgagagatgttgcccctaagttgccacaccaaagaatggggcaggagtgaagctgaatatcaagttcactgaggtaaatcacacaaagtccattattgtaagagttgaaaagaaagaaagaaaatgaagaaacaaagagagaatgagagaaaaagctgaaggcggaagatgagctgatattctatttatagtgtacactgtaacattaaacaatcaagaaacatgacaaaaagaagtaacaaacagttgtaatagaaaaataacagacacctaaacaataactaactctaacataacaccccccctcaagttacactcggttctttcagagtaaacttgtctctaaacttggtaaactgtgtttgaggaagtggttcagtaaatatgtctgttgtttagtgatcggcagagagatgtctaatgtcaagggtgtgatcaagaactttgtccctaacaaagtgaatatccacctcaatgtgttttgttctttggtgaaagacaagattgtaagcgagagatgttgcccctaagttgccacaccaaagaatggggcaggagtgaagctgaatatcaagttcactga

SEQ ID NO: 8353 - DNA, 869 bp, Cannabis sativa
cattgatttatgccaattaacaacgatttggtgcaagactgttgagtcacaacgtcaagaacagtagacggtcaaaaggaggatcgaacttcactaattgcacctgttgaaagcaccctgatcttcttcaatgtgaatattattgcatgaagtttattcaagaattattgactgtggaaaatccaaaacaacacttagacaattaggtatatacaaccatgtgatgactttatattttaaatactccttaattatttataactaactaatattagtttatctctttcttctatagtataaaattgttgattcaccgtgtacacccaacgaaataaaaatcattaaggatgaattgtcaaaatttattctgaacaaactcaataaagcaaacatcgaagaagtattttttagtataagtatatacttttgttatattcattagtttgagtatgaatataatatatatattttttaatattcttgttactaaatatatttattgatttcaagcttgggaatcgattggccatgccttgttccaatgccaacatgtcaacgtagtttggagacaatttaattatccaattgatttcagcaaagctcgaaacatggttggtggagattatatttttcaccttgcaaccttactcagtcagcaagaatcggaattgtttttgtcatcatgttggtcatttggactgaccgaaacaaaattaatcatggtgaatcaaggcgtgatggtatggctctagcaaattatgctacaaactacatggaaaattatcacaaggccaacaactgtctcactgctgttactgaactgattactccagcaccaattttagctctaccaacggagggaattcctt

SEQ ID NO: 8354 - DNA, 723 bp, Cannabis sativa
atgggccattaaatcttttatcacggttagccaaaaatactcttgcttgattatttttttagacaggttctgtcccttagcgtgatttctataaaaacctttgtggacctcaacacgaatttgtgctacttcgccctcagtgacacatcttaagaggggaagtaaatttcacgtttgtacattgctccatccataataaagtaccatggaactttcctcattattttttgagctttatttttgtcacttgggagtgttcttgattcgaggtaagttgcgattggggtcatcttggtaggagtgtcgtctaaaatgtcaatctcctttgagcaggtgatgcttggctcttcaaggtattggacaagaactaagttttccttgttgaccaccgtgatgcttgctaaccaatctaaagcgtatgtagttgcattttcttcccttgggatttgtcttatcgtgtaccctttaaattgtgccaagaaatccttgattttgatgaggtaggctgccatttttttctcatgccatatacttgcctagatcatgattggtgatcaactgtgaattactacatatatctaagtattcaacatgtatttttcgagcaagtttgagtccaacactgagtgattcatactttgcttcattattcgaggctgaaaatccaaaatttacaactttgtgtagtttttatcccccaggagtaattagggtgattcttgc

SEQ ID NO: 8355 - DNA, 772 bp, Cannabis sativa
ttattataaaacataatctaataataaaatagcaagtcttaccatattttcaggattagtgttgtttttctcaatatcttaaaatattatttacatgattttttttttttttttaaaagagagctcgtataccgttatatatataatatacacatatattccatttacaatataaagctatatcgatcttagatcatcattagatatgtttctaaaaatatatataaaaaaattgactaactacttaagtagactttgaattcaagttaaactaaatgactcgtgtaaaaggatcatcatattatacatgatgtatatatatgatgactaataaaggctttagccagtagtctttgtcgttaactaatccatgcatgaacatatataaatgcagtacaaagcagtactgtacaaacaaaactaaggcggcagcaccaagccaaaccccctcaactacaaatatatatcaattaaagtacgtctcaattgcacaaagtgaaggggaaaaaagtaaataaaattctataattcatgcaattgtggtaatcaataataagttatttgtactatcccacacaaatctttagagcaattgtggtttttttttgtatagaacataccttccaattttaaggtgaaggttggtgttgcgaaaatcgtgtaattgctcgatcgtatatataatcattataaattataatattatataaaccatgcatgcatcgatcgagagagattaattatatattgacgagtttctagtatatatact

SEQ ID NO: 8356 - DNA, 1054 bp, Cannabis sativa
tagaagaccatttattaggtactcttttctgtctacatttgttaactaagcattgctattgctattacactttaatggttttaatactatattgagcatgtgatgcattgtaagtatttatgagtttttttgtattatttgcttaattaaaataggtgggatctgatattaaattacatcaataataaatatgatacttcttatgatgcttgacactttagggtgtccctgtaacatttatcttcttaactaatgtccgagatcttaagacatgtcataagttggcttattaaacccttatttaaaaaacataatatttttttaaaaaaaaaaaattgtgccctaagctaggtggcctatggtgcaactctctagccttagggtcagtcctagtcatattgatattggtacaaaaattaataacgagtctcatatgcttttattgatagagttaagagatttgaagagtgtcctggcttcagatttatttaaatttttaaaattatacgtaaaaaattaaaaaatatatatttttacatgtatttgtctcgttaaatttcggtttggtttcaccattgtattttttttttccaattgaagaatgtcattgaatatttgtgtgtgttttcagagttgcaacatgggcgaaagccattagattggtacaaaaggatgaaaatagcattaggggcagcaaaagggttggagtatttgcattacaaggccaatccacctgtaatctacagagatttgaagtcatcaaacattttgttagacaagaatttcaatgccaaactctctgattttgggcttgccaagcttggacctgtgggagacaagagtcatgtctcctcaagagtaatgggaacatatggttattgtgcacctgagtaccagagaactggccaactcactgttaaatcagatgtttacagttttggtgttgttttattggaacttataactggaagaagagccattgatactacaaaaccaaacactgagcaaactcttgttaattgggtaattttctttttacttttaacattatcat

SEQ ID NO: 8357 - DNA, 539 bp, Cannabis sativa
cattgcattaaccaaaatatctaccactccatcaacatctaatacgtgtcggtgtggtggaaaagaagaaatgaggaaaaaaagtcacatcataaaagggagtattttttctttttttttttttgaacatacatcatagaaggttttttttttttttttaacttaaaaaaaagtctaccaatacacttcctatttatattgggcattcgacaaatttttttaatttatttatttttgtctacattatagttattgaaaacattttgtaaaatttaaagaaattcaaaaaatttaatacatcgaaaacaaaaataagattcgaatagtctgttgcacgctactcttttattttacactcgtgtaaaatagacaatttaaatcttatttcaagcgtattaaatttttttgaattttttaaaattttacaggatgttctaaataataacataaacaatcataaagaaaattagacaaaaattctttgcaaatatcgaaataaataaagagtatatctataaacctaaggaggtgtaagatcg

SEQ ID NO: 8358 - DNA, 734 bp, Cannabis sativa
tattaatttagaattaagatatttcttttatggcatggaaggaatattattgtaattatatctgttaagctatttatataattaattcgtattttaagtatattattgaaaaaatacattgattagttcatggtaggttatctttttgttattaggttaatgttgtcatcatcaaccccatatgcttttaacttatacaaattaaaaaccatttgtatttttttacgcactgcgaatgacaaaaaaaataaaaactatatattgaaacggaacgataacccagtactatatataaatataccagtaagtgcatatatctgttatacgtatctaattggaaactgtaattaaattgaacaaacatgagtttctttctcagatcaatttaataaaaataatcattgatcatcgagcttacaaaaacaatgaaagaacaaaaaaaattgtagtttcacaccggcctatatatacagagactagacttaacctctatatcttttcaatcaactaatacgtagtatatatagtacttacacacataattaacatatataataaacccaaaatttgaaagcgtatcagagagaaaaaaagagatcatcataatcaacggattaatcaatcctcgatctagctattttctacagcatacaatttaattaaaccatactatctccatggccccctccgtgatgatgagggtcatgatgaggagctccaccactatttccacc

SEQ ID NO: 8359 - DNA, 672 bp, Cannabis sativa
gatgatgatagagatgaaatgagagctttgggttagtctttgaggttcaatctcgggcgtcggagagcgacattgccgagaattaagcgccatcgacactagggaatacctttttaactgttacgagaattttataattaattaattcattcattttaattaattttgtatttatttatttaattatttatattttatgaatattcattctctcctacgtggcctcacattctcttaggactttgaaattttcgaaattcgtaataaaatttatttaattttttttttttgtaagggagcttgcggctttttcggtattatattctttattaattttcactctaaatataattaattaatagatatgtataggtttgtttttgtttccttaattttagttatggactttcttttaaccttgggattgaaaaaaaattagttctttggtttgaccaatttgaccattgaaaaatattgtgctctttttgtttttgtgttgaaaattattggactttttacctataaattgaatttagaaaattaatggtataaaaatggcatgtgatttttgaaatgaaatgagtaatacaaatttttttaaaaaaaaaataaaaaaattcaaaaaatagttgacgaatttgtttgtatgaacaacattgagttatcttttaa

SEQ ID NO: 8360 - DNA, 1032 bp, Cannabis sativa
aaataaaataaaattaaataaatcatagtatgcatgtgtggaagaaatgtactgaattgacattattattatttttttttatagatttataataatatatatttaaatttgtattactgaatcggatatatatttcatctctaacaaagctgataaggattaagtaagagataacacagatatatattaatgtataataattaatatgtggtgctttataaaaacaatactattatatgacaaattaatgtgtatataaatactgttcgatatattgaacatttttaacgtatataatttccacacacaacctgtttaaaaacagtctctcaaaaactatttcatactctgttttttttttatttatttttttatattataaatgagtgacgattgtttcttttgtccttatattgtgagcgcatgctctctttaatatttattataacagcattagatttgtgatcaaatcgaagttattatattcacatatataatattaatgtgtttaattattaattttcgaaagtgaaatatttgtaaaagttttttctttaattaattaatttcctgtacttaatattttattcattatagtgcctttgatttgacattaatttaataaaggtatatatgtaagaaaaatgttccgtgaactacacaaagctagggctttttaacttttcatttttcatctttttttatattttacatttactaatttattaattagtgtccaataaattaagggtcaatatcaccgagtgttatattatatatatgatgaccatgcatgcatggactgatcactaactatatataattatatatatatttatatagctctccaagaacataaaatgcatgttcagccttttattgacaatattttggagctagtaaataattaaagtataagtaattaagcaaattaacacaaagtaggtacgtaagtaataatacaaaaatacaacattaatattttatatatatagactcgtgaaacataaataattaagtatggttttatta

SEQ ID NO: 8361 - DNA, 889 bp, Cannabis sativa
acataatcattcacataaaaattctaatatttatgataataataataaaatgagcacttataatctcactaatgtatatttaattattacgatcgctacagtaacaccaccatatactcttgaatccaatagagtggcagaacgaataaattatcctttaaaggagataatgaatgacatattattaagttctagattaccacaaaacatgtggggtgaagctattttgtcaactaattatcttttatataagattccgcaaaagaaagatcaaaagatgccatatgaattatgaaaatgtagacaacctctatacaaatacttaaaagtctgggggtgttttgctaaggtgattgcaccattgccaaagagaatgaaaataggtccaaaaacagtagattgtattttcatatcctatgcaaaaaaatagcaaagcatattgatttgttgtacatgagtctaaaaaccaaaatattatcaagaatacgataatggaattaaagactgcatcattctttgaacatgtatttccttgcaaagataatgtggttaagccaaacgaacatctaaaatgatgaatgattgaaggtactttaatgattgggcaaaattttctaatttatattatagaagcagaacctcaagcatataaagaagttagcgagctctactgaaggtacctttcggaaggaaaccataaggagtgaaattgatttcatcttgcaaaatcatacttaagaactgattgaccttcctcctagatgtaaatctttgggttctaagtggattttcaaaagaaaaatgaaaatagatggaataatttataagtacaacgtccgattgataataaaaagttataaacaataagaaggccatgactactttgata

SEQ ID NO: 8362 - DNA, 1100 bp, Cannabis sativa
atagtatttaccctttataattttataaaacctatatttagaatttgatagtagtaataggtcactaccatatcaatttttaaaataactagttactaatgttgaattaatattttattaataaaattttaatttaatgataaccggttaccaccaaatcactaattctaatatagtaaaaaaattatagaggtaactagttactattatatcaattttatatataaaaaataattaattctcaaaattgaccaagttaactttgacaattcttaaaattaacaccaatatatcataattaataaatgtgcctaatttatcttttcttctctaatttatacatgttattgaaaattttcaaaattgaccaagtcaactttgacaattcttattgatacttaaatcaattaattgaggttgtctagacgattttgtccaaggtacatgagaattatggacctatgaaaagctccaataagttatcataattttaataaataaattgactaacttattaatttattattacttcactataaatttaaaattgcacaattaaattcatagctataagtaatatggatacgttattaattatccattatttcaatcataattatcaattaatcttctatgaatgatctacattaaattgggactaaaattattattttacccctcattgtatcttacccttaaaaatacttagttctttgtaaatattatttctataaactagtataattactgaaatgagatttttaacatttagtgcatttaaccaagttaaaagaaagcatcgttttacttctttagcagaagttatagatgtcagtgtctatgattaacagactcactcaattatattatcaagttcctaaaatgtaagtatgagtaagtccacatggtaagttggtaacaaataaaataacttactcaataaataatacaatcatctagagtttaatcgctcataattgagattgaattaacatataatcaactatattatatgacttagaataaataatattattggaaatgctttgcaacataaatatacatcgaagaaggatttagaatagataataacaatgtgt

SEQ ID NO: 8363 - DNA, 683 bp, Cannabis sativa
caaacttgtcagatgtgtgatcgatatggccactttgttgcctactgttataatcgttatgataaaacttacatgggctcatacccatctacatctggagctacatttggccgtaaaggatttcaaaatggaaacatcaatggagcatttgttttcattgctacacctaaaatgattagagatggagcttcgtaagtggattttggagctagtagtcacatcacatcgaacaccaacaatatgacctagagaacatactacactagtgaggaaactcttacaatgggcaatggtagtcatttaaaatttgctcatgttggtactagctcttgatctctcatggtaataaatgcttatttctaaaaaatgtgttacatgtgtcaaacattactaagaatttgttaagaatctctcaattgacatctgaaaataaagtgtttgttcaattttttgtcaaataatgttttgtgaaggatctagacactaagaaggtgcttctccaagggactcttagagatggtttgtatcaggttgttggccaagaaggaaatcccaccaccaactcacatgtgtttttaaatcgatgtttattaaatcattcactagtgtagtgtatcaataaaatgatcaacgagttgttgtatctcagattattttcttaaaggataagtggcacaagagat

SEQ ID NO: 8364 - DNA, 1254 bp, Cannabis sativa
taatctgattatgtaatattcaatttaaagatattatttgaaatttattgtcatatctattaattgttaacataaaaaattacaatattcttacaagtcaagtaaattatttttgaaaagaaatcatcaattattaactgaaatcctttaagattatattatgttatgaaaattagaagaaacatcattacttctgataacacgatcagtaaattatttaatttaggtccaatttaaaagtccatagaattttagaaattattcaattggtttaattaaatgtattggttgcattagataaaaatttatggaattaatattaaaaaaattataaatttgaagaaattcgtgggtttagaaattattttagtgaaacaaccataattgaagttgtaaaactctaattaaggtgatttgttggcattagaaatatctttcaaagatcaaagattcgcataaaagtaattaataacaacaagaatttatatccaaaacgaaattcgaataactaaagggtcaaaactgaactctaaaattacaatatgttatgcttagtaaaaacttctctcgtgatcagatcgaaattcttacgttttttttaatctattcattgatagtgataatctctcctaaagttctaagtattttgtcttttctgcccaaagcgtaatcaatcttaagtaatagaatgctctaaatctctctaaatatttcacgacactaattttagaaggaatatttataaatctctgcataacatatatcactgttggggtatcaatgcaagtctaacattgaaagaatagacaagaattacttagaatacaagtattctacctatttcattagtataagaccttttgggaaggtacttaaaaccaaaattgtaaggtaggccctaatccaccttagcccaggcccagccttggaactatatttattctcacctaacattggcctcttatttgtaccgacaacgttatcatacaacatacaaaatatacaagtcatactatatatatatatatcaattcacattgattacatcagaataaaacaactccttccattcaatcattctaaccttaattccctttttgtagcagggggtattgccaagtgatgaacttagattaatttttcttgaactcataagcgacaaacaatacaatcttttacaaggaattgagtatcaccttaattagagtggggtagtcactcaatcattataggcttcagagagagagagagaga

SEQ ID NO: 8365 - DNA, 1012 bp, Cannabis sativa
ttaacaaataaatcctaaaatctttctctaaacaactcatccaacttgaaagaatattctaaacctctccctcaaaatttagcagcgtcaagataatactatcgattgattcatcaattagaaaataaaataatatgattgttatgtatataaaaatcataattatacgtagtatgtacaaaaatctacttataacttttcctcccaccattcattaggagtatcatctctttgcctttgtgcgtcccaaccaagtcgagtctctcctataagtaatgaatcccacatctgccattcctttttaacattatcccaataatttttatttgttttctatcataatttctacccatctttaagttaaattattcaataaaatttttccaacttaattttcttaaatatgatccatttctattaccaactctcacttgttctataactaaatcaatcaatttctcacgtgttgttgaatcccgaactctttttgatttttcttgtgttacctcagttttcattctatttaaaataatatgagaagtataaataaacacacaaaataatactatttattattctattcaaaatcacagtaataacaataataattattaatgatcaaccatttaaagaaaaaaaaactacaaaataagaatgtaaaaaattaaacaaacatagtgattaatttaaaaagaaaaatatataaatataaaacacttcagtaataaagagattttaattatcattgtaaaagaaagaatatatgacaattgaataatatgtatataaattttttatcttaatcacattattttttatgtacatagctctagaaagctcttttaaataaaaaactcttctcttattttacccaaacagatctaaaagtagcttcgagacttcaaaatttctttcaaaaccatgccaaataagcccgaaataatatggtgaaagggcttttcaaatatcaaaatatgttcgttaattaaaaaaagaataattagtaaatttt

SEQ ID NO: 8366 - DNA, 687 bp, Cannabis sativa
tatacttttggttacaaatataaatgtaagacactgctaaaagattccattaaggtttttatgtaaatgattaattagtacattcaaggaagcaggaactacagagaatagtatggagttgaaaagtatatattcaaggtgatgaagacaccaaatatgagtagtttgaattggtaaacattaacatttagcttaattttatgactgtatttgggatgtagctagatagcaattggcatatgtttagaccaaatatgagatgtagttcgaattacaagtcatactcacaagtcaagggtctcttctcgtgagttacgttttctctttttatttgaattttttagtgttgaaatttatagaagaagacttgtgcataggaaaatgagttaatatatattttaagaccaatgtttttttatttgacttttttaatgtttaaattattgtgaacaattgacgcatgtttgcatggtttgtagtaaatgagttaatattttacgagcaatatatgttagttaattgctcacttcttttgttttttagctcttattcatctttatatcaccttatctttttttttttaatatttttcactctctcacaatttttttaaaaaaaattacaaacacttattctatattttttttcttctctttattacatttttcttactactcactctcaaac

SEQ ID NO: 8367 - DNA, 743 bp, Cannabis sativa
cttcactccattatcttccttttctaatatcaatacctcctctgcaatacccttcaggtatctaaactaaacttcatatattcccagatgccctttttcctctaaattctcagtttttattgttttggttcctaaatgattgagattgattacagtgtagaaatgaaatttgaataagtttaggcttaaatctcatgcacccattagtaacccactatttcatttgaggttttaaggtgtattgtttgatttttacaattatttttttcttttccaaaaaaaaaaatgtatctttgcttcttcagaaatttatggatggatgttttattataggataattttaatctatacatattataaatggagctgaatatatatgtagttctttcaaatgatttttctatttttgggtaattctgaaaatattatgaataaaatattatcactgatattaggaaaaaattgtgaatttctcatgttgatgatgacttatctaatgattagatggttgtgatgaattaaaacacaagaatgagaatcaaaatgagaatgaggaatggaatggaatataataaaaaaatgcataatttcttgtaattctgatactttaaaatataaccaaacaaaagaacggaatgaaaattgatttctttccattctaatttttttcattacctccaactaaacgcaaccttattcttcctctgaaaattcaattcaatgttctttcaccttaaactcta

SEQ ID NO: 8368 - DNA, 988 bp, Cannabis sativa
  modified_base (372)..(375): a, c, t, g, unknown or other
cttaattaagtaattaattaattattagtttcaaccaaaccctttctaaatcctaatatatatttcagttatgtaccctatatggtaaagtacttttaataatattaattctatctaccgattaaaatatacagcttgttaaattgttttttgaaattttacatttacataagcaatttaaaaaactatttattttttattaaaaaatccatttagatgtaaaattatattaaaaattcaatatttgtaaaaactaaattttaagggaacaagtgtgagtctatttttctttccaaaaatctagatttgtttaagtaaataataaaaaaattagtttaatttctaacttttttttaaaataattttatattnnnnttgaatttttaattattttttaagataatgagtttataaatataaataagtttagttttttttttcaaaaatttattgaattttcaacaattttgatttaattttttaagatacgtgtttataaataaaataaaattttaaaatattttttttacaaataatttaagtttttttaagtaaacttaatactttaatttaatatttttatccgttttaataattttttcagaattaatagaggattataatttttaaaattatttttttaataaaagggtttaaaattttgtcaaattttaagaagtaaaaatactcatttttaactgaagaaatagaaaataaacagtaggagaaattttcaacaacggtataacacatacaaattgctcaatctatccacataagtattaatattgttgatgttatcatcctgacctataatagtatatatataagggttattatttttttaggagtataatgattttcatgtactttaaaaaataaataaataaaattacacgttggtggtgtggtcttatatagaatgaataggtcaggcggccggggacaaacatgttgttgcatctgtagctgggtacgacagaagtga

SEQ ID NO: 8369 - DNA, 947 bp, Cannabis sativa
cgaaaataatatttacgactgtttctttaactatttaaatttttttaaaaaatttataagtgatcgttaatagttttaaacgtacacaattaaaaaaaaaaaattaactaaaaaagttttttaaatattaaaacagatacataatttaccgaaaatttcctacaaaaaattaatacttttaataataattttttaatcacaatataattttttgtgactaaatatgactttcagtcacaacaaaatgttacttgtgattaaaacatagtctttagttacaagtgtcactaatttagttttagtcacaacaagtattgtgactaaaaatacatttagttacaataaattgtaacttttgtgacaaatacctttactcatgaactttttagttataacataagaatgataatttataattagtcataatttttctatgtgactaaaagtaaaaaaatttatattgacatatacatcaaaataattagttttttaggtctaaaataccaacccttgtctttcatttaaatttattattattattattaaataatctcattaaagtttgcaccgaaattaaaaaggtaccatttagggatggacatagcctgcatctaaacaataaaaaatataattaaccaataatattattttgaggctatttcttgagtactagtagtgttgaaagttgatatatataatatatattatataaattaataataatttaggtagattaattggttatatatatatatattgcttaattgtcatgcattatatgtatttttttcttttcttttcttttctagttttcgtggttacacgtaaggattgtgtaacacacaagagtctccaaacttggccaactgaaagaacccacatatctcttttttgaatattcaatcttattggcctttctcaattattttctaagcaaactttccaat

SEQ ID NO: 8370 - DNA, 708 bp, Cannabis sativa
ctttccatagggagtcttgcttggtctatccaacactgctggagttcttgctggtgtctttggtacagctgcaactggatacattctccaacatggttagtactcatttcttactagtacagaagtataaacaaaaacaaatacccttgaattgcttgtttgatttcaatgatgctttaataattatctggtgctataatcttttcttacctgacatagaataggtattctgtttatttattcaagtaagcacaacttgacctcattagacaactaagtaatccgctacaagtttcttgatatttgtttagaaaattaagcggtgttgtgtagtgtagtctcaaaattgggttggcctggagtgttttggtaaatatttttggaaggtaagacattatatattgagtgcccacaaaatgtggagtctgttctgcctcagtggcttcaaagcatatgatagtcaataataggtttctgattaaattcttcattcttctagtgagggtagtttggggttgattttctatgtttgttaagcccaaattcatacttcattagtagaaagtatgacctataaggctaattgggtacacctaacaaagccatctaattaaacacagtgtcgacacactaaagttttcggttattcctttcttgtaaagcttaattggtttaaatctttgggacaagaaaaccaagttctaatct

SEQ ID NO: 8371 - DNA, 579 bp, Cannabis sativa
ctatatgtttattagtagaaaataggatctattgtcaaaaataggctttagagaaataatttttcaattatggagattttattgaattctgtatgtattttatatgttatatatgaatttctatgctttctattttttatgcccaataacagtggaatgcgacgatttagccgataaagtcacttaaatacggttctcttgaaattagtggggcaaattagctatacatttagaatatcaagattatgcaagataatagtttttgaccatttacccctagatatttagattacttaaagggcaaaaaaaaaacaaaatggtaattttaccctaattattggatttatcttctgtgtgatttttaatattttcgtgatatattttaaaaaatgtagtaaagaagttgttaacttgtgcaatctaatgtgtatatgaaaaggataggcaataataagccatataaagtagttccacacttcttctcacaagaaagttccaagttcaaatcccctcctacaaaattgaaaaaaaaaaaaaacaaacaaagaaagaagccctatggaaggacaagaactcttt

SEQ ID NO: 8372 - DNA, 1118 bp, Cannabis sativa
tagtattattattatctggaggacagtagtaacctcaattttgatccggtgcaactgggcagagtcttctaagacaatataataatcataatttaattattaagtaaaactataatatatataattaattcttatgatcttaattaatatattgttattccctaagttttgtcaatttctttgttgtgtgcttatgtttttgttttttgggggaatttatttcttttgtttgtcgaccgtagtactgttttaaattttttaaaaataaagtgagataagtgatcaaatttaaaaaataaaaaaataaaaatgataagcgatgagtattacttattaatagggactgacccagtagctaacatgaaaatcattaagaaagatatagaaatttttacaccaaaatacaatttacataatttattacaaaaaaatctacacacggttattacatcatcatttttaccttttctctttcttttattacacatatacaacttgcacatcaactccatgtagagacacaggacggagggacttaagccattgtgtaggcttaaaccctcactgaattttataatatataaaaaaattttatgttacgtatatgtatttaaatttttgtttattataaatgtgtattaagccctcactcaatttgttcatgtccaattttaaaggtaataccactaaaatttaacaccaaattcaaaaaaaaaaaaaaaaacaatcaacactttttttttctaagcacatatgtaacactctatttaacatgcttttttatttcattcaatttttattcaagcccttgaaaaagaaattattcaagccctcactgaaccgaatttctggcttcgtcactgtctactacttagcataaaacttaaatatttatattgcaaataactctaaatatacaactcaaagctcaaaatgcaaataaataagagaataaaaaagttaaaagactaggtttataactcaaagcatgaacatatgaatgaatgtaaataaatatgagaatatatataattaaataaactatatatataggacttcgattccatacctcttagtacaaatggcgaaataactttcgcttacaaatattaattgta

SEQ ID NO: 8373 - DNA, 1305 bp, Cannabis sativa
agcttacaataagcaacgatttaaaaataaaagacaggatacatatttcgaatatagcaattcaaccattttccaagagtaaaaggaaaaacatgaaacaatatctgtgttttaactatcttagaatgatgcgttgttgattgtcaatcaatgtagaggccaggtacaatttttttcaacgttcatagtgaaagtatagtcaaaatacaagatggaacaacatagccgcatggttttaaacttgaaagaatgtagacaattttgacagtaaataagattttgttgttctatcattcctccaaagtaaaatactaaatattgtatacagactgatatagatgagactttttcactctagagtctaggtcttatgaatttggacaagacaccagcagaatgagaaaataccatgataagcaccacaattggtaaccagccacaccattacattagatacacaaattgtcaacccaaaattattatcaaccaagcaaaacaaatttatctccgtagagacacaactagcacaatccaaacaaaacatcctcaacgatcacgttctgttttttttttttataaaaactttttttttttctacacatgagctattttgtgaaacgagaaaaagaggttaccaaatcagaggcgacgtgtagtccttagtgttttcttaagctcataatcagcatcatcagtgggcaactcatagcgacagacagggcaagtgttcctaatgcccagccatggcacaatacaatcaccatgataaagatgagaacaaggcagctgtttggcttgttccccaacattaatttcttccttacaaacagcacaatgtgcattgttattccttacatcctcttgactcaaaacaactgaaggaagattattcacagcagttccagatgcaggaggccggcccatatctgtcggggtctcattaaactgcccaatcaacatatcatattctgcaggataaatataatcatgttcactcaaataaggttcattttctgggtttgtatccaaattttcagtactcaacagaacttcccaatccaaattttctaaaccaacttccctctccaaacttatttcttcctcctcctctaaagggggaattgagcgagagagcgaagcagaaatagatcctctgcgatcagcatccatagacatacttaacacatctctctcatcaacccgaccgtctacttcttcccactcaaaatcttcaatggtttctctgtgatcctctaattgaagcgaatcccagcaaaggggaatacctgtatcatcatcgttctc

SEQ ID NO: 8374 - DNA, 764 bp, Cannabis sativa
caaaatgatagacttggatccaccttacctagctgaagttctgtattattatgaactaagcatgaacttctacaagcgtgattataacagagatggattttaccatctaaaaaggcagagcaagaatgtaaatagtcttcacagcacctagagccaccctttggacatgagggaatatcttcacatctgggttcctgcttcataggtattcgacactaatgttggattttcagagagttggtaagtctcaagcttcctttctttttcttgcctttactaagtggttttcatgaaccttcgataaaagtctaaacattttcgtttatcctgatattagagggccttatgcacaaaaaactccttatctctacattttttcccatgaagtggcgtacaaggaaaatgatgaggatgagtcggaggctggcttcttggtgacggacgccaaccttaaaacctatggcttgattactcaatattagagcattgtgcctcctagttttcgtggcctacaagcgattccaaaggaggtcaagggtagacttatcgagatcatggataacgaggttgcaaaagaattaaagcgtgatgagatttgtcatcgcaatttaggagaagaaggagtggttcagagtgaggaagtggagttggcggactatttcggggctatgtttcggaatattggtgctctgggagccagtacgtcaggagtaggtagcactttgtttaccctcattaacacacctttttcggaggacttctcc

SEQ ID NO: 8375 - DNA, 828 bp, Cannabis sativa
cttaggatacactgaaacgcaaaggagaaaaatatattccataggtacataccaacgaaggctaaaaacaatccaatagcaaaaatggagattgaaagcaaggtccaactctctaaccgtcttttgtgatcctggaaatcattgaatatcatttcagtaaacaaactgtcagtagtgatgctttttaaatagtataattagcatgattataaggtatgctgcattcctctgtgccagacttatgacataatatttgagtaataataactaaaattatgtttccagaatcatataaatttcactttcacctgtaagttagcaagaatatggccatattgaagtccaattatgcaggtcactgcagctgttaaagaactatgataccatacaacaaatatttgacatgagttgtgcataaaagagatcaagtactacacacaaagacagaaaaagtaataggaatttcctatcatttacataaatacagtaggaaaataaagcaaaatggctaacatattgatagtagaaattgaagtgaacaaagtactgggtattcgagagacctagtgctctcccaagccaagagcagtagctctcttacaaattcattctccccttttgcatacctattcactcatatatataatatccttacccaattaaaattaccctcatactcttattaaatatcctaagtcctatcaagtaacatatcgtattactgtaataaagatattttcataacaatttaaacaaatagtttttgaaggcttcaatgtaacctctttcttgtggcttttagaatcctaaaatttcatctacttttgc

SEQ ID NO: 8376 - DNA, 572 bp, Cannabis sativa
ttttttaattgttttatttcagacgccgagcttagcgtagctggtttccatgttagaaggtataaaatcatataattgtcttatgattgacttttggttgaagttttccataccagtgcagtgcaacgcctttccaatgtatcccttcacatttataaacaaacccataaatgaataaataataaataaagaaatcgcattcccatcagtttccataatcaggacaatttgtcaacaaatacattaaataaataatttataaaataggtatcacattcaaatacggcaatgcatttttggaaattctcaaatttggtgtctcttttatttgtgcttcttgctttgttctactactatcatactcatcaattctctctttccatcaaaatggccgaaactgaacagacccccaaatccatatatgacttcactgtgaaggtctttatttcttctgccttttttttcctcaagtatttctgtttggagtgtcatatgattggttaagatctttagaaaaagttctaaacagaatttctcttgtgtttctgttttttggggttgttttgtgctct

SEQ ID NO: 8377 - DNA, 1896 bp, Cannabis sativa
aaggctcttcatcggcggttcatcatttgaagattgccttggcaagcttctctgatgttacaggattataccccaacaaggataaatctttagtgtactttgggggtgtttcgttggatgaaaaagaggtgatcctggaagacttacaatttagcgagggctcattcctgctcaagtatcttagggtacctctaagaccaacaaagtggagacgagaggattgcgatgctatcataaagaagataaaaatgcggctggttacttgggcaactaggcatttatcttatgcgggacgtattcaactcattcactcagtgttgtttggtcttcgtaactattggatgagcatcttcatccttccgcaaagtgttattaaggaggttgtagaggtttcctttgaggagttaagggggattgaagcaaaattcatttggcctcttgggataaggtttgtcttcccaaaccttttggtggtcttggattcaagaatggcacttcttggaatcgttctattcttggtaagtttgtttgggcaatcatggacaagcatgatattctttgggtcaaatgggtcaacaatatctatatgaaaggtgttgagttttgggagtatgagttgaagggggatgttagttggtattagaggaagatctgtcatttgagaagccatttcagcaagcttatggtgactgcagcagtaaggaaaggcaagtttattgcagctagattgtatatgggaaccttaaagctcaacatagacagtttttacaaatttgtctggtgtaatctttcgctgcccaagcatagattcattttatggcaggtggttcatggacacttgctcactagatataacttctatagatttcacattgtgttagactctagttattgccctgtttgctgcattgaagaggagagtcaccatcatctattcttcaactgttgtgtttctagggaggtcgtgaagcaggtttttgactggtgtggagtagcagcctggccttcggactacagcaggtggcgttgctggtttgctagcgaaaaacttggtgtgattactttgctctttgctgccacaatttacatgctttggaaaaataggaatttttgtgtgcataatagtagttgttttactatcttgaaaattgtaaatgatattaaagatatagtaaaataaaggttgtatagtttaaagaataggaggattattcaagctgaacaaggcatgtttttacacctaactttgtagtggctgtcagaggttgttggggtcggtcgattgtggtcatgatttagcttgtttggtatttgattttaatgaaattttcccgttagtcaaaaaaaaaattaaataacatagttaataattaatttaatttaatttttttaatataaaaatattaactttttaaattaaaaattaaacaaaaaatactacaatttaaaagaaaaaatttataattatagaaccacattaaagtttttaacaaatatttttatatcaattgaacttataaattatatatcatatagtaaaataataatatatttttatagggtaaaaaaattacttggtttgtaatgaatattaagctcatttgtattttcgctaattataaaatatataaattcatcccttagactatattacaaaaattataagtataaatgtattttttctattattacaaatgaaaaatatcatttcaaaatgtgtattacaaaagttattaatttgctatttcgttttcttaaatgataattttattttataagggaggatttgaattgtttattttattaaaaatgggaatcttaatagtgtttttttaaaaaaaattacatcaccagtcacaagcacaaatttattaaattcaaaagctgttattttgt

SEQ ID NO: 8378 - DNA, 721 bp, Cannabis sativa
gcccgactgacattcctacatacctcccaacccatccatatgagtcattttgcttcaaaatctctaacaagaattaccaccaaagatttcaagattagagcaaaactttagagccacaatgtggaactatcccctcttttcttattaccatacaccttaaaaccactcaatcaccaataacacatatatatatgtatatatatatatatatatatacatgacatactcttataaccctaaggggttattcactaatagggcttaagtggtcttttatggtatactataatttaatagaccaattataatattaagagtaacctttaacacataattaatttattaaccatcctattatggttattagtaaaatattagacacataattaatgattgagtattatgaaagtaaacctataattgtattagtccattataataattccacaccttaatttcaaaaaatcatactaacattataaactaaatagaattacatgaactgttatccattgattcggtcaaacaggaatcatcggcccatgagatatttagaagttagtcattagttaccaaattatatttacccacactaaattccataaacaatcaataaaaataaacaacttgaaaccctgaaaccctcaattgcattaattttgtcaacaaatgttcaccgcacgattcaaaagaaacaactcaaatttgtaagagcggagag

SEQ ID NO: 8379 - DNA, 1803 bp, Cannabis sativa
ttttttttccattttgtcttaatggatacctgacgggttccccataaccaatatgtattctcctagcccgaattcactagttattagacggggatgagaatataaataggtagcaggaatgagggcgagaattgcattcctcttaggactgttcatcaaaccgtttaaactatccgcaccgcaaaaaaaatgcggtttaaaattttttgcggtgcggtcgcagtttgaatttttcctaaaccgcgcggtgcggtgtggtttgcgattttgaattgttaatatgcagttcaaactacaccacatattataaaaatactaatttttatatttattgaggtctaatactaatttaaattgtttcataatttaatgtgatagttaaatatattaataaaataataaaaataacatgaatataaataaaaaagtaatacatttattattgtgtaaattttacgtcataacaaattttgtgctaaatttgacacaaaatttattatgtgccaaatttatcactttttgacacactaaaagtacattttttgttaaatgagttatattttaatttttcactacttatttacatttgcattgaaatgttcttggaaaagtgctcatattttctaaagtattttagtttggtttctgaatttagttgggggttggaattttttgaattctagtcaccttggtaattaattatattttattctttaagaaataatttctaaaattattgtaagttttattggtataaaatttcaatatgataatttcttatttagtgtgaaaaacatttgtagtggtaaatggttatatattttttttttttgtgtaaaaaaaattgaggagataaaggagaagagaacttatataaaaatcaactttgttaaaaccattaaagaaaatgttgttaaaaaattatgaccacagaactttgtcccacatcgattataaaatatatccagtagtaagtacataaggcctttcattagtttctcatctttattttagctgagtcttcttcttcatcctctctatataacaatgggtatatcaccttccaaacgagtcaagactcagctttccaactcccccgagttcaactcagcatgcgactcggcctactcacactgcgtctcactcacccagcaagctttcccaggtgtctttctctaccaactcaacaccgcagctgaaaaaatccatcaaatcctcaccgtcgatcaaccccaccagatcatcctgaagtgggtttcttctcctccaactcgttctcaggttgactcagccctccgagtcgtgagtcgtctccccaacaaggatttgggctacgatgagcacacacttgggccgaacgggttcaaggaatgggccgtggagctttttgggagtgcgattgtgggtaatgcgaataaagccgtgctccgccgtgttccgattggagttgccggaatcgttggcgttggggttgtaactcggtcagggaaagacttggttgggacggcggttggagtatacgcgctgggcattgccacttctatttatttgggtttatgtaataaatagatgagagagttttttttgttctttatttaaagtcaattatgtatgtaagaaacctttgaatggtttgttaataaaataaaatgaatctcttagctatgtttgaggaggatctaatctatcccaatcgttatcagtttctaatttacatttttattattaatggtatgccaaaatatataataattaatttagttgaattttatttggtagtatttttattatatattttttttt

SEQ ID NO: 8380 - DNA, 624 bp, Cannabis sativa
ttttcactaatcatcataagtgagctcatttatttgtttttatttcattaaattttgaaactaataaatgataaaaagtttgagatacacaaagaaagctgtaaaaaaaaaggttgtgtgcggtggtcgtaatttacatcatatttaactttgccagttttactaattgattataatcatgcaaaaagtaagaagttcaagcttcaaatatttatatagatttaaaacgacatgacgttttttattcgaaaatgaaaaaacgacatgacgttcattgttcagaaccttcttccattagtctcttctctatttgatattgacatggttgagtagttttgttatatggcttgtttgtctttaggtttttctgatttgttggatgatattaacgaggagggggatgggagggtattagatgcacaattgtgtttggtgaggagattgatatccgatactcatgctgatttcgatgctttttgcagatggtcatggcgtcactatggaagcctggtatcgcgctgtattgaaagaaatagaaccaaatttgtacatttttcatttctaccatgcatgaatgggacattaagcgtgccattgaagggagtctatatatggaggtttaat

SEQ ID NO: 8381 - DNA, 500 bp, Cannabis sativa
acatgagaaatacgtcccaacactccatttcttccccgagaaaacaatttcccgggaaagacaaaaataaaagcgaaaataaaacagcttgtgacactattttcaatgtcgtctttttcggtaaaagcaaaatagtacacggaccgccatgcaaatcaatctccgacgcctaggaggaggtttaagcaccagaggatttctcgagggttcgcgaaaacggtttcgtagtggaaaggtaagcacccgagccgccattgaagtggtagttaagctactcattatcaatattaaggccagaatttggtatggagcgaagctctgcgtgccagtgtagaggttgaagccagaaatacgagctttgcagggagagaagatatgtggtgtttggaagagataaagtttgaataatgggtctgtttgtttgggtatacactttattgtactccgtttgtggggttagggttatccacgtaccgtttacaccaaaataatataagatt

SEQ ID NO: 8382 - DNA, 688 bp, Cannabis sativa
aatctgtttattcagttatatgactagttcaaaatgtatccaagtcttattcttataaaaattattaagattttttctattattcattttagacagtggctgaggctaaataaaagagggccaaaataatagttcttgagatacataatgtattgtcaacaaccacaaataaaatctactctcagttttcaagtctgttaatttgttttttaaccagtaaatatttttaaaagaaaatgtgttcatagattaaaaaaaaacaaaacaaaaatcacaaattcattaaaatcagcaataatctcaaaaaaaggttacattcaatgcagaaacaaactaataaatcatttttattttctcaagaaactcactacaaaacaatgaaacatatcaggccatttcaagagtcttgtagcatatagaacaagactagttctgaaatcttatacaaatttaatctgaatttcaacagtcaataatactccatttccacttgttgcttcattcttttacttgagaagaacatgattaaaacgagccacccaactgcaaatcatgcagaaaattgaattgaaaaaaagaaaagaaggttgcaatgaccttctaatgcagcctcaaatggcattagaaggtcaatttgtacaaagcaaacaccacaaaagattatatagtatgtaagagcttcttttat

SEQ ID NO: 8383 - DNA, 1248 bp, Cannabis sativa
accaaggagcacacaataactgaagattgaacatcttatatcttggaaactctcccaatctgcatcaggaaagaatgaaagttgaacatttgatggagataggcttgtttctacatatgatgacagatttggggacaagtttgaggggaagaacaggacttgtctaggagttcttttgaggtattgcaatgaatacgatgtgttgcttgaaagtgtgatacccgagggcatgctaagaattggttgagatgattgacaacatatgagatatctggtcttgtaatggtcaagtatatgagttttccaatctagcttctataagctgttggatctaatagtagtattcctttgtctttgctgagttttagattaggttccatcagggtcgtcttaaacatatggtattgtcatttatttttggcagttaactgtcaggttatctcttcatgtgtacatatggtattgtctatatggacacaatgtacacatgatattataatattggcccgtgtaaataaatatttaaaaataaaataatataagaaaagcaaatcagaattatctcatcatattaattcaccacaaatttaaaaccccgttttattttattttttctaaaatcaaaacaatgatgactccaatttttgtttaaacaaaattcctaattatcccttttaatcaaactcctttggtacctctttcttctcccatatgaaacctccatagatgccactacccttctcactagaaccctcttcttcttcttcttcttcttatttgactctgatttcatcccatcaccacaaccaattcatctcccatgaaccatcgccacgacccagcacaggttctggatttagaagatcattacgagaggagctaatttttgaaaatcattttgtttgctaacactcggcgtcgtcgaactatagctaagaagctctagctctagagactctctaaacagcgatggacaaagggggacctaagagtcttggggtttaaatagtcaaggaggcccgtagtggtctctagtttagttgagcatcactggaggtgctcattagcatggactcgagagcagtgagggataaaaagacagatctaaggagaaggtgaagagggattcaagagagagtaggttagggtttctgggtcttcgtcgggggtggccgagctcaagtcaccgcatcgaaagctactccgccggggttgaggctgcctacgactaacaggaaaagagagaga

SEQ ID NO: 8384 - DNA, 1053 bp, Cannabis sativa
ttttttttttttttttgatttggtcaatggacgtaattaaagtctttggtggtggtccgtggcttataaaaaacaattgctggctttggaagttccaatgagtatcatcgactacacgaaactcagtttcgatttgagttaaattatggtttcagtttcatctgctacgcatatgttgtatgacgaaagatatgggtagagaactaggcagtttaatcgagccagtaactgagatcgataccaattcttcgagtgattgtttagggaagtttctacgtagcatcgacatcaccaaaccattaccaaagcttttgaaagtgggatttatcaagggtgacccaaaatcgcaaatctcgaaaaaatataaaagtttcctagaactatgttattattgtaaaattattagtgagtgtgtcttcttcctcctattgttttacttttggaaatgagaagcagatagtgaaaggaatgaaatcaatttttattgattcgaggagttcagtataatatgagctttatatacgattcagacaaccaaaactaacacaacaaactctaactaacttcctaactaactaacagtatgcactacacctctttgttggaagtatgaactgttttaataactccctgttggacctattttctcaccaagtgacaataaatttttatgtgcttggtcctctcgtgaaagataggagtagcagctatttgctgggctgctttattgtcgcagcacaagatggctggtcctatatgatcgatatgcttggttcctttaacagagatattagccataccaactcacaactggtatttaacatggccctgtacttggcttcagttgaggaccttgataccgtgtgctgctttttacatttccaagacaccaaagatctctcaaggaacacacaaaatcctgttgttgatcttctcgagtcaacacatgatgcccaatcagcatccgtgtatgcttcgaactgaatctttgagtttgctagataaaagaatccttgtccagtgttcttaaggcagcattcatgtgattcattc

SEQ ID NO: 8385 - DNA, 1286 bp, Cannabis sativa
ctgttggtgcaccaacagtgcacgcatcttaattctccaaagactaaaattgttctcccgagtgaacttgtcaatctcaaactttgctgagctcaatttgattgagtcttgatcaacaaaataccatttcttgatgcttgaatcccttgctttgataacacttgtggtggtgtaacacctcataaaatcacaagaacaaagtacaaaatcaatcaagatcaaaactaatcaaaaaaactaaaacaaattcaaacaaaggaaataaaatcacaccaagattacgaggtttgatcaattgctagcagtggaaattgtctactctgtggagaacaaccttaggcttgtttctttattgattcagttcttggagctataatggagttgaacaccagaacataaattgaaaaactaggagactcacaaaataaggttgagttctttagtttataggtctatacaatatagagggggggaatttgaattggtgatcaatgaggtcaattaatgcactaaatatagaatttttccaagatagttggaggtggcccaaccgtaactaactttcttatagctacctaagtccaagcagagctagctcactaactgaagagaatagaaactgattctaactaactttaactaactccacacatgatatattttcgatgtcactcgatgctagttcataaagctttatggtattggaaaagtgtaattcgttgaggatcactcgatattgacttgattgaagttagatatggtaccttttcatgttgtctaaagttggcttgatgggggctcgattaaaattcaatgatagttgcagcatattgttcctaacaaacaacaaaaaaaaaacatttatggcttggttcagttcatcgattaaggtagtggccaggctggttcaattcattaatgaaggtggtggttgggttggtttagtttgttgagggagggagaaacctagggccagtggtggcttttggggttatgatcttttgccctcctattaacgagaaaaagagaaagaaaataaggggaataaaaaattataggggtattttaatttttggcggtcttagctcaaaggagctaatcttatcctccacatctggcccctaataaatccatacaacttttaaatttgttatgggtcacaatcttagtccccatatcaacacgaattttctcagtggggattttcttaattttaacaagctcttatgtcactttatctctaattaagtaatgcttgattttaacatatatattttttaaaaaaa

SEQ ID NO: 8386 - DNA, 897 bp, Cannabis sativa
cagcctaacttggaagtgaagaaagtcgttcgctataaccccatttttcctcaccttatttgcatttaggagggtacccattcttttggccatctgggtgagacactcatcagtgagataaggcatcaggagaccttttgtcttagccaaatatccagtttcgagagatctgccgactcccgatggccatcctcagagaattttgagactaacaaaaacccactgcaaggattccatgggccatttttgaggacgtatttcactttgcccaggtggttcaggccaaaaacaaagattttaggctccagagcttgtaatctccaacccggacggagcttccacattcttgtcaaaactttcctcagagtaccatgagtcacttctttttttgagaagaattaacccaccaccatctttgcgatagtctcctggggcgtcaccaagttcggcgccacctgaatagaaaagtcctccaaacaacagttctctgttttagctatcatctccgccaccacgttgttatgcactgactccatacccaccacccccagcagacgggccacacagaagaccaaaagacatggaatttgagaataacaaaatcttacgaaaatagaaaaaagcttgagaatacgaaatccatatatcaagacctaaacaagggaatttttccttccaatcatggacaaaagggatataataccctaagacacccagtacggtgcatgtgggtagcaggccactacccatggccaacggcccaccgtacatgacctacgcacccacacctgcatagtacgaagccaatatgtacggagagaaaatgtatttgtaatattgcattcaatatatgcaaaaccaaatcctggtataattttttacactatttattattta

SEQ ID NO: 8387 - DNA, 1299 bp, Cannabis sativa
acagtggtattgcaggcagcagtacgaatgtcatccaaaacatacaaaccattcttctctttacctctgccaatcaccatctggagccgtttttcctagataacaaaattgttagtatagaatttaacttcaaccgattcattgttcgtgaggttacttacagaaattatgttgaacttgaaatttggtacatagagaacattttcaagaattagatgttttgagataagaacagtaccacttcgttttactaataatgattcatgattaggtagagtaagcctagtggcaggcacactacagatactttgaaaaagtttaatgttgttgcatatatgcctagtagcaccacagtcaacaatccaagaagtatcaaaaaattcagatgaagtgtaagtaaggattataccagaattgtctgtggaagtgtttggatctgtcacaggcattttgttgtgttgattagcaagcaaattgaggagttgctgatattggatggcacttagttgaggcaaaagagtgtgggaatccttattcttgacactggtttcttcattagattggatctggtttgccactgcatcttttgatttatttttattgtaccctggaggatatccatgaatcttgtaacatctctctatagtatgaccgtggatgttacaatgagtacagaagggcctccctttcttcggtgcttgagacttttgatgatctaatttattgttcttgtcaccttggaaagcaaaggcatggctggtattcgggttattttctgctgcaacatttcctttttgattttcttcttgagtaaccaggtggaaaacccgattgatttctggtagaggatccatcaagagtatacttccacgaacctgagagaatttatcagacagtcccattaagaaggacataatatactccatgtggtgatgatcttggagtttcttaactcctccacaggtacaaccattgcaggtacagcttggtctgtaatttgctaattcttcccaaacagtttttaacttggtaaagtacataccaatggtgagagtttcttgtttaagattcattagattcttccttaggttgtagatatgtggcccatttctttgatggaaacgcactttgagatcagtccagatgttggcagccgattcatcgtataggatgctagaagagatctctttggacactgaatttagaatccaggagatcacgatgttattgtttctggtcttggcattaattatacagagtataatcggaaggagaaggtttttgaatggatccatcaag

SEQ ID NO: 8388 - DNA, 756 bp, Cannabis sativa
ttctatagtggctggctgggcagtaaataactgcttgaaatatagacaagcaaccttccccacctttttatttccataaacccagcgagcattatgatcaagcagccccttaattgcgtttttcctcttccttgagtttgcttttcggtggaaaaatttggtattgcggtccccttcctttagccaaagagcacgactcctttgtttccaaaatttttcctccttgtccaaatacacattgtacgatttctctatttctttcaagtgattccagcttctatggtctgtttgagtggataaggctgccattttatcttcatattccttgattcttctatgcatttccttttttcgggtcttattccaatcatgaagcaccacaccacatttcttaagttggtctttgagctgtccagccgtggtgctttttgttcccatcccccaagttttcttgactaaatcatggcacatttcttcctcggcccaggcgtgttcaaaatggaaacgagaatgccatttaactcctttaatggcttcttgttgctgtgtatcacatatgagaagtaaagggcagtggtctgaatttaatctctcaaggtgcactacttttgcagcagggaacaagtcaaaccaatcggaattcccgcaaattctgtctagtctttcaaagatcagattttcttgtctcccgttgcaccaagtaaacatatttccttcaaaatccacctctctaagatagcaatcgtctagagcttt

SEQ ID NO: 8389 - DNA, 525 bp, Cannabis sativa
taggaaaggaaagcaacctactaagtccttcactttcttcatcttactgacagatagaaagactcttaatcaaaaagcctatgtgtgttctcaaagcttggtatattttacatgtatctctatatcaatgaatatcattaaaaaaaaaaaaacaagattaaaatatttagaccaattatttgaactaaactaccatcattactagtgagtagtatagtataacatacataatctaaaagaaactatgtaggaaatgctaattaattttacttcaacctaaagatattcctccttaaccaaaacctttacttcaacatcacattttctctttgttgagagaatgttttgctcacattttcattatcctttgccatacaatacctatttatacatctcatgccattgacaaagtaagagttgtacaccatgaataataataatgaccaatattacaagatttttaccatctttatcagccttctttgcatgagatttactcaaatattaattgcagaagcttctgtc

SEQ ID NO: 8390 - DNA, 546 bp, Cannabis sativa
aacattaaatgttatgccttgaaattcgtacgtggggagtgtgcagacagttacaggaggtcatgcaatacatcattcttcgaatttaaattctttgatttttaaattttttgtttaaatgtgtgtaccccaaatactagtagttgatattgatttgaatttacactaattctatgcaaaattatcccttgttttttcttggccaattatttttggctctttgaagcttctagaaatttcaaaacttcaaatccctttctatttggaattccataatggtgttaaccgtgaatatctaaaatatgagtattcttacaaaaagaaaataggaggataaatgattcaagatgttctatacaagcaaaagaggacaaaagatggccccacctcttttgtcctaaaatttttttttgtcacattgggctaaatcttggtacctacacgtccctatacctgcgtccccatgacgcccgcaccgcctcctcagcccatgcccgggcccacacctcagcctgtgcttgggcccacacctcagcctgcgcccgc

SEQ ID NO: 8391 - DNA, 703 bp, Cannabis sativa
gacataatgacaatcaaagacttttatttctttgtttgtctactctagaaaatttggcattataggaacgaatcattacacaacaagccaactccaaattcctctttgaccatccaatgaatggaagattatctatttctacaccaacaacaaaatatagggaaaatgccatgcaaccctaaaaatgctagtagcccttcactacattggcagccactgcctccaggaaagcttaagcttaatgttgacgctacccaaaatattcaaaagaatagaataggctttggcttgatagtttgaaatcataccttagatgttgtcgcaaccttagctacaccttggaaaggcgtccaccaaacacttatgatggaagtgcattctctctaactcgccttcgaatggtgtcaaaagtactcacttatgatcaattaaatagaatctgattgtcaaattcttattgatgttgtaattaaaggtcactccaataatattcaccgacatgaatttgtaaccaaaattaatagcttgctgtcttcacttcctcaagcttcaattatctatgtccctcgagaggctaattatgtcgttcatggactagccaagcaatctataggcttagaacatgaggctattctctgttttcagcaattgtttcactttcttgcatcatgtattattggaatttatcttaatggatacaact

SEQ ID NO: 8392 - DNA, 1241 bp, Cannabis sativa
tttatttaattttgaaaatatgaagttaggttggataatggaaatttaagcaatttatgtttaataattttgatcaccattttaatttttttggggggaaatttatgaaaattagcgatttgtaactgtaaaatttgtaaaataaccaccttaaactttacactcatgagtgtaagtaaatttatggttgttttatgattattattttactaataaaaattttcataaacattatttttacaactttaaattttttgtagcaaaataatcatgtttggtggcaaaagcgataaaaaattaatagtagttttgcgattataatttacactgtgtgaagataatggtttcattgtgtaaatttagtgtggtttttcttttactaatttaatgtattaatttggcaaatttcttaaaattaagctttccttttttgttttaatatttatagttaattaggcacaactttctgtttgtttgctgagaaagtaaataggaatttattgaggaaaacaaaaaagaaaaaagaatactatgggtgcttaggttactttttgaaattaaaaaaaaaaagaaaaagaaaacttgtggagaatttttctacttaagtatataatataaaaatattcgtacttaagttggttttgaaaatagattataattttatatttatgaagaactctgttctgtgattctgtaaattacattaaaaataaaatatctttcttttttcatcaaataaataaaatatctttcttgtttccaatttcaatgacttatttagaagaaagtacatttggaattgaattattattgtactaatttagaagtgaaatatcttatttttattttactgttctttacaaatatctaattagtacttttttactgttgaaggcttcatagttcatacagtggggtcgcattttgtcccccccctttgtttatcttgtcggtctggtccacaattgtttggattaatagttagattgatttttgatcattacaagttttcaaatctaaatttaggaacagaattccgagccacgtgagattggttggtcgagaggactgcaaaattatcgcttaataattttgcagtcttcctcaccaacccgataatgccacatggctcagattaggaacgtgtttgctctcgagatttattacattatgctttaaaaagttgtcatgtgacaattcttgattgattgaaattattaaatatttatgtcaaagttcta

SEQ ID NO: 8393 - DNA, 992 bp, Cannabis sativa
tgacatcacagttcactttgatcttatctctaggaggtggagtccacccaggcataggatccacagaatctcgaggaaaaaaagaagcaccataatctgcataacagtaagaaatcatattaatataatatgtaatgttaaataaattattattgtagaccttattattacgggcttgctaaatcgtgtcaaccacaataaaagtataaaaactagatgagattgtatatctactttactttatttgttttaatttatatttttatttttatattcataaattatgcgctagacttagtagatggtaaaatatattagacaactcattcataaaactagatacattttaataaaatttaatgtgaaagtatttttaattaatgaatagaaaaaaaaatattccactggaaaaataactcactggctcaaataaaaattatttcgcccaccgtggggctcgaacccacgaccacaaggttaagagccttgcgctctaccaactgagctagacgggcttttgattttaatgcaatgtaaatattatcaatgtgaataaatttcagccaataggtctttcttcacaactacacaaagagcagcgaaacgtaagaactatacctgagcaaaatcccgaagcagacgatttgtgaaagtaaacaatggaggttgaaatcgtacagaccacggtggagatcttggtagccctcgtcgtaatactaaccctgggtttactctctgttatattttttgaagcttatcgaagaaggcacaaccacacgtacgttcacttcccatcgtctcccattctcaattctgctattttcgtttctgttctttgattaaatgctgtgatcgtgttttcctttttttttgggcagtcacgtcgaagccccggcgatcttcgaggatcccaattcgttgaaacaggttcattatcttatgtaaagttgctttgcaacgtttttgtttcagattcaatttgaagtttgtat

SEQ ID NO: 8394 - DNA, 957 bp, Cannabis sativa
ctctgtctccctccattggcgtcatagtaccctccgtgaataagatcgcaccatctgctggggcctcctttaactcagaaaattgagcatccgtatgaactcctcccaccttagctttaccccgtgctttactcttaatggaaacacgtttccttcttccattattctgctgacccattccacgagtctcaacaccacaccccggtttaaagcttcccgattccaccccttccaccgccgtacctccttccatatcgcaatcaatattatcagagccaaccgtattcctcccacacttcctttttcgaccctccccttcatcatcaacttcagattgacctcctccctttgcaaactctcgagttcgaacacctctctctttctccacattctcctgattgtgtttcttagcattgtcctcagtcataaccttttttaaattactaggcccaacatccttcaacccaccattgctaaactcaacttgggctctagtaataccatgtgggcttttagttgtattatcccctctattccctaagcccaattctgtcaccaagtccatcttaccctttgacttattaacatggaaatgatcaaagagttctgccccacgactcactcctgtaaccacctcctcctgtaactactgttgaagagaaaaccgctcagacgtggttcccgtgtccggaattacttcccgaacctcccccctgctcaggtccttccgtcgagccccctccaccacagaagtttcatctaactcagttgaacgatcacctcgttgtcgggccattgcttggtcattagcaacaaagcaatttggaactggatcttcatctcttaaccaaactctatattttggcacctgactgcctgttgcactaatctccatagccattgattgatcgcatcccacttgatcatgtcccaaatgaccacatttaaaacagagaa

SEQ ID NO: 8395 - DNA, 972 bp, Cannabis sativa
aaaaagggtaaccgttgttttgatatctagtttctaaaacattgtatgtatctcgtcatgtagtttttcttgagctttacctttcttttctattcatggtaatccttataatttgataaaatcagattttattcacatatttgacccattctctgagtctgagtctgaattatccactaattcaacagttctttttcctcttcattactctcgcatgcgtcctattgacaggtctcaagaattagatattggtacttcgcaacccgaaattactcctccgttagatactagaactttgcaacttgatatcgatcctccattagatactggtacttcacaacttgaaaatgctccttcccctcctcctgtagctattccaaatcctcttgagattgtggaccctcctcatcactattgtcaatgcattcttaagtctactagctgaccaaattttacatactcttcttattctgcttcttttactcttttttttttggcatttattcattgtctttctaagcctttgtcctatagagaggcagttattaactccctttcgtagtgtgttatgaatgaggaactctgtgctttgcaaaagacttaaatttaatacttttgcctcttggtaaacatgctattggttctcgtttggtgtataaaatcaagaccaagtctgatgggtccattgaacggtagaaggctcgattagtggctaagggattttcacaacagtatggtatggactaactaccatttgcactcttatagcagtggcatccgttcaccattagactatatcccaaatggatgttaagaatgcctttctgaatggtgacttacatgaggaggtctacatggttcctcctcttggtgttcctcataagcaatgataggtttgcaagctaaaaaggctttgtatatggtcttaaacaggcctccgagcatggtttttagaagttctctattgttatt

SEQ ID NO: 8396 - DNA, 586 bp, Cannabis sativa
taccgataattctctaatcttctataagcaataaaagaggcctaacccacatgctatagataaccagttctccagtaagcatcattgtaccaaacctgctaaataagatataacacaatctattcaaactatcaagtgtatttccaccctataaatcaatagaaaaaccccgaacatccaatctaaagtttttgatttggtaagaaatcacaccaaaagttttccaaatcaaccttaatactacaggacaaatatgaacatgtaggattaattctaggataattatttttgctttcacaatgtgagacatgaatagattttgcttgaaaagagctttccaactcatttgaaatcacatcaattgaaattgtattgatcgagatatgcttatttactgcggatagtttttaaatttaagtacaaaaaatactgcagttacatttaattggaggtaatggaatgaaaaaaaagaattcattccattattttatttagtaatattttagtagagtaaccattttattttaaaaatataggatttagtttggttatgggttaactttttggtccaagacttgtttcaatt

SEQ ID NO: 8397 - DNA, 1038 bp, Cannabis sativa
gcagccttgtttggtaaccaatggagacacttagaaatttaatttggtgaacaagagtgaagggaagccatttgaaagaaattcaggtatagcacaattaccacttgtttattaccttgttaagtgtattgtcttattccttgtacaacaaaataattaaaagttatatataataatggtcctttgtttattatatgattatatatagaaagctgtgttaatctggcattaatagttttttcttgccttttaatataatactgattattagttaggggtctgtgactgtgttagtggactagtcttcaatggtccttttcttctttaatttttttcttttgtttattattatagtgatggttgtttctattttggagttgggagtttctatgcagaatcactacacgtgtagtgtaatggttgttttcatctaaaccagaaattgtttaaatgacttgtaactaactataggactaactagaactagacatattggtaaaatttaagttggataatataatcctagttttttcttgctttttaatactattctgattttaaattagttagagaaaacaaatataacagatgttcaaagcaacaaagaaaagagaagtagttggatgtgttagtgccttgtattatggaatcttgtgatgatcactctgctccaaaaattttagtatatataatcatatatttattattatattatgttaaagatattaattatgttcaaacacaataatagttgcagactaaaaatcatataacgttcacatcagggctccttgcttgtggtaactacaacaaccatagcttccaacagctctccactcccccgagagtcttcgatggatctttcaagcttcagttgtcagcaatggcaatggcaatcaatcgatggatgtttcattttctgcgtttccaatatctgtcacactcacaagatttgtagcataaataattaatataagatattgtttgtttaaatttaaactgatgaaataaaaaataatcaaatcacttaacaacata

SEQ ID NO: 8398 - DNA, 1051 bp, Cannabis sativa
taaagctcagctcatcgaatagagaatggcatgaattgtatttatacacaaatgattggtacaaaatattctagatttggtacagctgtacagagaaggattacaatgaaatcagtaaaagtaatattctaacaacctctgacaattcccaattcttaggaccacatggctaacggctatgacaacaaatattgacagcacaacagtaggtgattaggattaattcattttcttaacaatgaagacaagaatagagaatcatatcttctccttagtaaatgtgtatgtcaagggtgatagaataatagaggcttggtgtagtacgagtgtgaagaacaccaagaaaaagatgaagagagaaaaaggtgtcaagggatgaagtgataatacgaccaagtaaattggaagtctaggaagcagtccctaaatcttatcctatcattatctatatataggcttagggtttgttagtgatctcccacaagttggggtatctcactccaaaataatgaatgaaaaatataaatgaataaagatctataaaaatatctcgtactcataggcaaatatcccacaattattggggttgttgttgaaggtggttatttctcttgtctcttgaaattgcttatgtggcattgtactttaaaaatggaaaaattggagagacgtgaccctgggatgacacaccttggctaaggaaagtagagagtcacaagtattgtggcacaactctcctaatatccccttgtggccctcagtaaactaattaattaattctcgagtagagtgtgatatcctattttgtaaccaaattttgagcctgagaactttaaaattatcctatgactgtgacacatttatatctgcctcaaaagtatctttaaaatgcaagttgtatcaagtcatttggtcaaaaattgagatagttatgcatgttctgttgaaggatctaagtacattttagctcaaaatcttacttgtgccatgtcattacgagctatgccacctctttatggtgcaggtcggccatccatgttctcggataact

SEQ ID NO: 8399 - DNA, 731 bp, Cannabis sativa
accaaccaaacaatttctttcccacaaatcaataatactaagatatatacacaattaaacactcgacccaattcacttaaagatatatatttaaagataaaatagttatgcatccaaaactaaatggtatttttgccaatctaatatgttggcccaattcacaagcacacaaaagttatattatagaggccttcttctccaaagtcctcgaacattgagaaccaattacaggagccctacctacctacccatacaccaagcaccgtgtcctttacaccattagagctaagaccaagagagttcgaagaaaatattaaataatttaggggagagattgttttttataatctagggcagagatattatttacggggaaagaggtatatttttagttattttaattatttttttgtttttggattttttttttaataatattaagtatgtataattatgtggaacaataagaatgtaacactgtagatttatttacatgtgagataatctatgctgacacataaatactcttgtagacgacagtagaagttggcgggttttaccattaaatttaaagtttaagtgtaaataaaataatgattgagagagtttagtcgcaaaaaaacacataaaattataatattatgaattattaaaaataaaaaaaaattaccttaaaaaattgacacttgtcattataatatagagagtgcaaaatatagtataaaataaag

SEQ ID NO: 8400 - DNA, 615 bp, Cannabis sativa
ttaaatagattatttttcattctacatatgatcccactagtgtttctatttttaccaatttttaacaataataaaaagactaatttagagtataaatatttaagtttaacttcttgttgaaaataaacacctaacgaaaataaattatatcaaaatatatttagaccaaatcgagattagcagagtaattattttgaactaatttacaaaatacgcggtctaacaaaagaaataaagaaaaagaagcatttttcaaaatgactttgttaacaataactatacataattacaaacttaattaccaaaaatcctcatcaaatttacacaaacctaaacctatataggaattattttataaatactaagaaattacaagaagtatgttataaacaaaaacaaataaaaaaatttatatttttttgaattttgaaattttttttataaaaatacgattttttttattgttttcacgttgctcttacataaaaataaagaaaaaacaatttgtagaaataagaatttgtaaaaatatgttaaaaaagaaaaaaataaataaatttaaagtaaactgtaaattttcctataaataattttgtaatcacaaaaaatgcctaa

SEQ ID NO: 8401 - DNA, 1987 bp, Cannabis sativa
cgtgggattgatgctgtatacactaatcgcgggatcgtgtgtatgccatatccctgtaatctgatcctcgagttattgggatttcgttgatgactcataatgcgaaagctgaattcgctaagtcttgattcctctgtgcggatcgctgatcggtttgcttcaagtatgccagcaaggcatcttgctcgggctatactctctgagaagatacttgaggttgattccacgtgtcaccaccgtgtgatgccacgtcagagtgcaaaaattgggataacaagggtcaatccctatcatatctccatgactctaggcaaactgatcctggttcgcccttaagaaacttattagctgctattttaactgctcgtctaggttcttcccaatgtacacactttgtgggatttcctgggtcgagaacaacttcttccaattcttctattggttttaacaagtttttttcatcttcaatttgaggatctagatcttcacccttcttttcactttcttctgccaagactgccattaactggtgatcaacttttctatgttgtacctgtatgcgatagcaatcacgagctagcatctaatcgcttcgcaccactcccacaccctctgctgtttgaaacttcagggataggtgcttgatcaaactaactgcccctagtctgatcaatggtggtcgacccaataatatattgtaagctgatggcaggtcgacaaccagaaagtcttacataattgtggcagataggggtgcctctaccaaggttagtgcgagatcgactatgccctaactggcgatactgtcaccagtgaaattgcatagatttaccatgtaaggcctcaatttggcctttttgagccccatcttcttcaacgttccattgtaaaggatgttcagtgaactctcgttgtctatcaacaccttctttgtccttttattggcgagctggatagtaataaccaatggatcgacgtgaggatacctcacgttcttctcatcttcatccaagaatatgattgaagattcttcagtttttaccttcttagaaggtttaggagcaaatactgactgcacattttttatttctttcacatatctcttttgggcgttattgctctctccagcaatgtgcggccttcctaaaataaccaagatgtactctccttctctaggaggaggttgtaacccctggttgtttgggttgttaggcagactgggctggtgatgtccattgccctgtctctttacatactgcttaaagtggccccgagtaatgagactttctatcacatccttcaattgacaacactcgtctgccaatatccttattgtgtttgcaatacctggtaggatctcttttgtgcctcgcatgcctcatgggctcaagcttgttgaaggcaaccttgtgctcatgcgccaggtagatattttctcgagtttcattaagctcgatataatagtataaattggcacatatttatcgtgcttcttttgcttctttttgcctttggatgactccttagaatcgttttttctttttgaggcagaggccccttagttatcaactctagttgagacagtgcttgttgaaacattgctgggtttgcctcccaagcctgctttcagcaagttcctatcttttcaagattcctcttttcggacgaacgcctaagccctcttgctgaacttagtgatgttcttcactggacgaccctataagtcgttccatagtttgcccccagcggtggatagatcaatagtgatccccgcctgaaggtcaataatctgtgtactatcatccagatttctaacccttgcagcagccgtgataaaacgacttaagtatcccttaagtgtcttgtggggttgttgctttatgttggttagtaatgacgccacttgtcgtctatcacttgcgacttagaacttatttttgaaatccttggaaagctattcccaggaaattatggaatgatgagtaaa

SEQ ID NO: 8402 - DNA, 587 bp, Cannabis sativa
tattgttatttgtttgttcctaggttcaatgccacaaaaatgctggaactgataagagggaaaaggcttgtttttgtgggtgattcacttaatagaaaccaatgggaatccatgctatgcatgttaatgggggctattaaagatccaactaaggtttatgagacacataagcgtagaatcaccaaagggaagggaaactatagtttccgttttgtggtaactctcaaaaattattattatataataaaaataataactctttccttgctgtcatattcagctgtaatttgatgatttgattacttacttttttcttcgtttatgtcgttttcataggactatagatgtacggttgagtattacgtgacccatttcttagttcacgaaggtaaaggaagagtggggcagaagcgtttacagactttgagcattgattcgattgatcgtagctcatcaagatggaaaggagctgatattttagtttttaacaccgcacattggtggtcccattacaaaactaaagctgggtaagtcttttattgttagacaacacttgtagtgttttgcacccacaaatcctgagatcc

SEQ ID NO: 8403 - DNA, 604 bp, Cannabis sativa
taggcttggggagagaaaagtctaggcactacacaattaaaactgcttataaactattccaagaagagaaggaagatcattttatggctgataaatttggttttctgaaataactgtggcagttgaaagtgcctccaaaggttaaagattttctatggagggcagtctcaagtttttttccaacaaaatttcaattgagaatcaaaaagatggaagttgacacttattgttaatggtgtcttatagcacctcaaactactaatcatgtgttagttgagtgtgcttttgtgcaagatatttagagtagttttggttggtgatatcaggtggccataattccagttttggagcttggttacatgatcttttcaaaaatatggcaaggagaaacacgttgaagtggccatgctatgttagtcaatttggggaatccagaatagtctagtttggaagcaaaaaaatactttagttttgtaaatcataacggcaggagctgtcactcttcaacattattgtactgctcaggcttctaatgaagtctctatggattcgttggaaccagtagttggtcttgagaaatggacgaaactggatttagaaaatc

SEQ ID NO: 8404 - DNA, 1005 bp, Cannabis sativa
tacaaagattatttacttttttaaataatgattgcattggagttgctgttatagcttccaaatcctttattgacaacaactaagagcttaatacatatgttgttgttcctttgtattttttggtttcccgcattaggtatcgatatataaatattatataatacaattaaacattaaaccctaacgcatggcccaatacttatgcaattaatatatctaattaattaaccactccacagctctttctaatctggccattggtcccagtcaaaggactaatattacccatcttcaccatggcactggcgaagtcattgaagaatctcaacggactggtactataagtggttactaaggagtcctgagatccgccattgaagagctcttggtcagagtggagaagtccacgcttactgatcagttgtttgaagtagtcgttatcgaatctgttctgggtggtgtcgaagggagcaaggttggtatcgccgccggagaaagggcagttggccttgcgtgtggtggcgaaggttgagtcaatgttggtgtcgttgtaaatgtgtgtgcggaagttgaggcattgggacaagccgagggtgtgagcaccggagagagcggtcatgtcggtggcgctgaggcctttgttggcaaattgtctgatgagagtagcgagatcggagctcggaccggggaggtctcggttggcgtcgctttggctggcggttgttgagtctctccttccgaatggtaccacccatgaaggtccccccaactgtattaaaaaaaaatgaattactagtttaagttttcagaagatatgtggattaagtttgtaataaaaatagatgattactatttttaaatttgcttacaattaattaattaattaattaaatagatactcaaaacatgaaactataaatttagtgtataaatcttagaaacatcatgtcccttccaaaaaaaaagaatacgttaaaagctcaacctatataggctatatatata

SEQ ID NO: 8405 - DNA, 729 bp, Cannabis sativa
catcttgttttaatataatgaaatactaaagaaacaatccatctactatcttattgtacaaaaattcaatgcacacttttaaaagagtccacagattccacagatactgtttctgtattttgaaaaaaaaaaaattaattcaattttttttataattgtctacgtaacagttatttaggacatcttacaaaattttaataaattaaaaaaaatgccgaaaaataggattcaaaccatctaaaacatattgtttgaaacctattttcggcatgttaaatttttttgaatcttttaaaaaattttaggatgtctcaattacctacaaagtatcccttattaattattatatatctattagccaataatagttattattttttatatacatataactgaaaaaaaatcaggtggtgcaggtcttatctcctccttcaacttaatagcaatcccaaagaccaccaaataattaactgaggtttatacactatttctaagatggttgctcatcaaggccctcttacgcaaggatactatggcttaaccaattggacgcacaaatatctattactctaggaggagcgccactttaaagtacaaaattagtgctaccatggagacacgaactcacgtaaagccatccaaccaattacctgtgtggttaaaaaacctagttaaagtgattcatctggtataaattgcagatacgtacgaaaattaatatatcaacct

SEQ ID NO: 8406 - DNA, 852 bp, Cannabis sativa
  modified_base (493)..(508): a, c, t, g, unknown or other
ttccctccaattcaaaatacatatatgtgtgtaatagttgtcctcaaaagataaaaaaaatagaaaaagtatgtacacggcattaatgttttaccatcattatgataatcatgtagtaaattttctgcaggaggagagatatatatctatgaaaattaaaagcaagctattttttttttagaaaattaaaagcaagatataaatttgatggcactttgttactattattggaaatactaatatataaaaaatttaaaacgcccaacaattttcaatacatagctcacgatttcagtacaaagaattcaataatgtgatttatacatgtgctttttttttttgaaaggatttatacatgtgctttgaaataagtaattaaaggtacacatttattttgatcaagcttttacgttggtaaaaagttagagaggtcgattttgttatttctgttttgattcagtattgtacttctatttattattattattattannnnnnnnnnnnnnnntattattattattattatgatacttgttgtggtggtaaaaatgtacgtttttttaaatcaatggtaaaaaatgtacttaaaaactaaaactaataataaaagaacactctcacaataaataagagaacaaggtcacacacctaacatttatcaaagcgtgtgcactgtaggttgacgatactataataaaaatataaattaaatgtttttgtatttatattatattattttatttatttttatttttgggactttaggtaataacacatcgaaacccaaacatatataccttcttttaggttatttattccgaatgaatgtcttcggacttagctagtaatggg

SEQ ID NO: 8407 - DNA, 1186 bp, Cannabis sativa
ggaaaataagtttcaaacagtatattttacacgcacgtataaaataattaaaaaaatgttgtgtgtaactaactgtttgaaccttattttcagcatgttaaatttttctaaaaatctcaaaattttaaacgacattttaaataactacaacgtaaacgattataaaaaaattaactaaaaatttctcacatggttgaaacaaatagagaatatatcgatatatagacttttttttttaaagagttgttgaaacattctatatatatatatatatataaatttctttatattaaatggccccacatttgcttattttcacttccttggtgctgaatttagatttcagatggagttaaattattttttgtaagagaaatggtaaaatatagtgttggtggttagaatttgtatggtattaatacgtagttaagtattgagtctcatataatttaaaaaaataatttttaaaaaaatattgctaattaatcataaagcaccaccaataatgttggacactattaatggtaaatattattactctttccttaattctatagttaaaaattatacattggactttctgcccctctgaattttttgtggcaatagaagtacttggtcttgctgtgatggttggaatatttaggtgcatgttacaaatatatatacatatatatatatatatataatcgatattggaaaattttagaatgcatctagtatgtaccaatatattattatttgttttagtattgaaataattttttagactatttttttctcgtgatcatgtacgttataattatttaaaatattcagcacaattttaataaatgtggaaaatggaattaacacgccgaaatagggtgcaacaatttgttgtatccgtgattattttattttatacgtgtgtaaaatagattgtttgaacactattttctatattgtaaattattttgaattttttaaaaatttttaaaatattttaaataactatgaagtacataaatattgaaaagaaaatttttaaaaaagattgaaataaaaaatattttaaaagaaaaattgagtgcattcctattaaaaaagtgcattgtaatcacttaaatcatattttttctttcggattaacgagaggtatttgttttctttttaaatatagcatatataattcctgttagagata

SEQ ID NO: 8408 - DNA, 1108 bp, Cannabis sativa
taagctactagtgcaattcaagatcattagagcatttctatttttaatagagtaacaaaaaagtagtatattgttatattttagtatattttaaaaaaattattattctaatagtgtttaaaatatgtgttaaatttggagcatactaaaaattgtactaaatttgatataaaatataatattgtgttaaatttaatctaaatgctactttttatttacttatgacactaattattataattcattgaattagctaaactttatattttatatttactatattaccataatttaattaataaaagaataaaaaattataattttatatattctcaataaaatattatataatcatcatcaatataatcaattatttttcttattttacatcttgtacattgaagtacaattcttcagactaaatataatataaacttgtttttttttttttggttaaatttagcaaaattttcaaattttctaatgaagatggtgttatatcccaatatattttaatttgagaattactatagaatattaataactactcataaattcccactttatagtagtgtgggttgcctatataatagcaattatatgtaaagatactcttattttttggaccatcttttaattttagtgtaaattttccaaggcaaaattcaatgcgaagaaaaatagtagtttactacgaactctttgaatttgttcaaaattttgcaccgtacagtaattaaagctgtttaattagttgaaaattgagtcttattattgaacaattagtataaatacatttgaattaaaagtggtattttcgtaaacatattattaataattactcaagatatatatatttataaatcataatttgtaatttttggtttggtattgttttacagctggaagctcgttcattgaagagtaaatatagttatgatttttccgttccttgttgtaacgataatcatccaggtttttggggctgattttctggcgtaacacatggttaatttccaatgtatgcaaatgcaaatataattttcatctttcatttttggttttgtgttctatataataattaatgtacgaggaatatatatatata

SEQ ID NO: 8409 - DNA, 651 bp, Cannabis sativa
aacccgccgccgccgccgttgcagggtgttactctatggatgatatatggaaggaaatttctttgcctgaagagggtgtctataactgcaacaatcttacctctacacctttaatagcggcggcggagccctctccgccagcgtgggatgaatattactgctcggactcgctttggataaataatttggatgaagaagtgagtaataagtcccgaggttttactcaaactactgctactgccattaatgacccattcaattacgcttgcttcgactatggaggagcgtttctaacaggctgatctttaggattttatttattaagatttgttaatataatatgtaaaataataataattaaaaaaaaaaaaaaacacagtatcgatcgtaagtagcaaggtctaagtccaagactagtactagctagtactaccactacgtcgtcgtttcaactctcgaactgtcatattatgggctaacctctatatgggttttctttctcagtcatatgataaactctgtcagcttagcttggcttcttcttcggttcaacgcagtgggcaagtggcatatgcatagtagttttaagcagtttaaattctctgtattcgtatcaacattatgctttattattgtgtgtacgtattcagt

SEQ ID NO: 8410 - DNA, 692 bp, Cannabis sativa
ttaaataagaaatgagaatgcaatatcttttgtaaatttataaaaaaatttgtttctttcaatactggtggaaccttatatatatttataaatataaaaaatctctaaatatatctatcataatagttgaaaataccctataataagcaatggtaaaacgttactctatgaggaaagatattatatcctttgttgaagatagagagatgttaagattttcatcatttgtttgttaggagcggaaattggaaggaagtttatttgcacaaaaactataatatccttagttgttatttagtgataaaatatttagaagtgagatcctggaaaaataatttgaaaccttttacagattctttcatttcttgacaactggtaaacacacttgtaccaaatgtctcggttaataatcacttaaaatgaaaacaaaggaatgagaatgtgaatgtgaatgtgaacaggaatagaatgaaataaaattttatatgcataattttttttataaaagaattattcttttttaaagttcttctagggagttaatctggttaaagttgcttttctagaaaagctaatttaaccaaatttttttatacaactttaacaatacatacaatacaactaactaatcatatcttaaagttagttgtatggtttcctcatttataggattaggtttaattctgtaatta

SEQ ID NO: 8411 - DNA, 2510 bp, Cannabis sativa
gtaaatttaaatactggtaaaatacgtttcaatagacaaaccatacgtattacttcctttatcggttctcaagggaagtcagtgaaagattaccccagacctcggacccgaactccagacttgaaccctggaccacacccaaacctcgaaccctggaccacacccagacctcaaaccctggacccaaacccggaccagaaccccagaccccgaacccaaacctcgaacccaaactcgaacctagacacaaaccaagaccccagaccaagacccgaagtcgaacactgacctagactcggactcgaaccccgaacctaaacacagacctagaccccgaactccagacaaagacccagacccggaccgtgttcgaggctcggtttgggtctgggtctgggttcgggtccgggtctacgtctcagtccaggtccggctccagggtctaaggtttgggtctggcttagaggttcggagtctaggtttgggtccgagtctggtgtcctaagtccaagttcggatcctgggtcttggtctcggtctggggtctggggtctagatccgggtccaggtctagggttcgagtccaggtttcgggtcttgggttcgggtctgggtctaggtctggggtccaggtctagggtttgggtatgggttcgagtctgggtttagggtctgagtcttggtcttggttcaaggttcgggttctggtttgggatctgggttcgggtctaggtttgggaccaagtttagggtttgaggctcaggtctggggttcgagttcgggtcaaggtctgggtacggggtccgatctgagtctaggtccaagttcgggtctaaggtccgagtgtgggttcgagtctggtgtcctggtccttggtcttggttcgggtccagggtctggattctagggttgggtctgagtcaaaggttcgagtttggggttcgggtctggggtctggggtccgagtctgggtttagatttggggtcttggtccgggtttagggtttgggtctgaggtccgggtctggggtcgaggatccaggtctgggtctaggtccaggtaggggtctagggtttgagtcttggtctttgtccgggttcagatctgggttcggggtctaggtatgggtctggtccaaagtccgagtccgagtctgatgtctgtgtcctggtttaggtccgggtccggagtctaggtatgtgagcaaaaatataaaatatatatcttagacaaaaaagaaaattacttttaaaaatagaaaataacatttaaatttttttgttttctagttttaaaaactcagtttttaaaaaatttgaccaaacgacccttattaatttttaaaaattgttttttgtttttaaaaactaaaaatagttcatcaattttaatgaaaaataattgaaaacgtagaagcctttcaattttcattacagaaagaaaaaacaccatttttggccaaaaaaataccattttcagccaaaaaaaaataaagaaacaaaatatcaaaactcaccaagatgaagcttcaatcaattctcaagcttcctttatgttgtatgaagcttacccaaacatatttcaatctaaaacattcaaatgcaagctaacatttcaatattttactaattttttagactaaaataaattaacaactattaggataaaaatatcaaaaaaaaaaaataaaataaatcaatagtatatatttaagctcaccttttttttgaaatggttgtgatgaaatagaagaagagaacattgatgttcgcttgaaattttggattagaggagaatggctgccattttctcaatgggaaaggaaatagggttttttttggaagatgtaatgaagaagaagaaaagagaggttaaaaggcgtttaggcgtgctgggagctaaaaattttaccaatctcgacgggccaatataggcccaccgttattggtaaccacggctggaccaataatggggggcctatattggcccgtcgagattggtcaaattttaagttttacgatttttttttaaaaaattacgcctatctcgacacgcacacgcgagcccgccgagattgctcaaatttgaagttttaaaaatagaattttttttaaaaaaaaatcaagcctatctcgacacgcacactcgagcccggcgagagagggctgccgagataagccttttttgttgtagtgcaaacaacttctaagtctttcatctttctctctagagttaccattgcttatattaaacgtagtaccaatatggggacacacgtattagttctagtgttggataaagattattcttggttagggactatatacctcctccatttactgtaaatgatttaaggggtaacttatttctgctgctatctttttaaggtttcttaatattatatgtgttattttttgtgtttttttaatgatttcatattttaggatgttagattatttatgtgataatcaaacatacataatagtaaatttaaatactggtaaaata

SEQ ID NO: 8412 - DNA, 647 bp, Cannabis sativa
acccctatcaattctgcaattttatgttgaactgaaccacaccacgactaattgaaacagcctcaatcaattttcctgcaaggtcaagggccacacaaccaaaaccatttttcaagttttaaatgaagagcaatgtttgttctccacaataaaatgaaaatgtttgtaaactttttgtacaaaaataacttttcaacaaagagtactatatggtatatgtgatatgacaatgtatattttagttatagtagatctcttgtttattttgaaaaattctaaataatttagaatctttttaagttactagttgaaaatatagaatataataacaacaatgtacacatacaatcatatcaactgaaaatagattataacttctctatttgccaaaaaatattaaaattatatacatatgccttcacacaataataacatagggtatactaagtcgtgtaattattaggtaataatctagtgaataatattacattatatttaaattatttatagtaattatagtaattataataaaaataatatagtttgataattaatttttgaaatgaactttttagtaatgtaattattacacttcattctcatgtaaaatgtaagggttagagagattaaaatatctcaattatgtg

SEQ ID NO: 8413 - DNA, 1084 bp, Cannabis sativa
ttccctatggaacttgtcaactatcaaggcccccataagtagctcacgggctttaggctcagcccaacactcattggaaggccattttagaatttgggcttgggtcccatgtaaagagcccaaataatggtccgatacttccttttctagttcagtatgggtcaatggcacgtgagattcttcagagatggttgtggttgtggacccagtcaacttcttatttgggatacaggttagtttactttcaacacaataaggcttggtcttttccagagaggaaatatcctcacttgtctctctcgactgggttgcaggaagcttgctcgaagacccctgttccccttctgttcgagccttctcactggcctttgcagcagcatatttctcagccaattcctggagctcttgtatggagacacactttgtattattcccaaaaggggcaatctcaccaatgcccgggaggtaaaccaaaggtaactgggtaataaccaaatcggattgttgatcggcgggggcctcgtcatcatcggtaacaatccttttcttgcttggaagttgtcttctacattctctcatttcatcggactcgccattgcggatagctttctgaactttcatctggttcctaaggactgggtccttacagagagacttttgtagtatccaatcttggaaccacttagccaggggcgacatgaatgtggatttctccgctgcatcgctctctagccaaatgccgaacataaaataaaagtttcccatggcatccttgataatcgttggcggtttaaagcatacgctttggtcatgtgctattatgccacacttgaagcacactttgggtagtctctcatatttgtattgcagccacaaatcctttagacgctggcgcttgaggaaaaaacctgagaagatcggcttgttcaagtcgatagtggccctaaaacggagtgtactcataccaatggcatcctcaataccaggtggtagttcatagacaggggaggcctttgaggctagctctttcaagttggaaaggttccagtaaaaggggggtatactctcaacgttaacccaaatc

SEQ ID NO: 8414 - DNA, 1874 bp, Cannabis sativa
ctggccatcgcaacctcaatacccttacaaatcttaataggcaacctaaacaagccatcgcataagcagggatggcttgaatcacgactttcaaaagaacctctttaccaacactaaaaaaatacttagaagaccaacatctaagtacataagcaacattaatcacaaaggaaagcaaacgagtgatatttagatctagagagacattgaggaaggtccaaatatttacagacaaatggcctatcttctaagttaaaagtatcaaaaaaacaaagtgcgaacctcctgcaaagtattgggagaaaagagaataaaagatttggaaaaattaatagcttgccctgaagccctagaatagatattaaagacttcttgaagagctaaataagaacctctatcagcagaacaaaaaagaaggttatcatcaacaacaaaaaaaaaaaaaaagatgagagataggaggagcatgcgtagagatagtaattcccttaagaagttcagcatcctgcctaaccctaaggagagaggacaaaccctctacacaaaggatagaaaggtaaggggataatagatccccttgccgaagacctgtagagggtttaagggaacctttgacaacaccattaataagaaaagaaagattagtagtagaaatacatttcataactaaagtaacaaacttaattgggaagtttaaatgaaacataatactttccaaaaaatgccattcaacacaatcaaaagctttagccatatcaagttttaaagcatcccaaccccttttaccacttttgcgagagttaatggcatgaataatttcttgggcaataagaatattatcaaatataattcaccctcaaacaaaagcactttgaaaaggagagataattttgtgaaggaccactttgacacgattggctagcactttagaaataactttatacatagtagtacaaagacttgtgggtctaaaatccttcatagagttagcatgttgtttcttaggaattaaagctataagagtagtactaatattagaaaagtcaacattattatttaagcaatctaaaatagcatgaacgaaatcatgaccaagagtgtcccaatttttctggtagaaaaaagcattaagtccatccaagctaggagctttatccccagaaaggctgaaaatagcttttttcacttcctgagttgtgaaaggctgaaaatagcttatttcacttcttgagttatgaaaggctgagccaagaagtcaatttcaggctcctccatggaaggccctaaacatcccaaaatttgactagtagcctcagcatcacaaccctcagaacgaaaaaggttagagaaaaaagaaaaaataatatcaaacatagcctcaggatcattggttttattaccaaaatcatctttcaagtatttaatagtattattctttttcctatgagaagcaaacctatgaaaaaatctggtatttttatctctagctttaagccaatgaactctagcccgttgtgtccaataaacttcttctttataaaggagagcatcaagttaagactgaagatacgtaagacgagggctagactctctactatcaaaggtagcggtccgaatcttaacaatctccttttgaatgtcctagattcgagattggaaactaagcttagtagatttattccaggattttaaagcagagacacaagagttttggaaaaaaaaaaaagaaaacgaccaaaggcatcctcattaacagaaatgccagtggaattcagccaggaatcctgaacagttgtataaaaattagggttctcaagtcaaatattttcaaattaaaatctttttttaacaaaatgagtgctagtggaattgtt

SEQ ID NO: 8415 - DNA, 867 bp, Cannabis sativa
ggagtaaaataaaatttgacattgtccatctgttttagaaggaactaaagaataatgaaaatttaggtaactatttagatcttgtttgttgcattggataattttgtccagtgcacacaatttgttcctttggcttgggactatattatcccaccaagagtggttaaaatagtcacgtctattttttggttttgtttttcttttttaaaaaaatgtgtgtacatatattttataaaatagtatatttgttttaacatgtatatcttttatctattttttattttctaattcttcttttaaatgatattttcttttataatgtacataactcttaataataataatatatattttttaatttttataaatatgttttttttttattaaatgttaatcatattttatttatgaatatggtataatattttagtttattaaacattataatttattaagaaaaactatttatactagattagtcctatattacatggtttagtacacaaattatcctttctaatctaattcaatcttaattaataattatgttcaatacaatctaatcctatataccaaaccaactcatgaatactgaacattaccttaattgatagtatctgtatgatattaatgaatagataactaatcataacaatatgttaactcatatcctcacatttagatgttaatatgtgtactcataagtgaattaacatcattcattttagggttagttatgatatatttcaaagttttgtgtttgtaaatgacataatttaataaatttttttagcagtataagtatacaatgctagtaaaattataatttttgtctagtttgtcagtgcatattccattttgaatttt

SEQ ID NO: 8416 - DNA, 723 bp, Cannabis sativa
agactttctggcatcatgtacatttattgtcacactttggatggtataactaccgggtgcatttgtcaatgagcgccgccaatatgaaaatatgaaaatatgaaaattctccattctcttgtaaatatgaaaatttgcttacgttacttttaacagtatcaataataataatattgctgttttctaatcaatttttcatggtcattcatgtagtttttggctttttaacaagaaaatatttcattttttttctttaacttattatcactgtgtaatacgcattggtattccaattataaattgactttacagcataacaaatactatatatatagcatcctagctaggatatttatataaataaatataccagattttatatatatttttatagttaatttaaatgatatacataaatattaaattcaatatcgataataatatatgtgttaccctctctaattagtatattggcacttgactgtttttttctaaaacccaaaatgtatattaaggttttcaaaaacgggatcggatacgtactaagtgttttttcttagtctcacgaatcgagaagaaggaaagataacctcataaaatatcataaaactcataaaataatctataacaatgttagaatttaaaatgaaagttgctaaagtatatgggattataccttataattaattggcaataaagaaaagtagtatcttatatatatga

SEQ ID NO: 8417 - DNA, 1250 bp, Cannabis sativa
tgtttcatgttcaaaagacttcaaaatgatcttaggattttttatagttaaaagattagagatgtttgttatctcaatttttgtcctcaggacatggcatgcttatgtgggcagaaccagtgccacgtggcagtacaactcactaaaaggaaggccaagtcaacacttgagcaaacgaagaccctgacactcagaaagggatcaagcgaccaactagatccctctcaggagctggccagccagctttagaacaacaccgtggccatcgtagggacctggccagccaaggagtgaactacaagctttgttggacagctctgcacgtggacaacagatatgggctgtgaagtgggccctaaaagcccaagagaatggtttaataatatctagatttaagggcactttagtcttttatatttatccaacaacctatgtaaatatctaggatttaaacctgtaatatagatttttgggctcatatatagaggccttaaccctagcttagaaacttaagttgcctctagatcactaagcctccaaattcttctcagtcaaaaccctagtctctcttcctctctctgctacacggccctaagggctctccttctctcttctcacttcatttctcacacgcctaccaaaggttgtccaaaacttgtgatctgcctactgattcatactttgtaatcctaagagtgctatagcatatcccaccaatagtgactcgtaaaataaatatgaatatattaaatatatttaattattttaccattttacttatcaagaatactcaagggccaatattatacaaaatatttatcattgaacatttatataaaccaacatttcagaaattatatacaatatacaaatatatattcaaatatttccataatagaatcaataataacaagaattcgattttctataagaaggttatctcttaaattctttataaatataagattacaagagatacacaaaagtttataaatatacaatcttttttcttcaaatccagtgtaatacattcttgactaacatgtaataaatcatttgtaagcaaagtaaaattttagtcaaattacatttagtatgaatattaaatttcataatcatgaaatttcattatgattttaaagacaacattagaaaccagtaataaaaatttgacactcgacaagaaaattaaaataataatttacacttctcctctaaataaaattaattaactcaaattttttcttaac

SEQ ID NO: 8418 - DNA, 720 bp, Cannabis sativa
ataattttatttcccttgaaaatgaccatgttccccctcccttcctttttgatgatagctcatatccaatcgtttcttttgtttcttatcctcattttgtcaacattttatgtgatcacaaagagactgttagtaatggcttgatatttgccaagcagattacactacgaaggacatggtggaaaatgccacgttggcataagattaagctgatctatgctatgctttttcaagcagtctttttaccaagttctgatgaacttaataaaatggtgagcttagatttcctgtcaatttatctttgaatctaaggattttattctgagtactatatattttttttaagtttaaaaactagacttgtatcttattttgcttacatatggatggttctaattttatcttgcttaccttcagctaaaagaaatggatgatgttgacatgctgactcttgtcattcaagagatgagtaaggcgtttcccactctgatggagactcttgtacatgagagagaccagttagtattctctttctttccattaatattcaacaagaaccttttgctgcattctttgacaatgttgacaacctaatttatccatacatcaaatacaccaggggtagacatccacctgtctgtgtttgctttaaggatatctaatggatcttcttttcttgtgtctgctgtggtgccacagtctaaagtgaaagacaattta

SEQ ID NO: 8419 - DNA, 629 bp, Cannabis sativa
ttaaacaatatcggactaaattatcaaaacaaaacattaatgattaaaattgttaactttagataaacaaaggaccaaaagtgaaagcccaggacattcaaagggactactcaagcaaaaagatacttagcacaggaagattctagaccattcatttctttcaattatggcttaccgacaaaattgacgaaattgcccctctctaggtttcaacgctaccaccaccatcaccgcctcaagactctatataaacaccttcatcctcctgtattattcattcatatattctcagcctaatctcatatctctctcttcatttcatacaagaacgattttctttttctctgcgattttcaattgttgaatatgcagatcttcgtaaaaactctaaccggcaagaccatcaccctcgaggtcgagagctctgacaccatcgacaacgtcaaggctaagatccaggataaggaaggtattcccccggatcagcagaggttgatctttgccgggaagcagctcgaggacggacgaaccctcgccgattacaacattcagaaggaatccacccttcatttggtgctaaggctccgtggtggcatgcagatcttcgttaagactctaaccgggaagac

SEQ ID NO: 8420 - DNA, 1324 bp, Cannabis sativa
acaccatacgttgcacagacgtgctcgagggtttaaatccataattatttgatttcatgatgccccatacatcgattgacggctataatacattatcaaatcacgaacaagagacaaattaaatctcactaaacacctataaccagcccaaatacaacatgaaaagtagacaatcatgccctaagatcaaatttgaaaaattgtgcaaatcatggttcatacaaacacaacaatagtgaccttttactactattacgaaccaataaataccccaatgaagcatagaaaaagggattagaaaattctttgcaataaatattcctattaataacagtgactcgtggattaaaactcattaattcccaaactacgtaaaaattctcttctcgaatactcatttattgcttcacacagctctaattaatagtgtcaaaaatctcaatcaacacataaataacagtctaataatgaattgtgagagcatgtatgtgcattattaaagttactgtcatgtatgtttaatatcaacaaactggattttaggtaccttaaagctattaaatgcccttttactataattattcttgcaacttatagcaacataagaaaattgttttaaaagatgagcaaaaaataactagagggggatatttgtaacgatttacataatttaggaaaaagccactaagactaacttagtggtgagggagggatgggaaaaagggagaggtcataggttcgaacccaagacctttaagctattaagctaatatatgattataaaatactattacgctacactaaaaaaaaaaaaatacataatttaggaaaaattttcgcatcaaagaaaagttcataaggcaaaattctataaggatcataatttaaagaaaaaaaaaatcatatttattctattttttaagtggcataccaaatgttaatatactataatttttgtattaaaagtaattgatacatttttcttttcagacttagtgattaagaagttgatccttatattacacgtgtatactgacgaaaattataattttacaaatatgagatacttatgtcgctataaaaaattagttgatttatactgtttataattcaaaattttaattatttatgccactatttattcataataaattaaatatattattttaaaagaatattaagaatattatatataaaaaaagtattaaaatcagttttaatattaaataacaaggttatattttagataaaataaaaaatgtatagtgatacgttaactttagctcaatattattgctagattagatccctatatgccactagt

SEQ ID NO: 8421 - DNA, 1707 bp, Cannabis sativa
tatatatatatataataaagtgttttgaaaaagtcttgttctacctttgaagaataggtaataatataaggccccacaattgtgtccattattataaacgataaatatatataatgttgtatgtgaattgaaaaatcaatggttaattacaaatattacacttgatgaaactcaaaatatatataaaagaaatttggtttaatatgtttaaatgtaaaatatagtattatagtattgtttttatataccactcaattgaaaatagtatatttatatttttaatatctatttctctcaaaaagtatccttatatttcaaaaaaaattctctctctaactctctcagtctaaccctctcactctcaggcgttgaacctcgacttagaatccctgccgttgaacacacaaacccagaactctggttgcaagtccccgtcgtcgttttctcttacgacctctctcgtttttttgcattttttctcctagttttctaattttttgcaatattgcaatatttagcgctatttagcgatgtatttgtaatgataaactaaatctaaaattaggaataaagtttagtgatgattagagatatttagcaatattttgcgtatttagcaatgtttagcaataatattaacgatatatttctaatatgagactaaaaaatgcaaagcacatcactaaatattgctaatcatcgtgaaacattgagagtgatttcgtgacatttagtgatatgtttggcgatattgtgaattagagacatttagcgatgtttcgcgatagagtgaaatctaacgatatttcacgacatcatgaaaactagaaaaaaaaaatcaaaacacgagcgagttgagaactccagcgatgggtaggaatttagggaattttgaggtctcgtgaattttggggcttttgtgtggagacaacaagacttagttagagtgagagagttagagagatgtgcttttttgaaatgtaagggtatttttaagaggaaaagatattaaaagtataagtgtgttttatttttaattgggtggtatattaaaaagctatgttttatatttaagcatgttaaactaaatttctcaaataaaatctgtaataaactaaaagggttccgttattgaacccttgtttgtttcggtatccgaaagaattttataatctatgtttttttcatagtcgtatatattgcagtcatttaagacatcagttgtatatattgcagtcatttaagacatcttataaaattttaagaaatttgaagaaaaaaaaataacatgctgaaaaacatagttcaaacagtttgttgcacgtgtgactcttttattttatacttgtataaaatacactgtttttggcatgttaatttttttttaatttttcaaaattttacgagatgtcttaaataactacaatatagactactatgaagaaaaaaaaaatagactaaaacattctcctaaatactaaaatagataggaagtacatcagtacatctttttgcgtcttttaaaggatgcatatattgtataattttcctaacctttattatttatataataaaatagtaaataatagtataaataccttaaattttaaatttgtaagtagtataaatttattattttttaacagaataaatacttaatattagtaaacttgtaatatttatctaattttgtcatcaaaatggaat

SEQ ID NO: 8422 - DNA, 928 bp, Cannabis sativa
ttgtgcaacgagccgtgctttatgtctctcaatggagccatcactgttgagttttattttgtatacccaacggcagcctatggctcttttgtttggtggaagccttacatatgtccaagtcttgtttttcagcaacgcaaaaagttcattgttcatggcttcattccaaatcttgtattgagaagcttgattatagttggccggtttatatagagctgtaattacagaaatgaaagctttatgagaaggagaaagtttgtcataagatatgaaattttgaagtacatgaggggtagaagttttgtcttgtaagacagaatgacactcataatcgcgtaggtaggcaggaggcctagatattctgctggtgcgcctgagatcaggtatattgtgacttgaagatgaggcattgttgctgtcagcaccagaattttcttggtctggacagtcagaactgttggtgtcgtggtcatgaattccatcctgtatatttgtatccgtatctgcaatttctgcctgagaagaagtgttagtgcaagaattatatggaacattatttggaaaatctgctacatgtgtattagatatactggtggcaggtaggacaatgttggtaaaaggatcaattagctctttagcaatgttaagtctatgaaagggatatattctttcatgaaagacaacatttcttgaaacaaagaactctttgttatttatattgtacaatttatatccttttatacctttaggatatccaacaaaaacacatgttcgagctcgagaagtgaatttatttctgtgggcagtgagggtgctagcaaaggcgaggcaaccaaaatttctcaagtgttcatacttaggtgattcattatacatcaattcatatggacacttattattcaaattaggagtaggagtgcgattaata

SEQ ID NO: 8423 - DNA, 1222 bp, Cannabis sativa
tatacatattttggtgagaataaagatataagaatagaaataatagaattgaattaaatttaaattttatataaaaaaaatattattttgtatttaaatagttatttttttattataaaataaaatagtcattttactaaaataataaaaatctcattttattatgttatcttaaaatctgcacaaggtggtatgatgtttatttgggtgacacgtgaattattctttagacttagaaagatacaattctcatttgtatgctgtctgacaaaggtataattgtgcaggttaaacgatacactctgactagagtcgttttcatggtaattttgcacatatcgcctatggtaaatgtataattgttgtattatgaaaagtaattagtttccctttttatttcttatttaatttccctataaaaagtgaagtcatttcattgatttgaaattaattcattcaatagaacacttaagttgctaaaactattgtaagagctttcgaggaagatcaagaactttttgcttcttctttcataatttaatatgtgaaaaagagagtaggttattaccaccatcacaggtcaaacctctataacaatctctgtgttctatttgcttaatcattattattaatcgtttataattattttaattgactcattgtcgttagctaaaagcgatatcgacgcgttgaaatggcattgccatacttggcgtttggttggaaggaataaaaatttagaaataggaatgtaatggaataaaataaaatttataatgcataaaaaaatcactaaattttttctcatgctacattgaaatggtctttcttctatttcaaaataaaacagtcattctaccaaaatgatagaaagtgcattctattgaaataatattccaatactttaaaattaaaccaaacaaaataatggaataaaaattattttctttcatattattactttcaaccaaacgccaccttagggctcgtttgacccatagggttgaactaaattagactagacaatgtcactaatagtgtttgcctatactggagaactgaataatttagttttttattttttaattttattgaacaatgtcactaatttagtgtttgcttatactagagaactgaataatttatttttttttttaatttttactttggagaggggagattcgaacttagaccttcttttactagaggactcgataactaa

SEQ ID NO: 8424 - DNA, 1220 bp, Cannabis sativa
tatataagcaaatttacaataatctagtccaagtgtaaaattcaagaatggaaattaaagtatgtacttaataaaaataaaaataaaataatataaatacgtatttatatttttgttgttattatacattttaaatatttatacatttatggattaaattatttctaaataattgtgtttcgtattataaaattaaaatctcagtctccaaaattcataatcataatataataattattatacatactaaaatattagagaaattacgtatattattttttaatatattttttaaaatttatgatttgagttgttgtgttagatgttgttggagtttctaagtagattttcataaaaaaaaaatcttatatataaaaaaattacaaatttgtaagcttctattacataaaaatattgtaattactattaaaaaaacggttttgttatgggcgtttatatatatggtggatattaattagggaaatttatataatgcacttataattagattctttttatatacttttagattttgtttcttcttatttttacaaattctgtttcttacaagtttttcacttgtttttcacgttactctgacgtgaaaataatattaatttcaaaacaacaaaaaaaataatactttatatttttgttgaaaaacttcgtaaaaatataaattttttgttatttttaagtatttatgaattaatccctatttatcagggtgcctatctcaatcagttctaaactaaaaaaaatctaaataaccagcctaatgtgcaccttttactttgcaaaagattaaataatacttcaatgaaaaagtgtaaaaataacattaaataagaagctaatcattatttactttttctaaaaatcaacattgtttatttttttaatataaaattatgcacatatgtagtctaggggtggtaatttgtgtctatgagtcatgtttgtatcttgttgagacttaggtattacaagtaaatattaaacccaaagtcgtcatattcattaatcgtgtcaataattaataaaatcatacctaacctagaaagcctgttgactagacccatcccgtctaattcatttatataaaaaattatgcttaattttggttaacttgacaattgattaacatatttataataaattgaacatgtttacatccgttttatgacacatttatgagtcatttcacatgtttatgtttt

SEQ ID NO: 8425 - DNA, 730 bp, Cannabis sativa
  modified_base (150)..(156): a, c, t, g, unknown or other
tttatttaatgtatatgtatttacacaattttatatcttctttgatgcagattgcagaatttgtgtgtggaatgcgtctgatggtagcttagtatattctctaactggtcatagtgaatctgtatgtgatttctctctctctctctctcnnnnnnnctctctctctctctcttaaaaaacaaaaaaagagattttgctctattttttctgttcttttgaatgcttaaaataatttgttaatcatgtctttcaaaatactttcactaaataaaaaaaaacaaagaaaaagtaagcccgagaacacatactgagagtttataacaggaaacttttatgcaagaacaacagaaatttacattaaaaaattcaatccttgttaacttagcgaaaaaataaagattgagcccttaaactcttttatctcgcaacatgggaaaattcttctctgcatgtccaaaaattcttttgttctgctccagccaaatgaaccaacagatggccatgggtaccacatcccataactttagaaatctcatgagtatgctgctgaaatacccactgcagattgaactctttgaaccaatttctccataattgagaggaaaattcacaatgcaaaaaaaaaaaaagaaatatatattctaaagtttcctcacttttcattcacgaaagcaggatgatgttttgttttccttccttgattagaggatttaaatgtgacttatgttgt

SEQ ID NO: 8426 - DNA, 1046 bp, Cannabis sativa
gggtgggttgtgcccactttcaaatttaagtaaaaaactaattattaaaaaagtgatataagtcattaataaactaaacacatgtaaagagaatacatatataaaagagatactaacccacaaaaagagttagagagagaaataaaatacatatatgtactaaaagaagaagaagatgaacagtatatgtgggggagtgggataaaataaatgatttaacactttttttgtatttgaaaataataaataaaaataaaaaagtataaactgtcacaaaaatttgacaaaaacattcaaatctaacttttttaaaaacatttactttcttaaaaaagtggcacaaccccaagaagacaacagtaagccacaaacccatcatatacaatttgaaccaaaaatttggaaaagttagtaaaggatataaatttccataattattctaagatatcaaggcccatgcctaaatctcatattgctcgcgaagcccgacccaaaaccatcgaactatgcatccaatggtccaaatagacaataacacaaagacacccagtgacgttgacggtggtcgctgctgcacattaacttagggtttctgactgtagccccaatccaattgtcttctaaagttggagaaggtttggttcgcaaattcctctttctctttcgcaatggcgaaaaatagaaacaagaagaaaagagatagctctgctatggaagtaacggaagatttggtttcagatgtccctcaaggtaatattttactcggtttcaggaaagacctctcttaagtagctgacaaatctttgaaacaatatatacatacgattttgattaaattaatgatgtttcttttgtaattggattcaaaatctgctttactttcagcaatggacacttcagagactggagctcgaaacgtggctactggtgctcccaatatgtacgtatcgaaactgaaatgcccatttagctatgtgataattatgcctttcggtctaaattgtagtcgttttctttgtaagcttagtgggttttgttaattcttt

SEQ ID NO: 8427 - DNA, 848 bp, Cannabis sativa
gtaccccatgcttgaaggcgcttccataatttttcttataaatagcccaaagccgcagtcttgttacgactcatagaacatagaagaccgagatacaagctacccttcgtagcaatgcacatacccaacagctctacaaggctctctttatttctgcactagagttggcactaaaaaagattgaagactttgtaaaattaactttctaacccgaagccaattcatatgtttgaggaatttctttgatcctaatcgcttcctgatacgtagctttgtagtataagtagttgtcatccgtaaagagcatgtgagatatacggggagccccataagccacttttcatcaatgcaaccacccacagttctcaaattttcgaaggaaagtcgagaaaccctcagcacacaatatcaataggtatggtgacaaagggtcaccctagcgaatacatctagccgggataatagggcttatctcgtgattaccatggataacatggtatctagccgatgatacacaccgcagtatcaggtgaacccaataattagtgaaccctagtttctatgacatagcttcaaggaagctttactcaactcgatcatacgccttgctcatatctagtttcagagccatgtacccatctttacccttgtttttccttttcaagtagtgcaatatttcaaacgaaacaaaaatattatcagagattaagtgactagggattaaagcgctttgattagtagagatgattgtgtccatgaatggcttcattctgttaaccataacttttgtaataattttatacagaacactacacagagctatgggctgaatttcaaacgtacaatct

SEQ ID NO: 8428 - DNA, 704 bp, Cannabis sativa
atacaaaagaaattataagaagaagaagagtataattaagaaataaggaaaggtagctagctaggcaacataaatgaaaatgactatatatatatttatatttatataacaaaggatggaatcatttaattttaattattttcacaataatggagtgtagtgtgtgtacatatatacttttagtgcacaacttggttagagctactagccaaatttttagataatgacaacgtgcataaaaaatcaaatttcacgtatgagtttttggttggttcttctaactttgttttaacattattatatatataatgatctagacatatatatatagccctatatatgtatatagatagatgcaaacttaacttgggagaaaggaaagaacattctaccaaaaaataatatgtttaattattaattagtattgttttttgtcacttggctaaatgttcaaaggaaaataccggaatagttgtaaacattatcaatacttgtcaaagaataataatttttcctttttcttttttattatcaaaatttaaaatataaaaaccacacatatatatatataattaatttttagtgatttgggtgtgttcaaacgcaggccaaaaaagaatccctctatcgatgtttccacgtcaaaaattgtgtccactagtggccattatggtgttttctttcatgttactaaatatataaat

SEQ ID NO: 8429 - DNA, 1145 bp, Cannabis sativa
gtttctctaccatatatatgttgtacaaatccatatccttaaacttaatatctgtggtggagagaagaaaataaaagtaggactgaaagaaaatgtgtacgttgactttgtcatctgtttctctactatacaaaacttgttgagaaatgagaaatgtaattccacttttttctttaaatatgaaaataattacataaaaaaacaaacagctaattaactatctatataaagtaagcatacccaaattgaaaaaatggctactctcgaagtagacgctcccccatgtctttcttattgatatttacgtttttagttatatatgtcaaaagtctaaactatacacacacattattattcactttcttctcatattgtatcttttctaaaatgtctactttggtcaactgttttgggatagtttcatacaaaattttgtgtcccagctggattagcttactcattatttatgagaaaacaattttgtccatggacttggtgtttttttattccttagatgaatgttgaactaactaatattatatttttagggaagttgacagcataaatccttaataaatttatttgtacttaagtgtttatgtgttgcacttaagtatctaatctttaattttaatgatataaatagttaatttttgaagcataaaattaagtaaatattggcatttaaatatttaagtcgccctattttagaaaaaagaaaagaaaatatatatttaattcactataaaaaccttatgttcaccttgattaaatttctttttgataaaatcaatttattgtgattaacaatattcatcttaatcatttacaatcttgtaagatttgttaataaaaaatgtcaacaataattatatactaaaatagtaaaaaaaatcacacaaatatattattaagagtaattataattttcgtttaaaatacacttaaattatttaatcctctgaccaaagtttgggtttcgggtccagatcctcatcaatgccattttctatgcactttcttatagtcgatcttaacttccaatatggataaatggagagataatagtgtaagactctgcacactttattggaaagtataactagaagatagcaaacgttttctagtagatcacaaactttatg

SEQ ID NO: 8430 - DNA, 608 bp, Cannabis sativa
ttcttgcccgattcttaatcgaaatcttcttccgatcgccatgaagacttgacttaccaaccttctctccctctccatgattattattcactcacccagagaaagagctgacccccagatcattgataatttgtttacccttaagaagtgcccgtcgatccctttcctcttcagtctcgccatccttccctccattctttctcttcttagcttcactctcagctccctctgtaatcccatcagaagtcgatcccccctggtgcgtgtcaaacacatcagaagcagccttattctcctttgggttattgtttgtggtaaattggcccagagtattgggctcagtaacattaatattcccagctcggcccaatgtattgggcacattaatattaaacttcccagcccggtccacttgatccaatgtaccaaaatgataatttttctctccattgccacctggcacagtattagttacttttccatctcccacgattgatgactccccgataaaagctataccactactcttagcagttacaacgttatggatcatcggagcctcgactcgatcttcggttcccgtctccggcgccaccacaaagtgtcgt

SEQ ID NO: 8431 - DNA, 567 bp, Cannabis sativa
ttttggttcttcttatgttaaatcatgttctgtttttttttttctccttggatttttattgtcactctgttaatgattttgaatttctattgttaaggttaccattgtacagtgaaatgaagttggcattgtttatatatctatggtcttaccaattgaaagtacgtaaatctatgtatgtatatatattattgttttcatataatttgtaattttgtaaatatttattgaaagttgggttgataaagtttcaataatacacaggggacaaaatatatatacagtaggtttctgcagccttttatgaggcgccatcaagaggaaattgatcagaatataaatgaattgagaagtaaggcagtaagttgttcaatttattattggaaaatggctttggaatttggagagggtagattattggagatcttgcagagtgtttcttctcgtcataacgagcatcattgaagaagacattatcataaactatattaactgttgtatagaactttaatttgtgtattggagtatttggatatattttactgttatttcaacaatgtcagataa

SEQ ID NO: 8432 - DNA, 1675 bp, Cannabis sativa
cttcaacacttgtatttttctcacaagccatccaaattgtcttcagcattcctacgatttcagaccagttcatactgcccacaaaaataggaattcttcatcaacaaataataaccctattctttaggaatattctccatattttatgtatttttaaataacaaaccataaaaaccctaacactatataaagggtcttaaccctacgtgaaaagggaccccaacctgaatcctaagtcttaagtattctcataagcacaaaagcctagagtcctctctctcttttcccatacttctcatctgaaaaatacattctcattgtaatacttaagagagccatagcaataaattacgaggtttcaacctgtaatctgctttgtattatctcaagagtgaatacaactaaaagggaagtaggtcattacatgaacaaaagagctaaacctctataaatccttatgtttttatatttattatcattctacacatgacagtcataagcaaaatccaatcctagtcagatatgtgttggttggctaaatccatagtcaataaagtgggtatacaagattaagttgaatgttgatagtacgtttcaaaaatacaaagccagattgtttgcaaaggggtttaatcagaggctaggaattgattttggtgagacatatagccctattgtgaagacttccatagttttggatcatcctaactattattgttgctaagtcttgggagataaggtagcttgacatcaataatactttcctaaatagagagcttcaagaagatgtttatatggaacaacctcaaggttttttagatgcctcaaaactagattatgtgtgtaaacttaccaagtctctttatggtttgaaagaggcaccaagggttggtatcgcatgttaaaagctacccttataacctagaagtttaagacctccaaggcagtttcatctttattcttttacaaagttcttggtctggtttttatggtattaatttatgtggatgacattattgtgataggcaagctaagctgaatcaatttatcaccaagcttcatgttgtgtttgctttgaaagacttaagtcccttgcattacttccttaggattgaggttcatggagatgagactggtttatacctataaccaaggtaaatatgtcaaggaactcttgatcaaaactatgatgatgcatttgaaaccatgttccactccaatgacagttggcaaaccgttgtcaaaaaaagatagggagccactccataatcctaccgaatacaggagaattattagaggtctcaaatatcttacacacaccagacctgatctctcttttgcagtcaataaactaagtcaatttctacaggctcctactacaacccattggagtgctgtaaagagagtacttaggtatttaaagggttctgtataccacaatttacacattaaaacctctgacagacttgcaattacagggtattcgaaagctgattgggcatgttatcctgatgatcgaagaagtgtagctggttattgtgtgtatctaggggacactttggtttcgtggtcgtccaagaaatagcttgcggtatcaaggtctagtacagagagaatatcgtgctctcgctcaagtttcagcagagatcgcttggattcaacccttactcaaaga

SEQ ID NO: 8433 - DNA, 912 bp, Cannabis sativa
tcttaaaataaattaatttttatattggatatgcgatttggggtgacaaaattacaaaatttgagagaaaaaagagaaatgacgacaatatttttttttattgagagatagttggagaataaagatgtaatgaggattttaaatatcaaattcagtttttatatatgtcttatggtttcaattattgtgaaattagtagtggaagatacaagtcttcaattattttgaaatgattgatgacataggtccgtgattttttctatatttttcttcttaattttgatttcgggttttatattttctattataaaaaataaagatacacattattttccactagtaaatagagtttaaacaaattgttatatatacatgggatcttttatttttggacgtatgagaaaatatttgttttgaactttgtttttcaatgtataaattatttgattttttttaaaacttagcggaatttattataattaaaatgaggaccatattaaaatattaaaaatgtaataaaacacactatagatgtgccaatttagagacgtaccgattcaacacatgagagtgtgttctactgtaggaatgcccttaaataactcatatgtataaaacttcattaataatgtaatactaattaaataagctatgcaattgcattttgattatgaacccggacaattgtaatgtaacaaactgatacaagcatataattaatgggtaaattacattattgttacaagagctgaaaataatattttacctgtaactaacaattaagctagcgactccattctactccaatagattaatttattaaaaaagggcaataaataattaaagcacataaacaaacttaaaattaacagtaccagacaattcaaggtcttcctctacttagcattaaca

SEQ ID NO: 8434 - DNA, 911 bp, Cannabis sativa
ggaattgtttaatgcagaaagtggagggtcctctaattataatgaaaaatcctatatataatatatattattatttaataaagttttgtttgatggaaaccaaacaaaaaagaggatattatttttcatatcacctaaaccaattattgtgctgtggttaacagctacaaaaacacttcagggccttggatttgtatttgttcccttcagccaaataagaaccactccccacttcaacaacctcaaaaaaaaaagtagtcatttacaaattaagttatatgcaagagagagaagctcctaattagtttcagaaatttttgcctatatataatatacttctacaaatattttatacataatatatcatatatattaatataacgaaggtgaaaaaaactttaccttggaaaataatttaaaattactcaataatgtgtgaaatagttggtttatatcattatatatgatatatggtttgtgaactgagacttcgaatcttgcaacttagtccctcaactacttcagccaatttttttggccttttcttcaactctgcctaacataaccaagtcaatgccttgctatgttacaagaataggggattggaaaacatctcatcaaaactctctaggtagagttcttaaacataatattataattaagatattaaattgggtacatacattttttattatttagtggttttgatcctaatctgcaaaccaaactttgacccatttaattgaccaatatgggatctggaaaattacataataaaccagttaacctatgatgagagcttaatggctaggaattcatatcaataagtggaatggaatcagtgttgaccaaagttaaatgcacacacattgtactaggtacaatcttattatagataatattgtataaag

SEQ ID NO: 8435 - DNA, 812 bp, Cannabis sativa
gcacagctcgactcgcccgagccgcctcagccgcgtcgaacagccctgccccaaccatcccagtcacttcagccataactccggccagtctcccagaagtccgaaccgtacaagtattaaccaaccccttacaggtattaactcctccttccaccttttcctattccctgtcaaatcccatcagagaaatgggtattttctaggttattttagatataaattcagcttgcccattaaattacctctgcataatcgatttttgaaaatgaatttgggtaaaggaaatatttttataatggttttcagaattgccataattccttttgcccaaaattttcaactgttagcatttatactaatctgcaagggtgatccgcctagtaccttttgtaatcctattgtgcagcaactctgcccgaaagtaaatgctcctgaagtgattgttaccaaatcggttcacaacttcttcactaggatttttctatataagggcagaccattcatttggtcttgcacatacagttttattcctacaaagaagtatcctctgcataagaatctttatagtagtcgtatttccttatatatacatattttccactgtagcagctcaaggcctcttatccctcatattctcttgaatcatgttctgcatttagccccaagtgtctcccccaccgatccatctagctcgctgttctggtattacattatagttaagtttttctgtttgttaaaattttcaagtcattacagcccatatcttctttggtcagttgctcaaagatcccaggtctttagtctcacgtgta

SEQ ID NO: 8436 - DNA, 1053 bp, Cannabis sativa
agtcagaaccaagtatatatataggtaggtagtcagttttccttttttttttttccattacaaatagtatacacaatattgttatatcaaaaaagaaatattgtatacaaggcagaatatgtcgacatctctcaaaatacaatcataaacttcatataattagcgttggcaattctattttcgtgtcgtgttttgggtcaacataattttaacacaatataattatacttagtatgaactggcacgattaaataatatgttataatatgcaaatacaagcacaacacgattataaatagattaatccctgacacgacacaattaacacaatatttaaatgtgttatatttaggtatgttaataactaacattttttatttttatttttcaaatttaccattttgacatgtataactaattatagtttctactaataaattaataatgtcaatctaaataatcaatgattcattgtttttacttgaaattatctattgtttcaatctaaatacggcttacaatgagtatggacaaatataccgttttacccttcgatgtatttttccctaaaatacttaagtctttataaataatatttcattaaactaatataatactgaaataagaactcttccatttatcatttagccaagctctgaggaaactgttgtttcacttctaaatagttacagaagctataaattctatattcatgattaacgcttcaactcaattgaactaccgaattcccaagatgtaagtgtgggctagtcctacgactaagttggtaacaaacaagtcaaagaacttgtataatataattaagccaaagcttcaccatcttaggattaagattaattgatctaagatcaactaagtggcattgacttagaaaagatataactgtaaaaatatgatatattttctgctgtcaatatcagtccagttagatgtatagctaatacatcatgttatcctgatttttgctcacctaacctggcatgtccacgtggtcaacatcaatatcgcgtgggagtatagctcgccaacaag

SEQ ID NO: 8437 - DNA, 640 bp, Cannabis sativa
aatagaattagtaattattgaagatatcaggaaaaattgtttgttttttgtaatcaacatgaaaagaaaaatgtacattaccgttattgatgaatgaatggattcaagaaatgcatttcatttgtaaccaaaagaataataattaagaaagaaaaaaattagaatggttgatacttacttgaattggaaaggaaagagtgagaatgaatgaggggttgtttgagtattgtgtaatgataataataataatgtaaagaaagagatttatatataagtgggtttatgtttggcggcaaaagtaaacccctttcaatttgtagaggagttgtttggtgtgtttagtttacttctctaaaataacgaaaaatcatttttaccattttgttgtgaaatttgcctcaaccaagaacacaattaaaacaacacagtgactagatttaagaacagaacagaacacaaaatgaataaaatggacaaatgaatttccaacccaatgagtataatggaatctaatgcattccaacaataacaactacaatagtcatcaaataagtgaaagatcaaataattttattttgtgcatttaataataatgaacatacttctaatattgtacgtagattctttgatcatcttcttt

SEQ ID NO: 8438 - DNA, 639 bp, Cannabis sativa
acttaattacaccaacatcaatataatacggaagctagagtaccttttaacaaatttctttataaaattattcctaaaaaaatcatatgcgattggttgcatcggctgctctttcataaatacccataggctccattgatccaacacaacctagtaatgatgtgtaggcctatagccatacagggcaaacccttttcgttttgtaatatgccccattaaccccaaatatataatgctttttttttttcatctttagtctatctttaccattcttttttgagctagaaagtacttacttttttatcttagccacgctctgcatccatagtatattttattactcaggtcagtatattcattgtccctttttctttatcatcattctttatttcagtgttcatctaagaagaaaacactaaaatatattattttaatttatttaatttattagttgcattcttttcctctcataattttaatactacacatatgtctttttctcttattgatcaaggcaattgaagacaaattagtagtcgtttttggaataggaccaaatgaagctataacatactaaactgtcaattacatggtgggaggtcatataaaatatatacactgatttatatgtctccttgt

SEQ ID NO: 8439 - DNA, 949 bp, Cannabis sativa
actaaaattcttcccatgttatgcaaatggtgtcatatgtagttttataaataattatatgtttggattattttttattataatggttgtttctacaatgcatcctactaatatatactatattttttacaatcttttttttagttgtatgatttttttaattacaaatgtatgcaactccaaaaaataaaaaagaaataccataagaaaataacataaaaataagaaaatagcataaagacaacatgcaaataatataaaaataataagaaaagacaacaatgtaaaaataataatccatattttcgtaaaaagaacttataatttgtaaaagaaaaataagatacttctacaacatactctttatctgtttcgacatgtaaaagaattttttagtccaatttttttcatggccgtctacgttatagttatttaaaacatcatgcaaaattttgagagatttgaaaaaaattaacatgtcgaaaaataggattcaaacagtgttacacgcgaaattcttttattttatacgtatatgaaatagattgtttgaattctattaaattttttaaaaaaaatttcaaaattttgtaggatgtcctaaatagttacaatgtagtccaccataaaaagatttggattgaaaaattctctcaaataccaaaacaaataaaaggtgcaactgtgaacccgttttagagggtacattgtacaaattttcaaaaatatttgataatctattctttttttttttttttgaaagggttttgataatctattcaacaaatgtatttttgcaattttttggttaaatatgaaataattcaaatattttacctggacaatggtaagcctaaatccagtttattggccagcccatattatgataagcccaaatccattttattggcgggcccatattatgataagcccaaacccatacaacaac

SEQ ID NO: 8440 - DNA, 1031 bp, Cannabis sativa
ttttttttttaaatatatatatatgattaacaactagtgatataattattaaattgaattctttcaatataataattattaatagaacgattagcacgatgatattaaaacttaactacactacaattcaaaataatgtaaattatctttaaaattatatacattaaaattagtgtgagtaaatattataaaatttagaatattgttattaaatattagagtacttatacatccacgtctactttatttttaaaatatatcattaaaatctcactttctttattttacattataccatatatcaagttctctcttattattttatatcacttaagtatattataattttttttgagataaaataccattatattgaaaaaaatagttaaaatacaataggcataataggagtaggtaattcctcacaccatgaacaattagtatccaccgaaaagagcaaatttggctgagatttgagctccaggaaattagaaactattagagaaatattgtttaacaaacaatgaaaatctgaaataaatcttcgagataattgtaatcctttaataacttaaagagcattggtctctatatagtgaactggtaattgaatgtctttagccattacaaactatgaagaaaagttactgcttccatcacttctggtcaaaaacattcttgaaagggcatagccatggcggctacaatatcacccgtgctgttactaaggactgcaccgaaatcagacttattgttcattgagttaacatcagtatcggtgtttaacttcagtctacctgatggtggatacaaccagttagaatcttgctacagcagctttgaagcgaaagcagggggagaagatttagaagcttatttgttatgagcagcatgatattcttccaggtagtctactgcaaaatacaacagtatatcaggcagtttaggcttggtcccatgtctttctttattttgcttactctatatactccaaaaaaaattgtagtaaattgctctaattgctttgagga

SEQ ID NO: 8441 - DNA, 513 bp, Cannabis sativa
gaaataaaatattaggattacaaatagatatgagatgggagaggtttcgaaaatgcacgatcactccctatgccacgtgcattctagcttaggatcttcatggttgtaggaaggcctgatcatctgcaggacttgcttctaggaaagtgatttcagtatcagaaaggttctttgatcgagtacgcttgataagttgtcaagtttcaccattaaccacttctgcatgccttttgaaactttctttgcctttggatgattgttttcttttgttgcttttggagcctgtgggagtggatagtcgaggttggaaagttaagggtgagagcttcgagtgggtgctagtgtcgaggaggggtatgtttgatggtaagggaaggtggcagtatttcgagctattggatttggagctgctagagctttgggaggaatttgacagatttaaggttgtagttttcacaattttttgttcactgacggtgctcatggttgcattgagtagagctgaaggttgat

SEQ ID NO: 8442 - DNA, 1098 bp, Cannabis sativa
gctaaattaaaatcatgtagattatagaaactcaaccctccagcatgtttatgacgactcaagcacgaccaactcatcctatgaatgcctttttgtttagaagaatcagattgccaccaaaatcttgccatgagtcgttctagttctttacaagtatccaatggtaaaagaaaaacactcatagcataatttggaagtgattgggaaactatctttagaaggacttctttaccggcccgagaaagaagcttaccctcccacccttgtattcgcttcttcaatcgatcactaagaaagcccaagatagcagtcttcttacgacccatagtattagggagacccaaataagtactattttcaccagcctcctggatccccaataaaccacatatatattctagttcggacacttgccttcgtgttagaactgaaaaaagtagaagactttacaaaattgaccggctgaccagaggcaccatcaaacaccctaagtagactaaggacattcgaagcttctagttcagtagctttgcaatacacatagctgtcgtcagcaaataacatgtgagaaaccaccggatctcccctagccaccttacaaccccgaatagacccattcatctaatatctatgtaaaagggaggaaaacccctctgcacaaataataaacaaataaggcgacaaagtatcaccttgccgaataaccctagaaggaatcaaaggacccatttcccttccaccatgtacaaacttgtaagagactgtcgacacacaagtcatgggaagtttaatccaagtatcactgaagcccatcctttggaaaaccgctcttaagaaagaccactctagacggtcgtaagccttgcccatatcaattttcaaggccataaagctgttttttccagtccgttttcaattcagataatgcataatctcaaaagagaccataacatttttagagatcaatcttccaggcaagaacacactttgagtatctaaatagcggtagataggacacctttaagacgattagcaatgactttagaaatcaccttataaaagacattgcaaagagcaatgggtcttacatcgcccatg

SEQ ID NO: 8443 - DNA, 650 bp, Cannabis sativa
ctctctctctctctctccaaccttgaagtcccctctttaaacatgctcttcaaaatgataagtgttggtatttatagaactgggatatggatcccaaagtcgatggctgcaaatgctaaattgctaagttagttacgatataacaaacttaacaaactcctcgtaacataatctccacgtcagctcaagttaaacttcttttgtatgagacgtatgcttcttggaagaaagaccagcgtatgctgaaaggacttcctggatagggaaagcgacactagagtcgactatccataactcccttctaagagggaacaactagccttttggaactcctttccaagagggaatagctagccatatgaaactcttttctgtaggaagactagctttccttggagactccttccggttgaataagttagactttcgagaattcccttccgaatgacatctaactttgacgaacaacttctggagtggacaagctagacttttgaaactctttttcggacgacatctaactttccacgagacttctttcaaagattttttttcatctggaggaaatataccacaaaaaaaaataataatattttgtaaaaacagtctttattaaaaaaattattaacaaagtaattttattgcagaaa

SEQ ID NO: 8444 - DNA, 644 bp, Cannabis sativa
atttacttacatttctctaatataaataagtataaaacatgtaaattttaaatttcttctaaaaaaagttacagtaaatttaaaataacttgtaaaataacataattattttttttaatggaataatcaaactttattaaccaatttcactttagttatcaaaactgataacaaatcagttgggactctaaactaaaatgacgatcaagatataaaatagaagctctagaaaaattatgagccaccatattaattgatcgtttaacaaagacaacaaaaatatttctcaattaagttagtacaattttacaatccttgattatatgacctaacaatagaacttcgtaaagcttgaacaaaaaaaaaaatagtttcaatcgttacttaaggccactagtgttctttgatccaactcaatgcctcccacacactcattgcttcagcgagaaccgactcaaccatgctatgaaaaaaatgagcacacccttcaatcaagaagtcatttgaatcacgtggaaccaacccaaagccatacttgtgaccatcattaaataaagatgcaattacatttaccttaatatattcatctgtggtgcaattcatgctgaaaattattttattaaaatctaaatttactaacatgt

SEQ ID NO: 8445 - DNA, 789 bp, Cannabis sativa
aatgaaggaatcacctgcatgcaccaaattaatttacaaataaataaataataatttaactaaatatatacatgatatatcaaaatattgaattatatattaattaagcttacatagtttgaaattctttgtatgacaatgctctcatatttttcataatattgatccacagcgaaagaacgaaaaccttttacctctttcgagctgagaatgtcgtaaaccattctgtaaaagaaaaataattatatattaattataatgaaaatagtatttgaaaaatcaaaacgaaattatttacttacgtgtatatgttaattttttggtgcatattccaatatcaacatggttgttaggattcattttcacatttattttgtcaattgaatcatctatagcaaccattgattcacttatcattcttttaagcactccaagacagggattcttctcttgctcatcattattattcaccatgattaattcttgattttggttgtaactatagtacttcttgctaagaaaaacccaagatcatatacacaaaatcagatatatatatatatatgtacatttcttgagaaaataataataatgaaaaagaagcagattaataattcaagactacatatgatatattaattaagagattaatgattagatatatgtgattatgaatatgagttataatgaatttgaatattatagaagatgtgtggaaaatcaaagaactaaaaattaagacatgggaagagagaaatgggtacctatgctatgcactaagtacgtaat

SEQ ID NO: 8446 - DNA, 514 bp, Cannabis sativa
gagagagagagagagaggtcttttggttttttataaaggtatttttgagttagaaaagaattaaaagaatagttaaaaagctgtgtagtgagaggaataatttaaaattatgtctgatactaaatagcccactatgacaaggttaagtacttagagatgtttcagtctttaagatgatgttttagtccttgagatgagttgcatttactctgcatacagagaaagatattattagtattttgtcagccctttggatatatatttgaagtttattaatgttctttcctttttacataaaaaaaaaaaattagaaactttgttcccacatattacatattattgtattatgtttttggtttaaaaaaatttgtatacaaataaaggcacaatgatattttaatacatcgatcaatgggaataattaaaaactgaaaaataatgcagccaaatatatgatatcaaattaatgtgtatgtgaaaaatatattaattatttcaggaaatattattgtgt

SEQ ID NO: 8447 - DNA, 548 bp, Cannabis sativa
aatttcgcccaaagtccctagggcattgagtttcctccggggcataaggatctttttccctttgaattgggccacttccatcagcaattcaaatgaagtctgttgattgaaaaaaatagccaactgactcagagtcaaataatcactggttaatcaccaataaggagttaaaaataataaataaataaataagaacacccatcaattataaaggtttaactccctttttagttgtattgatcgtgagataataccgtgcagatcactaaggaagacaaaatgaattctagctacaactctcaaagtgtttacagagaatatcttttagcaaagtgctcttagatgtgtgaatgtgatttcaagttccttctccttgccaattcatttactaattataggggggaggttgttacaattggctccataaaaggagtggttaaaaagtaactatctttatattctagggtacagttatgatctattgaagctcctatattctcggatagattgactggatccaagtttgtaggattcagtttgagatattt

SEQ ID NO: 8448 - DNA, 740 bp, Cannabis sativa
aatgagaatggaattcaaatgattgaatcgaaaatcttaaatgaacagcaaaccgttatgaacaaagattcaaacactgcctgtctcaacaattgattgaaataatctggaaagaacaaatatcatataatacatcaaatcaaatatgatcaccaagcttgtaagtgtcaatacacaagatttagtttcattcactgatggggttttggaatttggattgaattatcatcttctacactctgacttctgaaagcataagaaccgataaaagtgattcaaattggagcataactcgatcgcaatggttggcttccgacgaccgataacaacccaccttcggcggcgctttcatcagcgagatacaagtcctccgtgactcgaaacgcagcatgtaaaccaactaagacagccccaataatcaacgacattaataagttgaaacccacgtgagtgaacacaagagcaagaatcgtcaccaagctcagaagtgccatcacagttttgtcattgatcgtataaccgtacaccacaaccggaccgtcgttgaagaaatagaggaagaaccacccaacgaagactatcaagaagacgatcatggaaacagggtgccacagtaggccgaggaagacgattataagaacggccaaggcgtaattgatcctgaaatagctgatgttccatctgacacgttccatggcggcgttgtagttttcaggacgagagaatgaggagaattggaa

SEQ ID NO: 8449 - DNA, 659 bp, Cannabis sativa
tatagagtgtataatcatatgtaattttctttttatatgagtaaaaattcctcaacaacaaattctgttaccgactcaaatttctgttggtagaatcaaccttatcaagtagactttatggattccaatgtcttgtcatcagagatatttggtgaagacttagaagccgcaatgtaggtgacgagttcttattaattccacagagtttcgacaagctagcaaaaatggtcttgtcgaaactttgtgaaattaagaacttagtcacctacattgtagaatctacagagtctcctcgatagggttgattaactgaattttttgttgaaatttttttactttaacattctcgttaatcagattattttgaattatttttcttgcaatataatagtgtatattttgtgaggatttaacaagttttattagttgataatgattttggtgtgtgtatatgtataaataaataaacaaagttaccaataagagaaaaggggtggagtagtagtggtggtgtcccgatcagacaatttcgtttctctgaaagactcaaaggttggacagtcctacgtaggcaaagactcaatggcaaattcgatacggtatgtaataagatgccacatcggtataacgtttaccatcttaaggtgtcaaataacaat

SEQ ID NO: 8450 - DNA, 889 bp, Cannabis sativa
  modified_base (666)..(667): a, c, t, g, unknown or other
ctttggtcagggcagtcattacggcctccattctggtcatctttttgagcagtaactcgttgaattgatcctgtcgagtcaacctgcttttttccaattgaagttgtttagccatgatgaccgcggggtctgactcgccaagttggttcttatctccagcattatcatcagtgactttttcctgaaggtcatcttcaagcatatcctcaggtgtgtcccgagtgttgtcttcagcatcattaaaagtgatttctctagattttacatcttttattggatcgtcctaatttcgatcttcatcttggttacctttctgacgactagtcacctcatgtggatcattgatgtccactgctttggtgccaggaccagtaaaacaaagaccagactttgttcgggtgagtgccatgattatttgaacgtaatctctagatggtctcactgcttccttcatctctcaatgaaagtaccaaaatatttaccgagattttaaaaaactaattatcaaaaataagaactggaaaaataaaccattaagagaaaaaaaaaagtaaacagacataaatagttttttacgtggttggggcattaactagccttagttcacgagttagtgttattcagtagttctttagcttgaaaaagcctttaggaatacaatgaatnngttctcaagtttgcttgagcaagtattgtaataaaattcaacccttaatccataggattcactgggtatttatagtagtttgagaactacatttagtttcccttttccctcaattggatagtttacagtgaataacacacttcggctgcctggtgaagtgcagtccacaaaagaggagatgtgctgactaggaagatcagatttggttggatttggccaaca

SEQ ID NO: 8451 - DNA, 1043 bp, Cannabis sativa
agttacattgacttattttggttttggtgaagggataataattaataagtagtttcttttctttctcttttcaaatagattaaaaattattgtagactacatacatattatacatacgcatgatgttgtccagtttatgttttgttttaatcataagaatttccattttgacaggtcgacatgcctctggagccactagcgaagaagcagcgaaagtgacatcattgcattgtaattgtttgccccggatatagaattggggcccgatcacccaagtgtatgtaaccacacaactcctggagacaaaaatgttctgatcaggttagagatgctcatgtgtcacatatttatttcgggtagctgggtagccactccttttttaacagaagctcgtatttagcatatttgtacatgtagagtatcaaacttgaggaaccgaaaacatgaaagagaattcatggttggtaatatggaacagattgattgaaaccccagaataaaacatatctttagaagaagaagcatggttgattcttcttctatggcgattgtgagaaacttctgcagcttttcactttgtgtaaacattgaagattaagtaagaaacagatgtttgaaaggcgagtggggcaagtcgggaaaaattgattgagatctggttggcattgtagttgagaggtgcttcagtgtcttgtatattcttcttgttgtcataaatggcatttgtatatattttgttggcaaataagatacttttgttaaaacaaaaatttcatattttatgtattagaattaattagtattaatgcacaacgtaattttaccaggcataacataaaagtttattatgaattcaaaattattaaaatacataaaactaaaaattaaataatttcttacaagcaaatagaagaaaaaaaacttagtgtagattgctgcaaagcaaatatttcacattttttaaaaatattaattaatatacgttcttttgattaaaataaacatttttttattccaactataattatattaatcatttgagg

SEQ ID NO: 8452 - DNA, 1172 bp, Cannabis sativa
ttttttttgatttaagcgtttataagttacgaaaaatgttagggttactgtttaacttactaaattatgttaagcactaatatctaccatttaaaattttaaaaaagaaaattaaacataattatggttaattttattcaatattatcaaaatatctagtatttttaagagaaaaaaaattttagtcatagttttttaaaaaatgaaacattattattttgttacttcataagttttttatcagctaaaataataataatttttaaaacctaataagaaataattttttagtaaatttttaaaaaaataaacaataagataataaacaatatatttttatttttaaaactatttgtacaaaattaaaattaaaatatgtattcatttcaaaaaaaaattaaaatatatattatttcaatgtataacaaacttaagaattttctttaaaaaaaaataataatcatttactattatatttgcaaattttgaaaatttcaatatttgttaaaatagtgattatttattcagattaaaagtaaatttacaaaaaatcataagtaggggtgttttatattgatttctcaaataaaagcaatttattattagctaaataaataaattgaagttgaaaaaattaaaataattaaaagagtaactaataagtgattgtagaaaaaatattaaaggatattcatattgctgtgtaatattgctattggtgtcacatattttatttcattaaaaatttaggaaaactgttaattagttatgtagcatcacaatatagtagtattaggtaatagtggccaataacaatgctggaaaaaaaaattataataagatgatataatccaacattttatttgcattttaaaagaacaaaggtgaattttaatttttaataatttttattgaataaactgaaaattgagttgttttaaatattattgtgaagaaataaaataaaaggattattaacgtttagttgacagccgccaaagataacgttggcaagtagagttagaaaagtaaaaaccaaactgaaataccaacttttatcaacatagcaaatattacctaagcttagctagcgtgagactttggacttaacaactcattgaagattccggttcggtcacaaaacccggatctttctttctctctttcatttc

SEQ ID NO: 8453 - DNA, 830 bp, Cannabis sativa
  modified_base (188)..(200): a, c, t, g, unknown or other
  modified_base (345)..(354): a, c, t, g, unknown or other
ctattctcactctatttattaagataaatgttacgaggcgagttaaggtgtcaagtactataagaaatagcgagatagcgaattgtggtgtgttttaatattaagttttatatacataataataaattttacttttaattacaataaaatttgtgactaaaagtgaaaaaattgtaactaattataannnnnnnnnnnnntgttgtgactaaaagatccgtggctaaatgtattaatcacaaaaattacaatttattgtggctaaatgtatttttagtcacaatacttattgtggctaaaactaaattaatgacaacttctaactaaatactatgttttagtcannnnnnnnnntttgttgtgactaaaaagttgtcactaaaagtagcagtttttatagtgatattttgatttaataaagatgagtgttaattataaattatgtcggatttttttttaaacaaaatttcgttcgttatagttataataatattattcctgtaattttttaagatttttaaataatttatagtatcgataatagaattttttatattttagtgtagcatacgtgttcaaaatatttcaaattttttttttgacacggtaaactattcaccttaaaaaaaaaattgtactattcataatttttttagaatttataggaaaaatttgtatatgtattttctggtacggagattgagtaaaaagttgtaatatttaacacttatttttaataaataatatgaaaaattactaataatcaactgtatgatgtaatattaaattaaatatcttaagaagtaaaataacaatatgatataattata

SEQ ID NO: 8454 - DNA, 720 bp, Cannabis sativa
ctcagatggttgtttcattaaaatacaaaaatagagacaacaacatatttaaaaatggtgtgactattcagattgagagggtggttgaggttcatccagtgcttgagattgagattgctcctgaggttgaggttcagtctgtggctgaggttgagcctgagcaggggttgcttgaactgactttcctctctgcctaagcttggccatttcctccttcatggcttccttcctctttttgctagctactactttagcttgaagcccactcaaatttgggtcctttttctcttcttggggtgaaggtggaggccttctagctgctgctcttgcactccactcaccaccactcaacccaagagctacaccacccaaccccaagctcaatgtcctgtgaatcaacaccaccacttctatatatcaatattactaacatttatctgtctaatggcaaattggcaatggcattgtcataaggtatgaatcaaactccataacaaatgaggaaagcgctaaccttctgttgaggctcttttcatcgtttgaatcttcatgggatgccctcacacttacacatgcaaaatgactcttcttatagaatgttgtggagaagggtgttggtgctgctgttgtagtagacgccgcccccgccattgctgctgctgcagacagggaatgtgccatgactctttctcagtgtcctactgtcaaggtatactttgg

SEQ ID NO: 8455 - DNA, 899 bp, Cannabis sativa
catttgtgaaattaacccattaaattatgagggaactatacaaattttatgggtttattttactttttgtgcaaacaaatgattttttttttttttttaatttttacaaaaaagttattttaagggtaatctgatacccttatggtaaccaaaagggtaaaaagttaccataagagataaccaggtaccttatgatatatatatttttttttttcattttttttaatcttttttctaaaattttctaataaaataacttctttgaaaaaaaataaataaaaaatcatattcttccaaacatatactttaaaagctataaaaatgaaaattccccttaaattaaagtaataatattggtagggagtaatattatagaatcaaaaataatcaaattttattatatttttcgtttgtattttaaagtattaaaatatttgaaggaaatgattttttttataattttaatagaatgactattccatttaaaataggtagaaaaaccatgaaaaaaattaaccttttttataaattatttatatgcatattaaagttaattctgtttcattcctattttcattatcattatcattcaatcttccatccaaacgtaccctagacgttttcaattgaatatatacataatacttatatctataaacatatcaggatagtgtatatcatgaagtgaatatagttgatgagtagagcaatagtaagtttgtatttctcttatagcaagacattgcatattattaatttttctgaattgtatgttttgtaaatgagaaaggagtgttgcatacaagggacagagcgcagtggcatacaagtctagtattcggaatcaaataatgaaagaaggctatagaatttggggcaatgtgggagaccaatggagt

SEQ ID NO: 8456 - DNA, 895 bp, Cannabis sativa
catctgtcttaagttttccatagcaccatatacattgatatttaggtttttcatttttatactttgactaaacttagagaatgttgatacatgattagacaaagccaggattccgaaagttataaccaaaggacaattattgtttttttgacgcggtaattaaaatcacatatgattaacaacgcaacacttcataattggtggcaacacctcctcgaactaggatagctcatcttttaacagaatggcatgttttgccaaactatgagctgcagaaattcatatcgcaagccacatgggacaaaactaccctaaaaaatttagacaataaaactataccatcctcaaacaacatccccagctcattaaaacacccctcctttgttgatagttgaaattattatttttctttacatagtaaaataataaaatttatatttcctttctattataaggaccaataattttgtagtacaaggccattcagtgactaaaaaaaccccattcagtgacatattggtcgggttagaatttgggaatagtttaccttttaggaatttaggtctttaaaaaaaaaaaaaaatctgaaaccggaccggaccagaaatccgataacaactcgacataatcggccaaagtcggtccatcgggccaaagtcggcccgatccggctcgcaaaaatagcccatattgccattcctattttatatgtttagttgcttcgctcttttttgattttgaggagttacaaattaaggaaacatgccaaaaaaactccccggtacacgacacaaatttatctattttgtcccgttaattgtaaaattatatgtataccaactacaattcttctttaatgaaaattgaagtggcgaaatttttagaaagttaacat

SEQ ID NO: 8457 - DNA, 568 bp, Cannabis sativa
gagacggtactcgagtgataggactagtgcgcggagctgggccgctaagccggcgcatgattcgtggtaagggagggatgtggcgctgaagaggatgaagccgccgccgtggaagaagaggatgacgggaagatttggagtgttgggaaggggattgggcttgaaagctcggaggaatgttccggtggcggaattgagagggaaatctttggagatgacgggtgaatcgtgggattcagatgtaggggccttggggatggaggagtggcgggtaagagtgccgtctggattgggtacgagtttgaggaactcgtaagggtccatggagtccgccattgttattaattagttaaattagttgttttgttattttttggggggagagcaagttttctttatagaaaaattgtacttagttgatggtgatagtaaagtcaaagttgtatagtatacgtaagaagatattaaatatgtgaacaatgattagatagctcactagataatgtgcggcaaccgtagcctatcctaattttcgggccaaaataaaaaatggataatgaaaaaaaaa

SEQ ID NO: 8458 - DNA, 1525 bp, Cannabis sativa
aattcactaatatcatcaaccatgatcggaatatttataccttccgactagctagctaaacagtcaatcatcatgccatccatcatcaaaagtttaagaggaccgtaaagcaatccacgagaggatgcgacaacgtgtaaactacaccgtctacagtttaaatccatataaatatttgtgataattgcattcaatttatctgtggtaattttcttttttcttactttcaaattagtacttcaaattttgaatgctcatatacaggtcattttttactatttatttgatcaaacagagaacacatttttttttttaaagattatgggtacatggtaattccttcacctttttatataagattcttcggtgaagttcttttgcatatatactgacacctctatttcgacggatagacttgtgctttagttccatgcgaattagagtcaagatatagttttcttgttgacatcttcaactttaataaaattatttgcatcgtactcttttgaattcgttattttagttattgttattcgtttgcgatgtaaattaaaataattcattgaagtcaaacaattatgtgccattatctcaatggcactcatctttttcatctttatcttctgacccataatttaatacaataaatgttgaaaaatataatcggaaaaaattatgagaaaaattttcaacaaggacagatagtgtatatgttcctacaacggaaaaaaatgccattaagaaattaaaaaatatatatgtatatatataaattagtcgtctttatttatgttttctttcaataaatccagtttttgagttagtagtttagcatttgtgtagtagtgtggttattttgatcattacattttcatttatttatattttaatagagtataacaccaaaaaaaatacagataactatccttgaggagaaactatttaataatgatgaattcagattctcctgttagtaaagtgtttaaggaaatttattactcaatttcaacaaacatatcatcatattcatatataacactaataatatgcacttttctatttttattctttagtttattatacatgatattatttataagatgatatttaaattgaatagatataacatgtatactatatatatttcattattatagttatatatattgttataattttttttatatatatattaatgttatagaactttgagtacgtttatatatattttttttaaactaattaggataaaatataaggaggataaaatagtccaaagacaacaagagaagaccagaacaaaaggcaacaggcccgacagcaataaaaaaatagcaaacaacgaaaaatcacaaaggggtagtctaaaaaaaatcaaaaccatgaataagttttgagttagtacatttatatacatgagtattaagtttttgtaaaaaaaactatgagacatttgtgcttgcattgtgacccttctaattaaaccttcttacccttctacttgtggtgcttctaattttttctt

SEQ ID NO: 8459 - DNA, 609 bp, Cannabis sativa
atagaactactcctgttataggctttgtttgaatttacctagtagaagtgtagatcgaatgtatcctagtttcaccttgcccggtttggaacaggttgaagatgaataaccaggccttcattccacaggagtttttatattttatatatatataatatttgtctttcttggcttttttgttctgattctgatgaattgatttcttaagtgaatctctattttgcaggacttcaagcttgtgctgttatgaagattttagatttctgttctctcctaacataacatatatctcttgtttaattagccattatcggatttggtttctaatatacaattggtttcttctttttttgatgtaggtgatcaaagttttctgcaaattgcaagctaaagcaaatttctcatcgcgatgaccactagcactagcacatatgaggtatgttaacatgatactatgcttgaaatctactcaatttcatcataggttaaaaagacaatactttttgatcccttcataaaaccgaactagttttgggatctccggacctaaatcgatcttcttagccattctacaatatatcccatgtcttatatttttcattttcttcc

SEQ ID NO: 8460 - DNA, 986 bp, Cannabis sativa
atgttaaacagcatgagtcccaggatctttatacggattggatgagtcttcagcgataagattttcattctcttataaggtaaaagagttgttctcatccatcttagcttctgcctaggctttttgtgcctcataaaagtcaagataagcatccttattgtcttggagatggtcaaagttggcctctaggtttgccttctaaaacacatagaagatatccaacacagctaagtcaaagctctccacttccttttgaagtgtctcccattcagcattgaaagtctactacattggcttcttctcctcagtcagctcattgaccttgacatcttaatttggaatgagagtacggaggtttttgcgttcttccttcaaagagtatacctctttgctcactgcctccaaatcctcctcgagcttagctgtggacatcatatcctcgatctattctttaaggtccttaacaagcttctccgaggaaacaatctttttatttgcttcgcccaattgaaaagtattctcttccacctccttcttggcatcatctagtgatatcttcaatgtgttggtggttgttttgacttttagagcagcaaacttcacatgggagtaagtgtacgccatcttcagattaagctgcacaatgaaacaagattaaaacatgcatggcatcaagcctatatagaaaaacaaaaagaaaagtacttactcgagtggtctccttcagcattctacccattagcagctccacagacatgtcctccgccctagccaattgatcatttacctcaggcagcacttgatcctggtaaaaggtgagcatctcctttcctttcttactctccagatgcactacgagtggagtggccaatggctttggcagccaaggcccttctgtgctcacctctttacagcctttggtcatagcattagaagcctaagacttggcattcttctcagcaaaggcaacgaggtcaaggaccacc

SEQ ID NO: 8461 - DNA, 591 bp, Cannabis sativa
ttaatactgtctcgttattttcaatataatggaaatattacattatagtatgctttattttggttcagattttttttatttattttaaaattcttttgctttggttatgaaataaagtaaaaaatcaattagcatcgatgcactactatttatttcggttttcaactgaaacaaaaacttttctttttgcttcggtttataaccaaagtaaaaattaaattaattagcatcggtttataaccgaagcaaaaaatatcactatttgtgtctacgggtataacgtcaattacaccaatcgaaacaatatctttatatgtcacttaaaaactgaagtaaaatatcatttttgtagtagtgcaactagggctcctatattttcacaagatttttcaatcatattctcccatgattcagtaacttgttcattaagtcgtcagaagattttattattttgtgattaaaaaattaaaaaataaaaatgttacaaacggtaccataattattctttaaaaaacatattaaattttaattacttttgtatgcaaataaattagtgtgtatctacagatatgacttcttcgatgcctcatc

SEQ ID NO: 8462 - DNA, 882 bp, Cannabis sativa
agcttctccagtcaggcctcagaacatcgattggtgatggtactaccattaacatcttcaatgacgcttggattcctggctatggcaaacttcagttccttcggttttactccaatggcaatagaactgtggctgaccttctcacccctacaaaagaatggaaccatgcccttatccaatccatttttcccacagacatccaacaagctatagaagccatcccccttcattccatccccacccaggatactcacttttggtccctcacccctcatggatcctatacggttaactcaggctaccatctcgcccatagtcaacttcatcacaatgaccctaccccatcggaaaccaattcttcaactacatggtggaaacatctatggacccttcccctgcctccaaaagtgaaacatttcctctggcgcgtttgtcatgatatactcccaactagccacaacctgttcaataggaaaaccatctgttccccacattgcagtcggtgtcactatcataatgagaccctagaacacgctctcttcagatgtcccactgcccagaaggtatggaaattaactgactttaatgattttgtttctaaacactctgcacttcattgtatagatttattatatattgctgccaatgaatttgttgctggacattaccttctctttgcttgtttgctttggaagttatggaactgcaggaacaattggttacatgctggcataactcttcccccagaacaggtcctttgtgatgccacaaactaccttcaccaatactcgagctgcaatcagcagaccatcatctctcctcgagtccacgaagatcaaccgttacccattgcttgctgcacagctgctccaaccttcaact

SEQ ID NO: 8463 - DNA, 1079 bp, Cannabis sativa
acaatcctgtcgcggggaagcctcatgaaaccgggaacaagtcaagaccgatagattggcttaagcttacctagccttatcctaatttctcaaacacgaaagacacattttcttggaccgagagtggttcaaatatggaagcctgcccaaccgatacccgaatgggtacttaaagggcctatcaccgatttcgactgcccgagagtgtcgcagacatctacctttagagtaatccgagttacccaatgatggttatgattttctgacaatcaaattttgtccccagtgtccaggcatttaaaattaaacctaattgtgtaactaattttatgctcaaaagattactttatacatcaaaatagttttatgaacttcatcattctgctaactcaaccccgaagattgagcaaaacaaaacatattttactttcatgccctctaactcatggttgatcaatattgctttttcagataattaataagatagagatttttacatagtttaggtgttaattaatcttagttcacgagtcagtctattagcctctaaaagcgtgtttgatgtgtttacaatattttgtacgaaactctaactttgtatgttcttagtttctcttgaacaagaagaaaacttagaacaatattggcagagcctcgactatttagattgtgatcccccctttgtataaaaatagaagggtatttataggctaagagcaggtatggacatgcccatgacccgcctagagtttctgctcaaaacccactaatggagaaaattacatgcaaaagagagctgactattaggtcccttgaaaataattgtgcctgtatgtgtgtgctgtagctggacaattggggattattgtacgttgtggacacgtgtcattcaaaggtttaacctttaaaagtaaaaggtacgtgtcgctcagatgttttacctttaaaagcaaaagtttaatataactatctagcaaaaaagtggatgagatgcgcgcactagcatccccaacatgttataaatgtttaaaagtagttaaggttttatataacttcttctattttatgtaagttttaat

SEQ ID NO: 8464 - DNA, 754 bp, Cannabis sativa
gctaattttctttgagcattgttacgaagtattgatggttgtgtaacattacgataaaatgtcgttttataattagtaattttttctaatatattattagagaaaattttctctaatatatggtgtgtaatttttattaaattgcacaaattgtaatattatacttcacaagagtactaagtaccataagaatcttataacatttcttatttctttttttaatttaagacattctataaaatttgaaaaaaaatttaacataaaaatagaatttaaattgtctatttattttagtgtggaataaatttaaatatatataatatatataacaataaaaaaaattacactaattttttttttttaaatacagaaacactatcaaatgtatcactacactttgatggggtgtactgaagcacgcaataattaaattcaaaggaaaaacaaaacaaaaaaacataatgttcatatatgatattatatatattttttaattatatgttttataagaaaaagatatggacttaaaattttgatttttctataatgttcagatatgatatttttttggaatgaaaaatataattcattaagatatattcgatgttatagaacttaaaatgaaggattaatattcatctatacatactttcttaaattagtaatagaagtaatcaatgtgtgggcaaacaccattcatagatcgcgaaatggcgctgcaagaaccatcaccaacatgagctaataaagaatt

SEQ ID NO: 8465 - DNA, 1204 bp, Cannabis sativa
taataaagtatagctctaaaacaaaatacatatgtaaactacgatttttatccaccaaaaaaaaaaaaaggaagaagcagttccaatactcttggggatcatataattgaaccaaaaaactcgtcagttttcaatattaccgtacgtatatatatacgtcgtatatatataaatatatactttaaggtgatcataataatgattatttccactaaatattttggctcttggtatagactcattactctctcactatcatttcataagtgaatgagtatttacattaagtactcaacatcacgaaatatagcacttcaagtgtctataagattttcaatataacattactattatattttagcaatccttttaacaattttatgagagcaaatcaacctcacaatcttaatgagggccacgtggcactgaatttatgtagtgggttcataatgaggtgcattataaataaacaacagtaagagtttattatgtgtgtctaagtttacgtacatctagaatctagaatattcatactgatatccaccacaagagcttaataaaagaatatttagtaaatggaggataattaatgatagaagttttttttttttttaccatttacaaacaaaaataattcaataaacttatgagacaaaattataattatcccctgaaaccaagtctagctggctacctgatttttttttttttttttgaggggaattaataaaataagtaaaattaattaatcatatcacaaattaaagaattaatatagatattcacatctatctacacaataagtccactaactatatatatttattaataattaagagataatttattaaattaattaatgtacacaggtgcgggtgcaacatacgctagattggtacctaaaataaagaaaagatatgactatggagcaatgatattcatcctaacattcaatctggtggtggtgtctggtttgcgtgcggagaaggtcttacaattggctcgtgaacgtctctgtaccataggaatgggtttcgccgtatgcgtcttcataagcttgctcatcttccccacatgggctagtgatgaacttcacgactctatagcctccaacttcaaccaccttgccctctctcttgaaggtatatatacctacctatctaattaataatttccatctaatattaattaattcttctactta

SEQ ID NO: 8466 - DNA, 679 bp, Cannabis sativa
taataaataactgatggaatacttgttttgttttctcgagtaaaatcagaaaacttcattaatatacgcatgacaaggtgtgcaaggagaaaaaaacaccgtaaacatcaagaataaccatttgttctatttagtaatcaattcaattcagttgaacaaaaacaaattagcaatttataataactatcatttgggcatgtttccaaagctacttagatccaagtatattgaaaattagatccaacattcttcacctatatcttatgcatgtaattaatcaaaactcagttacaacaccactcgttcgatcaagctaaattcaaccacattcctataaattaataatatgagtaagaaacttcatcgcaaaatataaactcaagcacccaaaatgtactatcatagtatctcatttcaaaaggagctgatttcacaacttagaaacatcttaaatataagttaaacaaagcatggatatacaaaacattttatctattaaattagatgataaagttttagaactaggcacgtaatgattcaagaacaaattccatatcaatctaaacaagctcatcaatccaaagattccatatcaatgaaaaagaaaagttaataaaacaaataaaatagtaaagctaagaacaaacaggaagagttaaaaaacccttgaaagtatttt

SEQ ID NO: 8467 - DNA, 966 bp, Cannabis sativa
atatatatatatttatattgggtatccaaacttgtaattccctttttaagacactacttgctcatttatttatcacaaatatatattagtggaaacttatgaagagtttgttaaaaaccaaaaagaaaatagagatgaagaagacaaacaaacaaaactatataaatatatatagaataattctatggtacatacctttattttgttcttatagtatatgaatatttttttaatcattgatgtgtatgacttttgagtgtgcacattaactaatatagacttacatatacccaataaaaatattaaattattaaaatagtatatgaacatttttttaatcattgatgtgtatgacttttttaattattttttataaataaataaatatttatttattaaatattattaaaaaaaaatatgataatacaacccaaatattaactattatcatacacttatttatttattaccatttaatctattatctatggctataaaaacatccataccatagaaataaaacaatagtcattaccatataaatatccatatagaatatatatatatatatcataattaattctagtcaaacaagttcatgagagcatttttcttgccacatggttgaggtaagagctccttaatattattattattattattatgaggatgaggagagacatgagcaagttcaaggttgggaagagtaagtccttgcttttccaagtgttgttttttgtcttggtagagataaaggaaagcaataagagagacttgtgttgtgaaaaggatagtccaaagtgttgatgaactttttgatgttcttttatagtaaccctctaatcctgtgtagatgtttataatcccaaataatgatatcaaactcccaaatatccaatgcattatgtaccatacctttcttcctctctttcccctgcataatttttatttaattatataattaca

SEQ ID NO: 8468 - DNA, 917 bp, Cannabis sativa
  modified_base (808)..(827): a, c, t, g, unknown or other
tgatatttatgtataaattattcactgttaaatattaataatttaacattcatacatatatcaaaatgttcaactcttattaataattagaaatatctttacatgtttttcaaagcataaaccctaacataatttcactaaatctgttatttgcttcatttcttaagtgcctattgacacgactcaatccatactattttgagggtgaatgtggtagcttttcatgacaaataccttgctcttccttactaagttggtcgaagtaaaaaatatttgttccaatttgagatcttgtttggaataaacttttcacctagaaatctcgatctttttcttctagtgcactattacaaaaaggatttttttgtattggtgaatgcgtctagtcaaactagttgactgacgcaaaagttaaccctctcctttttgcttcgattgttaatcgatgccaataataaataatttttgttagttgttacttcgatattaaaaaaaactaatgctaaagatgatttttttaaaaaaaaaaatggagggctcaaattctgcgtctgtttcgctcaaacgcaccatttaacgtcagttgaatgggtttttatgttggttatgagtggacgcaaaattcgcaaccgacacaaaattcacaaccgacacaaaatttgcatcgattcataaacaacgctaaattacttaaaaaatcacagatttgtgggtttcgacccattttaaaaaaccctacctatatgttatctctatagccactcaaaccctaccgcacttagcctacattctctctctctctctctcnnnnnnnnnnnnnnnnnnnntctctctctctctctatctctatctatatatatatctctctcttcagaggcccaactccaccaggcaatgactctctctctctctctctc

SEQ ID NO: 8469 - DNA, 862 bp, Cannabis sativa
ttctcagcataccgaacaccagtgccattagatatatactcatccccatttcctgtgacatcgcgccatacagagcttcatatgactgatgggaatcactacaattacaatggccaagccattccatccgaagctctcaagaaaattctcaactttaaattggcttgtgaaggcaatgcgattgatgtagactcgggttgttattcagtcgacgaagattcaggtagtttttcagttgatgaagattcaggttttctttcaggcgatatagatttagaaaatctttcaatcgatgtagattcaggtcgtgtttcgggcatgatttttgtgtctgaacgtgaccatcttgaaaagctttacatagctattcgcttcaatgatagccaacccaaagtcaaaatcttttgtattgatgacatatatgacacatctaataatcatgatgtttgtatggaggatagtggttgttttgctggtgattatcttgtttatgtctccactaaaatggctcctcctagacgtcgtcaaccatggactgctgtttacaaaactaatcttaacactgctcaaactgaacgtctcaccccaccaggttacatttactttctttaataattttattatatgtattaagaatatataaaagttttcgtataaatattcataatttttttatttgataataaaattaggagaattactacatatactatttttttaaatgtgttttctatgtggtttgctatacggattttggttacgatttaagttgctacattaattgttataggagtttctatatatgtgaaaatttctttaaaaaaaatgttttaaaatgtagtaatgaaaagaaaaccccata

SEQ ID NO: 8470 - DNA, 745 bp, Cannabis sativa
aaaaaaaaaaaaaaaagtcatattaaaccaaaattgattaataataatgtgaaacataatactctgattaaactttaattaatagaaaaaaaaatgtattttttaagatgggtgtgttgcatgtaaatttttgtaacaaattttattggcacatgagacacatgacttgagcagcaaagcaaaggaataacatatatgtataaaattcctagaatagtgctcaaaactatataatatattatttggtgtggtctatttgtttttttaagtgacatgagattaaatgttggatctaaatctgcagtgaaaattgggattgttacttgttaaatcatatatgtgcacagattacagctggcttaaacttttttttatcaaatatagctaacattaaagaagagttattacatcatctttatatgtggaccacttgttatacattctcttctgttttccattttcttttttcaaggtttaggatagaacagaagagaagacattgatgattattatgatatgatgggccacctttcttacgcttggcttctttctctattcttcactttggaaagttaagctcattttcaagttttagtctttgaccgagttacactcatgaaattcatttaccactgtcaccatttttcttttgttctttgtatatatttatctatttaattatcaaacttatgattatgcttctttacttcaatttttgtttttgaagagcatatttaagtgtttt

SEQ ID NO: 8471 - DNA, 592 bp, Cannabis sativa
gctttcatgttttcggggtaacctatgaaaatgcttgctcttgcacgaggggcaagtttgtgtgagatattgatgtgtgaagcatatgtaagacagccatagtttctgagatggtcatagttaggtgtcttatggtgaagtagttcataaggtgttttatctttgaggataatggatgagattcgatttattagataaacagtcgtgtgaaccatttgtgaccagtatgctaatggtagatttgattgaaaagctaaagcacgagccacattgagaatgtgttggtgttttcgttcaaccactgaattttgttgtggtctgcctacgcaagcattaaagtttattacacctttgctagtgtagaattgagtaagtttcaattcttttgcattgtcagtgcggatggattttatgtttgtttgaaactgaacattgacaaaagtgaagaaattatgtatgatttgtggagcatcagatttcgctctaagaaaatatatccaagtatatcttgagtgatcatctacaatggtcaaaaaatatttatagccttcaattgatgttgtgggatatggtccccaaatgtccatgtgaa

SEQ ID NO: 8472 - DNA, 580 bp, Cannabis sativa
ataccaaaaaaagaaaggatacaccctttaccatagaattacttgtttttagataacaaaaactgctagaacaacattgcaacttatagaggagttgttggttgtattggttggtatacaagggtaataaagtaattaagtaattatatgatattatgagttgttgttgatgttgattgtggtcatggattcttgaatctcttcaagagttcttcccttagtctctggtacaagccttgcaacaaagacaacagtaaaagcacacattgcagagaacatgaaaaatgttgctgatgagctccaaaccatcattagattaaaactgtatgtcactatacatgaagatgaccaatttgccaatgttatacagcttccagcccaaccctttacatttatgggaaatatctgttcatacatacaaaaacacacacacatatcattagtttttaccactagaaaagaacattgctatacgtcttgtaaatggttagcgatatttcattacaccaatatattcataggtatgtacctctgacattataacccatggtaatccacccatccctatggaaaatgacac

SEQ ID NO: 8473 - DNA, 502 bp, Cannabis sativa
ggcagtagctgacgcgaccgtgctggtggtgggtgccgatcagtccatagaagccgagagtcgcgaccgagtggacctaaatcttccgggacagcagcaactcctaataacaacagtagcaagggctgccaaagggccagttattcttgttataatgtcaggaggaggttttgacatttcttttgccaaaaatgatgataagattactagcattctttgggtgggttatcctggtgaggctggtggtgctgccattgctgatgtgatttttggtcattacaatccaagtaagcttattaacaacatcatatcattcataaataaatatactaattgtcacaccttttgttctaatttcattaataattacatcgatacatgttattgtaataaacttaaaatgttggcattaacgcatcatccatttaattgtttgaaaaccttattccactaaacggcacatcccattgaggcttgagttaataaaaattattaatgaaat

SEQ ID NO: 8474 - DNA, 852 bp, Cannabis sativa
atgctatttttgggtatataattaagtcaccctatagctgtttcttttgttttaaggtattctatctttttattgggaaagtgtttttattaaataaaatttggtggtgctcacaaaactcacgacaaaacttctttagttctagctagatgcaaaatgggtctcatgtaagagtaagagcacagtctaaatttcagcattatcataattttaagtagcacatgtcatcaaccacatctagtttgtttgttgagggattagcatatcaaattagataatgataatagaatcttaaattctattataatacacaatttggtttgtacttaattctcaatgttgggattgggagttgagttatattatatcaaacttatcatgttataatctctcaccaaagtgatgtcacgtttagctgactctaaatgcttcatttgtaaataattaatattacgtaacaaactgaaaactattattctctttatagtttgtttttgttattttcaaaaaaataaaatcataaagaggttaatggttatgggatgttgatgtttaatcctgaatattaggcttataagctgtcatttattgtttctctcgctactattaaggaatttttttaagaaaattaatagacttaattctattgatctttcttgatatatgataatgttctttgtaaccactctctttttacattggatgcccaagctcaaagtgtttatttggggcatccttgtaattgagggcatccctcaacccatgaaaaagtaaaagttccattaattgtgttaaagtaacgaaagatatatggtactacggggctatgaaaatatttatttatatatatat

SEQ ID NO: 8475 - DNA, 1031 bp, Cannabis sativa
aaaaaaaaaaaaaaaagtggcaaagaaaaaaaagccctcattcaaaactgccgtaaaaaagtggtaaaattgtaaatctacccaaaaaataaaaaataaaaaaaaaagacaccagcacatctataatctcggctggcgaggatggaacgatcgtgaccgtcggatttaccgatgagaaaaccaagagacgagatcggcaccgacgcgccgttggcgcgtgagagacacggtctcatcataatgagcatcaagaagaggagaacggcataaagggcaattgaaattgagatgttcaagccaaccatcaaagcaattcttgtggaacacgtggcgacacgagagcttacgtacctgttccccagctcttaaggtggacatgcacaccacacaatcatcggagtttgaggcggcttcggcttcggcttcggcttgagatgagtgattattattgtatggataagagttgaggcgatttaggttgagctgattagctaagacgattaaaccggcgagacctgagccgacggctcgtaataagccaccgtcgtcaacaacaacaacaactgggttgggcccaaatcgtgaaaggcccaagaaatgaacgaggcccaagattgaagaacgaacgtagctgacgcaactggcgattagagctaccataaggagaggaattgaatcagacgacacgtcgtttaattggctttgtaatcccataattgatttttttttttctctattgtgttcaactactgagattagatgagatgagatgggttttttttagagagagaaaagaaggaagagagagagagagagtggtaaaggagtatggtgttgtgaggaagaagggagttatatgggaagtgtggtcggagagagaagtaaataataataataatattaataataaaacataggaaagagaaagaaaaaaggacaaaagaataaagaaaaatattaggaaggagtaaaagggcaaaaatggttaaagagtaaaatataatcatagtactatgtatgtagtattgagt

SEQ ID NO: 8476 - DNA, 845 bp, Cannabis sativa
taataatttacttacatatctttaaatcatacaaagatatttgtcatatagtgagtgcgactttgaatttatatcacttaagatatgtattaatttcttctagaattagttgggaaatttgaattaatattcagcatttgggaaaaattcgtacactaaacctaaatatatcaaaattagttagataggccactttttcatcaaatccaaaaacacccctcctctctctcttcctctattctctttgtttctctcactctcttcttctcacgcacacaaagaccctagcaacccacgactaccaaccaccgcgcctttaaccgaaaaccaccaacccaccgacaactaccaatccaagacccaacatcttcgaaccatgaccaccgtgccatgactataagttttctatttcattttatttatatgctgtgtgatttagggttgaaatgtatgattttatttataggtttattaatttaagaataaattgtatgattaatgtctattatctataagttgatgttagatttagggttgaaaacagttagatttgtgttttgggtagaaaattggtttttttgccaagctcgatggtggtctgatgccttcttgttgttaaattgagtaaaggttgaagacaaaggtccaatggtggcccgatgctttctataaatgtaggatatggtccgatgatactctgatggtagtcggatagtggttcgataccttcttgatgagcttcatgaatagagcttaacatctataatgtagaatatgacttgatggtggtccgatagtggtctgatgttactattttctaatgtacaaaaatataataataataa

SEQ ID NO: 8477 - DNA, 1322 bp, Cannabis sativa
tctcataaataaaggtcataattgtagcatatcttttaattgtgagattggatttgaaattggcaaacctaataacctactactcaaaattgcttttgtaaaaccatctcccactcactagaaatgatcttacttttagtcacaacaaaacttataattaaaagtaagaaaatcataactaattataaagtattatttttatgttatgactaaaatattcgtggctaaaaatattagttataaaaatcacaatttattgtgactaaattagtaacaatttgtatctaaatattatgttttagtcacaattaatttgttgttgtgactgaaagtcacatttagtcacaaaatttaggttgtaactaaaaagttgtcactaaaagtaatttttttttttgtagtgacttgatccaatactggcacatgtttgataacaactatcccttgttgaactttttcataatgaaagtaaagatctagctagttcaatatgcttcgtcctgccatggagcacaagattttgagtaagcataatggtacttaagttgtcacacaaaacaaccgagggttaaggcaagtgaaggtgcaacttagaaaatagagattgcaaccgattgatttcaacaacaacacttgctaagctcactactaaaaaaagtagattttttgaccgttttaaacagtcggttaatatattgtcattggtctctataactgtcgcctattcgactgtcacaaaactagatagaataggtgacagttttaaaacagtcggcgaaaaactttacggatggtattgcaccgtcacataaaaaaaagagacgagatcaacttgaaatgtccaccatatctgcaaaccagatacaaaactagaaaccctacacatctcaaataaaaaatagtcacaataataaactcatacatatctcaaatcaaagaacaatacaatagataaataaagacaagtgagattacccgagaatgatattgacaaacggtggttgttctagtggttggaggcatcgtcgagatgatggtgcgactggtggtggtgccaactgccaacgtggtgcaactggaagcggtgtccacttttgaggtggtgtaattggaaaggatgtcgagatgggccagctggtgtgagtggtggtcactctgtctgactggcagctgttactatgttctatcagagagagagagaatttgaaatgaaaaattaatgagataaatatttgatttggagggattttatgaaaaattgagcaaatttttttttttaaccaccgaacattaaaccaaaagttaaatgtcaccttaacaag

SEQ ID NO: 8478 - DNA, 1040 bp, Cannabis sativa
gctgccaccaccaacctcacatcatcaactaactacaaaggcaaagaaaagttggttgtaggtaatggcactaaacttgctattcataatattggtgattcacacatacatgctactcgctccatgcatctcaaaaatgttcttcatgttccagatattcaaaagaatcttatcagtatatccaaatttataattgacaatgatgtcttaatagaatttcaaccatctctttgttttgtcaaggacatgaatacgagacaggttctacttcaaggccaacttaaggatggactctaccaattgttgctacctaccatttcctcttcccaaaatggcaatcctcctgctgcctatctcagtgacactcaatcttcatctattaataataggaataaaacctcatgtaatttttccaatatttcatcttgtaccaagtcccctcgcattgttgctctatggcacaatcgacttggacacccttccaatgtaatcctatccaaagttttaaataaaatggatgtttcttgttctacttctgagattggcttttgtgattcttgtcaatatggcaaaaaccatatgatgcatttttctagttcctcacttaaaactcctgcacctttacaattggttcacactgatttatggggtccatctccacatccttctcctgagggatacaaatactacattctatttgttgatgattacaccaagtactcttggatttatcctatgcgtgtcaaaaatgaatcttttcccatcttcttacagttcaaaacaatggttgaaaaatagttagatttaccaataaaagccttacaatcagattgggggggtgagtttcgtccctttcaaaaccctcttcaacaacttgggatcttatttagacacccttgtcctcataatcatcaacaacaaggccgtgttgagcgaaaacaccgccatgttactgaagttggcctcactcttcttgccaaagcccaattacccctaatgttttggtgggattcctttgtctcggcagtttttctcataaa

SEQ ID NO: 8479 - DNA, 948 bp, Cannabis sativa
aaacgctctatccccaccttataaataaaggatagggaaaaccacatcatgtatctctcggcagagcagagaaatatactccgtttgacaagtgtggcaaacttccaaaagtatggtttatatcctcctgcttttggagttgcgagagtaccagttgtagagggatcctgtcttggagctggacaggttcctgacttagatgatgatgtacctttatctcgcattacacataacttggagaggaaggatagggccctccgccgacgcttggctagtgggggtccagttggtgatgcttctctctgggttgcgcctagaggccaaacttttgagggacctgctcgcccctttcctacatctagaggcaagggcaaggtagttgtagagggttttgacagttcttcctcttatgacgatagtttttgatagttgataaatccacattcttgcttgcattgactgtttatgattgctttctgactttgctactttctttttgcagatatgtcttccaggcttagaggtctcaatgggggaccttcatatgagcccacaggacgagtgagaggccaaaatggcccagacttcttgtggcatagatgctactgggtcgtatctaccttttcctctaccatggcctacacctactaggcagcctgtgctacggcctacaggccagggtgctcaaaggcccggtagaggagcagggtcaactgtaggacagagggctatggaggcagcccatagacaaatatagagagcttttcctttcatggatgaagagctcaaacagagaggctctattttactggcctttgggaccattctcttataaggtgtattttcagctttggtgatttttctggcactgtgtaagctggccatccaaggggttgtttgcatgtggctggtcagccatggattcacctgtgaggggcaggccagcca

SEQ ID NO: 8480 - DNA, 516 bp, Cannabis sativa
aaaaagaaaaacctaaaaaatatgagacgatgccagaatagaaatgttaaaattttatggaccaaaaaaatgagatatacttttaggtattagaaatgtgtctttgtttaaatgtgtagagcctacattggtgaataaaggtacttgttctcccgctttgaaaattataaacgacaacaaatcaaccacttccatttccagagggttctgccttagaaacttcacacaaagtacacaaccaaatgtcaaaccacctaatcagccatgctatattcttgctttcatttactgtgctgctttaaatttccccaaccagtccacttggtatgtaatcttgcttttttttttagttcacttaatattaatctatttttttctttcttctttctagagaatagaaccagttcgcgttactcgtttgtgttacttagagataattcatgttttagagtatttatttatttaagattgttctctactgaggaccagctgggtgcccttgtttagtggcagggg

SEQ ID NO: 8481 - DNA, 554 bp, Cannabis sativa
aaaataataagcctacagcacataacaattagcataggagtagaagcaaaatataattttttcaaaaagatgagataactaatgcaaataagttatgcagaacctccaaagctgaggcaaattttcaaaatgcaggctttcttttttgtttgctgttattttgaaaatcaacacctccatgctgagacagagataagctcctttcgctgccagcaaagggagagtgaagactgtttcttctcgacatggaagcccctaaccggagttcgctgcaccaaacactcagcttgggattcagtgaagttactgaagacagctggggaaaacccggaattcaaaaatgaagatctccatggaggtgttgtttcaggagaacggtagcgattcagcacgagtttctcgattcttggttgaagtaggaacttctcaatcttttgcagggcctctaggttgacattaactgcatcaagtgattcaataaggcctgaataagagtgaaaagcgtgaatgatttggtgtgggaatggaacatctgttcgatcagaccctctttc

SEQ ID NO: 8482 - DNA, 713 bp, Cannabis sativa
ttgagcttcagcaaaaattggagatgaagcccctggtttgaagatccttgcagactgatgaatgtgagatagaccctgcatataaaccatcccaatacctgttgcaggagcattagagctcagggcagcatcaacaaaaagagcagaggttgaaggaagcaaaatatgatccaagacagcaggggaatgattaatagtcaatgtgaaggctgaggaatggatttgagcatcctggtaatcctgcagaaaacttgaaacaatatcttgaacattatccattacagtggcctttcgaaaaagatgagcatttctgatgttccaaatttgccaaatgataccaaggaataagggaaggtgatctctgggaattaaagtaaggctatgcaggtaaaaatctttgatatcaagcctatgatagtcaacaaagaactgtttaaagttagagtgatgccaaatggttttaactctgggacagtgaaggagagcatgagaaactgactctgcacttccaagtgaaatgcttaattttaggaggaattttcaatgtccagagagttttccaccaatccttaaaagggttaggattagaggtggaaggggaagaattaagggcagtggactgggctaagtgataggttgagttgacagtaagaattcctgagtggtggaacccccagatcagagaatcagatggagcaaggtccaaagggata

SEQ ID NO: 8483 - DNA, 581 bp, Cannabis sativa
cagctcaggcagattcgacaacgcgtgacaaatcagctactgctgcggtgaagcttcagaagctttataggggttatcgcatacggtgtaggttaggggacactgtcgttttgtggcggaagagctctagtaaagttcatgaaatctcactctctttttctctgttttcagttcaaagagtaggattattttagctagcttttctttttatggaaaataataatgtgctgatatggtatttaatacatatatattgtgtgtgacttatttggtttcattggtttggatttgaggattgaggataatgaaaaaagttgagagctttctcaacagatttaaatgtgctatggatttctacaaatcttaaataagatttttttaaaaaaaattataaatatatataaactatttggatgatttcaattatatacactataaatttatagattctttggtttcagtttcagttggattagagagaagtgctttcgaatgggagaacttgaaataagtagctccacagattatattcttttcgtttctttctattgtttgatctgtggatggtttgacttgattat

SEQ ID NO: 8484 - DNA, 919 bp, Cannabis sativa
aaaaatcatttgaatccaatgtgagcccaaacctaggttaaaacaaagggcagagatcataagaaatacaagaaaattacctcagtgtaaactccagcaaaaccacttaagagtgccatgacctgcaaaattggtacaaacacttgtgatcacaaaataaatgtgtaaagttttttattttttgaaagagaagagagcctgaaagccattgaaaactcacaatcgccatcatccaaccttgtaaaggagtttgaagaacatgatcagaactgccaaataaacaagagataaatatgtgtaagagacattcactcattggtgctaactgctaacatagtgtggctgctttataatgttgcctgatagttgaattttatcctcgggaaggttataatgatataaacttattaacctaagagtcatggacagtgtattaacgatagcgatccccaactcctgactgacgagtcaacaaacaaccaaagagccctaaacagagtctaaaggccagcatgctaaatttgatactcaaggagaaacagtctgacaagatgtaattgaatgatgctggtagactcttactttgagttcagttgtgctgtggtgcatcctgcacatagtagaataaatgccgcccactgaatctgacttaacctgcaatatatgaagtaatcagaacaggattcttgttaagaatattgcaaagataatatggcaactctccgctgcattaatacaaagttaaattgtttagtccatccagtctcacatccaaaagcagctctcctcatgtttgtaccgataaaacatggttttctccttattaacaatatgtacaaacatgtttcctcaaattcaattgaactttatttgctcattaatgtctctctttgtaccccataaattcagtcatttcttt

SEQ ID NO: 8485 - DNA, 2117 bp, Cannabis sativa
cataacgccctatattaaaacaaaatccatataatgaagatgatgagataaaattgacgaatataaatcacccgacaaaaaaagcttgaccatagaaaatttagttcataccaaattgtatgataaagtttgggaaggtctgtgattctaattctatagaatgggactttggggaagaaataatggttaccttgaattttctctcaaaattcattcaactaactagtaatggtatgcatccgaactcctaaatttagcttcttactttttaatggagttatgtatggtttatttaaagctaagagaggtcttatgtcctatgcatggaatatctgtctcgaattctagctaaagtggagaggaaaatagattttaaatttcatgacaggtgctcagaaatgaaactcaatcatctatgctttgttgatgatgtaatgttgttttgtcatggagattttgaatctatttactatcttttacaaggacttaaattgttttcaaaatcatgtggattatttccaaataaattgaaatcgaccttgtattgctgtatatgaaagaaagggagattcaaagaattattgaggctttggggtttgttagaagtgaactttcctttagataccggggaataccgatttgtgcaaaaagattatcggctctagaatgtgaaataatagtggaaaagatggttcagagatagaatttggggaacccgaaatattttttttgttggtcgcacaattttgattaattcaatcctcattaatgctattcatacataatgggcatagattatggttctcccctaggctgtcctaaagaagataaatgatatttgtagggtattcttgtggaaaggtactgttgaaacaagcagtccaggatattctcttggtctaaactttgcaaataaaaaacaaagggaggacttggtttcaggaacaccttgatatgaatgaagcttctcttagaaaatacatttgggctattatatatatccaaacaagacaatttgtgggtgcgatgagttcatagcctatatataaagaatgcaaattggtgggactatcaatcaactacatatggcaactagtattggagacagattgtgaagattaaagagacatataaaagccttcaaaccttgtagcctcttctggaaggtaattatattatccatcaaacttataagcatctttgtggagatcaaaatagagttaaatgacatagagaagtccagaatagatgaaatataccgaaatacaagtttattatgtggttggctattcaagatatatagatattgtaagctagaaatagattgatcagatttaaagtttgtcaagatgagtcttgtctattatgtggagctgctgtagagacaattgatcacatttattttgaatgttattttagtaacaggtgcttaaaagaggtgttctcatggatgaaatgccagggaagaatttgcccattaaaaacactgctcagaaaaatttctcgggttaagctctctaagtttaagaagaaagtgataaatgcaaagatagcgagcttggtgtatcagatatggataaatcaaaatgattgcctttggaatgacaagatgcaaacaattaaaagttgtgttcatcaagtgaaagaaaatgtaaagcatagaatcaaaagtttggatggaaaaacaatgtcaatagaggaaaatgtgtggtttaattcattgaaagtgattagcttgtaattgattagtttattttcaggtctcaaatggagatgctgtttagtttgtaaatggttggttttgttgagcaatacaagtatctcattcataaataaaaaaattagttcaatttttttttcaagtacataatttatttaaaatatattgtaaaattttaaaaaattcaaaatgattaaaatatagaaaatataaaaaaataatgtttaaatagtctagaaattttatagcctggttaatttttttttttttaaagttctcaaaactttgtaagatattttaaattgaattaaaaattatgccgaaacaaataggagcccgtggttgctccatataattttccaaaagttcatactttattttgcaattaatgattaat

SEQ ID NO: 8486 - DNA, 688 bp, Cannabis sativa
aaccaagtttgagtccttgaactcaaacttgctcaattcaagaatcaaccataaaaataacctcaaacaaccataaacatcctgaaatataactcaaaaaataactcaagaccagctacgattcatacagaacatatctctaaatcttgcatgttcaatttaaaaaaaaaaagtcatcaaaatcaaacaaaccaagttcaactttaccttggctctttgttaattaatccccttcaattccttgctggattctactgggattagatgaattaagatcttgttcctttgagatttgggtgaggccaagaaagagatagatgaggtgagagagcggttgattagttgatttttctattaatttttatccttaaaataatctttctttattctaatataattatgagcctaaaacaataagataagtctaggaagtctactaaaaaaacaagactaaatcttattgattggcaaaattcaaattttgcccctttacttcacaattaagcaacttataggtttaggagtaaaatggtcccaaaacataaccccgcctaattatgatgttccaaatgtcaacatatggatgccccgctaaataaaaaggttctaaactaacccatgtcactaaatcggccatctgttgcgttttccattatcagcgagcaaaaatcataaaaattataaaatt

SEQ ID NO: 8487 - DNA, 886 bp, Cannabis sativa
gtgtgacagtatttttttaaaagttttcctaattaaatggcattatttttgcagtgtttatttttgtattatcttttttttttttttttctaaatgaagtgaaagtgagatatggaatatgtggtatgtgcataattttgctaatattgatggcccataatctttaatttattgtaaataattattacttaccttttgactttagtttttaagaatgaaacaatatgcagcatacattttataaggttgattgtaaagagtactattttcattcatttttatgtttttagcataaaatcgtttaatgttttttttatataataaaacattttataaaattttaaaaaatttaaaataattataatataaaaaaaaactaaggttttaatttttattttacattggaataaataaaagagactgatatatacatatacaacaaactgtttaaatcttacagcacgtaaatattattataaattttttaaaattgataattttcttagaaaacgatttattattaggagtttttacaccacatattacaaattttaactttttcacttttttattgtgagacggattttttttcaaaaatactgtgtaagttttatattgtgtactatgttaagtttttactgttgttccaatattattttaatttttctattttgtaattttataaaaagacaatatttttgtaaaaaaaatcatgtgagagtaaaattataagcttttacccaaaatctagtatttttgtaaaacccctttattattatcatataaaaattttattattaaaactaacgtgaaaaggagtgcacccctaatatatattatctttatttttttaataatgtcatattctgtattttttatgttttat

SEQ ID NO: 8488 - DNA, 861 bp, Cannabis sativa
  modified_base (452)..(456): a, c, t, g, unknown or other
gaatattcaaaataaatagaataaacgattatactgtaaattaaattacaccactaataatatcataaactcttcatactaaataccataaatacaatttttaacatttctcaacaaaaatacatgtattatgaattacaagtcacaacaaactttctaaaacaataatctttcaataatttccataaaaatcgtaacatataattccgaaaaagtggtaaaagtaatccattaaaaaaggtcaatcttcattttttttttgggataattacatatgaaatttttaggtttaaaggatttttttttttatatttttacagtttttcataaaaataacacgaaaacaattagaaaattacgtaaaagtaacatcaaaataagaacaaaaaataacatacaaataacacaaaattaacaattaattaatcagagtacaacataaaaagaccgtnnnnnctgtaaataaaataaaaaaatatttaaaatttcgtgaaaccgtatttttataattttttttttattatttttgtgtatttgtgaaataaccctttttgttacattactgttagatgatgtatttataattataaaaaatatacacattattttaaaatattacttctttttattcacataagatcttaataattacaactctagatttaattcattttttctaaaaaaataccttaatagttacaactctaaaaattatttactataatcggacatcacattaaattattgagttataattagtaaaaaataactttttctcaataaaataaataaattaaaaaaatgacatgtgatcatggtccatattcagcaacactttacataaatttgatcttaaaaatt

SEQ ID NO: 8489 - DNA, 885 bp, Cannabis sativa
aaaaaaaagaagctatatatatatattggaatgtattgttttggcaacatccaaattaggtatggttcaccataatatatattttatatatattattcatttttggggccaatatcacatccaatatcagattcattttgtccctctatatatagattatagagtagtatatgtactgtataatatacatgaattttcttccaattatatatatatgatacgattatataaaattattattagttaatttaattataatataaataatatatatagggaaagatatatatatatatatataacaaaaaaaaaaatcatacgaataaaatcagtgaagcctttcattattattattttagaaaaagtacgtgggattggaatgtacattattattattattcaaataaatatatatatataatgtgtttagatattcttgaatattctttttatattttcaagaagaactatcaatttcaacctactctcaccaaattattattcgtgtacattttaaaatgggtcccacttcccctcgtttatttttaactaagtaatataattattttttcaagtggctattttaattttattttagtataataacacaaaaaaaatcatttatcaatataataaataataatataattttaaaagataatttaatatataataatattatctaattgcttataaatatatataatagagtgtataaatatttggtatcttatgttttatataaatacaaatttaatatcttatattttcaataatatttatttggtaccatagtttttaaaatcatatgttggtaccctaaactctaaattttttattaaaatgttattaactttcttcaattttataaatcataaattcaaa

SEQ ID NO: 8490 - DNA, 754 bp, Cannabis sativa
gttcatttttctcacccaaaaaaacataaagagaaagatcgaaatataaatgtaataatttttttatatttatttataaagtttcttgttgttaaaaaaaatagtctctttggttattaaatttgttactttgtaatgtttgttatgttatatttatcggtttaattattttaacggtaaattaattatctgtcttatttgtttttaaaaaatagtaaaattaatattttaatatatgttgttggaagaaaatagataaagttgaaagtgcaaatattagagctacctacgaacacttacaagcagtactgtgaatatttacctatattactgattactcaaaataaaaatagtgattaacaagaatgtaaatatcgagtattttaatgacacaaaaaaattatagtagttcaggtaaaatttgatttacttagtccacttttgaaagttagattgtgattaatatcttactcgtatctggtcagtgaccattcaattacataactggtcagatgttacaatattaattacatttaattggaatgaaacacgcttgtaaaataaataaaagaatagttttgaccattcttatttaatattcgaacaagcacaactaccttgatcacatcgactgttcgtattcttggcaacatgtgaattgatcacgagttcattcgagttgtcgcgtatattgggtcgttggactgtccccgtaagaccattcttggcaacatttggaggagtaaagtgactt

SEQ ID NO: 8491 - DNA, 555 bp, Cannabis sativa
ctctaattgttgctccagggctctgaatctacaaaggataacggattggtggatcaaaacgagaaacatgatacagagcgttattcggtggactcccaggatgagatttcggaggatgagtgtgtactaaggagttctactcaaaaggccaacactcgtagaaagcgtcacatatcatggactccggaggaagtggtgaagttagttgaaggtgtttctcagtgtggagtgggaagatggactgagataaagagattactattttcgtcttcttcacaccgtacatctgtagatctcaaggtacttcaccgaaaaattatttctttattcatgaagaaataattgtgatgaatctaaaacttaatatcccaaaaaaattgttctttatcgggtggtttcaggacaaatggcggaatttgttgagggctagctgtactcaattgcatatcaaggaaaaggtgaggctaaagctgactttttcttttcttttgaagtcttgcagaaccgaaattcagttgattttgttcagtacattttatatccctaaactttttc

SEQ ID NO: 8492 - DNA, 1112 bp, Cannabis sativa
  modified_base (356)..(360): a, c, t, g, unknown or other
caacacaaataaatatcttaaagatttatttccagaagccacgtaactcgaaatgtctcgtcgtaagtactcatttcaacattacttttattaatgaaaagaacattactaaaacaaaagggtccccaaaaacacactattgtccacttgaattgaaattgagaaattgaaaaggttttttttttttagttattatgaataattctaaaacaaaactcataaaaaataaaattagaaaaacaaatgaaaaaatgggccgacaagacaaccccggcagtggtagtacaacgtcacgacggagactctttggaaaattgtttttgtgttaaggaaacttatatatatatatataaatnnnnntatatttatatgtatgtatatatacatatataaacatttgatcttcttttggattaagacacatgacacttgtgtagtgttgttttttttgattgtcttcttctaaatatttttgatgtcttttgtttagaatttatatttgtttagactctctatcaaaaataggtttttattatttttatctttcgaactttgacatgtactaaatcgtatcgtgtcgtgtcagtgtcagatcgttaaaagttttctccaaattattaagattgttggatttaagattttcgtttaattttgacgtggatgaaagtccagggaacacaacatgccaaaattcgaggtgcacgatttggtacatatggaattttggagaatacgatttgatacacagataatgttcatgttcgtaaaattgaacaggatttggactaaagtctttgaatctaacaatctcaacaatttgagagaaattttaacgacctgtaaaattcagtgggtacgatttagtacatataaaaatttaggaggaaaaattctaattatcttttgtattaaaagaaaatatttttagaataatttgatgcataaatatctaagtttaactcccaattatagataaatacctaaatttactttttgacggtaataatacctaagttatatttttgaaagttccgtaagtatctgactgttaagtgtcaagtcaataaccacgtaacaatccctaattaattcaggtcattaaatttttattt

SEQ ID NO: 8493 - DNA, 537 bp, Cannabis sativa
taagcgtggtatattaataaatacaaaaacataaattaataatttagaaggttaagaagttacaattaaatttgagagttaattggctagctatttttgtatagttgtaatctatgttgatgagcactataacatgacttatttatgatttaaataatgagattgttgtgactcaattaattttattaaaagatcattagctaatattgatagatgaattttagtaaatatatgttactttagtttagaagtataatatggtggtggctattgtggatcaatattgttgttagagttttattttattttatttatttatttcattttaatgtaagaatatgacttaataagcctattttcgataattttgttcttcgagctatatctttatgtaattgattttgtccgatttgtctaatatgaatatttttattttctctctctcaaaaaaaaaaaaatggtttaaatgatgttgacttaatttaaaaaataaataaattatgagtagtgtagtcactacaagaataatgatttgta

SEQ ID NO: 8494 - DNA, 659 bp, Cannabis sativa
tcaactgtggtgaccaacaagtcctctaaaaatgtcaaatttgtcaagatttcgatatctaaactttatggtccaatctggggtcttaccaagagtggtgatttctacacattaccatcttggctcaacaatataccagctgggaagagccttgagtttgtatacattcactctgcttctccagcaaatgttgcagtgtcaagctacacattgtcttaatcttgtgttttctggtgatttgatttggttgaagaatttgggggaagaaaggagtgaagagacagtttaagaatagagctcatcctcttttggctccatgacactatttaatatatagacaaatttgagagagagagagagagagatgagaagtgattttagtgacttctcaaatgttactaagaagtctattttgtatacttgagagcaagctttgattgtcttttctttttttgtgattgtaatgttaaaatgttgtaacctttgcaacatttgcttttttggataccaatatgaatatagtttgtgcagtttaattttttgatctacttatttatttttatttctttttaactcataattgttggattttcacaacatggcaacaaaaaacatatatgacacataggcatactccacttaatgaggccctctatttt

SEQ ID NO: 8495 - DNA, 915 bp, Cannabis sativa
cggcttttgctactacgaaagatcttccttatatccctttttattgacaaaaaggcaaaaaccagagcaatgaacattgcaggatgaataaggacagctttcccagaataaatgttggttgattttctcagaaacatttctctagcaagaccccacgtgaccaaaagtgtcccaaagaagctcattctccctggttttatgagacacgcaaatgctccagccactgacaaatagcttcctgcaaggacctgatgatgatgatagagccaaagtaagaaattgcaattttcaacttagaccatgtttataacattactagttgtagtacattttcatgcagcataattcctaatctatcagagtctatcttgcattttcatgcagcatagtttaaacccttcaacatttcctcatataatttataccattaccatttatgaaatgtgatgaaaattgacatcagaacagatgattcaaacgcatagatcaagcactgacctcaagtcgttgtagatcatcaaaagttactggggctgacttaaaagagacaaaagtaaatgacttcttgaagtgatgataagttggtatagctttgttgttaaagaaagcatgagcaatagccccagggtacagtacagtcttcactgcaactgaagggaacaattcggtagcaattaagtgtgaggctgtcacctctaatggccctctgcatattccagttctacaaggaaccctgttctccaaggagaataatacattaataacaagtgtaaataagtctatattttgtatattggtgacaaattctcaatacccagattgaatttgtactaataaattttctcagggaagaataaatgaattaactaatggataatgagcagtgctaatgattgaaaaaagcacgatcaaata

SEQ ID NO: 8496 - DNA, 546 bp, Cannabis sativa
tggtttgggctcttataaaagatacatgggttgggcctttctatcataccaaattcacgggcctcaaactttagttgggcctaaatcgtctaaaaagttattcactggttaccttaattggtacctccttacctatacttggttttctcattttttttttattttttcgaatttttcccaagataatattttagaaaagattgtattttttttttcacaagtagaatacaaataaataaaatttgtaatttccactaaaatcgttaattgattttttttttaacaaaaaaacaaaacaaaaattagttaatggattgaataagaacatttgaaatatatgtgttggtggttggattttcacaaagggaaagaaaaaatgtggaaagtaacaaaaaaaaaaaggataaaaaaattgtgtagaaaagaatttattcaacaaaaaatttcatatcgaacataaaaaaatgtactgtactggagtggtatgagttgagagttggctggaagagttaataatatcagaaggtgtagtcatgatgtaagaga

SEQ ID NO: 8497 - DNA, 1463 bp, Cannabis sativa
atttaattatgcaccttacaattccaataacaatttgttgattctatctgtgccgtgtgatgatgggtcagactcaaaaagaaaaggtgggcccaccacaaaacttatcatgatttgtcttacagtgtcaggacgagggagtgataaccatagttgtaaatacatgtctatcgggtcgggcggccaatatttctaaaatgttcgcaataatatagtgtcatgctgtctcctaatcaaacaaaaatatataagttatattaatattttaaagaaataattttttaaaaaatatacaaaatataaaattaggattagtacaaaaattttaatatttttataatttttataatatttataattttatttacataaaatataatttgttagtatatttttatattatattattgttatttttttttatttgtgtattatttttttattacttttatgtaatttttattattttttaaaatttatatagaatgttgtaagattattaaaaaaaaactttaaaggtaaatatgtaaaaaaaattacaaaattaatactttatgtaattatttttattttaaaaggtaagttcggcactctctgtaaatttatattttcgtaatgtgcttggatttgtgctatattttatttgagccgactaatttttcataataactcattattttatttatacgagcttaaatttagacttatttttttactattttttataattaatgaattaagtgaccatgaattaatcacttatatgtattttttagtgtctatttcttttatataatttttcaattatatatttcacataatcatataaaaaatataattagaatttatatatttattattaaatataagagaattactccatttactatttttttaaattttttatttaaatttacggtttgagtttctaaaatggttgcagcgctagttgcagtaggaatttttatacggttttttgttgcaatttatgttgcagcgctagttgcaataagagtttctatatagaatttcgtaaaaatgtaaaaaataattattttaaagtgtaaaaataaaaaaaaatcctttaaatatatatatgtaatattttattattaaattataataatttttaaccacttatgtgtttgagttcatttatttgtgtttatatgtagggttttgagtttgggatgcttaagtttattttctttcttctgctaatttatgcgaatttataatattgtaccgtatagagctaaacttatattttttattttttgtgccaaatagtattcttgtcgataaatgttaaaaggtattagtagtgtctagtactttcttatgtatttatatactattaatctaattaagcattaatataatcacttgtagagattatcgctacccatgctttgaaaatattaaacaccaattgtgtccaataacaatactttgttcgtgtc

SEQ ID NO: 8498 - DNA, 1311 bp, Cannabis sativa
ctttcacctaattaaattcaagtgccaaacaaacattaattagtatatatgagatatctgtcaattgggaaaagagtgacaacatgaagaaaaataaaactgtgcaaaatagagataaaataccaacggttttaatgctttcctttttttccgtaatgaattgatgagagtttaatccaatggatcaattttcaattctaaagtaaaggcaatttttcttcatttatttaccaaattactgtagtatttcttttttgaacatgccttttattatgtaatttttctttttcagtttggaaactttttcatcccttgtctacatctttaagtatgaaattaaattgagaaatgattggaacacactcgaattatacaaactttttacaaatataaagatgtgtagttaatctccatcatataattaaaagtgatgtatgtctacctaaaaagttaaatgactaatatttattatatattacgtactgtgtgtgcaattttacagtgtatctagcattactctatatatatgtgtagttgttactaattacactcaaaattataaatggtcgtagtcttatgcatgtctattagtgtagagcaacttaagataaattatagattagacatgttataattatattattattaattgtttcgtgattttatttaatgcaaatcaacggaagtttcctttaaccactgtgccatgatcagtgtaaagcatgcagaaaagaagttagaaaaagcagcccccatgggctcatagactacccactacttccaaaagatgtaaataggtcataaattggaaaaataatcataaattggaaaccataatagcagaattcaaaataaatttccaaccttgacttctttgactagttagttctattgagttatgatactaagaaacaataatgtaagaggcaattgttattgttattacgttataggtatacgtacccgtcaattgcacatatatatagatgactcggtgttaaataagtgtgacataagatcatagcaatttaaaatattcactaatgtcaaaatttttaaaattttattaggtaagtctacacaccctcctatagtgtagctaactatatatatagcaccctccaacattttatattgcaattttttttttagtgtaacgtaatggtattttacaatcatttaatagcttaatagcttcaaggtcttaatttcgaacccttgacctctccctttttccatccttccctcaccgctaagctaactttaatagcttacattttatattgcaattagtataaataaatattatat

SEQ ID NO: 8499 - DNA, 859 bp, Cannabis sativa
  modified_base (116)..(117): a, c, t, g, unknown or other
  modified_base (751)..(751): a, c, t, g, unknown or other
aaatataatgaaaactttcaattctattatccttttttttctttataacacaataaattagaaagactagttaattttatttcataatacttgttttgtgattcaaaatatccaanntatgaaatacaacattctaataaactcaatctcaaacacaccaattgatttggccttataaaatgtaataaatctcattacatcaataattctaataaactcaatctaaaacacaccaactgatttggccttataaatgtaataaatctcattacatcaatatacgagtattggtaagtcttgaaattaatccaatacatcgaaactttctttggaattctgatgaaaatatctgcaaaatagaatatataacatgaatatatatatgtaaagcatcaaataacagggtacatgattgagaaattcaaatagaaaaccgagaccaaaccacactttgagtatatatctatgagagcatagcaaaccaagacatcagtatcaggtacctatttaagagcacaagcatgaatttcactaccatgattcacatctaccatctcaatattggctgtcaatatagaatctgcttttttacttgtgtaagtgaatttcttaaacaaaacattagcattaactcattcctttagaagcacacggagtacattattataatttataaagtcacacaacaacatacccaaaccaaaataaacttttcaaatgataaaataaggtagcattaagaatcttacantttcgatggagcatccctgagaacaacatccaatgcttgagtagtctcttgaggagactcatgttgccttctctttaaaaactgttgatataacaactacatgtaagc

SEQ ID NO: 8500 - DNA, 986 bp, Cannabis sativa
tgaaacagagttttatttagggcataaaacccaacacattgaagctaatgtcaaacctcctgtagcatttttgcacagtgtgtcgaggacggccacacaattgacatatgactcgattttgagggtaagatcccctacctccattagtgcctcgaccaccatttgagtttcgtcctccgcctctataggtattgggattgccacgattgctagtgttgctgggatttggaggtttctttgactgtgcaaaattagcagaggcaccagagaaatctgccatttgtgaagcagtgttgacttcgattcgcatttcttggttctgcagtaagaactggacttcttgaaaagttagatgatctctggaagtgagattgatgacaacgacttcataatcggtgccaaggccagccaagacataaagaatcaactgttcttcagtgatttgatttccagcagctcgaagtccgtatgccaagttcttcatttttagaagatattcatcaatggcgagagagcctttttttgtattctgaagttgattcatgagatggatcattcgagctcgagatgccgtgccaaagagaagctcaagggtgcgccaaatgtcatgtgccgattcacaatttacaacatgacccagcatagattcagaaatagatgagaaaagccaagagaggagaaattgatcaagacgatgccaatgaacgaattcagggttactaaccagagtagttgattcaggtggctgacgaattcgttgttgcggaggatcttgattcagcaaaattccttcaagattatgggctcgaattgctggaaggacttgagagtgccagaagaagtaattgttgcgattgaggcgtagaggaggcaagaacatggtggtagggactccatagttgttagtcgactcaccaactccagaggatgtcgccatggaaggaccaagggtcgcctggtaccaagttgagaaagcagaaagaaaa

SEQ ID NO: 8501 - DNA, 678 bp, Cannabis sativa
atattaccatttgagtttgagtgaatctaattaattactcacattttagtgcacgagttatctcccatgaaatcatgtcattatcactaatttggccatagccctcgatgttgcaattaactaaagcaaccatgaacctctcgttctctagtgacgaaggatacataacttgttcttcctggaaaaatgcaatctcaattagacatggaataaaaataaagcaacatagaatattactatcaagacttatttttggtttaattacctcaggcagctcataaaattcatcaggagatatttggagcaactcaatgtcagtttgatcagtagaccatgcaaagatttttccagtctcatcagcaagggtaattttcagatgaaaactgcgaacaacttcagaatcacaagtgtaatgacagaaactgcactccataaacccattaggcgtcctgtttaccaagtgaccacatagggagtgtgaaagccttgtattcacatgacaatgcgccatttccagccaaactcgagccatctgtgcacatatgagtttctatcagatgttaattatccatctaacaaatgatttataaagcttcaatactactaataacaagcatcctcacattttacttttataagcctaattacttttactccaaacctccaacaaaagcaaaa

SEQ ID NO: 8502 - DNA, 581 bp, Cannabis sativa
gatactgtcttaaagagtgtatttagagatctttatgctgtctcgaagaagacctgtttacctaacattggtactttcattcagaggacaaatctccaaatgtaactcttcgagacagtaccaatcttcaattaaaccgaaattctattttctcaatccattcataatccatttgcacaataactttacatatttatagtattttttttatatataaaagcaaactattattgaaaaccaaaacgaggcctaaaaaccaaagttggcagtggcaacaaagggtgccacttcccttgcagaaaacaacttgaaacagtcatttgcagcagcccaagctgctaaattatgagcacatgtctttgaactacaggtgatccaacacaaccggctcaccggaatctcacgaaggtgactgagggtagcatcaaactgtcaattggcggtgtccatgtattgacctcacgtgacgctatcaatacaatgattcacaataataacgggtttataagttaatcctcggaacttaactgagataaatgagataggcgaacagcgtaaaagaatgagttaagtggaaaggg

SEQ ID NO: 8503 - DNA, 721 bp, Cannabis sativa
aaaaaaacatttagctttacttctcatgtaaaaagaaacaagcaaaactgactctgttttcaacttcacaaattcttctaaacgttttaaaaaacacataaaatatataccctcgtataacaaaaattaattataattactttaaataccaaagcataaatgtctctaattgtatgaacaaattaaaattcctactataatcttatcctatgaaagatatcaaaatgctctcataaatccaccaaaagatttataagaaatacggttgattaaaaataaaatttacaagtactcaacctataaattataattttgtaagaaagaaaaactataaattataattaatctcataaatatataaaacaaaaagaaaataactttcagcttaaactacaattttctttagtttttaattaaaaccatttttaatctttttaatatttctaccaaccccaaaataatggtgtactgtattttttttaagaaaaaaaatattgaaacttgaaagttagtggaaaatgttaggtgtgagatatggaagggctgatgatttattttagatcaaaaatttgaaaaattaaaaatataaaaggcatttaatagaaacaccagaaattttttactaaccaaaatcaatagatttatttatttgagtagaggtggtgagagaagaacagaccagaggtagagaaaccaagaagagcttatcttctttcattgc

SEQ ID NO: 8504 - DNA, 1264 bp, Cannabis sativa
gagagtctctgcactcttctttcaaatttaaccaaggaaaaggccgacatttaaccaagaaaaaagctgacctggaagaggacgttaagtctagggagatgagggaagaggagcttttgaaggaggtgggaaacctagaaactgctgccctggaggtcttttatgaattttagaaggccaacccatcaagcaattttgattagcttggagattccaaagaggccatactcgaatgtcactctaacatcctacaaatgatggcatcagaagcgactacaaaattaaatcgtcttcatcaaaaacaagagaaaataatgagtagtattcaaaaaggggcacacgtgacttgatgtcatcactctaggaggcacattgcaactcccattttgcaaaattgcaaaaaaggacttagggataaatgttgcctagaatttctcccaaaatacgtgacagtacaggaatatgccatgtggcagtaggacccacgagtgtgagatgtatctccctaattactcctgaagtaaagtaatgatagattaatcatctttgagagtatcaagctagtctgcgagccaccctcatctcaccttcttcgtgagtgaggcataaccaaaggatggtatgggaggagtagtggaagatgatgtcactaagggatcattacactatatacacatttaatgcaatataggaagaacatcagacgccttactctgattaacctatataagggttaaaacccgtcatttccagattttacgaaccctcagtcgttaatcaacgaatacataaatgagtcgtcaagtaacaaataagggataaatcacattccaccaaacacatatagacagcccaaaatccctcaaacgtaagcaagtatgccctaggtcagagatgggaaattatgtcaagtataatgcaaacaagcatgtcaatggtgacctttttaccaccattgagcctataaataccctattgaaaaatagaaatggagatcggccaagtgaaattcctgtaataaataccctcataaatatagtgactcatggactaaggctcattaatgccctaaacacgtaaaaatcttctaggagcttctgttaaatctttcatacaaatctaagtattgattgtttaaaactacggtcaacatatactataaatgctaaaatataaaaattggagggggctagaattgtctctagcaattatatgagtatcctagtatttatactctttttttttaataataataaatatacga

SEQ ID NO: 8505 - DNA, 1012 bp, Cannabis sativa
ttaagataattagaatttttattccgtaaattatgatatgtactaaattatgtattttcaaacttttcaagtttttaaaaattctcctcgaattattgaaatacttagattaaaactttaattttatttaattttactaatgcgatgattgtctatatactaaattgtactttctgaactttgatatctactaaattgtatctctcgaactttaacgtgtaccatatcgtgtctcttgaactttcttaaatctaacaatctaaatagttagagaaaaaaattttaacggtttgaaaagttcaaaaaaaatataatttaatacatatcaaagttcgagagagaaaaatcttaattaactattctaaaaaccattattaattttatagattttttttattgactcattaaatattttttaataatataacttgattctaatttctttttttaagatctaaaaataataacatcattattgaatactgacttatatatattatatatatttgtttatagtaatactagaaagaaacaccattaaaaatcaaacatggaacctcactggtaaaacaaatctcactcaaatatttactgaacctccttgaatggttgatgaaggtgatcattcaagtaaagctcagccagggcagtatgcaatgcagctccaattggaagaacatcttcatcaagaaagaaaaaaggcgagtggggtgagtgtaccgaacccacttcctcatttctgattccaatgctaagcatggttcccgggattgattcttggtagaaggcgaaatcctcacccgccatcacttccttgtcatccttcacattctcggaaccaagcaaaaggcttccaactctcttgacatgctcgtgtagccgttcatcgtttacaacagcaggtaacaatggatgttcttcttctctagtgctgacaaacgcggtgcatctatgcaccgcagcctgcccttcgataacctacaagagcgaaaaacggaacaaatgtatgaga

SEQ ID NO: 8506 - DNA, 574 bp, Cannabis sativa
caacacaggtatgttatgatgcttggacccttatcaagttgtagtgtattttcaattctgtttaggttgtttgtacaggtgtatctaagaaaatttatattctcactttgtgtaaatatggaatgttgtcaattgtgaaatatgtcatgggattacaatgactagattggagaaagtaggactaaggagttactcatatcatatgtggaaggtggtgattgttcgaaacattaaaaggaagaaaaggagtgtgcctcttttctcctgtaaatgcaatttcaaatctcttaaggctttttgtatatttattatttattgttccttttgttcatttgttttaatataaaggatatacattaatgtcaggatggattgacataactccttttcttttagatataattagcttctcaagcaaattttcttgcaaagtcttagcttagtaaatgataaattagatgattttaacatgtacgcatacaaattctgctcaggcatgaaattgcttgcaggatttaattaggtttgtcatgggaaatgggccaattatatgagagcctatgcaaatggcttc

SEQ ID NO: 8507 - DNA, 649 bp, Cannabis sativa
agctcttatagtatagtaatgagtagagacactttcggtacagtatatagcaaccacttagttatactctcatttctcttctttgttcaaaccaattgaagcttccaaagtaatacaaacaggaataataacataataaaaacaggatttcaacaaaagaccattaagagatgagagatttgtgtgtttaacgatgaaaacacatgattaagataaaaatatattactgtttccatctttttttcttagttctaaattctaacaagagtttagacataattgctcttgctaaaaactgatatcttagtcttggtgtgtttctttagctcctggttctattggcttccgagtctcaaaggttttctggtttttgtgtgctattttggttctcattaatggagaaagagattgcgagtttcgtggacgtgtctgtagatgctgttgatactgagagggggaagcttcttgaaagagacagtgttatggagatggaaatgctggaattgtttgaggatatcactttggaagatgttgttctcaacaaggcttgtgttgggaaagtgatgggatgtaaggatatgtcggcatcagtggttaaaaaaatccttttgggtgtctggaggaacattggaggctggcgtatgaaaaa

SEQ ID NO: 8508 - DNA, 937 bp, Cannabis sativa
aatgagaataaagaaacatcccaagattcccaactaagatgttactcaattctatctatataatagaatcgagcattttcaaccacactctctaaatgcactattgacttaaaatagagtgtgagctccaaccgtaagaacaatgactctctaaaatagagaaaggatagtgagctcataagtttactttttgattccacaaactgaaaaattattaaaataataaattctaaccaaactagagatcatgattgtagtgagatgaggaaaaaaatgtctattttagctaaaagaaaatgaaaatagggagcccctttggagatgcatactaaaggtgtatactaaggaagaaacatagtgatctttttaagtgaattttcaagttgataaagcaaaccttttgaagggtcatagaaccttgcaactaaagaaatgatagtactctttccacaaccactactccccactagagcaactgtctttccggctggaattgatagcgaaaacccttcaaggatttgcttctccggccgggatggataggagaaaaacacatcacatatttcaatgttgccacaaacctttccaagtgtttttccttgtgaagaatcactacttatagttggctttctttgaatcacttggaaaacttcataccctgcaaccttggcttgattgaatatttgcatatctggtgcagcataagtaattgatctgaaatgagaattttatgtttcattattagttatagaaaactattcattaaattcaacactgaactttgacatgtaacaaattatattccttgaattttttcaaactgttaaaattctccctaaacttttgagattgttaaatttgaggacttctctataattctattacattttattatcgaggagattgtccatgtacgaaattgtccctctcgaatttt

SEQ ID NO: 8509 - DNA, 825 bp, Cannabis sativa
tccataactatataaatatatattgccccatcacaattgtatacttttaatttaataatcagaataatcagataaatcagataaataagataaataaaactgcttctgatttaaagaactagggaggaagacttagtttatcgtattgcactatcaaattgtggtaattactaattactataattctatgaatcaatcagttacacaaacataattattatctaattattatatatattatagtgttatttattgaatacaattttatatctttggattattaatttttctaataaataaaacatcccttatacataaactcaagttgttataattttttttaatatttttaaagaaacttttttaaatgtgctatgtttttttacaggctaatttaatttgaatatattttaggacactattgaagtagtatatttttttatagcaatgcaattattttgacacaatcaattaggatgcttttaaggttttaacagataaaaataaaaagaaactataaattatccataagttttttttaaaaaagaaaataaacaagtaattttacattaaaaatgattatagtagtatatacgtacattacatattgaagtttttcacatgtgaaatgtaataaaccgtaattaatccaaacactacttaattataattaatgcgtcaagaatttattaatattattttaagacatatttaactcgtttaatataataaaaataatgttgcgttatatctaatcataacatgtttattcattattattaacatagttaatattataagtttaatacgacaatacactaatta

SEQ ID NO: 8510 - DNA, 555 bp, Cannabis sativa
caacagactatcatctgcaaaaaaaaaagagactagagattggtatggctctgtgagttagtgaaaaaccattaagagaactaagatgctcctgatgttgaagcaggcgcgagaaaccttctaaaaatatcaaaaattgatagggagacagtggacatccttgacggagccctctcgtgggcactagtaagaatgtattcgttgttaagcattccataattagagagatccatttttcagcaaaccccattttatgcataatttcctcaataaatcgccactccacacgatcaaaagtcttactcatatctagcttgagggccacaataccatttcgaccatttgtcctgtgcttgatggcatgaactaattcaaaagacaccaagatgttatcttcaatgagtttatttggcaggaagacactttgtgtttcagaaataacaatcgggagaacatgtttaaaatgagctactaagaccttggagacgagcttagagttgagattacaaaggcctgtaatccgccattcatttaggatttttcatttttggaata

SEQ ID NO: 8511 - DNA, 1205 bp, Cannabis sativa
tagactttctgttttattaaataaaacgtgttatgacaaaactgattatattttctgtatctgctcgtgttaaaaattatcttaaaattagttatattaaaaaaaattatcgaaaattgagctcaaagtcttatttttaccattttaaaaaacacatgaactattttatcatttaataaaataaataatctagtcaataacttttacaactcacaaaatctaactcaaatttaattactcaaaaaataattccttaaaaaaacaaaattagtcaaaataataaataagaaaatagaaagagataaatgttatagaaattcaagtcattttcaagccaacttctcgtcctctctctctctctcttcaagttgggtacttgggaagtgagcttctgagctttcttcggtcttattactggtgggttcttcttctcttaatcttaatgttgttgtgtatgaatatattcctacaaaattggtattatgctaacatctatgcggtggtatggtattaatcatggtatgtatatataatgtttgataaaatgtctgtgtgaatgaataattgttggttgttatggtaaagggctagtgtagtgataaagttctctacttttatagtttattggagataaaagattgaactgagcttagtaggcatgaactcatcaatcataaaaggctcttttgcctttttgcctgtaaaaatactcatctctttgaattttatatatctatatatatgtgtgtgtgggcgcttaaccaaatgggcatctcaaggtaggaatgtgaagcacataacaatgagagttatgcccaattttatttactatttcttacatttctttctatgtttcaatgtatttgagttaattcttatctaagagaatgaatccatttatctgttatttgtttgttaaatttaaaactgtaagtttgttccttgaaagaatttccagatttcataataatgacatagttaagttataaataaggacttctatatatgcatttgagatgtaacttttttatcttaaaagaaattcatgacagtaccttttaataatgttgctttttgtaaacaagtttcttttattatccaaacatgtttttagttttctgaaaattctttttagaaaatgttagccaaacaccaatgatttcgaaaactataagttattttctattttcatttctataaaaaac

SEQ ID NO: 8512 - DNA, 746 bp, Cannabis sativa
gtaattttgcttctttggttgaacacacatctacttaccatacgatttcacaacctcctttattggcatatcaaaaaatttatgacaaaaattattagaatggctgataataccacatgcaaagtaaaatattggaacaaactcatatttaaaatcagtctgaaaccattctccacctttctgtctcatcttcatttgtcgtttcaagggttattcatcaatattaacagtcacacagattcttatatattcatgccaaatgccagaattattctttgaatttgaatcaacaaaagtaccaatgtaatccgcatcagcttaaatcacactttcaatcgtaaaacccaaacgaaaactatgaaatcgatcccaaggatcgaacctatctagcaccacagccttcgggtcctcccctttaggaactcggccaaacaaaaattagtgttgattaaacgtccacggacttccatcaaccgcatacttgagatcaagttcatgataaatttgaatcaaaaatagattcgaccctaattccttaacatacttcctttcacgggtttctaaagtcctgccattgtatgcctcgtggcataaaaataatagcacgtgcattcaaaaatcacccaacaatacaccatcgatcatccacaagttgttcctcctcaaacacattatcaaactctaccccacactcctcctcaccatccaattgaacatgggcatacttctcctctaatcctccaacc

SEQ ID NO: 8513 - DNA, 642 bp, Cannabis sativa
  modified_base (200)..(214): a, c, t, g, unknown or other
gtggctccgcccctgaatacagatggtatctgcttaaaaatagaaaaggttccaaaatggaacttgacttactaaagggattgacttgtgtttaatagagttgtgagattggtctcttttttttggagagccttgaaagtgtatttagttggtgcgattaatgaagttttcttcttaatcacaataataataataataannnnnnnnnnnnnnntaataataataataaatatttacattggctagagatacaataaacactcttgatttttatattttttaaggaaaagaaaaataagcaataaacccaaatttaaaacttcgataacctcataaactatcactaccccttctatattacagtaatatcacttcaaattactatattagagtatctgcaatagagatccaaataagtagtaaaaagctaaaatataatccatttaataaaaaatgtgtttaatagtatgccaaaaagtgatgtaaatttggcacatagtaaattttgtgtcaaatttaacccaacatttgatatgatgtaaaatttacatcacaataaatgcactacttttttatttatttatatctatgctatttgtattatttttttagaggatcgctattaggcattagtagtgccta

SEQ ID NO: 8514 - DNA, 1412 bp, Cannabis sativa
agagaagaaaagaaaaaactgttctctatgatgtccctcagtactatatatacaaactctttctttataatggctttaaattggttacatttcctaggaggtgagaaagaagcattgacctgaatttgggtaatggagaagggtttgacttctattttatccagctttttaattagcacaatatattacatatattgattacaatataatttcgaaacattgcccatttcatggaaccttactctccattgaaaaaattaaattaagaatgaaaaaagaatcactaactcaccactaattaattaattcacttttatagctatcatcacttctgcatttgtatataaacaaattacaactattcccttctctcttaaaattgcgattctcctcccaagcttattcaatcaaataaaaggtgcagctttttagctatgttgatgaagagccttactttcttgatgatactagctgtgttttatctatcaagagttgaagccagcagattattaacccaaaaaaccaccactaccaccaccactaacccactagaagatcaatttacacttctttctgaaggattaataccatcactttccactgtaagttttctttttgtatatatacatatattctgttaattaaggcaaaatatatggtgtgttattttatggcaataataatgacaataatatataatgtgtctgtaggatcagaaaacagggttggaggaaggtgggtgcaatggtggtttagaaagtgaagaggagtgcttgattagaaggtccatggctgctcatgcagattacatctacacacaagatattcatggaatcccttgaatcttatctttctatctttctatctttattttctttttcttgttaaaatttacattttgtttgattattatatatcttcctggctttcctccatcctgtaatcttgaaggaaatcagagttttgatcattaatatagagatgcgcattgactttgagtgtatattaatttagtgtcaatatataagtgtctctctctctatagcaacacaaaattggtaatacgaatttgctttcatataatcaaagaaatttgtgtgtgtatatataactatgtagaaatgataagacactagttcgattgaggtagaagttatagaaatcgacagaacacagattataaaaattatattatgtgtatgtatatatttatttatatagtagagtttgggttgcttttttaggaggaatattcagtctaactcaacttaataacaccggcttgttaggcaaggattgcaccaccttatgatgtaaattgggtaaataccaccagcacagcaaatatagaattttaataggctcccgggttagacatgcctttaggaccctcccctttttttttttttttt

SEQ ID NO: 8515 - DNA, 966 bp, Cannabis sativa
ggcatgaatgacttcgctgttgcgagaagaggtaccggtgccaaatgtggaagccgattctataaccaaaacgtctctgcctctggcggccagctctctggccgtggcgattccgacgacgccagccccgatcactacgcagtcgactctctcggaggcgtggtggctggtgaaactcctcggccatggaagaaatctcttgaggcttcgaagcgcgtggttcttcagcatcatcggaccctactctaatggccgttgagctaactgacactctcctatgaaggaatttaacaaaataagaatcagcagtcagtgctcttttcttttcttttttagttaatcttcttcctttatttagtatcaaaaaataaaacttagatattgtataattttataaattaaaatatttaaataaatatacatatctatagtatttcgtaatacttttttttattaattttttaattgaaaatcaaaattttaaaattttttaaaataaaaaaaaaacattttcacaatatttttttatttttttttcttaatatataatttggactccgatcaagcccaaacccaaaattggacgcgaactccaaccctagatccggccccaaactcaacctcggacccagatcccaaaccccggacccgaacccaaacctaaaccctaaacttgaacccagatcctaactcagacccaaacctagaccccaaacccgaacctgaacctagccctaggacccagacccggacccagaccccgaacttggccgcgaaccccaatcctagccccaaacctagcctcaaacccaggaccccagccccaaacctgaccccttatacggaccctgaactcgacgcgggacccaaccccagaccccggaccgaccccggacctcgggcccgaaccatccccagccttaaaccctagacccgaacctagccccggacccagactcagccccg

SEQ ID NO: 8516 - DNA, 731 bp, Cannabis sativa
atactaataatggtagcccatcactattattctgattcttggccttacaccatctacgtagagggtcggcaagtgacaaccttagtcactgactccacaaagactcttgcaagatggctaaaagaggctcttaaatctccgccaaacaccgccgaggcttcaaactcaggcaaccgcaccattttggtgggcctttacgccgaaagggaagaggatcgtccccctaattccccctacgatctcatctccctctccattggatcttactctataatctaccacaacataccactcccagaataccgtgatgatgattctcgtctctttcctaaactactcaatgcctttttcaaccatcctagagtcctccttgtcggcaccgacatctctaccctagggaacgctctacgtacttgttatggcgtggagattggaaaatcagtagtggatttgaaagatattgtatttgagaaaaagagtaaggtggttttgaatttggtgatgaggatgagtaataatatgaagaagatgaggatgaagatggatgttgatgatatgggaaaattggttttggggatgaggcgtatggagagtataaggaggaagaaggtgggtaagattgattggtggattgatgagtatgtggttttgtcgagggagaagatcaaccactccattattaatgtgtatctttgttttctaataggatcttattatatgggctccattct

SEQ ID NO: 8517 - DNA, 795 bp, Cannabis sativa
cattttgcttacctttaaaccttatttgtatacatcttagtatttaattagttatttttaagttatattatcgtagattataatttaaaatacatttaggtaactttaaaaattatttttgaaactaataagttgtcatgtaatataacaagctaccatttttaatatattaattattttatatatatttttgttattttgaaaattaattagttatcttataatataatataattcaatcaataaaattctaaaataaatgttatctaatattttgaaaaaaaaaagtgtaaaacattaagtaatcactatattagtaaccaaatagtttctttctgtcgcattaaggaaggaggttactatctacattgggtgtgtgtttcagccaatatggaaatgcaaaaacatggttcagataaagggatgcaattttgatgcaattctgtaatcaacgaggttgctactgctttcttggagttttcaaattacagagctgagggtctcagtcaagacagctacgaagcttcagatgaccaggttgtgcaaagtgagcctgcagattatattttgctcacagatggatcatggaaggacagttttggaggttatgtggtggtagtaataaatcgtgcagcaaactcctggatgttcaagttggattcgagtactgcttcatgccctttggaggcagagactcgggccattctctctgccctggaactagcagtacagaattgttggtctagaattcatttactgtctgactacaggatccttgtgaaagcactggcgcaa

SEQ ID NO: 8518 - DNA, 1017 bp, Cannabis sativa
attgttccttggctttggtcttcacatctaacatttattgggtaggtgtggatgttcgagaacctcctaattatgaatgtatttgttggctcattttttaatgcttgtagagaccaattatagctttcataaacacacttcagactgtcttcttgagagcatgacctctataccttgaattagaagttgtttttgattgcgtagtagctcaagaccctcttgtgtatttctttgtccttgtattcttgtctttttgcaacttcatggtgaaatttatctgttatgagttttgcgttgttcgtaagcattcccacattttgttgaacttgttttgttcttaattcgaatatacgtattgcagcagcttttgtgttgttgtttagtgtgttaacgcacaatggatatatggtgaaatcagtttctttaatctttagttgcaagtaaaagaagaggctcgcatcgttgagtattctaatcggtggtattccatcttttgcttggtactggatttgcatggttgtttttgtgggttcgcacgccaatgaagagaggagaatccgtacaaattgttcattgttcatacttccaatcttttagtataaattcttcactagcctcataattgacataattttttcattcctcccagtgtctattgctcttcaaaagagctggtatagattccatgtcctataatattttgaaagtatttcaacaatttaacattataacatacacaaaacaatagtaaaaacactgtaaaaaaaaaaccatccacggttgttcttttcattatggtagtccagcttttattttggtgcctaattattatgtatatctttaatttcgaatacactatggttaattaaccaagaaaaaccttaaaactacattgaatctgttaaaatttaaatggaattattaataattttttttcaataatattgtatataaatttataatttattccattacacatatatataaatcaaatttgaaaaactgtaaatcattttt

SEQ ID NO: 8519 - DNA, 1109 bp, Cannabis sativa
  modified_base (537)..(540): a, c, t, g, unknown or other
cgttctttgatcagactattaggataagacaataaattctctcaatttgggctataagcccaatatacctattaatccttataagggtcatgcctcttattgatgactaaggatgtgtatgggataagtgtgcatagaaatagagagtacaatagtattcatgaaaaactcttgcatcactttcttctcttttgagtgtagattaaaagagcacaagtgatgataatgtacgaagaaaattttatttacaagataatatgttttattcactaatgttttaatgccttaaataaaatagtatttttgataattattgagcataattgtcattatataatttttgattaatgttgtgaatttagttacatggggcaactaacaccaataacgttgtgaatttatatatatatatataatacaacaacaagtagcatacgatacttcccatcccagcaaccacacgcaccctagtcatgcatggccaaaacaaccagtccaagtcaaaaagtcaaaccctttttttttttaaaaaaaaannnnaataataataacaaaaaataatacacaattgttttttttgtacaacaaaccaatatttatacctgactttcatctctgattttagtctgttcttcgttatttcattctttcatcatcaaattaaaagtgttcagttcatataaaagtatatataagtatatagttactcttccatagatctatatacactttattgaatttatattgaaataaactggcttaataattattaaaaatttctaataagaagtatacgtaggtagagctagatacatacatagaatgagaaaaccttgttctgaaaagcaagacaaaaacaaaggagcttggtccatagaagaggaccagaagcttatagattacatcaaccaacacggcgagggttgctggcgaacccttcccaaggctgcaggtaagtaattatatctcaattattaaccacatatatatatgcattagtaaattaatccatgttatccttttttctatttaattaacgtgtaattaattttccttttaatttatatccattgattcattcagggttgcttcgatgtggaaaaagctgc

SEQ ID NO: 8520 - DNA, 559 bp, Cannabis sativa
tcctaataacacatataattaatgaataattagtatggggaactggtttgctgccccgtcacaatcaaaaactttagtattttgtgtggtaaaacaattaacaagtagtagtagtactactagtagtattcaaatgagcacaacgtggagctgacagttacattttatttttgtacttttttttaacttattattatttggactctttaaaaaaaataaaaaaattattagaccaagacatcacattttcacacacatatcttcctaaatataacaagtgtctattacatagaaaacttggtttaagggactttttaggtacttagcaaacaaaaaaaaaggtaagttttccgtttatgttaacggaaaaagactgactgttaaaatattaaataaaatacaattatacaatcaatataaatgaacatttatcaacaaagaactataataaatgctttcaaaaaaaaaaaaaactataataaatgaatattgtatacatatatccatataaatgttataaaatatatatagtttttcaaatcttttaattatttttttt

SEQ ID NO: 8521 - DNA, 527 bp, Cannabis sativa
tggcttttgtttgagtataaatggaaggataattttatttgcacgccaattgtgcatcttactaataaaaaaacatataaatttaaaataattttaaaaattacacttcatatttttttaaatttaaaatcttttataaattaaatatatttttttatataaaataattaataaagtagagtattaatttttcgttttaatagaattcaatcattcaataaacattacataggatatggcaaatcatattgtataacatgtctcgcatagaagagattaacctcaatccatatgatactaattttgttaatcaaaatttcattggctaatatatgagcaacatatattacatgtctctcatgattatagagaacagagctcacgctattctcgctcttaccagtgttgataccagcatcaacgtttagcttcaacatcccattgtttggaggagacaaggtagctttatcccgaggtgtccctatcgttttactggtgtggattccttaaaaatctgccagaaaatt

SEQ ID NO: 8522 - DNA, 720 bp, Cannabis sativa
aacaaaaattatttttctcgacaaaatatttatgacatttttctcttaatgtcgtaaaagtttagataataggacatttttttaaatgtcgttaaaaagtgtcattaaaaactattaatgacattgaaataaaaaatgtaataaatttatattaatgacataatgccattgctaaagatatgataattataatatctttaaattattattataacatttatgactacatcatttttataaatattatctttattttaaaatattaatttcttattttaaaatcatcataaaatttgagatttatcaatttttattatctaaaattatttttcatcttttatttatatatttttttttttataaatttcatcacaaatcataagtatctcataatatagttgttgactaagatttttggcgactattaattagaattgtttatagtaattgatggaagttgaaagagataattttttacgtggttgggacattaatgagccttactccacgagtcactactatttatgagtattttcatacaaagagtctaaaaactgaatctatctctttcatacatcattggggtatttataagctcataatgatggtaaaaaagcctccatttttgtgcttgtatgaaccatgctatgcgaaatttcctagatttgattataggacatgattgactgttctttatgatgtgcttaggcttaatatagg

SEQ ID NO: 8523 - DNA, 1314 bp, Cannabis sativa
caggccgacagcaaagtggctcatcatctccaaggcaaaaggagccaggctaggtcccacgaagcatgaagccagttggttaagggatccaaattcaaatccctgacgcttctggcgtattcactttggatagatccatcctgggcgtcccttagtattttctttagagcctccacctctgcgttccccttggtgtactctcgcaaggcatagttgtacttagcaatccgaagccgagccctttcctcatgtagatgaacaggagtcaagataatgcctgggggcataggatactcatccacttcggaaggaatccctgagtcagcactgggagcaggagtatccacttgcctcggtttcttaacagcctccgtctccaccattttgcctttacatttgcggtccatgggaggaatcatctcaccttcttcctcttcctcgtcaatcaggacgacctggtcctcaggaacgtcagcaaaagatctcttgggggtcaccactatgtcgcgtgactcgggtaggccagactcaggattgtaagtacaggcaagggcatctaggaggtcttccattggcttcgctgcttaaggaataaacataggagtcagaacattgccaaaaaaccatgcatgcaagaatgacataataaaactaatcctaccttggcgatttaattctgccctaacaaaggtatatattaaaaggctggtgtcgtcgtcccctagaaagttatccgatgggaggaaccaactggaggacagataagcggagtgatctaagaggatgggtacgggaggactaaaacccacccgagactggcccaaaaaatgactaaggttggaaaaataaaaacttttggcgttataaccccatcgtgaatgggacattcgaaatttatgcaaccgatcatcaaattctactggcctacaactagagtaatcttgagcagaaggaacgttatgaatagtcaatggagacttacaagttctggaagtgttggcatcaagagcctcagcattaggaaccaggaaaaggaatttaggccaggagggcgcctgctctttccccgcttccactcggaggatcctccctgaagcagcttgggcattgatgtaggccaactcttgttccttcctgaatagatatttcttgtatttgtcttccctggaggtgatgatgtcctcttgaagcgccttctcggtctcggggttgcggacattagggcaaagaactttggataagttgaaatcttcttctgtctggcctttagaaatcaacttattagccctcctgcagttagcagtcgtgaccaag

SEQ ID NO: 8524 - DNA, 502 bp, Cannabis sativa
atctatcttttcattcaattaacttatcagttttccccttaatcaggtgtttttcttgctgtgtcgtccaacacacgttaccaaattataaatggactcgaacagcttgtcgaagcatcacctttggcaaaacaggtgccaccagtcgcgatggcattcacagtaggtgtacgatttgccaacaacatatacgggggtatgcagtttatagattgggctaaactgagcggagtgcaatagctgcaatacatataaatgtctctcattttcaatatcaaataagctatagaaatattttatatattttcttgagcaataagagtttttgagtttgaagtagtacattttctgggcttagacactgcattctcattttacagtctctaaggtaaagaaagataatcactttaaagcataaattagatcattttacatataaacatgaccctcttaggtagaagagctcatgaaagtgttaatatgcttggattttttttaaact

SEQ ID NO: 8525 - DNA, 747 bp, Cannabis sativa
tcttacaagctaaggcaaagaatacggttcataaacaatagacaaacacttgtgtagtacataaaggcttttctaactaaataatattaactcgtggactagagttcgttaatacttgaataacgtaaaaatattcgtctaaatttctatatctattttattttctttagctttattatattttatatcgattttctaaaaatttcagtaaataagttctaatagtgttatataaaaaattatatcatgaaaaattgaattctaattaatatatattttttttttttaaaaaaaaaaacaaatatttttagaaagggcaatgtcgtcactgataggggtgtaattctgtattaaaaaaagtaaagaaatgtatcaaagtaaagaaatgtatcatggatgacatgtttatttttagtgacgacaaataaaatcgtcactaatagtggcttttagccacaaagcatgagcgacaaaaaataaacctttcagtgacgatttttatcatcaatgatactcttttctccactagtacactgtatccttaaaaaattgttcttaatctgatcatattgacaaaacttaatgcgtgaaacaaaatgttgtatgatatatataggagttcataacaatctcaggattaagacatactattatgtatataatcatcaattaatgtgtattattaatactatgaaacgatatataaataagtattaacaaatcacatttgatccaattctatatatt

SEQ ID NO: 8526 - DNA, 512 bp, Cannabis sativa
taaaatatccacacccgaacaaatgtttattatataaacaatgaatctggtggggctgaggtaaggcgaatcaggtcgtggacacacccaacctaagggttcaaacaaatattttttttctaaaaaaaatagatacgttagtagtttttaaaaatattacatatattttaaataaaagggtctaataatttttatttttctaaggaccacccaatcccaggttcggcctaagttaaaattgatcaaaccaattgtgctaaatattaaaatgaaaagccaaatcgattaactgtctatgcatggctgtacctgtaataaaaaaacagttgaatagataacacaaaaaaagagatttattatttttcaaaaaaaaaaggataaaataaaagcatatgaaaatttattatatttcagtcacttgtcgcgtgatatttgatattctctgactatctcactaatgaggactttataatgtatatatagaattatatgcgtatatatgatattcattt

SEQ ID NO: 8527 - DNA, 655 bp, Cannabis sativa
cagatccaacaagatatcgaaggattttcttacaagcattccaatgattttgtgttggggcttgaagaaattgactgagtttatttacgggataagcaatgtcgggtctgctaagagttagatattgaagggcacctatgacacttctgtaaagagttggatgttcaaagagtgcgctgtcttggagacttaatttgttgctttggttcattggtgttggacacggcttagcattggacatgtttgttttcttgaggagatcaagggtgtacttggtttgagataagtgaagaccatcgggccccctactgatctcaaaaccaagaaagtaagtcacgggaccgagagatttgagggcaaatatggtgtgaagttgagaaatgatagcggaaacttgagaggcgttgttacccgtgagtagaatatcatcaacgtacactaaaacaaagagaagagcatcacctttgttatagaaaaataaagaagtatcagccactgagttaagaaaaccaagagcaacaagagtagttttaagtttgtcaaaccaggcccgaggtgcttgcttgaggccatacaatgctttggagagtttacaaacggcatgtggctgttgaggatcaataaaaccagctggttgctccatgaatacttcttc

SEQ ID NO: 8528 - DNA, 932 bp, Cannabis sativa
agtcccagcagataggaagacctggctttttcctgcttcttatgaaacccagcatctggaatatttatcattaactttcaatgataaatattatggtcattaatgagcttttgatttcgttgcttgagtaggaatgtcatctgcgtttcagttttgcctttgaaactaaggagagttagcttgctagagttcagttcaggttttgtttacctttgcttttgtgagttcttcaccattattgttgttaattttcctgtctctacttactcttgatttaggtgggtcagtaatgatacaaagccaacttgtaattttcttttgctcacacataaatatcctcacggaaatggaccactttagttgattattctgacctgtagaagattcagtgatgtatttatttgattatattgctgggaatatgctgaattgaaagacctggtagcttcagagttggtgacaattgctttcatctgaactgtaacagtgtggaattaattgtacagaaatctaatagcataatagaagtgtttgcatcatagtaaatgatgcatagtttggtggtgtgggtgggggaggaaagtcactgatcattagctcaatctaaactaaacttgtcccaaaaccaagaataataattaacagtttggttcgcgaagggaaaaaactaatgaatgatgatacaacagattggaggatgaaaaaaatccattctttctcttttaattcaattcattattatttcacaattgctacacaaaaatgttgaaattttttttcactgttttatattttctccatctggctacattataaggctaacacttaattgttaaaatgatatggcattaattgctcaatttataacaagaagctgaggttagtgaatgggattcctattgaaatttgataaaatcaaaatgttaaaccat

SEQ ID NO: 8529 - DNA, 856 bp, Cannabis sativa
taaaaattaaaaatagttttttttggggaaggcgggtaccatcaaatcgctcttcaaaaaagatttccgcaagtgaagactgaaagagagagaagagcagtgagagagttaatgccaaatattgcatattacaaaagcggtccgccattggcagagagcaatggaatggtgctaaagagtaaagagtgaagactataaagaaaggttcctaattatagaaataggatcaagagaaagcccgtacttctttggcttaattgcagtattgcccttcgtggaatatatagctacgtgttgttgattatccaagtcaagtagtcaacttggatttgtaatgactaatgatgaagactacattcccttagtaccattaaaagtgtttaagccaatgaaagaaatacatttttgtctccctctatgtttggaccaatcaggaaccactgaaacgtttcattcgccaatcatattgcttcttacaataacacaaaagtgacccttttttcatttcatatatataaaaaaaaaattagtctttaaaatggtgtgtattgtgtatttcatagtcttcgccctttacaatacgcaaaaataaaggtggtagacatgtaaatttgttgggcaaaatgggtattttgcaagaagacttgggtcttctaccggtggttgacccaactatgtttggaaactttcaaagcctccccctttagaagcttgaaaagtataagagcaaaaaactaggaagatgactgtgccataattattcatgtcccaaaataatgagtgtattgtagagtttgaaattgagctccatttgtttactttggcattcttcacagctgcatagaattaatcttgt

SEQ ID NO: 8530 - DNA, 635 bp, Cannabis sativa
aaatgtctttagcaaatgacactagaaaatgaagactctcttccaagatattaaaatacaagaggatccaatacataatattcatcgcaatcacaacaatcagaagaacatgatccaaattattctaattggtgttgcaaaaaaataatttctttcatcataattttacttgcgaattccaatagtagatcccaaatagtgttgtgcaaatcgccacctagcttcttaaaaaattttcatacattagatattgtttttcccaaatccttagacaacttaatcttccttcttaaataacataattacatcaatgtactgggaaaaccaccttcagagtgaattgctcaggaggcaaggcctgaaaaatccattcataattagcatttctcaaaatgttgtgatcaaattcaatcaagaaaatcaaatcaccaaacactacttgcaaaagctttcaaaagtatatttaggtagagaataaaaagcatgaaagccactacaggcatcataatttcttaacataaaattagccatccaataccaccccttgacagaatataaaatatttttaagtggaaattacatcatattttaattatattattgaatttaattatcacaatgccaatatatgtaac

SEQ ID NO: 8531 - DNA, 631 bp, Cannabis sativa
acaaggctctcatgataaagaaactcacccaataatacaatgcgaaaatacccacagcaatgaaagtaagttattgatattttttgacatacaaacaaattagaaaactaatacaacataaactcaactactaagacagcattgtattgacaatctattgaatttcttctactaagcctcattaatttcaaacagcatgaatattttctctcaaactcgaagaaagcaacctaattagtagttttcaattaatttacataatggggaaactgaacaaacaacacatgaatactaatagaacttgtgcaaaaagattgtacttcagaacatagaaaaacaaatggaggaaactataagtagatattgaaaatgtaatacggtaagagagtaatgaagacctgcgcatgagctatatagaactttagtcgattcatctcactagcaattctctccaaaagcatgctttgagtttctctcaaacttgttccactttcaacatgttgtacggaagtcccattgctcattaagttcttctctgtagaacttacatctccatttgaccaatcagccggcacactagggagctcttttatcagtttttcaacctgtatagaatttggatagaatcaat

SEQ ID NO: 8532 - DNA, 1535 bp, Cannabis sativa
agataaaccattgtttgtttatttggctccaaatacaaaccatttgttatgtattaaataatacaatttatattgttattaaaatttttatcgtaataattaatacaatacattattttatctaaacataatgtcatttattatttaatataatacaactcttatacacctaccaaacgagttcttggagttcaatcttgctcagcctgtgatctacactacttgtttgagagacatttctatttatagaagttttgatagttgatgaaattaatggcaaaaacagatccgttagtaagatgtgtcttcaacatttactctacttgtatattaaacttggttaagaatttatttcaacatatttaagtaaaattattagcgaaattcatagtgacatgcattagtactaagaaatatagagataatgttcaatttacttttgcatgtaaataataaattgtgaaggactgtggcattgaccattatattcccttctttattaaatggcgcaacaaaatcaaaggtgatagcaaagtaatatgaacccttgaaaaatagaatgattattgatcaaattaaggtgacccatagtacaataattctcttttatcgttatcttaaactaagataaaaccttgtcactttcccgaaattgttcatagctaaaaatcaaagcaagatctaattttggatatttaaatttacgattgaagaaaactacaaagataaaccaatcaaaaagtaacttcataagagttgggttagtgcaattattcaagaattgtcactctataagagccaaacgagcactgttcaatacattataagagtaccaacgccaactcaaaaggcccaaaaataaacaaaaatccatttctcttatcctcttgaatgagtacttttgtctgaaagcacttggaaacttagcaaacaatggaacaaaaaaccacttacttgatgcttggattgacttatcatcacattctatacattatctaaagctgagctaaaggcaattttggttactttccaaacccaagtcagctagtaaaggccattatcatgattaataattgtaagatttttctttttctcttactttctatgtttaggagttgacaaagtttgtgagtggagaactgggcctataaaccaacaaagcccatcacatcctgtggtcgataaaagtgggcctacatagtctgctatatgatacagaccaactattggttgaaggtccaatccaacaggtctaaattcttaccaaccgtattggaatgagccacgagggagtcctatgttttcgacaacatgtgtggctggctgtctataaaacatgtaaggacaaggcccgagcttggtgctggtggacagcccatccggcacagggcacacccacccacacccacacccacacccctcccagcaattgtttctgttctagggccttcttcctaggtttgacacaactacgacttgcgagttgcgagtgacattatcttcgatttttcaaagagatattttgataagtatta

SEQ ID NO: 8533 - DNA, 514 bp, Cannabis sativa
ctttgaagcttacaactcttttggttttggttacttagcccgtgacactttgggagatattattgaagctgttacttcaagtaagatcggtagtgttgctcccgagattgttgagctaattggaattaaggaagcccttagttggataaaaactaaaagatggagctctgttgaagttgaaaccgattgtctcatggtagttcaagctgtccacaataacatatttcttccgtctacatttggggctctgtttgtccatgactgtcaaaatcttctttccgaattaccttttgttaatttgtcttttgttaatcgttctgctaataaggccgcgcatttccttgcgcgtagctcttattatatgtcagatcgtacttttgatgctagaaattcaccatctgagttggtggaaattgtaatggtgacatttatcattaagaaagatttgtagttttttccaaaacacttttgaaaagttatttttaaatttaaataatatacataattcttaatt

SEQ ID NO: 8534 - DNA, 506 bp, Cannabis sativa
tatttgatgtgaattcagtatgttctcatactctcatttttttttaaatagtgtttcccttctattccatattttgaaaaaaaaaaatacacacacatacattaaacatattttacatattattgaaaaaatatatattattaattcttattaaagtaaaaactaaatatatattactttttaaatagttataaaaaataagataaaaaaattaatacaaatgaatgttaaaaaataaagtaataagtaaaaaataattaataaattaataattatttttagtaagtgactaggcagatccaattggtttcttagacaaccttgtgagttgtgagacacggataataactaataattaagttaaggttttcctaagtacatattaaattaaaacaatttaaggttttaaatatataattaatttgagaaaattctctgttcgtgtaagtaaaggtaagtaagggtgtttttattttccatagaaattataattttttttttatttt

SEQ ID NO: 8535 - DNA, 560 bp, Cannabis sativa
tgctaagatgacatgacaacaacaacaacaaatatatctttatatattgttaatataaagattttttattatttttaacggttaaaattaacaccgttaaataaatttttaataaatattattttttgaaaaataaatctaaatttaattctaattaaaatataacttatatacgattattttatttatttccgttaaataaaaaataagttaaaatttaattttttattttattatttattaagatataatttttataattatttaaaagtgttgataaaattaagtaaatattttttatagtctgaactaaacttgaattgaacattctatattttaaaattatgaaataatattgcatttaatatttttattattatttaaattaataattagttaatagtaacatatatacaatacaaatctatgaaacatgcattaaatgttacttataccttgtttatttatatatatataggtgtaatacattatgtttttaaggccaaaaacctattaatatttcacatgtagctttctatgaactctctctatatatagct

SEQ ID NO: 8536 - DNA, 1029 bp, Cannabis sativa
tctcctattttttattttatcaatttttgtcatttatttaatttttaaaattacttttttagctaaaacttattattattattaatgaagtaactcacatctacagatattattattggtgtaacttataataataataataataataatattaatagtattagtaaattgataaaaaaaaatatacatattattacaattaaattatatgcacataattcatatttaaatcttattatttattattatataaaattctgttatattcttattcttttaattaatatatatacatgaaattcattaatatatatttaaaaatatagatatattttataatttaactttcttttatatagttgatatattgaaaaaattgatataaatttctcttggtttttttttttaaaaagatttattattaattaaataatatatatttcctatgcatataattttctaattcgacacaaataagtaaacggcggttatattttctaaattacaaataaatttaagtgacatcttatattcatttagttaaaatttttgagttttgagaatagcacatatatttggtcccaaaaaaattaaatcgggcatgcatgcttatattaattttgtaataacaattcattgtatatttattttattttggggggcaaatacaaaataattacacaatattttttttcttttacatatttatatacaaaattgtgtaattttttttttctatacaatcctataaatttggttgattacaatttctctttatattattacactctaagatacaaatttcatatttatatcatttgttaaaattaatgctataatctaaaattctaaatatttatatagtaacaatctaactatctaactgtaatatttttttgaagtattttttttttggctcatttttttattgagtcaaacatatcaagttggttacacaaaaatagttttgcaaaataataaaagatacttagataatttcaatatcattctttattgttgaaggaaaaa

SEQ ID NO: 8537 - DNA, 874 bp, Cannabis sativa
atgatcatcttataattatgttatttattctatgttttatgttatataggatgaaatcaacaaggagtttgaagagaaaaaggttgacctccaacctaaggttctagaaatctatgaagcttgttctgttgaaatcaaggtacatatatacatacacatacatatatatatatacacatattattatttatatatatatgtacatatatattaattagtttttttgtgtgattaacagggtttggttaaggaaccaaaagaggcaggaatcaagaagagctcagttgcaatccacaaattgcttgaagaactttctaaaataggtactaaaaataatccatactttaacataatcttatttagggttcgcccttaattttagtggctcttaatgagaaaaaaaatatagtattttcaaaatcattaaaaatattatttctattttttaaaagggttttaaaaaaatacaaaatcaacaaaaaaaaaattataaaaatacagtatatacgtaatttttaatatttttacagttttatagatttttttttacataaaatacgatttttaatgtatttttatattgtactcttgttattttgttgttaattatttgttatttgtgtattattttttatgttgttttcttattactttcatgtaatttttttgttgttttcttctgtttttatagaatagtaaaaatataaaaaaaactataaaagtaaaaaaattaacaaaaattagtgttttatataattatagacctagtccgtttatacttaagacagtaatcttatgttatgctatgatacgttatcttttattatgatatgtaataataatatattatattatgttgtgttaaatacagagt

SEQ ID NO: 8538 - DNA, 793 bp, Cannabis sativa
tttatccttaaatttatttaaaaaaattatatatacgatctatattgtgagtgattggtcatacataaaaaaatagttgcaaactcaattttttatatatgattgttgtaattatttaagacattttacaaaattttgaataatttagaataatttacaatacataaagtatagaatcaaacagtttattttacacacttataaactttgcagcgaatcatctacaaagtatataattcatttataatatgtgcaatatattatttgaactttatttttagcaagttacattattctaaagttctaaaaaattcaaaaaaaaaaaaaaaaatcttatagaagagaaaagcaagatttgcaggaaaaattaaaacgtgaaatggctattcgaacattgatgcaaaaacaaaaattatttgaacaagactctatactaaaggttttttaacaagactctaaactaataaaagtattttcatcttgaacaaaatattaatttggcgtttgatttaaaggaataattattttgtattgaaattatttttttattttattttagaaagaaatagacattccactaaaataataaaaaatttatttaattgaaaagatattacaattctttaaaatacaactaaataaataaataaaataaaaattaacatttcattaattatatctccaactaaacaccacctaaaattaattacagtatgcatttttgaattgctaatatatacaaagtgagaatgggaacaattaattatagttcgttttgggaatcaaattaact

SEQ ID NO: 8539 - DNA, 506 bp, Cannabis sativa
atcgaggctgggggcactggttcagggtattgtgcgcaattttctgcattctgctggcgccatttctgatctttccagtctaacgactgggatttggtcaacaatggcagcccaacagagatgcttgagaggagtcttaccttcaatctctcggttagtttccttattcttttctttgttttttaacatttctttcaagaacccacaagaattcaagtgcatttttttttgtgtaggccaccttcttatctcatgtcgcctaaagtcggattctccataaagtaaagcaattgaaagctgaattttgtaaaaccattgaggaacgcgaggttgttgctaaagaatggaacgatgcccgaaaggagatttcccgtctgaccaaggaggctgaagagatgaagaggactcataagactgaacttgaggcggcccaaaaagaagccaaggacaagtccgaggcttgtcagacactctaagaagaacctaatgcagccactgtgaagctc

SEQ ID NO: 8540 - DNA, 520 bp, Cannabis sativa
gtcaagtcttgtatcgattctggacagctagccaaaaattcagccaaaagaaaaacattgcctgtttcagctacataatgcaagggagtcttagcttcccttcccttgacgcgaacaaggtttctgtctatagctaacagttcaagtgctgtctggaatttgttgttatgtaaagcaaggtgcattgggctgaagccatgctggttttgcttccatgaaaatgttggctttaatctcatcatctctatggaaaaatggctatgtcctgctgatgcagctatgtgcataggagtatcaatgaatggtatttgatcaatgcgatctaagatacatggatcctcatttatcaaatcataaaaggcatccatgtctccctcttgagctgcttttttcaacctctgatctgtcctgtcactaaaatagaattagtcagttgaatattatagatgtatggtaacagtcaatatgtaactctattatgttcatgacaatgcaacaaagaaaaatttatttcataata

SEQ ID NO: 8541 - DNA, 648 bp, Cannabis sativa
ttttgtgtaaatatctaaaggtgatcacataagcaagatggatatccacaaaagtgattcataatagaacttaattttgaaagagaaattatgagggaaccatcattgactgtgccaatgcaagagtagctacatatgattgaaaatcgttaaagtcttgtatatgtgtacccactggtttctagaaaataaaatcttaaaaagaaaatactttagacaattttacataatttttatataagaaaagaaaataataaatacaagtcctgttgttgagttcttttgctcatccaaggtggggtttcttttcttgggactttttttctcaaaaaagaaaacatatttaaaataaatatttatgtttttttttttttaaaaaaaggaataatattttggtaacaaacatgttatcggcataaatttaccctctccgcaaggactcggttatagagaaatcgcagttttaaaaatagcttgcaatattatagtaagaaaaacctcactatattaagaaaggaatggaagctcgtggtccagaagaagaagcatggttattagtagtactaggagtagagtgttggtttaaggcatggattgcggtattaacaggtctcattcataatggcatgagatcacacaattaaaaaa

SEQ ID NO: 8542 - DNA, 632 bp, Cannabis sativa
gctagtacaataatttttttttataatggtatattagattaggattggggtacatttttatacaatccaaatttgattattttattttgctgaatgttaatttttagtacacaaaatgtatatatcataatacaaaatgtatataccacaaactaaaaattaatattccatcaattggtttttatcttagtacaaacaattgatatatcataacttttttctctttaagtgagcatgaaatatataattcatattctgatatacacgataactagttttatagttgatgtatatcaacacttcttaataaaaataaaatgtgaacacccaaaaaaatcattcatcaaataaaatatactcatccattacagtatataccattctccaattataattgaaaaataaacttatataccacaacatgataataccttatatataatgaagggtattttaggtaacaaaaagtaaaaaagaacatttgttttattattctaaaaaagatacattaacttttactcgatagagaaatctggagtgagaaataaggccatttactctatttttatgcccaaaattacttctttaagtttaaacatgagaaagagaaatatatttacattccccttctt

SEQ ID NO: 8543 - DNA, 804 bp, Cannabis sativa
aattcttttgttgatgaagattctagaagaacaactttcgtagctacagagtcctgtaatgtagtctcagctacaacttctacagctctaccaatttcattttccacggcagaaggcttttcaagcaactcatcaatctgttcttcagttgaaaatttagaaaaacccgttaaatcatcatcaacaacattagcatattccattgcagttttggttctcatattatacacatgataagccgtaatattaatggaatatcctaaaaaaaaacaccttcatcactttttgcatcaaattttccattgtaatcacaatctctcaaaatataacaaacagaaccaaatatatgaaaatgactaacatttgggttcttacatttccaaatttcttatggtgtcttgtgagtacctggacataagaccactctgttgatagtatagcaagcagtgttaattgctttggcccaaagacactttgtaagcttcttgctattcaacattactctagccatttctgttagagttcgattttttctttcaaccactccattttttcaggagttttagagcaaaatattcatgagaaataccattagatttataaaactcatcatatacattgttttcaaattcttttctatgatcactcctaatgcatataatcttaccaatgttgcaatctttttcaactcttagtttcaaacataaaggtttaaaagcctcaaaagtatcaattttttatgttaaaaagtctacccatgaaacgagaaaaatcatcaacacacacaaaattatacctcttacc

SEQ ID NO: 8544 - DNA, 612 bp, Cannabis sativa
ggaacacacttgttcgtagacttggaaaaaaatttgataaaagttgtgatccttccagttaagctctgtacatctttgtatttcttctgagagggcatatctgggaacaccttgattttctctacattggcttcgatccctcaggagctgacgatgaagcctaagaactttcttgaggaaattccaaaggtgcatttcttttggttgagcttcataccgtacttcttaatggtgaaattaagcttcctcgagactattgttgtgctctccaaagttttggatttcactagcgcatatcatctacatacactttcatatttctcccaagaatatctttgaacattttatttcaataattcaattaaaatgatacatcttacttaatttataaatttattctgaattatttgtttttaatctactataatttaagtattataaattatggtgcattgatatatcatttattgttttagcattttgaagaaaaaaaaataatctaaattttttttatgggcgtgtacgttatggttatttaagacatcctgtaaaattttgagaaattaaggataatatacaacataaaaagaaatgtacacagtctatttaaca

SEQ ID NO: 8545 - DNA, 554 bp, Cannabis sativa
agcaattgttcacaagtttaattacaaagaaaaattgtctttaaagtgcacattttacctctttattatttcatgaatttacccaaaaatttcagaggggcggagttaatatataggtcgtgctttttctttctttgatagaataacaggttatatatgctttgctatttcaaatttatgtcactttctttctttgtggtgcttttctaatttttgcttactatttcaatctctcacaacaaagtaggccggaatttgagtatgtcatttgcattatgaggtaagttttttgaggccaaaatttgctagcttgcacttgttggtgattgtcaataattttgcattgggttaattaattatttatgtgtgtttctagatttacgatattgtattgagagatttttgtgtaaattaaaccaaaagaatctttatttttcagaacaaaagataagaaagaattatattgattctgtagtgcgattgctttgacatacattattatggttattttgtgaaaaaagagatttatatgttactattttgtatgtaaaaag

SEQ ID NO: 8546 - DNA, 663 bp, Cannabis sativa
ccctttatttcttatatgaaatgaagttttgagactaagaaagattttgactttttttccttctatatgaaaagataaacatcattaaagttttctcatttgggtgtttttctcttttggggtattatttttcctcaaaataaggctagtattatgcaatttgaagcataagaagaagcgtgtattaaagtttgtgaagggtggagttgagcctaaagtttaggttaaatcactttattgaataatacaaatatatttatatatgttgcttaagcattagctaaagtgggttttggtcaacttttcgtaattaggtatttttgcatgaacatggtcatggtggtttcttaattacataattgatttgatagttcaccttgcttgactataaagcaatgtcatttcacagtttcacacacccttcctcaatatatgctttctctttaatggtgcttttaatgtctttaaaagaaattttgtacttgtttttggggattgatttgctattataaagaattcaagatgaccttaacttcatcaattaggctaataattgtgaataaatgattagtagtagtaattgattgtagtttatcattgacaattatttatgaaaaaaatgctaaaagttatttatggtgtttttaatgtaattaagtattg

SEQ ID NO: 8547 - DNA, 559 bp, Cannabis sativa
ttagtttcattatcttagatcaagcattatgctttttattgtcttagatcacactttgactaaatatatcttgacgaaagtcattagtataataagttatcatgtttgtatctattttctattcttaatgagctttgttgatcaatgaatctgtatcttctccttccttaagctttattgcttggaaggtaatttcttttggagcctttcttcaaaaaataaaaataaaaaaaagtccaaataattttctgcagtctgcaccaaataatacgcattaaagtatagcttaaatattaatacttataacttaactgataaacacagcatatggttttttatcgtgattttgtgtccatattgatgatcacaacgttaacaaacaaaacgtttttctacgtccattaatttacaagtacatgtatacaaaagcatatctactacatagatagaccctcctttattcacatttgtttggtttacttaatactcatggtaatttcttttagtgaaagtgaagcatacatattatatgatctatataaatatatattatgtatat

SEQ ID NO: 8548 - DNA, 940 bp, Cannabis sativa
atattcacatgcacatacatgtaaacagaatgaaatgctttaggttttcattttggagaagaagtaatcgtcctcatttgatttttctgtataggactcaaagcttgatattaccattggtccatatgaaacatatgaagatgcactctttgggtacaaggtatggtttatgtcacacacttgatttagcttttgcattcatcatattcaaattttcacctgtgtttcttattcttggcaattaatttatgtcacttaataggctataactcatggttttatacatgttaggccacatttgaagcattcattggagttcgagatgacaaagcaacagctcaacttaaactttttggtgatcatttacaggtaatatttttcagtcttcttttacctaactagcaaataggtttactatttatccttattttcataactcaaaccatattttctagtcctaaattgaccaattggtaacaggttttggaacaaaatcttccattggacaatatttacaaatcaaaagatgtgattgctgctccaattagagtcatccaactcctctacaatgccggggtgagcttgtgaatttgtggtattttttcattgatgattgaattttaaattatcataatgtgctcgtcaaagcttattgatgagaagtattggtgctctcattttagttgtgttttcttataatataaaaagcaaatcccacaaatttaagcttagcatggttgtcaagaaattacatagatgaaggtcttagtttataattaatttttatatagcaaaccatgaatataaacaaaccatatatacatatctttacaagtatggttttcatcgcaatggttaaaataaatagcataggagaactaaacaaattcatagaaatggatccccaatttaccgtaaaaggaattgattattttttttt

SEQ ID NO: 8549 - DNA, 888 bp, Cannabis sativa
tatgataagctaataatgaaaatgttaataggccaccatgcctcctaggagattttatatcgttatgtttgtaattaagtatcaggatatacatatttaatttaatagttattatagaaaactgataattatttaaacattctcacatgctaatacgctaattaagctaattataagactctcttttctactatagtaaatgattagtagtattcatgtgtcaaattatattaaaggaagagaatgtaatttgagaaactgaatttattaattagtaacaattaaaaaaatcaatttctaagtaattaatcaaaaatatattgaagaaactataaatttttgctaagcaatattaaaaaaaaaaaaaaaaaagtaaaaatattatagtattctcatcatattattaacattgtaggtaaagaaatttttgttaaacaaatattaacttgatatataatactaattataatattgattagcataattaagttattaaaccaagtcatgtaaacatgaaaaaagtgactctaagtagctctaaaaagacaatttaggagagaaaggtcagagtagagatactaattaagtatttaactaaaaaaatatatcctaattgggtttaagtacaatacttatttatctttcaaaactaataaaatactagttcatctagacgttgaccaacacttattagaattaaaaataatttccccatcttcaatggtgaattatgtataatttttaattttagagtcatgattagatagcaatatttcttaaatgttattttcttaagttacataaatttcgatttacactaataacgatgaaaaaccgaagagaatgttaggtaacattttagcaattctcttaattttataaaagaat

SEQ ID NO: 8550 - DNA, 916 bp, Cannabis sativa
  modified_base (565)..(570): a, c, t, g, unknown or other
agcaaaatattaagaagatgtggaaaaatcttacattattaatgtataaaataataagatgatgatactaacctcgttactaattgattttgcattgtcttagtagtgaggactctaacccgctctagaaactttataagatgccgtaaatattgtttgtaatcatttacacatgtattagtaatcttaagtttaaataaataagagagatcacatggtgtggttggttacatattttattaggaattattagaacaattattaattatttcaatatttttctttccatatataggcatagtattagtattagtctggtcatctatatatatatttggatgattcaacaatgcacccccttaaaagagatgtattgatacactcttaatttgtttcggcattcaaaaaaaaatttagtctaatttttccgaataatttacaatatagaaaataatgttcaaacagtcaattttacacgtgtataaaataaaatagtcacacgtgcaatacactgtttgaacgtagttttcggcgtgttaaacttttttaaatttcttaaaatttnnnnnnatgtcttaaataactataatgtataccatgaaaaaaaaattgactaaaattattttcgaaaattatttcaggtgctaaaataaattaaggtgcatcactatatatattttaaagagtgttaaacccatattttttattattttattacaaactgttttattctcctttaaacccatggcatgtcagtggccacgacaatagtagtcggttggtacaacctatttttaatgtaaaaaatcaactgctattctcaaaaaaaaaaaaaaacacacacacaactctacaatattcatagggaaccgatatttgataaaggacataattatattaatatttaaaatacttt

SEQ ID NO: 8551 - DNA, 921 bp, Cannabis sativa
ttggttgataattaattcataataatttcatattgttaatagtttttttctttcttttttgtgagaataaataaatagattgttagaaatagaaattaaaaaaccagtgaatttactctaatatttctttcttatagttttcagcattttgaaaataaagagggattttttttttttttcagtagagtttctgagactgagagcagcttttgggaaagtcacaacaacattttaaaagaaaaataaaaaaagaaaagcctaaggaagctagcttttgttatgtttgtactttgtagggacaaacaccaatgagctatatatattttaggttactgaaaattgtatattttattgtataatatttcaaataccaaaagcttaaaaaccaataagtcaattttggtgagttattgaaattcaaaacacaatgcttagtatattgcggaatctgtggatttaaatttgtatgcattttataagcttctatatatatgtatattagttggttttgtttagtttaagatgaattttacttgttcaaagcacaaaacttgaccagtccaaattctttgtgttgctcaatgaaaggttttattatgaaaaaacaagggtcaaagctagctttgaaatatttagaccatgttatgttatttttatttgttggtgtagaagcctagagagattgtttagttcgttccttcacgaatcatggagaagggagccttcaaatatattctttttctttaacatgaccttatataagaaaaggaaaaggatacccaagaaatctcaaaacactcaaacacaaaaagaaatgagctcagtgatggagggaggaattaaaaaatggagggaattgtaaacaaattaatttaagggggcaaattaataataactatatataattttttttcatacaat

SEQ ID NO: 8552 - DNA, 663 bp, Cannabis sativa
taagaatatataaatattactgacattagttcggttcagttatttattgaatcggatgtcccatccaacaatcgattcgatttaattagatttttagaatttacatctaatctcatttaattataattagataatcgttcctattagatctgtcagtggtaattaaatttgacaactatctctacactccaatttaaaaggagattctcttcctctccttctctcatcctttttattctttttctcttacatattactatacaaataatttaatcgatctcttttatccatcttcctccatccttctctcccctccaccaaatattgtgtaaatatttttatgttgaatgtctgtaaactattaaattaactaagtttgtagccctcaattacaaaaattatatgttttcgaaaactcaagttcataactttgagtagcaaaatgattaccatttttttaatggaaagaaacaaaattatcatgtcttacataaatcatatgtcttgtaaaagcaactttgtaaccatttgtaaatgaattttgaacttaattttcataaaggagtagagtgtctttatcgaatttaatttgcactatcttgttcacaatcattcaatctgcattatgtacgaattttatattttggatccaatccaatccgt

SEQ ID NO: 8553 - DNA, 1276 bp, Cannabis sativa
tgctatctggatccatgaatctctgtacaagtaccgaaatctcatctctactgactaaactaacatgatcagtccctgcacatattatcttcttcttatcattaaccttacaaccaattttccattcctcaacaatttgtttgctattagaatgttggtctgcagttataggaaaagtcaacattggaaccccagcaaaaatggcttccaaagtagaattccagccacagtgagtccaaaatccaccaatagaaggatgacacaacacccttaattggtcacaccatggcaccacaaaccccacatcaccacaaccatctttgatctttgacacattctcacgtgccacccacatgtgtctaacaccaccagttcgtatcccagccacaatttcatccaattgggtatctgaaactgaaagaaaactaccaaacgagatgtacaaaacagatgcttcaggttgagaatctaaccactgtatatactctacaacagtactaatattagtggtgtcattaaaggtattttcaagttgaatctgaggactaatactgataggtcctatagagtacaaagggaaggagaatttgagtttcaagacatcaaagacttgtgattcaagctcatacactgaagttgatagaaggtattgtactttggttaccttagaaacagcctctattattaattcagccattttttcattgttactgtggaaaagccggtcggataaatctgcaagaggagttgtagaaatgcctgggatatagtctacaattttgtctccacgctctacgtctgtgtatcaccaaatcagtgcatatagacaaattaagataatataatcaataagaaatgttgaaattgacacaattagaatgaaaataaaccaaattcaacatctcgaatgcttcttaaaagcaatgtgatattacaatttacataaaaaaaggtaattgagttgaattgcagtgaaatgttgttttctgaaaacttgaaatcagggccggccctgagggtaggcggcctaggcgtgctcctcggccccgaatgctcagggattgaatcttggagcttttaagaatttttaaaagctttaccattacactcagcactaaaactattattttcatagttaaactatatatatagagtcccaaaatatgattttgcttaggccccataggactggtcatgaattgaattgcagtgaatgttatttttggaaaaattaaattgcatgttgattgatgattgataatgatattaacattgt

SEQ ID NO: 8554 - DNA, 868 bp, Cannabis sativa
tggtaaaataatttctaacaactttagcatgggctatttggctaggggccatatgggagggttaaggaagcttttaacaggggtagacaaggtgttgtccttcctgaaatcggtcagatagtagatataaaggaagccttttagctgaattctgaacatcaatggtccaatgtcatcttggagtcggatagccttgtgcgtgttcaagctatattaacaataatttgcatatgttttctgaattcggtctttttaataaggattgtgaaatgccattatttaatctttgtaatgtttctatttgttttgttaagcagtctgctaataaagtcgcacaatatttgacgcgtggctcttgttactcttcaggttgtgtaattcaggaggataatttgtcttctgaattacgttctattgtaatggaagatttttcaagatttatgaaaattttacttttcatttttttttattaaattcctaaaattataaattatataagatgataaaatcagacttcaggtaatttgttatgcattttcctttttggtacgacagtgcaacagaccagagatttttacagtattaaactattctagtcctatgaaaaaaactattttatgggaatggggtgtccaaagacaccaacacacaagtgaggagtccctaaactatttcttagtccaaaaacacatacacataagtgaccctgagaaaacattgatagaatttgtgaaaattggaatgtgaaatgggtggtgaagcataaaaatagtgcttaaatattggatgtttgttgtgtgagtgtgcatagtaaagagtgttattcaataaaaaagtatggtcgcaggtcactttcaacccccaaata

SEQ ID NO: 8555 - DNA, 546 bp, Cannabis sativa
atactcatgcaaaagattaccaaaattcatgccttaatcttatgaggaaaggccaattaactttagaatatacctattaatttgtctcatcttggtaggtgatatattatatatatttatatatataggcaccatatggaacacatatagctagctcttttgaccatttgcaaaatatgggagaattttgaagaaccagcaatatcttcacatggaaaagtttcttttcactttttgccctaaaacattaaataataaaattccaattaaattgagttaagaactaaagtgattttggagggatgacaataaagaaatcagtgcaccttggaatatatacatatatatacatataaaaattattatgtgatttttgtgaatagcgtaaacttgcttcaatggatatctaaagctaaacatcctttcgtagtataagaaattgattagctagctgaggtttgaaagggacagtattatcctccactttcaataattttggtcttcatcatcttctattctaatccatacaaattaaatactatatat

SEQ ID NO: 8556 - DNA, 1113 bp, Cannabis sativa
agttttctgatgtgaagatgagctgagccagcttttcttttataggtgaatgaggctcacaaaaatatgaaaaaaaatacaaataagtctttctttatcgttgatgatgatctagcagtgagaataacttctggtgatgatagctattttttagtgctcggggaatccagttgcaggttacttgaagcttattttcataactctctaaaagtaaattttgatgacgatagcttcaaaattgcaattgaagtgtgaaacatgacttgataaagcacttaaatagcttcaaaatccaaattgaatcacatcaatcatataaaaattgaatgagttataaccgttttactgaaggtagttcatgtcccagtgcccaaattgaatgagcccagcaccatgcatgtcaacttaggtgttggaccctgcacaaggtcaacttgggcactgggcctagtaccaggtcaacttgggcactgggcccagcaccaagtcaacctgagtgttggatcctatttctagggactcagatttgtagtatctcctcgaatttacttgaatctttattatttttttatgacggtgacgatgcccgaagtaatttttgctaaattgaattggaaatagataggttgacaaaatatcaactggttctctcttctgcccctttgaaagttccatttggtcctaaaaaatagttgaatctcaatattttctgaagacggagatggtgctcaaaaaaattatgagaaaactctattttttgtggcccatgttggaaaattatcaacattggcgtagggctagcaccaagtgtcaacctaggcattgggccctattttttatgcctagaaattattgtttttccttcgaaaggacctatttctctatttttgatgaagacaaattcaaagtgaaagtagaatcttcgattagacacttagaaggccccaagattgatagattatcaacctaggcgctgggtggtcggggccccaggaccctaggtgctaaaaaatcaacttatttcgaatctaattctcatgcctcaaacatgtacataatatgtcaagtcgatgtcccaatgcaattttcgcccactttgtactaagacggtcc

SEQ ID NO: 8557 - DNA, 867 bp, Cannabis sativa
attcatcggtttacagagatgagattttataaattttagctttcattatttaatttatagtcttatttgattttgacatttactgaagtacgatgtaattcaatattaatcagaacacagagtatgcaaactttctgttctctctattttttttttttttcggctcagttttaaattttttattgctccccctttttagtatagttttattgtgctttgaattagtggttataactctagcagtcttagggaaggataaaaaagaactaaacttagtagtttaaagcaataaaatgaagagattttttttgaaatatatagggagtgtatggtggggttggaactttccatctagatcattacgcactctaacacaccacactaatcaccacttctaagcttaacaaaaattacaacaatagccaccgcgtcaagtactccaagctcaagaagtttttctccagcaaaattctcaccttcgccctggccactgccattggtatcaacccctttgttgcttttggcaacgatctatgtcgatgcttttgctggaaacgatgccaggtcaagtgaacctaataagagagaataattgtgtactctttgagatttgacatcatggcgatagatccgctattgccagtaatcaaacggctcgcaagaggccaagaaggtgattcggagaatggatcttaaaataataacaagaaaactttaaaaataaataagttaaatagataaaaaaaaaaatctcatgcatctctcaatttaaataagaacctatatttattgatgtggtaacctcttgtgccccaacttgtgaggcattttctcctacccaccataagaaatttcaatatatatata

SEQ ID NO: 8558 - DNA, 605 bp, Cannabis sativa
aataataataagaaaaagaataagaaaaatgaaccgccatcaccaccttcatacccaatcataggccatctccatctcctaagcaaacaaccactagtccaccgagcattacacaatctctcaaccaaatacggcgacgttttctctctacggttcggatcacgccacgtggtgatcgtatcatctccatcggccgtacaagaatgtttcaccaaaaacgacatcgttttagccaaccgtccacctcttatcctgaacaagcacataggctacaactacacagccattctcacatccccttacggcgaccactggcggaacctccgccgaatagcggtggtcgagatcttatcctccgcccgtctcaacctctcagtcaacatccgcgacgatgaaattaagcggctccttcgcaaactcaaccgagttgatgagtttggaagaagagtcgagctgaggtcaaagttaagtgagctcagtttcaacatcatgatgagaatgatggctggaaagaggtattacggcgatgatgttaccgacgaagacgaagctccccggtttagggagatttttaaagagattaatcaggtggccgaagctgacaa

SEQ ID NO: 8559 - DNA, 736 bp, Cannabis sativa
cattctttctgcaagtaattcactttctttccctgatatctttttcccacaaatggggatcccagtaaatgaaaggtaaatcttgcttggtgaagccagaaagatgtataatacaattcacaaccacctgctgcatgttattgccataaatagcagtttttgattcatttggacataaaccaaatgtaacagagaaagttttaagagcctgcaatttcataaatattaatcactccaaaacgcacacataactaaacgcgaagaaaattttaaaacccaccaatatattcccccacattgttcatcttaatctatccatatctttaacaaaataaataaatcataccttagaagcatttaagctaagtcgagttcctgggttgagattttggaaatttcagaggtagtggggtcaggctcccccgtcgatgacaaaagtggcaaagacgaacctcgttgtgggtgtgggctcttatgttgacgactagggtggcagtctgcacatgaaaagaagggcgaggttgagatcagaggagaagaagggctaaggtggttgtccaattttcagttagagaaggagagatcgagagagagaaggttgaagaaggagagaggaattgtttgttctgggctaatctccggcggtgaagcaccgacgacgagatggaagggctaggctagttctggtttggtaaggaagagatggacttgggaaaaggaagagagagagagagag

SEQ ID NO: 8560 - DNA, 670 bp, Cannabis sativa
attttcgcattcaaaaacacacgttaaaatattttttaatttcataacagtgtttgttatcgttataacattattgtaaatttttaattttttttaaagaatttacaatatcgataaaagttctgatattttaatttattatgtatgttcaaagaattttaaatttatttttgacattgtaataatttaaattttttaaaaaatttataagaataatttataataataaagaatcacatgaaaaaaaaatataataaaaatattctagtatgaatttttagacacgaaggttaaaaaagacagaaagttctgttcactatctatttgtgcccatggaaaaatatactagcaattattgtttagatagcagtattggctaagggctatccttcaaaagtgaaaatttattagttacattatgtatatatgttatttcatatgaaaatggaagatttttgattcttttgcaaccatatatattataaatatatggcaccaactttgtaaaaaaaaaaaaaaactaacaaaaaaaaaaaataggtggtaaatgaacttcacaaaatagattagaaactcaagtaagtgcaaataattgtggaaaaaatctcactaggaaatatagcttccataaaggtacctcatataatatatgaacacttttttttttttt

SEQ ID NO: 8561 - DNA, 788 bp, Cannabis sativa
gcttcatacttttaattcttaaccgcctattacaatttttatattcgaaagcacatgttaaaatattttttttcatggtatgtttattatagttataatattatttatataaattttttgaaaaatttcgaatagtttacttgaaaataaatttaaatttttttatatatgtgcagtaaattaaaatattaggaaatctgtttcaatactgtaaactatttataattttttagaaatttataaagattacattataattataatgaatattgctataaaaaatatttaaaaaaaaatattctgacatataatttcaaacttgaaatttgacttaaaagttttaataaataagtggtttatttgaccttaaatcgtacgtttaggataacttgaagccctttctctagtattcaaagttcaactataaaactcttgaaaactcactatcaatatcataaatatgcagacccagggaagattgcattgaacaaaaacaaaaatgcaatgcaccaaaagacaattaacttaaaacaatatgcggttagttgttgctgaaccatgttgggaatatgcaaactacaaattatttttctttcttctttctccttctgacaaacaatataaaaacaataaagaattgaactttagctttgttcaactcctgatttttctgttctgtatgtatttttttggggggttgagttgttacaagtacgtacttacagttacagaggattaattgaaaagaattaaagggtttgcactttgcactaatctaataacgtggc

SEQ ID NO: 8562 - DNA, 555 bp, Cannabis sativa
aataaactcgatctcagtataatttgagtctgggcccagtacgggtctgggcatcggtccagtgtttggtctaggtcccgagtcctgtcagaagtctgggtctaggtcaagcctcgagtccggattgggtcccgtgtcttgggtcccgggtccagattggacattgaagttttgtatttattataatacaagttaatacaaaccatttgttatgtattaataatacaacttacattgtattaaaatttttaatcttaataattaatacaatacattgttttgtccaaacatagtattatttattatttaatacaatattacccttatccggcctaccaaacaagctcatagtatgtaaaagtgatacttgaattgttaagaattaattaattaccattaatattagttaagccattgtgattgcattgcaatgagatgattacattgtttttattgttggtctccatgatcccaacattagggccacttgccacactcttattagtgttactaacccttttaaagggtataaatacaatatgataccctctaact

SEQ ID NO: 8563 - DNA, 679 bp, Cannabis sativa
aaaaaaaaaaaaaaagatagatggacaagttattatgtgcttcttttgtttaatatttacatattttgttttaaagggttaagagttgaaaatgacttcggagaaattttcatatttttatggtatggcgctcctatccgatgcttaaagtgactttatgatatttttatggcaacggggaattaatactcttttacaaatacatgcttaaagccattaatgtctatttatattatatgtaaatcattggggcctacttcagtatggtactgcatccaattctatattaccaaacgaattgatcagatcacgtgaatggtgaaggtgaacccattattattgtaatattaaaaaataattataataataataattaattaacagtctatttttatttttacttgagtatgagttttttttccgaaaagggtagagtgagttaattgtctattatatatattttccattactgtctctcaagtgtttgaaccatatattacttaatattactatataagttgctgcagtgaaaaaaataaaataaaataaaacattatgagagataattaatggagttaaattagctttttcaattcttgagaatttaaggtaggatattgaagattcaattagtgcccctttaatataatgaacgtacgatctagatacaaaaaatgac

SEQ ID NO: 8564 - DNA, 832 bp, Cannabis sativa
ttattattagtcaaaataagcaatcatgcaattccttctgttctaatatgccagccatattattatcaatttgttgtgcaaaattgcctaattgactcaaattaagatatatatacttgtatacttctaaacatactttcattttcacatcaatcgataaatcaagtaatcatagcacatagaattatatagataaaaaatattatatgcatatgatggaaaataaagttgagtatagctagccaaaaaaaataaaaaatatatatataataataaaaatgataggtagacaagcaattaagaagcaatgcaggacacattttctaccaaatccatgtcacggttgtatagtactacttcatctcctttttgtgggtttagaggaaaaagctataagatttgtgttccaccaactccacatcttcaacccttatccaaaaaccctcctccatttatttgatataggaattttttttaatatgttttaatttttgtcatatttagagtaattatatattttttatttagtattgtatattattataataaacaaatatctgatttattttagaaaaattttaaattatttatagttgttgaaaattatggaatttcatctcaaaaccaattagtaataagtggaataatccatctttttatatatagctcgatatttttacatttgatccgcgtggataatattatctaatattttttctcaagatggtagctattttttgtttttgaatcaccttatcataagtagtgtcatttgtttgtggctacaagttctatttgctcatttgcggatggttaagtactatctaataaa

SEQ ID NO: 8565 - DNA, 920 bp, Cannabis sativa
tgaaaattcggcaaaactaatttgtcagtcatcatgttgtcgcaaatgtccacatgaagcctagaacttgcgctttttgagtttttcgcatattttgagattctaaatgatgtgaaagcttttcttagttcattctttgactctggcaaagttgttcactgtctcttgaaaattttactcgatgcgcgcaagagatgtctgagtgatcatcgattgagactagaagacgaccgggtgatcactagtgcacgtaagtgtcagtgaacttgcgtgtgacacatgtatatgagatattgatttgcggaagcatccaaatcttatattggcggtaaaataagatcgatgcccgaaacactgagctccaagttaatgttaacttgggcgcccagtgtggtgtctggtggtgcctgggcgttgaactaccacttggatgatattttcttctaatttcaagtctcaaatctcatttcgggagcaaaacaagaataatgcccaagatagaatcacaatcaaatcgcgtggatatgtcaacttgagcacccaaggcacattttccggcgcccatattttcatccgagccttagatggcttcattttcttcctgaaagcactcatatcttcattgttgacaaaaaaataagggaaatgtctaggagacttctctagataagtgtaccagagagtcctgggtgcccataatagcctgggggctgtcactggttgactaggtgggggaaaagtctcttgaatttatctaattgatgttcaatcttttttttttttttggtgaaaagtgctgaccaaattttagtttcgtctaattcgcatgggcgttactcggtgaagtagaatcaatgctcaggttgcattattaacttgggcgcccgtagtttgagatgggctccttcgggatgtcgttg

SEQ ID NO: 8566 - DNA, 860 bp, Cannabis sativa
aattttattgaatggggattttgttttctcgggactctgcagataggggctctgggcggctggccggtcctaatttggagaacgctggtgcccctgattcgaaaaacttacgcgttaaggtatttgtgggaaataatgctcttatttggtggtttctttatgctctttttagttcttggttggaattgtttactttagcaagcaataaatccacggagtaaatttgagttttgcttattatattattaattaatggcctcaggagatggttttttcaagaatgtaattaactcctcatttgttgttactgctaacagcttgttctattgggtgattctggagttggtaaaagttgtattgttctccgctttgttcgcggtcaatttgatccaacatccaaggtgaggaaaatgtcacttgtcttgttatgctaaggataaatttatatatttgatgagaaattccttttggtgcccaagaagggcgggccatttggcctggcctgtggtttttgctctacaggtataaggtttaactccctttctagatacccactttgttttatttcttgtttcgcaaaagtctatgtcctaaccgtaaaatggaaatgaggaggcgtccccttctgtacaacttgtttacctgacaatctggcattccgtttgtatatgtttgaatgttgtagttaaaattttgaaaaaaattatcatgtttcctcattttgtaatttcaggtgactgttggagcttcatttttgtcacaaacaatagctcttcaagattctacaacagtcaaatttgaaatatgggacactgctggccaagagaggtattctttggcaagatttttttttttttttt

SEQ ID NO: 8567 - DNA, 1450 bp, Cannabis sativa
tgaattcataaatattagctctccacttgtaaccaaaatttaacccatcactccattactataattggtatggtgagttactcattcatgaattcataaatatagaatgccaatttataaccattaaaaatataataacttacatgattgtgttactataataatttacccatatatattagattattggtacagtacattgcacgtatatttaagttatatttttagcttttaaaattttttttacgtagttttaaaattttataaattaaagaaaaacaattacttaattttttttaagaaaaataatattttaagttttaaaaatttgagaaaaataaatataatgttttaaaatattaaaattgaacacaatcccaatattcaaaataacaataaaaaataataatgttgttgttggaaatgcaaacaaaatcctacactggctaaaaaataggaacgattatgggtatataaagattgacatataccactagcatgaggccttttgggaaggttcctaagaacaaaatcgtgagaggctaagtctaaagcaaacaatatcatagtggagatggttggtgtccaatgatccttgacaaatttgtatcagagcaagatcccaacattagccatatgaatgaatcctcttaaggtgatgtgcctcggtgtactggcatgatatcgatggatgtgctcagctaggcggtgtactctaactttttctgcagttagcctagtaatgatcaagaaactctcgaggtggtggtggagctccatgtaaggcgtgcgttccaacgcattgggggaaagtacactagttggtagagagtggaacagattagaggtcttgtttggtgtcttgtatcgaaagtcttcctgacaaagaaggtcaggcgacatgttccatttagtgatagcagcggtgcaagatggaagatcgttttaggggaggattgttgggaatgcaaacaaagtcccacattagctagaaatgggaatatataatgatggacatatcttcattggtatgaggccttttgggaaggtacccaagaacaaaactgtgagagcttaggcccaaagcaaacaatatcgtacctggagatggttgatgtctgatccttaacagttacaaataaatatattaatatatatatttaaattaatttaaaattagtataagttcaattattctaaaacacataatattaatatttatattatttaaattaatctaaaataaaaaaaatactaatatttatatatattcttttttataaaactaaccctactaataccattaaatttaacaaaatattcttatatttgtaaaatattctgctacaccaataaaatattctacaacttagatttaactaaataactcaattttgattaacaacgtaatactgtttaataaaaataaaatatattatttaatgatatg

SEQ ID NO: 8568 - DNA, 1836 bp, Cannabis sativa
gaaaagctattttctaagttagaaggattaaaaaaaatctttatattttattatgtttagggtcactgtcttgataccaaataaaagtttatgggttatactttataaagccaggaccaggccttccacaagctcaagcccaaaaccgtatgaggcccaagcccaaaaataaagtccatattccatagctctaatgtttcttcctattttactagggatttttaaataaaatgtttgattagtaatttttttaaaaaaaatcaactttaaatccataaaattatttaaaaaattatataatttctattttttgtataagttattattattattaaaaatttccattaatttatacaagaatgggggatgtcacagtatttatgacatgaaatctttgttactttgtcaactcctgaagttaatgcttctttggatatatatatatatagattacagagtcaactgttgacactgacacatactcctaattaagattgacaattacagcttaacttgtttcttcttttagttgtcattttagcataatagtttaagctcaaaaagattggttaccacatcaatggatattacttatggaatctggtaaaccaatcctttctgtttctattgactcaaaacttggtttggtgctatgaacactaataacaagtcaaaatcataaaaactaaatggatagcctgaaatcttgagaaaaatctcaaaaggcctctcaatcctcagagtagctaaatactaataattaattattagaaattcaagaatagtaggaacaaaacttgtaaccagttaccagcttcaatatttatcatcatctaattatataaactaaatatgtgacaatgcccatgataattaatgacaataataataataatatttataacactagctggaacaagagagaaggacctcttctaagtcttaaaatctctttccatctattatgtcagattcaagctaatgctaagttgaggaggaagaagagatgacatgacatgacatggcttattcacttgttctcggacgcttcgagggttgggagccggccccgcttgcatcttgcccaagatcatcagaagctttattttcttgaggtgtctctttctgctgcttgccaagctcgtcggaaccttcttccgagatagctttagcattggttggatcagatttagttttcccgtcgttgtctttccccgatgcttcaagttcaccttttaatgaggaatctggaattgcatcaggagagggattctccaaagaagatgatgaagcctttaacttgtccattcccgacttgcattgtttctcgaacatcatttgaaggtaccgcccttgctcttctattcgcaactgcaggttcctttgtatctacagagaattagagacagttcagtaccacaaagaatgaacaaaccctttacatagaataattcatgtatttcgaaggcaacgattcatacctcaagctgttcatgcagccgcttctgcacttccatttgcatccgtagagcttcagtgatctcaatacccctgttaagcaaatcacgtcgatacttattcagcataacaaattgaaccttcaacaagaaaacattttaaaggtggaaccttttgacaattcgactcttttataagcacaactaaatggacaaatttctagaagagcctgatacaaccacttgagtagaactcactccaaaaagctaacctaagggagcatggtgcccaagtagttttatactacgaaccaatctcatactttggagccaacatgcccactctgtggtggcctactctaggctaggcctaatccac

SEQ ID NO: 8569 - DNA, 971 bp, Cannabis sativa
tcgtcatgtattggatttttgcctcttaaatgagctgccttttgaaggtgattcgttcacttggattaaaggaaggcataatgtggacaccattaaggagcgcttggattagtgcttttttgtgtatgatccaccaggattatctatttttgttataactatgctcattgttgtcgtacttgtgctgggtttacttcccaagccagttttcaatagcttcatttgtgtcctcgcttcctctttacgcacaaagacttgtgctcttttattgaactcgttgatgttcctcacagggcgaccgtggagatcatcccataactcaactccttccatagataagtcagttgtgatccctgcttgaagtgttgttagttgaatactatcattcaggtttctgacttttgtagcatccgtactgaagcaactcaagtacgccttaagagattccccaggttgttgctttatgttggtcaaggatgacactttaggtcgacggcctcttgcaacttgaaactgctttttaaattccctcgatagctgttcctaagatgttatggaatgatgggtgaatttatcgaaccaactgctcgcatcccctgttaaggaggttgggaataaaatgcaacgcaagttattgatacattcctggctcgcataatagtgttaaagttgtttaaatgagtgactgggtctgtgggcctatcatactgtgagacatgtgggttcttaaatccatgaggaaaatctgaaattaagatatcttgatggaatggcttggtttctttgtctgagtcatatcctggcaatttgtcatgttctccatcttgatattttccgaatttatcctctagttcaattatttgtagctggatggaatccacttgttgctgatttgcattttgattaatttaattgtgcaaatcaagtgcatttcggtttagacactcgtgaaggtcagactgtctttgatt

SEQ ID NO: 8570 - DNA, 1376 bp, Cannabis sativa
ggccacggccacgatcactacagtctagcccgtcattttcaactgttgaaatttttttccccaacatttttttaccgtcgccaattctacccagtattcacaatgctgatataggtgataattttatagaccgttgagaattctttactcaacagtataaaactgttagaaattctaagtttttagtagtgctagtacctaaccaaaaatttcaaaaaatattatatgatgtaattttgtcctcattaatacatttaaaatgtttattttattgatatttcttttctcttattcgaattttccccattagggaatgcactttgttcaccttatattgatcaaacggttgttattagagcatctctattaaatagtgggaagttaaaatataacttatttaacaaaaagtgtgttataatagtgtgtcaaaaagtagtgtaaatttggcacagtaaatcttgtgtcaaatttgacacaacatttactatgatataaaatttacatcacaataaatacattatttttttatttacatttatgtcatttgtgttattttattagtaaatttaattataacattaaattatgaaatattcatattattttttattaacttacatattagaataacataataaaattgataataaagttattagtttttatatttttaataaaaataataattagatattaaattttacattaaaattttgcaattgtgtattggagcacaatgttaaaatttgatgtaaatctatcacaaagctattttttttgccaaatatagtacaaattttacatcttcattggagatggtcttaattattagccagttgccccacatggattaaatataaagttttatatttataagaaaatgtgctacttcattcatcagtgattagttttgagatgaaatctcatgattcttgtcatggtattagagttatttccttaacgaccgacattcgatctacacttatccagatagtaagccagaaaaaaaaaagagtgcatgcacaacacgagacttgcttagtgcaaaaagagtacactagagatccaaacaaaataagtgagctaccatttttaagggggatattggataatattatcttacgtggattgaatataaaaatatattgaacaatttataagaatataggttattttactcatcactaattaattttcaatggaatccaataattttttttaggagaaaattctcaaccaccaagtaccaaaagcaataaacactttaaaaaagtggggagcgatgatttattcaagtatagcatcttctaataatagttcatggatacctagaattacctggccaccaaattacactactattagtcgataaagcg

SEQ ID NO: 8571 - DNA, 837 bp, Cannabis sativa
aaattatcctaaataatatatttaaactttatattcagctttataaattatcctaaattttttaaaaatttacaaatattttaaaataagtacaacttttacatcatgagaaaataagattaaactagaaattttttttagatattgaaacaagtagaaaatgtattagcatataacaaagtgttatatatatattttattttattaattaagatagaaattacttttgattaattatttaattaattaattaataatgcagatgttgatgagttcatcatgtgaaacaactcaaatgattaatgatgaaagtaataataactatttgggtagtggatcatacgttgttggggttgggagattatcaaacacagcagcattgggattgggattgggattagaagaaggaagagaagcacgtgtttcgagatacagagagaaaagaagaacaagattgttttctaagaaaataaggtacgaggttcgaaaactcaatgctgagaaaagaccaagaatgaaaggtaggtttgtcaagagatcttccttgacttttgttaataatccaccattaccaattactactactactactacctctttccctaataagcttaagtaatgttaattagcacaatgtttacatagtatatattaatcaataagttggtaaaactctaatactcttttgagctttcataatgttattaatgcaattttgtatcgggttttatatattttgaattaaaatattttaagtgtactgtaagatgtatatagtttcattacaaaataatttataatgtgaaaagagtataaagtctatggtataaatttttt

SEQ ID NO: 8572 - DNA, 640 bp, Cannabis sativa
aagagctcattaaggctgaaaatgaacttgatatttctgaagcacagctggcaggatatgaaaaacccttggtagctcggctgggtttgagtgcagcaaaggcatgtactaggttccagttgttattttgtgtgttgatttatatgtattttggttcctctcgagatggctcttgtatataacttttcatgtttcccttatgttttttttttctcttccctttcccatttttatctcaagaaatggtttcttatttgactattatatgcatatatacatatgtgtagatattcttttgctcaccttgctgatgaaagttttgctgtggttgacagattaaaacccttgcaaaaaatatgcgtgctattgcaaacatggaagatccaattggtcgcgttttgaagagaactgaggtaaatgaatagagtggtaggacgattaagtcaaatcttttttattcacagagcacactgcagatttggattttattctaggaattgaatcaaaactcaaccattttctttaaatgttttacgcttgaaatgttggcggtcttcactatgagagcagtgaaagatggtctgtggtttgagtatctttttgaattttattaccctgtcttctctctctctctctctct

SEQ ID NO: 8573 - DNA, 2322 bp, Cannabis sativa
aaaaaaaaaactacaatacaactattagcaaactattaacaaacaacaccataccaagcctaaacctaaaacaatataaatactcattgaaaaataaagtctaaaatttatagaaaaatacagcaaccaaacaattatttatataaaaaaaaattaaaaaataacttaaatctaataatattctaaatcagtaaacctaccactaatataacaacaaaacaaatacaatatatgaaaccttagaactaaaatcacatgtaaaaatactaaaaagaataaagacacaatttctaaattacaacaaaatggaaaagaaagcttaggcattttatcgacattcttctctcctttcttaacttctggtacagatcctctttaatttcttcttcaatggacgaccttaatgttttgttactggttcaacgaaatctttgtcagagtcatcatcttccacaataattgtttacttttaccttttttggccaatgatttcacacccattgttgtaggtttagaacttttaaaaattggcttcttaacactgagttttttgcagatgaagatggagaagaagaagaacgggtgacaaccatttatatagaatttgatagaagaaaaaaacaactgagtgagaaatagtgagctggagcttcaatggaagttggagatcgtgggggagcagctttttcgagataaatatttttttgattgtggtgaaataattcaaaatgaaactaaaaatgaaaaatgaaaaggaaaagtaaaataaaatgaagaaaaggtatagaaaagagaggtagaaagtgttgagtgttattgtagaactatggtatcagcacttttatagtttatatgtgcaaaagatatttttgtaaacaaaacaataaattttattgtataaaagttttttatccttgtgaaatgaaagtaaaattgtaataaaatataaattttgtattttttatgtaaaatttttttaaatatattatcatatttataaaagagtcccatgagtatgcagccaacttttacactgataaaagttgacatgcgttcaggaaatagactattgacaacagtaaaaagatataaagatattagtttacattattcataataacactataatatttctttgagtaatgattcaattttgtttttagaatttatacaacttttatttttttttcacgtaatgttataatcaatagtcttgatattaagccaatatcatgttttaaaattctcaagatttattttttttaatgcttaatgttgacggtaagaacttatcaactaaattataatcgaaaaatcaaatattaagaacttaagtaaagatatttctctaaagattcagaactcaagtaatagtggtaatgttgttctattgaatctcaaagttctcttataaataattttttccacccctttacaagtattcaaatgaggtctttatacttgagttctaatgcctctgaaatacaagtggtcacaaaagagattaagttctgtttgtaccatgaggatcagcatgtcacaatggtagtggaggagcgttggttggatgccagcctgtacctagagtgagacaaatgatgtctccactagggatgttcattggatcgcatccaatagatttagacctagccgatccaatctaattatttattggatgttggattttatcaatcgatccaatccaattgaattgagtcaacctatcttatccgatctaatagatgtgttggattggatcggttctaaccattgaatacattgactggttttctattagattggattggatccacccattcttttttagccatcatttaggctgaattttattaacaaaaattatatatataacaaacataatttaaaacctaattcttataataataaaatacaaatcaaacatacatacataataagcattagtttagtctaaactaattttcatgatgctataatttaaatataacaacacaaacacaaatccaatcctccataattaatagtttaggtttatgctttttttagtgtgatctcatgtgtgcatattacgaataaaattaattaatatatttttaaaatataattaataaagatatttaaaaaaatataaaaatttaattggatgataattggattagttcagtttggttatccattagattgtatgtccaatctaataaccaatctgatgcaattgtattttcagaatttacatctgatccgatctaattataattggatatctgattctattagatcagttgtgattggatcgaccagttgtaattgaattggatgact

SEQ ID NO: 8574 - DNA, 637 bp, Cannabis sativa
gcaggcaagccactctcaatcaacgatggagttaagatcgaaaatcccacacactacagaagcgttatcggagctctgcagtacctgacacacacacgtccagacattgcatttgcagtgaataagttgagtcaatttctcaaaagtcccacaactagtcactggaatgcaactaaacgaatcctgaggtacctaaaaggaactgtccaccatggcttgcacattggctacagtgacaatctaaacttaattgggtactccgatgctgactgggcatgttgtccagatgatcgaaagtccattggcggttattgtgtgtatttcggagacacccttgtgtcatggtaatcgaagaagcaaacagtcgtatccagatcaagtacagagtccgagtatagggccctggcacaagttacgacggaaatcatctagctcgaatcactgttgcaagaaatccagttcaaacctctctcaattcccattgtttggtgtgataacatgagtgcaggagctttggcatccaatcctgtataccatgcacgcactaaacacaaagaactagacattcactttgttcgtgatcgagttttgcaaaagaaaattgatgtccactatgttccctcatttgactaaatcg

SEQ ID NO: 8575 - DNA, 615 bp, Cannabis sativa
ttccatggcgtactccacctggaataaccgccccgccgggctccatgtcgtcacatccgtatcgtactgattcctaaacatggtaacggcgtcgtttcaggattcgaactgcagcaaatgcctctgtctctataatccgagtcaaaaaataaaagattgttgtagagaaagaaagactgtaaaagagattttgtttctttttcttcaagccagtcaatggggttttcctcttcaacaagtttcgattgtactttctttgttagggctacccaatcataagacagaaacataagcccgtagttatagtactgggcttcctcgaagcctaatggacttttttcagttcactacaactttctgggcctggtgatgtgtaaggacatacacaaatgatattaagactaatcttgtagtttactgagctgttagcttagtttattgttagttacttcttttttttaagtagaactgttagttggtacagtaaaagattagttacactataaatacttgtaactgatttcgtttgttttcgaaagaacaaaaaaaaatgagagttcaaccgtataataatcaaaaactaattatcctaaaaataaaaagggaaattgtcta

SEQ ID NO: 8576 - DNA, 852 bp, Cannabis sativa
attatatttataatcgaaaggttgatggaaattataatcttacataatcaatttacaacaattaaagaatgtattctttgaataaataagaaccataatgaaatcaagattcagagatgaacatgaatcttgatgatgaaaaaacattgcatacatgaatataaatgataacgtattaatgctaacgaaataatgatgataaaaaatgacaataaacttattaaagataataaatttaatcataaaagatgcaatataaattaaagataagggttaagagaatatgatccattttggggggaatcaaagcttgcacaatctaataattgctctcaaaaatatctattcctaatcctccataaatgattgaagtttatctcaaagtaatagtgagaagtgagatatagaagccttgtgaaacttagcgcacaagttgagcatttttagttcgtatattgggatttgattatatcccaagtacgcattcataaaactaagaagttcatgacctggggtaattaacatcaacaagttagtcaatgccaggtaaaggaaagctgtccttgaaacaagctttatttaaatctataaaatcgtcgcatgtgggccatgagccatttagctttggtacgagaacaagattggctaaccagtttgagtaaaatgactcctttatgaagccgcattccaacaagcggtctacttcttccttaagcgcttggtacctcgcagggtccattttgcggtgcttttgtcgtactcctcacgcatcggggtcaatgttcaagcagtgactcatgacctcgggcagtatttcgatcatgtctgaatgtttccaagcgacaatgtcca

SEQ ID NO: 8577 - DNA, 920 bp, Cannabis sativa
atatatattaaaatagaatcggttcaacaaataatacataataacccaaactagttataactaaaatagaactcgttctataacataatgaatacaaacaaataacatagaataactcaaatcggttataattaaaaaaaaaaaaaaattgttccaacaacattgagacataatttaaatatcggttttacacacaaaaaaaaaaagaataaaaacatacaacaaataactactcaaaaatcagttataatttttttaaaaaaaagaaatataaatcataccacatcacaaatactagtgcgttttattaggagatccatttgaaactagctgcgaataacaccaataaaatgtaacacgatctttaactaaatcgaaaatcagcttagaaagaatacaaaataaatacaacacgatcttcgcaacataactagcaaaatcataatttgggtcaatattcaaatatgttggatggaaaaaaaaaaattaacaatataaaaagtatttggaatcagttaatattaataaaaaaaataaacaaataaaaaatatatacaaacaaggagtcaattctaaaaatacttatacataaattaaaacaaaatcggttccacaataaaataaataaaaacaaataatacataataactccaaaaccggttataattcaaaaacaagagaaaatcagtttaaaaaacaatggaacataaatctcgatcttctattctcagttgtaattcgacaatcacccatctgattcttcatcgagtacaataagcaaactactttccacacaaaatatcaaaacaacaatgcaaaattaagtaaattattatatgaaaaaaagtaaacttaatatttttcatgtaatgtatgtatatataaatatgttgtctaactaatttactatcacaaaaaaa

SEQ ID NO: 8578 - DNA, 605 bp, Cannabis sativa
agattaaaacattcattgcattgccacaagtattacaattctttctttttactacaaaattattattattattattagattgacacggctaacctgtttattaaacgggttatttttttaaatttgacatgtttaactaaaaaataatatgataatgacatatgtaagagtatacactcttaaattcattaaatttattacatataaattatattttttttagttaaatagaatataaatatattaaattattcataaatgtgaaaattaagcatataattttttatataaatgggtcaaataaatctctttatttatatatagtttgagtttgaaatttgattgtaatacttaagtctcaacacgacacaatttaaccccgatccacgaacacgaattattatcccttactgttgctgacatatatctattggtattgcagaagaagaaaatatttatagttggattgaatagagtgacttattatgatcaagtataaaaatagatatatgtgagtgaggacctatcatttcctaactcctgattaagatatatataccattaatgtctaagttatcataggaaacgacaaaaatatcttagtc

SEQ ID NO: 8579 - DNA, 792 bp, Cannabis sativa
ttatttgagatatgaaaattatttcggcattataaactgttttaggttggggatccccatttaaaaattttacaaaaaatgtcgttaacaatcttacaacaaaatactcatattcatcaaagtcaccataagaaaaatcctgactattcagcactgctagtcagttaagtcgatatgtacatttgtcgaggataacctctaactcatggctgacctagctcagtcctttccttacttttaccacaaagcactcgtgagtcacaaagactcagcaaatgcataaataatagacatcaacacatgtagacataatcaaatatgctcataaaaaaaaaaaaaaaaaaaccaacgaaaatgatcattaataacaaatacttgtctaataagacaaactaaagttgttacttaataaagtaatcattactcaccatttcccaatgagacaaccttaatacccttgcctaacgagacaattcaatgtcactatcattgcataatgagacaactgataagtaagaaacctaacaacggttttagattagagtaatgactctttttaaattgttgcctgataagacaaccaatagagtaataactcttcctcatagacggtagctaccaaatcatatattgatgtgttatgtggtacaattatacttttcttaccttaagtccaaattcaagcatgtcgatcaaccttagtggaaattgttcgacgatttgggctctatgtcacatctgcggtaaactgtaaacaactcattctaatccattctaggacttaaactcaaa

SEQ ID NO: 8580 - DNA, 984 bp, Cannabis sativa
atattaactttgcaacatcgctagagaagtggataggtaaagctcctatcatagtttggagatagttccatttacacaaatagtttcataagaagaaataaggaaagcaatgtcccaaatggatttagataaaagtttgggaccagacggtatgacttatgcattttaccaaaagtgttggtccattgtgagtaaggatgtaggtggggtggaccaacatttctttgagattgaggagtttgagaagggttgttgtaatgaccgcatgattagattatggattagcgaatgcaattggtattaattgttgatatttaatgattatacatgagtttatacctattgtgggtcccatttttagaaatggacattagaattgtaatttctcaattatggtaattttgttaaactctaagtgtattatttatgttatatgcaaaatttacagtttttatgatttttcgttcggcgacgatagaaaatgcgacagatggctgatttagtcacatgaattagcttagaacctttttatttagcaaggtattcataagttgatatttagaatatcggacctaagccattttaccatttaagcacttaagtgaggacattttagtcattttagttttgaggctaggtggctgattttctaatggacggctggccaatatgtgttgtttcatcctaatcctattattaattaatgagattaatcaaattttaaagaaaaaaaaaaaaagaaaaaccaatttttccttcttctcccccattccccccccccccttcaaaccttagacggaatcagcaacaaactgagatttgttgagcaaattttgtggagttctagcagaattcaagtagtaaggacaaaaggtaagaaccctagaacctatatctttaagttttgttgatttttttttttagtttcaagcatgtaattgttgtactttagttctgtcagaaccctaggagttaggggatgtt

SEQ ID NO: 8581 - DNA, 535 bp, Cannabis sativa
ataaataagataattgtgaaaggactctaaatttaggtccttgagcggttcccacattagccttaagacgatattttttagctagaaaagtaaatgtttgagctagataagcaatattattgaactaatagtgtttaccactacctaaaatgttatgttggtatctgtacaatttaatatttaatatttcgtatatgttagttttaatagtcgttagaaaaagttgttaactactcgtaaagtagtattgagcaccactaatacttaaataataacagtgttgttgttagacactagtggtactcaacatgagatgaaaaagcttataaaaagtgaaaagtgcttaataataatagtactgttgttaaataccaatattgctcaacatcatcacgagatgaggtgaaaaaacttatataaaaactgaaaagttctataatatctagaacaaacttataaaaggtcatccaaatattgaacttaattagatgataaaagtatggaactataaataattaaatttcatgcatattat

SEQ ID NO: 8582 - DNA, 661 bp, Cannabis sativa
gtggtaggaatacaaaacacatattacctaattagtgaaatgaggggaaaaaaaaaacttataattgaaaataagtaattctaattgcgctgacaaatggctgtgtgatcttagcaactcacatgtaattgtggcctatgactccatttaagaaagattttcttatagagattaaaaaaaaaaaaaacacttttgaaagtgagtaaaaaataaaaagatttctttttagttgttaagactttttataaaggataggattcctaccttataaaagaaattataagaccttattaaacaagctacaaccaaaagctttgccaaaggggtctcatttgacataaaattgtacccaattttcaagtatacttagcagcttctgctcctacagatgaaaaaaatttcatcatctaatagtagttccagcaatatctatgtgcatacataatctatatcaactcccaaatgaagcatacatattagtttaacactaatttcccaacttcctatagctatagtaattctcactccctccacaggctttttcccctatttttcgtattggttttctactacaacagaacacacccatgatcattcaccaggaacctcctatcataagtcctatgcctctatttcacattcaatgatttgaaatctatta

SEQ ID NO: 8583 - DNA, 947 bp, Cannabis sativa
gtccattttctctagtatatatctggctggtgtttctagtttcttgcgtgccaggagtaaacccagccagaggggtcgtcactctaagtcttgttggtgggggaactcgcggagttagttgagtgcttgggttaggatccatcaccattggatccctttgaccggtgggacttgaacattgggatctgtcaccatcagattagttgattcaatggattgagaccttcttgttaagaccatcttttgctgaattgaagagaatcagattttaatgaaatcgtatccttttgctctcaatgaaagcaccaaaatattgaccttgcttttagacaacgacactgagtttttaaagtaatgaaattgaatgactgattaccaataaaataataataatgagcaataagaacacaacaatttatagaggtttggccctgtgatagtagtaatagcctactcccttttttgttgtattacttaaagacttattaagatcataacgtccggctaagtgagtttcttaataatctcgagaaaacttacattgattttagcaatgtaatgactctttagaaagttcaaaatcgaatccctaaacaataaaatgacttcactatttataggttaaatgttacatgtctaaaatctctcgatgttatgaaattgatcccacaaataaaaggatttaattatgctacaactgtagagatatttaaggaaaatatcttagagaatctgtatttgccgtgttcttttctgtggaggattacacttcactgaacatacatgttttgctcgggagattgcgaggtacaaaacatattcagatacttcttgttgaaggcgtagacttgactaatttgagctcgaatccctcttgacagaataccaaacaagtatagctagtctaagtattgaaatgatccccacgtatcaccctgtgcagaaat

SEQ ID NO: 8584 - DNA, 770 bp, Cannabis sativa
taatgtggtgtttggcacatgtgctccttagtatttctcttaactaaatgaataaggaatatcaaacatttggtaacttgtactctattcagttttgtagaaaagggtgaaagtgtttttgtgtttttgaagaatgtggccacagctattcatttctacaaaactgaattagatgacatagttctcataaagagtgtattttaaaatattccttcctattttatcagagttgcttttaattatagaaagacaaactaacatgctttgacatgaacttaatgccataaggtatagtgaaagtacctattgcatttcatgccttcaagatacaagcgcattccggtgactggtgttttaccaaccacaacctgttgaagataacatattagtttgaatttgaaccttggacgcaagagcaataaggaaaaaaattgttttggtgaacataaagcaatcatgggtacctgatgagtgtttacatacagctttggtcccatcatgttgaactggattgcacccgatgtagtagcccggtttgttgtaggaccaagaggaaggtcattgtaaattggagcccaaatcctgtgagtttgaaagtccaaaaagtactctaaatcagctagaggtggtttgtctgcacattattaagaaactcattacactcatatcagtacaagttagcaataattcacatttcagatgagtaaccatcacatgttaaaagttgaatcttacactggtatatagagatttgaatacttacatctaag

SEQ ID NO: 8585 - DNA, 889 bp, Cannabis sativa
ttgggttcaggcctatcgactcccctttctcaataagactcaatctctttcaaaggctttagggaatctcattggggaactcattgaagtctttcaggattcttgctttgaaggttgagtccatttcttcgttttagagttcgtatggatattactaagccactcctgagggggaaaatgatctctctttccaatgtcaaagatgaattttgggtggaattccattatgaacgtcttcctgattattgtatggagtgtggacaaattggacatgtttttaataagtgcttaatccaacttgaaaatatggataatgggattgaatctgaattggcttatagaccgagtcttaagggagctcctttgcctacatctagttataatcgatatagatcgtatttttctaaaggaaatgcttggccactcttgactcatttggcacgatccaccctcactgcaacaatcccacagttaaacaatcagccactttctcatctgagtccacttctacagggagaatcttctaacactaacaagggtaatcaacttcttgcatctccttctaccaccatacaaacattttctccatctgttgcatcaaatgttcagcctccagttactgctgctgttcccgcaagtcattctcttggcttaacaaatgctccccgtggtaactcagtggttcatctaaaagatgttttcactccggacatttgtactttctctacagatcacctttgccacataccctcaaattcctaatatccctcgagaagtagtgtgtcagaatattactatggatctttcttccaaaaaggctgggaaagccattgctgcaactattgtctcgcaccagcctcactcttaccctgatgatatcgacgatttt

SEQ ID NO: 8586 - DNA, 566 bp, Cannabis sativa
aactttggaggtggttctgatgatgatcaccatgatcatgatcatgatcatgataagtaacaaaatgttttgtttttgaagagagacctaattggtcaccatcatgatgagctaaacttggaagagaaagagataacataaaaaatacaaacagaactagaagaagaggaagatgtttgatctgatcagacatattttgattatggttatgtaatagtgccctaataataatgatgaggttctctatttatataataagagatatggaagactgaatataaaacatatgtatatttatatatgtgtggtgggccagattttgaatgatcttaacataaatattaagaagctagctttatatgtaccaaaaatgctaaaaggtactaatattagtgtttaatattagtgtttagcgctttcttatgtgttattatttaattaattatcgagtcctatatatataatgtattgctaactaattacaagacgatatatctagagatactagaccgtggttcacaataataatgcgttcgcgtgaatgaattaattgagagaatgttgtt

SEQ ID NO: 8587 - DNA, 723 bp, Cannabis sativa
catttattaggtattttaatgaaaatatgtaatacacaattaactttcatcttacaattaatctatattctctctcttgattccataacaaatattcagtatttagtatatttctatatttttaacaaatattgtatagatattaattaatttaacaactttatttggtaggtacacaattcttcttcttcttcttttttttttttttttgaaaaaaggggtaacatttaataattttatcaatatatataaacttaactattacaaaaataattagatatttttattgacaaatataccattattttttaccccactattatttagtttttcaaatttttgtcccactcttttattttggtcatatgaatttatataacatcttttatataacttttattaggtgagagtatttttttagtttaggaaaatgtatggaattaaaatgagttgtcccatcttcaaatactttgtccacctctttaaaatatattgagaaagtattttcacaatattatgaaaggaaaagactttaagaatatgtgagcacaatatttttgcaaactcagacttcttgcaactacgtattgttgtattagtcaatgaattatatttaactttgtggtgaaaagacttaccctttgaagtaagcttatattctctcataactgctaactcagtaataagttccatagcacagctataagcctttaaaaactcaac

SEQ ID NO: 8588 - DNA, 1085 bp, Cannabis sativa
ttaaaattgttaccgaacaggaccataatttattaaaatgacaatagaaaaaattaaaatataaggaaaataataacataatacaaaccttttcatgatcatattatcaatcaaaattagcagtatggatatttttcaaaaaaaaaaaaaagaaaacaaattagcaatggctagcaataaataaacatatcaaactaagaggataactaaaaaaaattagcaaaaaaatataaaattaggaagaaaggtggctgaaaattttgacgaaatatgataattatatagaaagattattaatgaacatgtattgttatagggttagaagtttagggttttgtagtttatgaaatttagatagatattttataattaataaacaaaaatttatttacgaaaattaaataaacaaaaattatatgacgtgtagagttatcaaatcaaattcttagttagggtcacttctattcagccctaaacataaaatcaattaggaaagaaattcaggaactgagttaaaaaaataaaatagagcaatcgaaattaaagtatagattaagcatacatacatatttgagaaggtacacaatcaaagcatacaaaagaataaatttaatccaagtgaatgcttggaatcacgattgaaaacattagccctagttggacttacatgaacattgttgaaagtttttcctctgctccccttctccaaaagatcatagttgaaaacaaactctcttccaatatgtcaatcgtaaggaaggataaataaagaaaaagcttgatgtaaatattttatttttactatatgctaacgtcaatagttagggtcaggtagtttttatatagaagggatatatatagatattatgtaatttttttaaaaaaaaaattattaataattatttctattttatataaagtgtgtatatatgactgaattcttggtttatgagaaatttgtgggttagttttttttttaaaagttttctattcaaaaataatagttttttttattaagatatattttaatattaatttttaaataaattaatataactctaacaggaacacaagctaagccaaat

SEQ ID NO: 8589 - DNA, 1653 bp, Cannabis sativa
  modified_base (1074)..(1079): a, c, t, g, unknown or other
agtgtactcccctggttggctagagttactcatacaggtggttgaccagccaaaggttggtagatgggggttgttgtggagcctaagatcgttggtcggcctcccatgccattggttgatgggatcttgctgttcttgccattagacctttgtggcaaggcttatcctccctcgagtaagggaagatctgtcctagttcctgaagcaatgggttggtcaacttactagtagacctttgctagtctatcaactagtcttccttggaatggatctctgacgtgatgctagcctcttctattggttctctggattaactgcctcgagttactggcttctatgtttcagcaatcttgccccgcctggttaaatcgaaggatgtactcttggttatccatccatttgaggaatttgaatctctattgagtgaatacctcgtaatcagtagcatgtgtttcttcagtttggtagacatggcagaagacctctctaagtttagctaactcgatatcttctctttaatccacatggggcatgccaatagtaggctcactaattcctctcttgtctctcctaaatagtaccggggacaaggtccagttgttattcttggtggttgttccccaagggtccttccgttagagtgaggcgcttatggagggtcaagcagggctgattgttcaaatctactgggatgtttataacatcttggccagctgtactggccatattcgtggtgcctaccgagatggaaaaattgaccacatctgtagtgttcatgggaattcctatggatagaagatgaacattaggatctacaacctatgggtcttgaggaagaaccaaagatgcaaatggtgcaacatgagctcttcttgtgttaaccgtggcgtttgatcagactaattgacaacttgttctcaatgaaaccaccaaactgttgacctcaaaaagtggccaacagacaatggggttgtattaatctaatgtttgccacgtgttacacaacaagaaaaagaaagtaaattagataaggatttttatagaggttcggcctccttagttagcgggtaatgnnnnnntccccttttagttgtattgatacctagagatgatattattgaaatcactataggtgggatctaatttagctctcttcaagcttacaaagtatgaatcagtaggcaaatctctaatgatagagagagatatggccttagaggcatgtgagaaagaacaagagagagagccacttgggcatgtacaaacgagagagagggagagagactagggttttagacttagagttttatggccttaatgagacttagagtgacataagtttttaggattgagttaaggcgctttatataggacagcataaaccctaattagtaaataaaatgatagatatttacatattaagttaataaataaaaatgagtaaattaccccttaaatgtagatattttcctagaatcataatgggcggttaaggcccaactcgtagctcggcttgcttcaaggtttgtaggttgcggtctggccatacaactgtaggatgaggtctggccagccattcaaggtttgcaggttgcagtctggtcggtcatactcctgctagggtttggccggacatgtgcctaccaaggtctg

SEQ ID NO: 8590 - DNA, 1188 bp, Cannabis sativa
ttggggcaaatggcaaaatatagtctatacaagataataagagatttgagaagaaacaaaatataaaaacttagagagaaacataacatataaaagatggggttcttttaagagaaaattcaagttcaactcaaacacttattaataattaaaccgaaaaactttaaataataaataaaaacttcatcttttgtactctctaaactgcaagtcttattaacttaggcttacacaattattggacaaaaaaatatactgataacaagcaactgtgcagttgtgtcatcagtagtctagtttatgttaaaagtacattattgtttgtcaccaaaggtccttttatggaatcttctctatccaactggtttgggaattcctcttctttctttttggcttcagtcagagctttcgggtttaaaaaactcggctggttggttgaagatagaagccttgcccacattctgtcagttatcacaacctgattctgtttttcggtgatgcgctgtaaaacacaaagtcaagcaagtgtatatattattttatacactttcagaatattaactttcatcttttacttacactgtcatttttcttatttaattttttttgcaaaatgtacattaataatattcattcagtctaatttccaaggttcaaggaatggtgatagtagtagggaagaaagagaggaactttacattgaaaggaatgtaagtctgtcttccattcacaagtccgcttacgaagcctgtgtacccggccatggcaccatgtactgcactctgtgcaaggagtgtgcagtacacattgtcggatgcattccctggaattgcccggatcatgtatgtaggatctgtcagcaaaaaaaaaataagttgttaaactttacttcatattcattggagtgaaaatttaaggtgaaaaaaaaaagggaaaatcaggatgctttcaacctatgtatttaagattaataggtagtttattttgctttgcgaaatgatcctgcaacaaaacaaacaaaaaattataaatcaacaaacccgaaaaaaaggttaagcaatttgggaaaggtcgagatcaagacaagcagtaacacaagcttatctcactgcctcaatataaaaggaagaaaaacaggcaaaacatagtaaatttaccttgattttttgagatatccacaatccaaca

SEQ ID NO: 8591 - DNA, 1375 bp, Cannabis sativa
ctccctcagcccctgtggctcccgcccccctggttggaccatctgtagtacagatgtggctattaacgacaacatctcgactggtgcggctatcttctacaatgaggcaggcagcattagtagtatctccacagttaaactcaactactgcgaccccctagcaagagaaattgcagcactttggtttggggctgaagaggcaaatagactgcacatccaaaatgtaattttctagaatgactcgacgaatgcaattgctgcaatttgcagtatggacgtcaaggccttacaccataatgtccaaacaattgttcaaaagttcaagctatcagttagttctctgagtctttgggaggcttcgtggatccctcggaggctcaatggtgttgcccaccgtgtggcacgctgggcagttaactctcagcagtttgggaatgttaatctgtctaattttgacggttccctgctcactgggtgagtggatggtcgtgatggttcttcggctttagttcatttgttagttcctagcttagttagtttagtttttcggcttctttcttttcttagtctgttgtctgtttgttgtttgtttcccaggtttctcttcctggtttgtgttttttcttggctctctttgaggtgccagtaatcaaaaaaaaaaaaaaaaacattaagacatggtgagtcttggaaagaaattttatatggtcatttgaattttataagaataattcaagttgttcatatggtcaatagtttatattgaaagagatcatttcatatatataaatgtgtataagatttctgatcccattcttctgaatcttaaaacagatgtagtaatagtatcatatataatcatatagcatcataatatatttatagcttactagtgtattgtaaaaatacaagaggattttaggagatccatgaagaggattaagttattgaacattgtatttatagagtagaaatacaaaggaaagataagaaaaataaaaaatagcaaaataaagaaatattgtgaggatagctaatacagttgtacccatctcattgacatggtagtctcttggccttgtcttacctttgggttttggaatatcctcttattttattgaaattagtactggtgatcttgtccatttgtgttattttaattttctttattttttgtgctttgttgagttatgtttttattctagtttgttttctcaagtttgtgactttgctaattctgtcaggtctttagtattcaaatgaaaaatctaggtgatttattttatcatttgaccaatatcttgatgaattttaagctgttttattcaaattggttagacacaaactatacagagcaattttagaagagtttcat

SEQ ID NO: 8592 - DNA, 1186 bp, Cannabis sativa
acatttccagtagatataaaatgggaaatgcgttaggtggatgtaatcctttatcacttcttgactgatgtgatctctcataaagtagccgtcactatgcttattaatcatagcgtaatagctgcagaagaggggttacgccgtcagacttaatgcttatagcagtttcgatacgtcttctcccatgcggtattaaatgcgaggtgactgttcaaatggggtctggtatcttccggaggtgctttgtcatagctctgtcctcttggagtacgtggaaccctcatttcttttccgggaggtattttcttgtggacactcttgatacaaaaagacttagttgaattatctaaaaataatgttgtttagatccacgtggcacagtcgcattggtccacgtattttgggcaaaattaagggcaacatttaccccccaagacttgtttggtgggaagtaaacgaagcttgcttaggtgcctccggttgtcttattaactacatggcacgtgcttcgggcgcgtgggatgcatttatgacaatcatcattacattttttgttttttgcaggaaacgattcgcttcccatccattaatgatccggcgcatttaatgggtgtcagttaaatactcaagcgtttccagccgccttgacgagcgcttatcccaaccgttagatctgcagaatgcgaatcgattgctattctcaccgtacgatgatgcctgatcataactgtttcacacctgttctggcctataaaagccagccttctcatttcatttggttactttcgccagtttgccaaatttcctcaaagtctttacagagagaaaaaattccagacaccatagatttcttgctactcttccttcgccgctgtcagtccttgttataccgtcgttcaacaccgacccccatctctcaaccttcatgtaagttttctggatattttgtgcttgtttactgtttgtttgtatggtaggattagaatttctgggttgagtgctgaattcctgggaaataactttgactgaatgtgttgtgtaatgcgtagaatctccctcattcgtgtctttgctattttcctttattgctttttagagtcgactccctttcgtcaagataatgtttttagggcataaggcgattcttgcttccactctctacgttttcttctctctctctctctct

SEQ ID NO: 8593 - DNA, 1449 bp, Cannabis sativa
aatgatgagccttctggtgctttataaatatcggcatgatcggctgctatgagaggccttagctctaatgctgatatgaatggaattcccttacctgtgtttactagacaaacatgaatgtaatctgatactactgggatatgtataatttcttcatttttaacagtcgttgtatcctttagcactactttattccaaaagtcaaccccaatatacaaatcaaattctgggattctatttttgttgtcgtagtttccatacatgaaccttgctctgatcaagtagcgttcgcctttgccattaacaggtctgagggtataacaatttctggctccttcagggaagcttctcacgttccaaagctgcttttcatcacttagaaatttgtgcgtggctgttacttcatggttttcaccggcctctgtgaaatttgtgtccgaaacgtaagtcagatatgttgttccatctacgtagcctgaggtctctgataacccacaatcaatgctaatgaagcctgaaatcaaaataattaattgatgaataatatacaatatattgtgcagtagttatatatattagctagctttaagtcataagataataattttaaggctttaattctttatcaaacctgattgagactgagcctgtaccaggagcagtgagatgatcaggataaaagcacattgaaatgaagcaagaaggaaattcttatacatgatcatgatgaccctcatttaaacccttaatttcttacacttagatcttatatgtgtataattgatatgctccttacttccatttaatttattatagcaaacatattatgaatgttatatttgacgggatgagagatgaagtactattactaatttcctttctttctttttttttttcttaagtcaaatgaaatatttattagttaataaaattagtggcctatttgattattattaaattattttatgtatatccaacatgtggcccatcggggtttaacaaccatatatttcaagtcattatgtattttaagatgtatttattagtttgacctaattaaatataatctaggaaactaatacgataagtattaatttagaaagacatgcacacaatgtatattctcctgctgcctctggctcatgatcgatcatatatgttattttacttatactgatgaatgtaattatttttttagatttttttttttaatttttacattttaaagcaagtttgtttgtttttttttttaatacgaaaatacacaaagctactaacataacaacttaaatcgtaacctaaatttatattgcaatccacacacccaatccgtaaatataataataaaaaaaatgattagaaaatattatattaggtgattctccttattttcaatttaaataactgtcattaatttataacttattattatgtcaatcgatcattatg

SEQ ID NO: 8594 - DNA, 1129 bp, Cannabis sativa
ttttgtacaaaattttaaatgtttggattgaccctgatattaagtactagaaaattcacattctttaacttcaatatgagtccctcactaattttttttcaatatattaatataagtattcttcttttaatcccattcccaaccaacaaagtcaaggtttatatatataatataagtatatgaacattttctatggtaaaaattgggtagaagaaaaatgaaactttgtttgttgcataactcaaattgtcaaatgggttaatatgagatcttgcttctctcatagctagctagtgtctcctttaaggaatagttaattgaaagtgattttagttaatttatccatacgatattgttgtgctcatttctactacaaattcacatcatcacttggttgagttattttaatagtgtaaacttacataacatgacttgacttgtgtgttatattcgttagtgtttatgcatggttgttgtgtagtcgacagtatataacatgtttaaggtgttaaattatgtcggttttagattaaagcgcgctagacttgtgtttagggtcctctcattttagagacctaaataaaaaaatatacatagttttttaataatttttaaaaatactatttattcttataataaaagcctaattttttcttaaggcttatttcaattcagggtcaaccccggtgttagacttaaatacaacatggactcatttagtaggtttgtataaggatcgtattatatcaaataacaaataacattatatttggataaaatattgtattgtattaattattacgaccataaattttaatttattgtatgttgtattatttaatacattacaaatgacatgtattagcttgataaagggtttcgggtttgggactctagccccaaaccctgccctagtcctgaaccctaaacctgatcctgatcctagacctgaaccccgaactcgaacctagccctggctttggacctggtcctaatttcagccccagacccggtctcggtctcagccctggacccgggcccagccccggacctggacctagactctagctctagaccacagggcaaccctaaacttgaacccagccctagtcctagtctcggccttggg

SEQ ID NO: 8595 - DNA, 536 bp, Cannabis sativa
ttttttttaattataggaggaaagcttccaatgacatggtacccacaaaagtacctagctaaggttccaatgacaatcatggatcttagaccaaacaaaaagacaggatacccaggaagaacacatcgtttctacaaaggccctgttgtttttcctttcggctatggtcttagctacaccaagttttctcataacatagccaaagctccaacactcatctctgtcccaattctcaactcaaacaaaacaacaacaacaaatgctcacattagaattgctcataccaactgcaattcactcattttaggagttcatattgatgtggagaatattgggcttatggatgggacacacactgtacttctttactcaaatccacctactaaaaaattgggtaatacccaaaaacaattagtgggctttagaaaattacatttagctgctaaatcaagacaacaagttagaattgatatccatgtttgcaagcatttaagtgttgttgaccaatttggagttcgaaagattccaatgggcaa

SEQ ID NO: 8596 - DNA, 2142 bp, Cannabis sativa
tgttgttgttgtagttattattaatataatattctaaaggatataataatgaagaagatgatgatgatgataatgattttttggttgttgttgttgttgtcgtcgtctcttttgatttgttgttgttgttatctgctggtacgtactttttgtatgatgggattcgtttgaatattcggcatagtgtccaaacttcctgcaaaacacaaatattaatttcacagtatatatataattaaatatataccagagctatataatatatatgcataatatatgtatataagttcctaataaatagataagtattttaccaaagtatatatatttattgttacaataagaataacatatataatctcaaatttataatttcattggtataaggtaccgccctagtagctagtgacatatatattagctagtgactataattttaatcagcacaatagaaatattttgaaaataaatgaccatgcatttttagtcatatgatattataaaatcaaatttagtcacaaattaattgttacttgtctagctaattatttattatattgatgaaatttgtaaaatgagactaaaattaaataaacacgttaatttagtagcaattaacaaatttttttttttttgacattgggggtatagaaggagaccaggactttgacgttgttggagatagagagagggaggtagagggttggtcgggtctgttaggcgatcagagagagaatgagagaattagagcgagaaatatactttttgaaatttttgaaaaaattagatgagaatggtagtttagataagaatataagaattatcatgataaagtagtatagtataattaaggggtgtttttaagtatggattatgaaatttctcaatatataattaattatatgtttatgtatgtatgtataacgtcttatacagtttcctataattttaatttattaaagtaaaataaataagactaaatattaaattatatcaataataatattacacctctaaagtacatgtttgtgtatattaatattagtatatttaacatttctcatagttcatgtaacatatatatatattctaagagtactcgatatataattattatggatatggaaaaatatgtacgtaccaacccatatattagtaaaattttcggagaataaaagaaaaatagacatatgcaacatgcatgtgtgttagtataatatataatgtcaacaattcacacgtatatatatatatgaataaagtattaaattgagtagtttttctgggattatttcaatatatacaatatatatttataaatgtgtaggtcttattaattgaaaaggcaaaatctggacttttctattcaaagatctaaggcagcagagattgaataaatataaataattaaaaatgggaattaaggaggtgcaatgttttgaccatattaattatatacagtagcttgacaccatatataatatatatggccatatacatatatatatctatattattatattatacatgcaaatgcaaatgcatgcagcgtgcgattttactaacaaacaaaaactttcaaattataaatcttattttaaaatgtaaaaactcattatacaattatatattgcatgcgaagcagttttccatgcatgcatgacacaacaaccagataataatggcttccaaggaagattttcattaataattacattttgaatttttgatatataatatataagagaaatggtaaaagacaccagtggtgattagcaccctcctacgtgttaatatcgctattagttcaactaattatcaggtctcatataatttaatataatttttagagaatattactagttaatcgcaacgtgacatgtcgagaacgtgttatacactactgatgcctaatagcaatactctatatataatggtaattcgatttcttaattaatatatatatgttttgtatcagaagtttctttacttaatcccgaagttgtaatacgtacatgcattaaaacatgtttggtaataaaattcagcatgcacaatacaaaaaataatctttattttaattaaaaaaaaaatcatgatcacataatatatgatcactaaattaaaattaaggctaattaa

SEQ ID NO: 8597 - DNA, 1351 bp, Cannabis sativa
tatggattgagatcaagcatttgcgtagtatatctttgcctgactggatcctaaaggatcgtcacagtcatgtatgtttttcactataataatgtggagattagtttataattgtacagactagagctaattttttgttgaaaaaaagaaagaggccacttgtcttaaacttcccgcccccgcccccgatatgtattgataacctcacttatggcggaaaaacaaaacattttagtacaaattaggagaaagaaaaaacgcagaaaaacacaaaaataaacatcaattcttaatacatcaatgaactccactccctacagactagagagctaatgaaaaggaatgtgataagacccgagttttaggacaggtcataaatttaggaaaatcttactcgtgtaagatggattaacatagtgtcattcttctcattctccataaaaattggccccatatgttttcaaaattattttgacagctctttgcaatgctaagcttcaaagcattctcatgtcaaggtattatggaaagttaagtttccatgatgcaacaatacgttacaaattaactaccattaaacactaaatacgagtacgatttttgaattgttgagatatgttaccacatcaacaggtgagccaatacagacagcaaagaaacctgccccaagaccagcaaaaagatgtgtaacaacattatcggtaaaccctggtagtttcaaaatcgactgcattgaaaaaatatgattcagaaacaacacaaacatttatactaaaagagaaatatatgtacgtatacagcacaaaaggtacctgcttcacttgatcatagctggctagctcagcagcatttataatagcatttcttgctacattgggtccaattccagtccacagagccccaaagccttcctaagaatcagaaacaattagacaaaagaaaagaagtcagaataaaaaataagtttatatggagccaaactgcatctttgtgaatgaggctcatataggcaacctgtctgacaatggtggaataagcattcattgctccagaatagcgtctcggcaccccagggggaagctttccttctgattgaagtctaacttttacaagatcagtcggatttgcaactgtaatggctagagcacctattttgtagacaaacatgaaaaaaaaattatgagagagttcaatgtgatgtgtgcttgtatatattactttctcaacgaaggtaaaatgcagttaaaaagttcagtgtctgtagataatttattttacaagcaatgaaatctgctcaccagttgttaatgcagcaagtattttctttgttaaaggaacatctccaacaaag

SEQ ID NO: 8598 - DNA, 735 bp, Cannabis sativa
cgttccaaataagctcaaaatatctaattttttcacatcactccaattgaagtaggtaaaatagaacacgtgacctaaataaatatacaaacaagcctattagttgagtattaattttagagctgtgtcaagcattatcatatgagaaagtaatgtaatatcttctatgataattaaataaatttactcagttattatagattttatttaaattaactacaaatacttgttataaccattctaaaaaaattataataagccaataacatatgataatctgatacattttcgtgatattttttctttttattttgaaagaacattgtcgtgagatgaacaccacaaatatcttttaacgtttcactcctcttaattgtaacattgtataaacgtgattaattaattaattaattaattaaattgagtgtactgatggacataatctaactcaacctaattattaaaaacaaaaataacaataataataattattattatattattatatataattatctatacaatctcacaagatataccagctcagtaaaatgatatcaagatattttctcaagtaaaactattacaactaattaatttaataataataatgaaaaattgaaggagcaaagcactctgtcactctatctctctgtctctttctttctccattgattcaagctctcatcttcagagtccagaccagataccattccttctttctctccttctctc

SEQ ID NO: 8599 - DNA, 672 bp, Cannabis sativa
tctcttaacactctcttttactctttataataatgcctaacaataccaccacacccattaccctccactttcctaccttcgatttttactctctttttgcactcccattaaaataaaaattgaaactttaaggtgaagaaattaaaaattagggaagtgagttcaaagcggtgcaactggaactgctttttatgcaatctccataattttgttttgggattatattatagtctcttcttctattattgatggagtctcgggttaatttaattctttgttacttttatctaattgattaatttttcatagtgggtactgattttttttttctttgctgtaaatgctaaattttcagttatgctttgattagttatgagtttataggttgagaaattctattcaaaatttcaagctttattaatatttttaaatatgtttgttgtgatatttgattagatatttgtctttttggttagttggtgatagaagatttggcagcatgtcttggtgcacgattgagtccgacccaggtatgatgataccactccctatttattccataaataatttgcggcatacaatgaatcgtgttgggtagagggacaacttattttgtatgaattaatttcttcgtttttagtttctgcatttgtttacgaaaaaaatacgagc

SEQ ID NO: 8600 - DNA, 518 bp, Cannabis sativa
aactgttatgtagtcttcaatgagagtgaaatgtccatgaagaaaacaacatcagaaaatgatgctcagacaaaaaacacaggtagtattcaagtacaacttgaagaatcacagaatgagacacaagctaaaaacaaataacaatcaaaacaaatttcgtttcacaagactgttctacattaagtagcaaattcagttccaagtacctattatgaagttgttaattgcaaagatagaaagaattgtcttggaaatattgattaagagataacatctctcaagaagaacaagtcctagaccaattagacagaagttataggatgcaattgaaaatttccatctgttctaatcttgatataatctcattttattcaacactttgatatccatcgctataacaaagtttttaaatattaaacaaatgtacgtgatgagttcatgggagtgagaataattgccaagatttttaagttaaaattagtatagattgagttctttataattaagttgcaaaacac

SEQ ID NO: 8601 - DNA, 686 bp, Cannabis sativa
aatcattatgtcactaagcaccaatccgtgaggagaaggcaaaggagaatttaattccaatacttttgagaactcagtatagggtgctgcaatatttgctacagctcgagatgagtttgcaccaattccttttaagctaagaaggttcctctggaaccaaattttaataaagagacagcctgtaaataagatgagatcctttctatttgtatactagctattaaggatttagttttccataaaaagaatcatggaattctctggtattttctctatctgtataggaaagcatctagcaaaccatatggctttggaatagctacagtctctaaacagatgaaggctactttcttcatgggctccacataggcaacaacccttatccattacaaagggcaatctattctttgtagggatggcttcttgaagtgatctccaaaggaagatagatactttggggtgaatactagtatcccatatctattttcacatgtctttcatagggaaaacctctaacctcgatccaccaaataagcttatttggtagagaattggccattctggttgaatttccaaaatatttggtctttaaaaggttgaggaattttcgggatagacaagatttgattccccaatttgttaccaaaggtttgaaacacaattttttttattccattcattgccta

SEQ ID NO: 8602 - DNA, 890 bp, Cannabis sativa
gaatccaaagctcagaaattttggattgtaattccggttcctcaatcaacagagatgcattcgaagtctggccttgaatccatcctagtctctcctcagctgctttaatcatcgtatcgcactccccgaatatatcttttttccatttttgtaaagcaatccttgtatcattcagtcttccacacacattcttacccctaactctcatcaatctccacgcaccttttataatatcctcacacgattgatcccgagaccaagcttcaaaaaaccgaaatggtttaaaccccctcttccttcccccgacagtgtccagaagcacatatccatgatccgatacggagattggagcattagtgactttagcctcaagaaaagatgtgatccaatcccccaaaaccattgcacggtctaatctctccctagtcaaagcactcagaaatctgttattttgccatgtaaacttgcaaccatgaaacccaagatcaactccccctgtattctgcaagaagtttgtaaagatccaagtgtcccgagcagttactcttctaccaccactcttctcccaaggatgcacaatcacattaagatcaccaatcaccacccagggaattcgaactttattgatccttttttccaactcttccgagaataattgtttttcagtttcatacggtctcccatacaccgtaaacaacatccaatgaaccttcagtaaaggttctttaattagcacttgaaaaattccattactaacttttatcaattccaaatccacaccctcattccacaataaagcaaagcctcctccaatacccacggctgggattattgaagaaaattgataacccaaaaaccttaccactccatataattcctcctcatttgct

SEQ ID NO: 8603 - DNA, 706 bp, Cannabis sativa
caaagatgtatgttagatgtggttaacttgttgggacttcgagattcgcttggttactgtggaaagtgtctttcaacttggaataagcaaaggtttgggtcactacataagaaatttgtggaaacttaaaaggagatagataaactcttgaatgccaaagctctcgatgttcgaatggatgaggtgaaagctctagaacttaaattggatgaccttatgaatagagagcaactttgttggaagcagagatcgagatcgaagtggatgatagtgggtgatagaaacacaaaatactttcatacaaagtgttggtgaggaagaagaaaaatgctattactgagattatgatggaatctggccaaaagttgtgtgttgaggaagagattgttggtgaactagagcggtattttacagatatttttcaaatagccaatccaacaaatgagcaaatttagcgtggtacagaggttgttaatttgtgtatttcggtggctaataatgagcatctaatggaaccattcactcaggaggatgttcaccaggctattaaggctattggcgccaccaaagctccaagaccaaacaaatttcatgctttatctttttagagattccgagatattgtgggtgaaagggttagccaggtatgccttgcaatcttaaatgagggtgctttggtgcaacagtttaataagtcaaatgtagt

SEQ ID NO: 8604 - DNA, 1108 bp, Cannabis sativa
ctcaacaacccaagcaacactattatccccaaagcttaaaaattttgtttgtattgttttcgtgcactgactactacatgaaaataacgacaatttttgtcttctttttttaactaaaattacttagtgcctttgcctccgaaacacttattcttgatttaaaatctaataaaatttatgttgtttttcatcatacaattttggagaagcatcaataatttattaattagtcataaaatactatacatattttacggcttcttgtttttgggtatatgtataggtagggtatgtaaggtggttgtttgtcataatataaatgatttgaagagggaaaacatgattagattattaatcatgaatttgaaattctaagctatatataatttttaatcatttcacaataatataaactattctcctagcttggaccgaacacaacgaataaaggggccggtcgagtgttttctttctttttagattatttttcttttatatatataaatatatatatatctttttttttttttttgaaaatatatatattttttgattatagccaccttcgttaattaatatatatcttaacaaataacagtacatatttataccctaataatatggctttttttcgaataaaatgatatgctttttaatttgcatgcatgcatgcatgatatatggctagtttacgacattttatatatatatttatctaggaaaatttatattgcagaaaaaaaaatgtagaataatttacaagttttatataaagtcttgtgaaataatttttttttttttttttgaaacaaatgaaatatatgtttttttctgaaaaatgaaataatttatttaaaatatattatcaacatattaaattatttaaatatttttacaaaaatttgcaaaatattctaaattatattacgaaatatatcatcaattaaaaaatataaaataataaccgccaaataaattattctgtttatatatatgtatttaaataatattacaatttattaataacaactccctaaatatatcagttgttagatattgtaattaatggctgatctgatttattaataaattaagggtaaatactatt

SEQ ID NO: 8605 - DNA, 593 bp, Cannabis sativa
atagtaatgcaggaatgttacttagatacattaaaaggaagattaaaaccagttttatcatattgtaagtcaaaagtgattagtgaaaataggttcaatcaaaatgctacaagaagaagatcattttatataatgacattaagaatatctatattttacttagcgccattaattcaataaatcattgttctttgtcaagaaaaattctgcaaaaagagattattctatcccaaaatatgtttgtgtcagcctatatttcatgattagttagcagcaattaacaaattagatttgaatgtataccttcttagagaagaagcgaattcctttatcaggaaagtcagcttaataagttccccctaacaaaggatttgaaaggcttgcaatgctgaccttcaaacgaagcatatgcagacactgcaaatgcaacaacattcaaagccctttggatgttgtccccctaacaacatcacaaactcatggtccagtaagattaaagttccatcataaaatcaattaatgctaactaataaagcaactctttcctactaaattgtaattctcataagtttaagcctcaattgtaattctca

SEQ ID NO: 8606 - DNA, 646 bp, Cannabis sativa
accttcagtttctgataattatactaatacttaaactgttgtgggttgaaggtgatgtttgggatggtgaatctgttggagctgcaatcctctcaaagcagctccaccggatcttctcttccacaaactctccgaatcaccttcttgatctcccaccagccgtttaactaccggcaacggcggatctatcgccatgatatcgatctcagagacacaattattctcactcttagcttcacttctgcacaacccatttcctccattgatgacctgacctcgtctccggcaaaggggtcggccacgaccgcggtcggaagtgacggaggggttgataacggtggcagcggctgtggcagcagtgaggtttttgctggagaaaaacttcttgagcttggagtacttgaggaggtgggttttggtgtcgttttgtctgattagtgttgtttggtgaatgagtaatgatctagttggaaagccgattatcttgttgttccgcttgacctgaccgatgcaactgattcttggggataaagggtcgtctccggaagaggaggccggcgacggtgagcggcggttgacgcatctgatgggatgaggaagggcgacgtctttgatagaaggtttggagcataacattggtaagaat

SEQ ID NO: 8607 - DNA, 2198 bp, Cannabis sativa
aattgattccatatctaatgtgactataaacacatatatttacggtgacacattatcacataatactgaaatagaatttatgtcatatttttaaaattggaaacaatttgttcccataaatttcacgcgagtggttaccattcaggtttattgttaacactgcacaatgattctgacaaaaaaatgtcattgtcaacattgcaaaagtttcaacaaaatccaatgttaagcaaagattaactattgcaattgaaaaaaaaaaaaaactactatcacactacaacatacactcagaaaatacttatgatattaatcaacatagatttcaaagatcaccgtagattcttacagcaatacataagaactcaatttggcaacctaaagttgcccctgaaaggtgggagtgtacattgacttcgatagagcatctcgggtgacgattgcgaggaggggatatctaaagtttctggtggatctccgaatagatcagcaaattgttgcaggtttctatttgaatatttctcgggataaaaaagagtgggttcaattcaaataccataaactcccggctttgtgcttcaactgtgggtttcttgctcattcttttaccaaatgccataaaccaaaggagtttgcattcccgccggtagggaaagcggttccgatgtacggcgcttggcttaaagtcggggtgcccatacgaaattgctttgatccaagtatcccgcgcctaaccttgagaagaccggtaaacaacggagagtctggggaattgccggtgcaggcgaagggcaaaaatgtaatttctgtgggtgataatgacgttcccaaaggccctgctttggcaggcgacaatagagccgttggggagggggtcagtcggcagcaaggactttcaccaagggggaattctcagagaactcagaaggcaatagaaattcgatgttctgataatactcctattatggcaaaaggaatagctcgcgtggaacccaaagtgactactagggcttttcctcatcctatggcccatatatgcaacaaaaagaaagacgtgggcatttatcgaagcttgatgcctgacattgggcctactagagaccagatggttgacctaccacatgtagaagtgtgcaaatcaagaacgccccatcatttccctgaacccacagtagtaaattggcccaataactcaagcttatctgagatggtccaaggtctgctggacccggcccaggatggagaagagatggcccagagaagtatcacttgtaataatattgaactggaaagtagtgggccagtgatttcgggctcaaaaaagagaaaagctagcttgtgtgttattcccgtagcccaggacccaagtgttaacggtcctccagctttgcccggtaaggacataatactccctcctctggaagtaaatgttatcaaggtggggaatgcaggctatgtgcacggagaggcttcgtcgtctaaaacgaggacggaaaagagaaggaagggaagttatgccaagagaccaactaggctttcgatgtcaggtaaatctcttccccgactctcttttgaagattcagaagcaactaacattgaagggaagctacgggattcagaggaaggtaacttggtggaaattactgtacaagaagttcaaaattttcatttgggcgaggaggcggcccttatcaagcccccccctccccaatgaagtttctttcgtggaattgtcggggtgctttacgggccccggcaatccaagctatccaagcttggaagcgaaggcacaaacctgactgtgtctttttgatggaaactaaaaccaatgaggaagggatgaatcaagtggtgagagctattggatttcaggagtcagtctctctaccggctgagggtttggcgggcggacatctgcttacttggagtactgacattagactgaatgtggtaagagctactaatggggttttcgaagctttggtgtgggacccgggctcatgtgaatattggatgcttgtggctatatatggccgcccgtataaaaatgaaaagaatgagttttgggaagatattaaatgtgaattgctcaaatattcagtcccttggatgatcatgggcgatttgaaccttattgtctctcaggatgagaaacgagggggtagtaaggttacggatagcgatacgaagatactaag

SEQ ID NO: 8608 - DNA, 1614 bp, Cannabis sativa
tttctcctttttctctgtttgggttaactaatcttgcatcaatctccttttcaaaaaaaaaaaaaaatcttgcatcaatcactttgaataaataaagcaaacttatactttttaaagtgtcttttttacttttcttcctttcagactgtaaacttgataaattaatttaatagtgtaaatatatatatattatacggggacttggggataaggtccattaaggatatatattgtgtaatggtttttttttttaacagtaatatgaatttaatccaaggactaattatcatagaaaagaaaaataaattttcctatttccttaattcaatattaaaagtgtccttgatcgtcaagtaatccgactacatcgtaaaaataatatatagctcagctcctgttcctatagtataatacaaacactgaactccaaaaaaaaaaaaaaaaagaaaaaaacaatcagatcacttttctacgttttgaatcaataaatgtaaaattaattattctttcttattgtttgaaatttagataattaatttttcattagaaaatggataagaaaaaaaaaagtaaagcaaagtaatgttgctttattagtgaattaagtacctagagaattataggcataggcggacttaagggtattgagagtgagttttgatttaaaaatatattaatataaaattgttatattttcataaatacatagtagttaaatagaacaattagttaagatactttaaatttatatgagaaaccattttttgaatttttttgcccattttcttttacttgtatctatattttttttttattaaaaagaataaatgaagtataaggttcaaactaggatcaaacttatgacggctatgtaaggccaagttcttgtctaacctatcatttttatatttagattgattttattttgatttatgcttgaatagaaaaaatacaataaaaattcaacactagaactttacaagcttgatcatctgccctagaaactcattctaggcggctagtgcttgggtttcccgaaccagaataataacttatgaccgggagatgctgctaaaccatcattctacttaaatttagttagttattgattgatttagattatattaaatgtataactaagtccaccctaaaattcaatccggattccgccactcatgacatccttatttattttttttacagctccaccctcttctcatgctatttggcttcattgtcctcggaggtgaaggtatatatattatacttctaacaaaagatttttgtgaatcacgaacatatattgcttcaattttatctcacattaatttagatttagatagttcaccttattattggcagatcaataagacaaaatctaaagctctatgtttattatgtttggtacagctataataagttataaatcacttcctttgacgaaggaggtgaagaaattagttcacctagtactccatgcacttgccttgggactaggcattattggcatatacacagcatttaagtatcacaatgagagtggcattgctaatctctacagtttgcactcctggcttggtattggtgttattgtactctacgctattcaggtat

SEQ ID NO: 8609 - DNA, 965 bp, Cannabis sativa
atcatttctttaaatggaaattcaatattatttaatcatcaacttttcttacaaatatagtagtaattagtttaaatagattctaaactgaaatgataatcaggttacaaaaatagtaagtttagtaaagttacgagccacaattagattcgatttagacatataggcaggataagtctgtacttatgacccatctagctcagggacccaattttttttttctcttttcaaaattatatatatttttttgctggttatgaaaaatattatatttttttttttctaaataagagatcgaaaatatttttttttcttacgatccataaaatttcaagactaactttgggcacaatattaactaatcattcaataaattaaagaaatagaaacattatttgcatcattttaatcaccatattaattaatatattttgatctccccctccctcctctcctctctctatatatacctattacctaatatgtctcgataaaatataagtaatattgttagatacatatttaaataacacacattttttagacacaataatatacatatattttttatttgaatggcacgataaatacatatatgtaatgatagtcatagatagttttatgaaggaccacataactttttaaatatatacatcaaatttctacgtgtatatattatatagattactagtcttaaatatatatgtatatatatttttaataggtatattattaattaagaaaatttaagattttatacttatttttttatttaattaaaaaaatctcttatttttatataataaaattgtttcattaattaaaaaaaaaaactcccttaaaaaaattttaatttgacttaaatttatttaatacccattgaaaaagtattatatataatattaatgctaagtaaataataatctgcaatttttaacatgggatgactttcttactaataatca

SEQ ID NO: 8610 - DNA, 538 bp, Cannabis sativa
atgcaagccctagagtgatatatagcattaaattgatatagaatgaaataaagagtagagcacttaatatatatatgtgtttaattatactttatatatattttattaattaattaagcactagctatatatattactactacatttttaagcagatctaggagatgcattaaagcaatattttagtattttagtatttttatacaatacgattgtgtcgctactaaaaaaatttataatcgtccctaaaatttgttattggcaacaattcacctctaaaatttcttatatcatccctaaagtgtattatctctgctaattaatgatatcgatcgaccccaaaacttttttttcttgtagtactattatggtagtatttttttttttaaattagtaaattatactaaaatgataaatatgattagaatattttagggtataatttgaaatgttgcgatttttagggttgtaattttgtaattcgatcatctagaaaccaacaaacttgcatagtttagcgaatgcaagagtatttcct

SEQ ID NO: 8611 - DNA, 1518 bp, Cannabis sativa
caattcatcgcatagttggtgcatttccttacagtcaaattactttccattgtcagaaattaacttataaggtataccaaacctgcagatgatggtgctgtatacgaactcgtgcaatttggcagcagttatagtcacaagaggcttggctttagcccattttgtgaagtaatggacaacggctacggcgtattttactcctcctttacctcttggtatttctccaatcaaatctatgccccaaacgaagggccaagaacttgtgatagaatttaattggctgggtggtctattcacatatgtagctattcgctgacatttttcgcatcttttaggaaagctagatgcatttgctcgcaatgttggccagtaatacccctacctcatgatttttaaagcaagggaattacccccggcgtgatttccgcagattccaccatgcacctcatggagtatataatcgcactcagtcccctctatacacttgagtaatggctgactgaagcttctttgatagagtttgtcgtcataaataacatatcgagcggcttgttattgcagttttttagcttctactttatctccaggaagcactcctattttcaagtagtctactatcggggtcatctaggtgaactttttggttgtatcaacctccatcatttcatcttgattgattgttggttgagttaatacgtctacaggaattacatcaagtaatttagcttctcttttcaaagccaatcaggctagagcatctgcatgagaattgtaagcacgaggtattctataaataattatctttttaaacttttgtaataactcacaagtaagagaaagatatttggccaaacgacctcctctggcaaggtactctccattgacttgacaaaccacgatctctgaattgctgaaggcttgcaaatactcgattttcatctcaagagcgatttttaatcctgcgatatttggccaaacgacctcctctggcaaggtactctcatattcggctttgttgttatatgcgcgaaatccaaatctaagggcaacgtgtaccttgaatttattgggacttatgaggattatgccaccccctgatccttcactgttagatgcccaatccacatacaaagtccatccttcaccattcggtacatcaggatcaatttgctcttctgcagtaatggctacttcgtcacttggaaattcgagcatgaagtctgcaagggcttgtcccttgattactgatctaggtttgtacctgacgtcgaattgtctcaactctactgaccacttcagtaatctacctgaggattctggttttgccaaaacttattgcaagggatagtttgttaaaacctcaatgatgtgtgctttaaagtaaggtcgtaactttcttgatgtgattactaatgcgaatgttaatttctccatttgtggataacgggtctcggcgtccaggagacgcttgctcagatagtacacctgatactgtctagcattgaccaacttgttgat

SEQ ID NO: 8612 - DNA, 724 bp, Cannabis sativa
ttacccttttaacctacacacaacaaacaaataaatcaagtttcccatggtcaaaatagatcttccaccctgagtcaaagctcggttgactcttttgaaattagggataaatgacacttatcaaactcgagtgacaagtcgttttgtaacaattctaattatccctagaacaatctagaattaaacattaacactcacacccacgattcacagattgaaaccctagtagagctttcagtttctgcttaagaaactcaaacactgctcacaacccaaaaaatctcagccaatcccttccagatcaaggttaaacccccaaatccatacacaaatagataaatatcaaaataatatcaaaagaaaaaattagaaagagtgcaccagaaatttatagaggttccctaaatgttgttggtacattctcttcgagctcgccttagaaaagctcgtttccactattagatcttcaagatcaaagagttacaaagctggattccaaatcatatgtacaattggtaatccattaattttacagtgtttattttctctctttttctctctgaatatcttattgagtccttcttcttcttccctatgtgtatgtcttcttcttggtttggatctccgagccctaaacctagggctcaaagacttaaccagtgcaagtctcttcctcccaatttttctatcttgatctctgtttttctagttttgtttgcatgta

SEQ ID NO: 8613 - DNA, 676 bp, Cannabis sativa
aaacttattcacttgaactcgttaaaccttttaatagagttgttatatcgacagggctaagttttgactaaggtgagttagggtccaccagtttaggagcctaaaagaaaaattttctttttaaaaatatgcatactttttaaagaaatttgcggcgaaactctcttaatattttaatttttatataattaaccctttatctttatttttggtggtaaaaccccttaagtttatttttatttacaaatttaaggtgtcaattagatattaccgttaaattctaattggattactactgtatcgactttgaggttttactgttacatatacacatgtgtatacaatagtcattcggttgatatttaacagtaatatttaactggcgtgtcaaatttacaaagaaaaataaatttaaggaaggttttgtcacaaaaaataaggggattaaatgtataaaaattaaaatataaggagattgtaccataaattactctattttttaatagttttcgaaaataccacttattttcgtaataaaaagcttaacaaatgtttttttaaggcgtaccaaatctcaagctaaatgtttgattttctcataagacttttgaaattgaacattgtgaatattttacaatatctatgtgggttatcatgggaaatttacaaaaatact

SEQ ID NO: 8614 - DNA, 670 bp, Cannabis sativa
ttcccttttctaccattagaacaataggaaaggttattaaagaattaaaccaaaatgctaaacttttagagaaaggaggagaggtttttgccttgaccgaatcccttccttgaacttttactggcaatcaatgaaacaaaaagatgagaatatagaaaatagagttcttatataatttttttataactagagttccttaaaaatcagtattctttttactaatttgatgtaatttaggaaaagtaatatatataatttataaaaatattaaaattttaaatgcacttaaggtactaaaatagtatccttttcaaataacaaaggtaataaaatagtaatcggtcaattctgagaactctcattcaacctcaacccctttttaccttcctcaaaaaaataacctcaactcctttttcctaagtttttattatttttaaggaagtcttgtcttttgacatggtaatgttttgtttttgtagtatgttttgagtgttgaggtatcacggtgttgttgttctgactaccaattttcataagcttgtttcggattatcatggcttctatgaaccggtccacttctacattagaagaacagtatggtgtgttgaatatagaagatgatgagaatgaggggatactatacgatggtggagaggaagatctatccaat

SEQ ID NO: 8615 - DNA, 881 bp, Cannabis sativa
ggacgatgtcaaaataatcaagtatgtcgatgaagaatggatgaaggggtaagacagcgccaaccaccataatatgggcgctaaaggccactcccccttggtaaggcatgatagcgaactcatcttgtcaaggcttgcgtaacactaagtcactcgtggcacgcactttgaaggtatccatcgccttgcaaatattgttcgtggatatagtgctcctagcgcctacgtagacgaaagacacatcactaagcaaataaggaatgtgccacctaggcacatgagaagaggaacgcccatgggatgtagtaggttgagctaattgcttgggtggagtcatgcctgtagatacaaaaaaaaaatgatggtaactgtgagcctcatattttctatttctctcagaattcttacgagctcgagccttaaccctagataccttcgagcgtagtcccacactcctcatctaagttaaattcgataacctcgacaggagacatggcaacaggtttagaagatggggcaataggttcaggtgggaagctattctcaaggaatcttaggtaactctaaactttggcaagtgacaccataagtctagaaaggtacacaccggaatcagcaataaaatcatcttgatctccgctcaaaactaaacaaattttggctcgaaccctcttaacacgctccctatagttaatgatgtgttctatatgatctcttcactcgaacattaatctagcatatctattgtatgtgttctcttgagtacccttcgagtcagaagacgatatgtaaataacatcagctgcaaaagagatctcattctagagatcgcctccgaatgaggcccatgatgaaaaggttcaaagaaatgcgacgtcttg

SEQ ID NO: 8616 - DNA, 530 bp, Cannabis sativa
ttgcttcagatagtcttccatggaggttgagcctttgcgtgtagtctgaatcagagtgcgagtatcgtccatcctggattttgagtgagccccatacaaattttcaagagctttccacaatgctgcagcagttgcacatcccataacttctgtagcgattccttcagtcattgagctgtatagccagcccattagaagctggtcactaacaatccagtgttcgtaatctgggttgactgtaacaccaaaaccgagttctccttcagtggtagtaggagttggaatgaactctggtgggcagggtcgagttccatgcacaaagccgtcaagacgatgaccacgtatcactgtggacaccattgttttccagagtacatagttcttcctatcgagcttcaaaggaaatggttggttcaatgtattgaacggttgagtgtagttttgttgagagacatgtacggaagggctagcagcacctgctgctgccgtggtggtgacctgaggagtctgagaatgggacgacatagtcc

SEQ ID NO: 8617 - DNA, 1328 bp, Cannabis sativa
tcatatttaatcaaattcttcttcttcatttagatttagtaatataataattgattggtgaaattttaattattgacagaatttcactggtgagattttaattattcatagtcttaataacattggcaaagtgagattctgtctcattttaaatgtcatttttaaaatgtgtcgatagagtctcactcgacgttgatgaagattgtgatgagatataaaactcgacacttgtcctgctttatttccttgactcagattgcaagtaattcttactctcactattgtagtactgttaaatatctatctatacatatgtatatatttttttttgttatttgtctcataaaattagatctcacttttacaaggaatattgtttgtaaaataaaattcttttcataatctttttctttaaaaaaataaaaaaaaatcttgataatttactcatactacaacaaaacaaaactgacaaaaacaaaaacaaagataaaatcaacaatttactaactttaaattgtcgtagaaaatataaaacaaatctatatacattaatatcttttttaatgtaggacttttacctaatttaataaaaattggaactggcggacacttttgttagaacaaaattatataaatatatatatacccgtagaccgtataattatatattgatataattattgttgtttagtgggtgagattccttgtatatatgtacatatttcttttcatttttgattttaggtcagagggcattgattagaaagaaaaaaaaaaaaaaacctatgcactttccaattatattttgaataatgcttaaaaagaaagttctgtacgtacgtttctttacattttcacttatgaagatgggacacaaagacacgagtatcagaatcgtggccatatgtggtgttgacaaaatatagatttgaatcatatttacatcaaattactttcatgcaaacaaaaatgtacttttttttaaccaaattatgatacaattatatcatgatattattatctatgtgtattttcaaattaaatttttaaatcataattttcaaattcgtatatatatatatagatcctaatatactctaatattaatttgtatacaggtatttatttcattcaacactggccagtacacactacttatagttgaacaataacgttctcttctctaaatattaatgctcctgttcagtattacttcgtttaacaataaatacggatttgatattgggtgatcagtagttgtgaaagatgtttagtagaatcaaatccaagatttcctctatttcttctagtagatcaccatcaccatc

SEQ ID NO: 8618 - DNA, 531 bp, Cannabis sativa
agaacagagtcgtaaaagggcatagttacctcgttaatgttcagattaggaggccagtagtgcaagaacttgaagaagtaatcaaacatctcaaccgatgaactgaaagtcttcggacccaattgaaccggactcggttgtggctcatctccttcccccagcttcttctctaagcgttcctcctccacagacttctcgccctcactcaccttctgcttcttcgaaacgtcatcgttttcttcttccctggctcgcttcgagttggggtctccattagtggcgggctcatcggcgacggcggtttccttggaaacctgaacgggttctaggtccatctcctcggcagccaagttgggatgctcggagtttgtctcttccgccatttctgtgaaatgttttggggtttgatggcagtgaaagagaaaccttaaaaccctaggatggattttgctttatttcgttcgaaactaaaaagaaccctaataatgttttggcctcttataatagcctttggaaaattctaatgtgaaa

SEQ ID NO: 8619 - DNA, 901 bp, Cannabis sativa
tttgccggcgcaatttgtgtacttcgccgacaatatttgctattgccggcgatattaggccccagtaaaaggtggaggtgaaaaaattttgttgattatctttgccggagcatttgttgacttgcgccggcattggttgacatttttcagcgcaatttctcaatagcgccggcaaaagtggacattcttgtagtgagtttcaggttcttctctgcatcgtggacagtaaagtacctggactttccgggagataagttgtggttctaatggtaacgcaaaatagaacatactccaaacaaaaacttttacctttggtggcatagtaagatttcaaattccattccaccaacgaattagcctggatgaatcggcaactccctcctcaacctcgagcgaccacgccaatgagtagccactcttaacattataaactctgtcttgatcatagtgccatcaccatccatcctctacctctcgcctcactaatggaacagacacatatgtcgacattcattggcaaaagaacctattgaagtttcactatatcccaaacaccagaaagaaggataaattcactcactcaacaattatcatgctttaaaataattttaaaacatgttttgattaaaatttgcacaaaaaataatgtttatatgtatgtaagatgaaattccatccttcgatttagaattttcaccttaagcatttattctttactaatttgacgtattaactttcactatttaacaaatttcaacacaatatctaaacgagttttcacatgcaaaaaaagttacggagagtttttgacagagtttttgttatgtaagatgaaattacatcctttctatgtgggagaagagctcatatttataatattggattacaattaattatcatt

SEQ ID NO: 8620 - DNA, 1131 bp, Cannabis sativa
aagttaatatacagatattccttgtaaaatatagctcaataaaacctttgattacttgtatttaatgacgaaaaaaatataaagcagataagaattaattcattaattaatattaaaacatgtggaaaataacacatgcttttaggttaaagtatatgaagtggtttaactaattctaaactttcaacactaatgaattattttgttgacttcacttattgttctgcaatattatccttttgagtgtttttttttcttcagtactgatgatcatatgtatctatgtgatatgtaattcatatatatatatatattaaacaaataaaaaaaaacaattaaattaaagccatgatatatatatatatatatgaggatcatgatgataaacttattgtattaatgaacaaatgtacaaatgtgatcaaatgcatacatgggaatatatatagcctaagaaaggccatatacaaaacaaaacttaaatacatataataaacgaataaatcccaaagcgacctagctataataaaaagaaataataaatgaaaagatgaagaaaagagaagagaggagtataaaaactctcctccatatgatcggctcctataccattactataactaactaactagctatttatatatatatatatatatatatatatattataatataaaaatattatatgtatgtgaatgtgatgaacataatataaatcatatatatgtaaccaaagaaactgatttcccaagctgaagaatcttgatatcattttccaaaggtgtgaggttcaaatccaaacacaaaaccctattgttcttcttattcaccatcgcggccggccgccgtacttgcaaagaaccggcaatatcaataggcggtggccgtgtggcggccgaggccgctgacaaagcatgatgatgagtctggtcggtcaaggcggctctatggcgcctcatgtggccccccaaggcttggccgatggcgaattcaagcccacatatggtgcactcgtgggtcttgggcttggatggtgagcctgactgtgaatcagagctgttactgccttctccggtcattagcctcggctttttgtgactggctcggtggccgcctagggcttggaacgaa

SEQ ID NO: 8621 - DNA, 697 bp, Cannabis sativa
gttcaactttattttttcttatagtctactaaatttcaaggccaaccctgatctgagctaatctcggttcgttcttcttaatctaattataaagatgtaatttattagtgatgacttgattttgttttgttttttggtaggtttttcatccaaacataagtgaagatgggacaatacacattgattttttaggaaagacatggggagctgcatggaccattgagaaaatattgctagggttgtgttcattccttgatgatccagacccagaagaccttcttaaccctatctcctatttgtaccaaaatcatagagaaacttacaacaagatagcaagagagtggactaagaagtatgccatgccttagtttttctttttatatatatataaaaccatatataaataaataaatatatattgtcaaaagggaatttaattttgggttattatgatatgttgagttgttacttcattaataatatagtatacattaatataatcaatttacaacactcttgtgtaaatgattatatatatcatgaatttttcaaagctctttatagtattatatatgtaataagtttgttttggttataataattggtgattgtgttattataattcttaatcgataaaccttaattaaagtcattatattaaaatatgagttttggatttaatattggtctaatttga

SEQ ID NO: 8622 - DNA, 1301 bp, Cannabis sativa
tatcatagttaggttccacaatagcttttcccttgtcttgatgcatttgtttttcaacatagcccggtacttattttgtgagagaatcaagtggtattatagagagatttttgttccggtgtagcatgacaaaagtgttatgggaattatgagttgactatacaacaaatttccctttctcttgtggtgtgatatgttgtggtaaggctggtggttgtctaggatgagatatgatcggagaaatggtgtttctagccagccgagtgataaagggccaaggccccaatttggaaaaatcttgtcgttatcaatcataagtattcctagggagagcagccccttccatccaatgaccataaggcaagtccggatcaaggccattgtcaattttttgtaggaatttaggacaattgtcaaagacatggcctataattccacactcataacaaaaatcgcgaagacgctcataacgaaagtctaaccatagttcatcagccaaccatggaagagtaaccaattgaccccgaagaagaggcttatagacatcgatttccactctaatccttaaaaagggaccccaaccctcattcaaagattcatcaaaaacttcaacaaaagtaccaatgagattaccaataaccttagcaagactttcagatttattgaggaaaggaagcctgaatacttgaacccgaaagggagtagttgttactgattcaattgtggcattctccaaagcagttggaagacataatatcatatgaagattgtgaaagtgccatggttctttagaaagaacccttcttacatctcattcacatccaaaagtaactcctaaagattcactttcgtaatcagcaatatcaacagcaaaccttccttaccaatgtttacaaatgaaaattttgagttgcttctgatttaaattataatcccttttagagaaaattctacaaaaaagtctatggagagtaggcctaggagttggagttggagaaacaacatttgatatattgaaaacttctatttcatgagcagtaatagcattggaaagaactggatgaaaggattccattttagagttgagatgaatgaattccagggaaaatagatgcaggcaagtgaagaaacaaaggaggaagaagtagtggcgggagcagttaaactgggtaaagtgaagaacagggaagaagaagtagtggcgggagcagttatacaggggaaattttgaaaaaaagaaagaaagacaattaaaaagaaaaaactatattaaactgccacagagcaaagttacgggcaga

SEQ ID NO: 8623 - DNA, 660 bp, Cannabis sativa
ttggtaatttaaatcacttaaaagttatatatatataaatgtaccttatgaaatatttttgtaaataaaatattaatttatatttttttatgtaataattatacacatgacaaattacgttgacaaaataatgcataagtaaaattccaaataacctatttttaatttgttgtatttcattttattaccacccaacaatggaagccgaacccaaagtagagccaccgtccgatcaatgggccgataaggcgtggaccatgttaaccaccgtacgccgccaatccccgctaatccaatgcataaccaatttcgtctccatggatttgatggccaacacgcttctctccgccggcgcatcacccgccatgctacacaccctcgaagaaataccccacttcactcctcacgtccacgctctctgtctcaacgtcggaaccctctccgccgactggctaccctccatgaaagccgccgcaaacttcgcttttaactcctccaagccttgggttcttgaccctgtcgctgccggagcttccggttttcggttgaatgcttgtttggagcttattcaactcaaacccactgttattcggggaaatgggtctgagattttggctctttccaaagcttctgttcaacccaccaaggtaataattgacg

SEQ ID NO: 8624 - DNA, 869 bp, Cannabis sativa
tttgtagtgaatataaaacatttttttatattattttgctctgaaacatttaatgtggctgcccatttttgttagctaaatttgctatatgaagacaaagtttgaatttagcaactattttggcaggagcattgttattgggcattagtggtaacgtgtcgtcttgcgattggttagcgatactcttaagctattatattaaactatgtgagacctgatacttaattagatcaatagcgatattgacacgtaagagggtacttggcaccactaatgccttttagtatttctcttttgggagatgccgatcatcaataaatttctgttgcgtgcacccattttcgaggctcatttttttttttttgataagtcgaggctcatttatttgaggtgtttaagccttgtttccctaatgaaaaacattgataaattctctctctcatgcatgagttgaattttttttaagggagcaaacttaaacaaacaaaacactacaatagaataggcaaatcagccattatagctgagcttgcaacaggaggaataacatcattccaagaagcacagagttcaaaatcttcttgagtttaaataaaggcaaagagagtaactaatttgttttatttgatctatggttattagctcccttgattacgttttatctcttgtctttcctttaatcaatctaattaataaccttaactaggttagatgtagcaataaaactcaaatctctttatgatcatcttgacacaagacaatatcattattaatgtcgatgtatatattaattaactatgagtaattagctttcaaaaaaaagctatagctagctatgtagattattaattaggccaaagccccaaata

SEQ ID NO: 8625 - DNA, 1093 bp, Cannabis sativa
cttagtttcttcagtaactttccaaaacatttcaatgccaccactatgaccttgtgtttcaacaaaaaaatacccttcataacccatacgaacctctccacaacttcctgacaacaaatagtttcacaataaaaaaattgagtttcttctggataacaagatccataaggaattggaccgctcgcgagttctcaagcccatgagaattctaaattaacatatgtatttagcgggtctgttctaaaaaatatgttaaatttgacaaatactaaaaaatatactaaatttggcacatgctaaaatttattataccaaatttagcacaattaatatcattactttttttattaattataatgtcattaatattatattgatttttactaaattttatattatttttttatttaccatattattattatttaaataataaaaaaaataattttatatattttttcaataaaatattaactaactattaatataataagaattgtaaataatagagtaaatataacacatacttatttttttaggccaaatttaacataaaatttcatttatgtgaataaaaagtcaacaaagtaatttaatttatttatttttaaaaggacacaatcggaaaaagtctttcgggatatatatcttccatgggtgcttaggattttggaagacacagtttttttttttttttggttgttgtgaaaaagtctatacatgattataattagtaattaatttaccgacagtactagtgtcgacaagtacgagaataccaaaataataaattggatattatatttgggtaagatatatttagcaggatgtgaaaggctaactactatttgaagttttcaatgattcagtcaatactcgcttaagttttttcaaaaacaagttgcatacaactcgatgtattgataagttgaagttttcttcacatcaatttgcacatttaattatttaatgaagagaaaattaactttggttgttgagcttgagcaaagtttaatttatttaccctcttaattattactatgtgggttgggttggatgttataagccccaaaccacattattatttaattta

SEQ ID NO: 8626 - DNA, 2163 bp, Cannabis sativa
tttcgagttgaacccgaacccgccaaccaactcggttactttttatttttattttttattacatatataatatattaaaaataaaaaaaaaaaagaaacctaaaatgtaatcattttatttttattacatagataatatattaataataacaatatataatatattatatatagtttggaacttgacttttgtattttagatttgaaattaatgcatttttattttattttaatctaacaaatatagattatggtgttataactttataacttatattcttaatttaatatatagaaaaaacaacataaaatttgattttttttaaaaaaaaaattaatgagttgactgggtcaacccgttgacctggccaactcgaacctgcaaaaccgcgagctcgaaacttgtgaacccgaaccattttacgggtcaggtctgggtagaattttttgaactcgaaacctgatcaacccgcccgatgttcagccctagcctagagtgttggacatccttaggtacgcatgtgggatagaatgaggaagagagagagtttatcagaaacataatgtttgagatcaggtttctatcttagaggcaacttaagttttcagtcagaggttaaggcctttatataggaagccgtaaaccctaggttcactattcaaatcccttgatagttgtataattagttagttatttataaaagactaaaatgcccttgattctagataatattcagccattttgttgggttttaaggcccaatttgtagtccattattcttggccacgtgtagaagtgtccagtgaagcctatagagcactccttggttggccaggcccttgtggtggccaggctggctggccatggtgctgtccctggccggcaagctcctgagagggagctggtctatcactcgatctctcgtttaagtgttggggtcttcgtttactcggctgctaacttgatcttccttttagtgagttgtactacatgtggcactggttctgtccacatgagtatgccacgtcatgagggacaaaaattgcgataacaggcataaatcctaatattagaccaaaaatagagatcgaatgtccttcattaatgctcattgtttaagttaaagtttatttatattgcattattttattatatttattaaaattatcaatttagataactaaacataaattctaatttaatatttataaaattactaacttaggttgttttgaaagataaaatttatttttcatccttagtaaaaattttaaataaatattatgaaaattacataatttggtagatctaaaattaataacaaactttaattttcaactcaaattttattttctatattttaaaaatcaaatttatatatatacatatatatatatacatatttcaaatatatattctctaaaataaaattaaataatgtcttgaaaaatttacaaatgtatgctgatctaaaattgattaatttaattttttcattaaatcttgtgatttttttttaaaaaaaaatccacttaacaaataattttctatttaattaattacttgaaaaaatacagaataatttattcagcaattaattatctagaatttatttcataaactaagtataaagtttctaaattaattctttaaataatatattgaaaaactaattttaaatattttcagaattaattatgctgctagtcaatttaaattaggttaaactaatataattaatcctaatataattattgtaacaagccaaatgagccttcacatttagaattgctagtgcagaggagggttgaattcaatatgttgtacccacttctatcaccccctaacatccacacaatacccaaaagaaaggaatttaacatttatttaaatttttattagttgcttatgacatatgtgacatataatcatgaaataaacatgtaaacaaagaatatgataatgtcaagatatgatttctaatttttattgatagtaaataagactacattgaaatttgattttatttagggtataaaattttaacagtttcatcagcaacaaggcaaattcccaattgtctattactaaagcaaataagggagcattttgtgagagagaaggagaagctctgagcgttggggtttaggggagcggtgaac

SEQ ID NO: 8627 - DNA, 1294 bp, Cannabis sativa
tctctctctctctctctcctcaaagccctaagtccgctaggcattgttgcatggcaattccctcacgcacgcccaactcctcccttgtctaccatcggagccacaactagaagatgctcgtcattgtaagtgctttctctctctctctctctcttaactttcagatatgtgggtttcgcttcgtcgtgtggcttcgagatcgaaatgagttataactctcagatttaagattttctttctcatgcgactttgaaatgggaatggaatgtctcttagctcttattttttttcaagttactaagattattgtggttgttttgttgtatagctgagattatctcaatcagatttggaattttttttttattttttttagtgttcccaacgggatagtgacactattgccgacggttttaaaccgttaagaaattttttcaccaactatttttaactgttgcctattctaccaagttttgtgacggtcaaataggcagcagttatagagaccaacatcaatacattagttgattatttagaactatcgaaaaaactcaaatttttagtagtgacagaaagaaatccgcaaaactcaagtaagaaaataaacttcggtcgacgagggcaaatcgtcaaaaggtgaagacttggtgtgagattgaagataagaggagaaataattcgtggtattgtatgtgcgtgtgagtttgaatcttgaccattggtaagagaaagagaaacaacttttaggtttagattgaaagttttattttgttatttttttgatattaatattatgtatattataatatttttaaaatatatatataatgaagtgtagattggattagattaattattttttaagatcaaacaacatctaatttgcacttgtgtagatttcaaatttttcaatccaaccctatatgcacaaatgcggatattcgcatttagcaaattagattagattgatgggatcaaatcggatactctgtgaatagccctactttattttatgcatccctttactcaagatatttttaatcttaatttttctgttatataacattatacaatgtagttatttaaaatatttcgcataatttttaaaaatttaaaataattgacaacatcaaaaataggactcaaacaatctatttcatacattataaaaaaatctcataaattaacatattatttaaactttattttggatatattattttttaattttttaaaatttataagacgtgttaaataattactctgtacatacatgtcatacaaaattaataaa

SEQ ID NO: 8628 - DNA, 529 bp, Cannabis sativa
tgattatggtagttatataccttcagtaggcattggcggtgggttttttctgttatggaataaaggtattaatatcacggtgcttaagaagtttgattcggggttctcctgttgggtgaaagaccatggctcacaaatttcgtggcatctgtttgctatctatggtacgccttatgccgatcacaagaatgaattttgggaggacttggcagatcaaataaatggttgtaatggcccttgggctcttatgggggacttgaatgttattttggctaaggaggacaagtcggggggcgtgcttttgcctatcgtgacggttctgttctgagaaattttatgttttccacgggtggtgtcgatctgggatttagtgggtgcaagtatacttggcagaacaaaagaggtttcgttcggttggtgaagaaaagaattgatcgtgtgatagttgacacaagctggatgaacttatgtccaaaaaggggagttcgtaaccttccgatcattagctctgaccatggagccattttgc

SEQ ID NO: 8629 - DNA, 814 bp, Cannabis sativa
attcatcgactcatatttaatattcaaaaacttgactcataacacaaacaaacaagcaaattattaataaaactaaaacgaaaaaaaagttaaattgaattcactaaggagtaagaaagacatcctaccggagcgccacatcactacggcggcggaggccagaagtggtaatttggtacggttgccatatggtggtggagccgaaaaatgatcaagggcttcaagattcatggtctacatggcaaaagctgaattcagttcacgcacttgccgatgagcgaattcattgtggctctcaagctaggtattgtaaaattcagtttgagtatgattcgattggattgtgtgttgatttttatgaatgagataatctatagccgatcataagtaccttgagtccatgaatctagtggcggttcaatttgcaacggaggaggaagagtttcactaggatcagcttcaatatcgtcttcctctgcttcaccacctttcaccctccgtttcgtcattcccttgacgttttcgggtgtatctttcgtaggagtgaaagatgctggtgggaactcataaaagtgtctcttatagtaatcatcttcattggcggcttaatgatattcccattcaaagctcgaatgtcatgtaggctacataattgtaatcagagcactatgagctatatatgcgagcattaatggtgcgcatttgagtgacgaactcaataaatttgaatttttctttataaatgttagctttctatatataactcaactgtatctgattataccattatatgtaataaatattctgttcaatt

SEQ ID NO: 8630 - DNA, 884 bp, Cannabis sativa
ttttaaaccaactcgttggtgcctcaagaccattgtagaaattcaaatttttacgaattcgtaaaattgagttgtttgggagctttgtttcaataagaaagaggacatgggtgattgttgctgcacaagcaattgtaaatgcctgaatgcactcgggttccccaaaccccagacattccaactaataattttcatggtgataacaacctctactgatgagtcaaaagaactaattgaatcccgctgaacatcggaaacatcttattcaaaaccatcttcaaattacaagggtgaagaggttgtactagctaaaccacgacaacgctttagcatttttctcatagacaaagcataattttgtctcttagagtgtaaatttggtaccatattctccttcccagcagttgaggtattggtagtaagtaaagcctgagaagttatagtggcagatgttgtgaaaagtggggatgtctatccaacaattaaatcaacgttttggtgggattgagagactgctttgagtgatggtattaaaggggggtaagtggcaaaagtgtttatagttcttagccccaaataaggtatgaagacatgtgaaagatcgttgatatctggtttggcagcagggatatttggtgattgattagtgtttaaggctatggttgttgttggtttttccttggttaggctgaacgggtttatagggggatcaagtatggtgttgtgctggtgcaaatgccttgaagaaggggtattctaatgtggtataaatccagatggtgcattattatgaaaaggatgctgctgtaattgaggtgttgtagatgattcccccgcataagggtgtcttggatgtggctgacttggagaagataaaccagtaa

SEQ ID NO: 8631 - DNA, 527 bp, Cannabis sativa
cggcacagttctccggtctcagatggcatctggaaaatgtaaaactattctcgagtacccttttggctgaattgaactgggtcaggcttagtttttcgatttatacagtgtgaagagagaattgatgagtagtagtgaagaagagaatgaaagtagctaacttgataatataaaaaacagttctttggtttgttcttcttctctctttttttctttctttctgttttggcttggtgtgttaaggtgaggagaggaagtagtgagagggtttatatattgagagaatgaaagtatagagatagagagagaaagtattaggagaggttttgtgttgagtggcagagtgggaacagtttcaaaattataattttcttttttctaaggcatatatgaggcagagaggaacaggctttacagtgttctgttaagcacgacatttttcagtcggctacctccagaagaaaaccctgtttgggtcggctaaaactatacctacaagtgggggctgtatgtgacttgtttttttt

SEQ ID NO: 8632 - DNA, 648 bp, Cannabis sativa
gttagtagagatagaaattgtgtggtctcactcatttaatacacacattcacacattgcttaaaaaagagaataactgtagttaatgagattgactaatcaattaagggtgtaataattttttaatcagctttttattttttaattcgaaaattgatttttttttaaatatattttataaaaatgtttttactttttaaattactttcaaattattttaaataattttttttcttaaccaatatttttggactccaacctcaacatggaccttgggactcggaccccaaccccggaccatgggactcggactcagacttggaccctaacccagagccgaacccagactcgaataggaaccctggcctcggactcggacctcgaccccagaaccaaactcgaagacggcctcatacccagaccccgacccaagaaccgagcccaaacccggcctcagacgcggaccgaaccccgaactcagacccgaacccgaaccccatccccagacctgcccccagacccacactcaaacctgcacctagaccccgaaccccagacctagccccaaccccagattcagacctaacccctaacacggtgcaacgtcctactaagaaaaacaccatgtgtcgtgtttacaatatactaa

SEQ ID NO: 8633 - DNA, 973 bp, Cannabis sativa
attgaatttcagggaaaaggacttaaaaaattagcaatatataatgactgacctggaggtcgggatccttgaggatatgaaatacatatcaatttaacaagaaacttactattaagattattgggacaaaatcccagaagtttgcatgctgcctcagccaaattgaaagcatcggggatgttgtctccctctgagcagtagcataataagcaggtgaccttcaaacctttttcctaatagatattaagcatcactaatcaggtaagttctcttccaagaaaattattatggtactttcaaagtataattttagcactacattgtaaaattgcaatgacataatgaacaaattatatccaatctttcgttatttaaattgcgtatctccgtcacttgtagtcatttatcattcaacaaatgattgattataagggggcaaaacaatgaaatctaaatgttaacccctccctcacagtcactccaagtcaaaatggaatatgcaaatctttcaacatatatatggtatgacatgcaaagagtaccttgaaacatgaataaagtgcagcaaaaggcaagcttgggtagtaatcttcatcattttcttgctcgtcttcaaaagacaaatcatctacatgcacagaactgccctctgctatatcactcagatatttccatctcctctggtcagggttatattcttctagtattttccacccaattttctcacagtgatcatcttttccatccttcttggtgtttgataggtaatggacctgcgaaccactaaggatgtggcaaagattacaattaatatcgcaatatgttatgttgatccagtaaacattctgtgataccaacctttctttaaaaggcaatcagttatgactgttggcctttagtcctgtttggttgttagtgctataaatagcttatgttgtatagcatttaaaggtcctagaattgtatttttttt

SEQ ID NO: 8634 - DNA, 753 bp, Cannabis sativa
taaaaataaaaaatttatttttttgaaaatactattttttttaaccaaattactgatataatatagaatattatatagtattctgaaaattattgaaattaaaaaataaaataacaaatgttatccattagttctctagtttggatataaaaaagtgcatcactacaaaacgacataacttgtttgctttctaaaagaaaaacgacatcgtatttttttcagtaagcgtaagcctaaagaagcacggaacggaaaaatgctcccagtaaccccgaaaaaggaactgtgtgaagtgacgaaaggagttgcagtgctgcttcaagagttgattactttacttccaaacatcgtaagtttttgttgctcatactttcgtttcttttcctccttttgataatagtcatcgaaatcaggtaatattgaaaacctagtgagaattttatgaaactcagagtaggaacttagagacaaatcgcataatctttgatactgataattggtgatgtattatgttgtctatgtacttattttgaacgaataaataatgggttttggtttattttaagttttcaactcatttaacgctgcttaaccctttaaagcatatatgttttagattaagttcaagctcacattgggaaactatgataggagttataagagtttctttttttcatatttcatgcagttttggaggtgaaaattctgtacattgtctttcccatttgggtgttttgagatggaagtagaaag

SEQ ID NO: 8635 - DNA, 571 bp, Cannabis sativa
ccttaaattgaaaatatcatatttatatatctatatattttcgtaaataatgtaaataaatgtgtgtaggctattattatcatggctttggaaccagcaaaaaaggaagaagcagaaaagtattggaagaagtttgtcgatttaagaagtgagtttagtttccaacccatgtttagagaaagcatggaagagactgggatctttaaaatcactactagttttcaagagtttcaaaatgttgttaagcagcttctctacgacatcaataaggcacttttacgtaaaacaacatgaaacaagggtcggtcttaaggtacgtaaggccaacgagcaaagtgcgcgtcttgaatacccaatgccctaaattgtaaaataatattattagtagtatatataataataataaataataacaaattcaataaaattgtatttatagtgtaatggtagattaattaagtctgcaacaagatttagggtttgatttctatcccactagcttcttaatttttttagaactatattaaaagtgtgcctatatagagaattaaatttggaatttcaagaacat

SEQ ID NO: 8636 - DNA, 976 bp, Cannabis sativa
ttgcattccttttcattcaaataataaacataagatactaaaaatatatctctatgtcaataaagcattaattatcaaaaaaaaatgtcaataaagcattttttaaaacattttattgtagatgatcttatgtcttaagaaaactgaactttttattctattaatcagacacgtcattaagctcaaaaactttaataaacaaatatcaacgttcagatcatatcttctttgattattttttgaatatgaaggtacaaggaagttgtacaaacggttgactaactattggttgataagcaattgattttctttttctcgttacagttatttaaaaaaaacataaaatatttatttcttaaattttttaatatttagattgttacaatctaaatattaaaaaatttaagaaataaatattttatgttttttttaaataactgtaacgagaaaaaaaaatcaaggtcaaaaattagtgtccttattaaagtttgacacatcaactaatttaatttatattaaatatgttaactaattttgttgactttattaaaggtttaatttttttataaataaaaaattaattaacgtcaaactttaattagtttaacacaatatgggacgctatttttgaacagaaaattttgattcgaaaagaaacccaaaaaaccacgagacacttacaaaagtaggaaagagaagctaaatcctccaaacccgatctttatcttgccttaaaatttctctagcattttgattgcaagcttcgctatctcaaaatggagtgcctcttcaccactttttgctgaagcccaatctcttttagaagacctactttggtgtactgcatcaaacttcctcttgcatccattgaatctgattgtttacagttaatctcaaaggttaagagcacttggaaggacaattcagctttgtccagtgttatagagttaattcgaaaattctcatctccattccc

SEQ ID NO: 8637 - DNA, 1905 bp, Cannabis sativa
cagaagttattgatttgatcttctgttctgttaaacaacaaattagaccttgtatttttcaaaatggtacccgagtccaatttttgttaaaatagaacataatataaccttaaagtgttatgaccaggttaaaaactgagctcagtgaattattaattttgtataattttaaaaaatacacgatccaatttgttattttgaaaatgatattaaacattaattttgaaatgtttgaattataatagggattggctaatttctcaaagcctgcaagatacatcttcatggaaattcagaagattgatagttgttactacccagaggtatatgttatattatatctattattagtaaccaatgatgaatgaaatatggtatatacatatataatatggtgttaatatatatttatgtatatatactgtacatattatcagacaatgcatcgtctgtttattgtgaatgctggttctggatttagaatgctgtggaaagtagtcaaggcttttttagatgcacgtactctagccaagattaaggtaactagtaactagtaactcatcattaattacttgttattataatcatcaaactcaactatacatattataatatattcaggtgttgggatacaactaccttaatgagttacttgaagttattgacctaaggcaagtgtttaattattaagattttcgttactaattagttacaaatgaattaagaatataataattaatgttgattatggatatatgaaagttgcttgccaacatttctgggtggaaattgcacgtgtgatgactatggtgggtgtttgttaagtgataaaggaccttggaatgatcctgacattgcagaaattgttcaggtactctaaattttacattaactaccattttataatggttaattaaaattttaacatctaaattttgatatatattaaattgtgtttattgaagtttttaggccgttaaaaatttatctcaaattattgacattattaaattcaagtactttcatccaattttactaatagatacttgacactgataaaagttcaagaggtacgatttagtatatgttaaaatttgggaacacgatttgatacattgacaatcatcatgttggtaaaaaattaaatagaattgaacaaaaatccttgaatctgaaaatctcaatagttcgaaattcatgaacgacataaaaaattcggggatatgatttggttagtatcaaaaatctgggagtaaaatcttaattagtcttttataatttggggtaaatactattttgaaccctgtttttgcaaaaattattaattagaccttctattttgttaaatgacaaattaaattttgtatttctaaaataatactaaatagtaccctaaactgtttttttgttataaaacaaaatttcctaataacttgatatagaattgttattacaaaattattatgttttttatatctgtgctagaaacatgttcaagttggttatattaaaaaaattatcgaaaaattaaactcagagtcttatttgtactattttaaaaaatactgaacaaacgaaagattcaatcgatattttttgcaaaatacagaatctaaactgatattaaccttataaattaccattacattaaaatacggaccatatatttactgagaaatgatatggtttatgatggactggtgctgaggacgggatttattagtaatgaaatttgttaataataagtatgaattaattttttgtttatgttgtatataggcaattacgacaacaacagatgaggagaataacaatggtgaagaagatcacattgaaacaacagctccacagtctgcattggcacgcaatatggtaccctatttataaatacacttaatattataa

SEQ ID NO: 8638 - DNA, 1810 bp, Cannabis sativa
  modified_base (997)..(1018): a, c, t, g, unknown or other
gatgttggcattgagggaatccaaattcataataaatagcaatatcattaacattctccactcgccaaacaacccctgaatcaaaaaaaaaatttaccccacaatattttttcaaacaaaaaacatactttttgatttccgcaaaggatttattcctgaaatatagtctttaaaccatgattggccaatgaagaatggacattgtaaatacgagaagctattttagcaaggacagattggttaaatagacgtaagtctcgaaaacacatttaactatcttccttgtgtaagctaaatttgttccaattataccaatgtatttttttacattcttaccaccctaccaaaaacaagcacatattctatgaacattttaaataaataattttggaagcttgaacatgttcttagtattatgtttaataaacagattcatagtattcgaatgaacagactcatttttaacaaacatttttcacattattattatatatttattttaaaaactgaaatgttgggaaatatgaagaaatttttcgtagtcaattttacaagtgaaggttttttttccgacaaattaattttaaaaaatgtgaaataaaagagaaacacagtcgatttccgtattagttttgttgagaatcgtgaggttccatctcaaaaccaattggtgatgagtggagtagtactatgttcttatatatggctcaatacttttacgtttaatccatcatgtgggacaatgttctccaatatcctcgcttaagatggtgactatttttgctcaccaatcttgaatcaccttatcacaggccatgccatttgctcgcttatttttgttcagatctcaagcgtctttgcactatctggatatcgtgcagctggctaaccatctggataggtgtggatcgaaagcccacaagggatatagctttgataccatgttgagaatcatgaagttctatctcaaacccaattggtgatgagtggagtagcnnnnnnnnnnnnnnnnnnnnnnatacttttacatttaatttatgtgggacaatatgaaatgattggaaaaactttttttacacacaatttgtttctttggtttaagtttgtgtcttatgactcttatgtaaatgtgcatacttaggcacacatgtatctgtatgtaacatttacagttttgttcttcaaatttattagaaagataaaaggtattttttagaccatataaaaagaataaaataaatctaatctaaaccaagacctaactaaaaccatttcatcttttattctttaaactaatttgagatatgaaagtattcaagctttgcaataaatattaaatactggcaaacttctgaacagagaaactgaagctaatttattaatgttttgtaatatatcttcttctgtgaaaatatctaaaggaaaccatatctgacattatcttaaagttttctgccaataaatttcaggttttttttagtggtgacatacatacaaacatatatataatagtatctttgtaagcaagagacctgaagtctattctatgtaaagaataaatgcttcttggttcaaatgtggagagactatttctgagaagaaaagtataattcttacctgggtggcttattacccaaggttttgatatactattattctatacagctaattatatttatactagtaaacaataatactgggaccttttatgttaccagaaccatcatcaaatatactatgctctactctttaggttattgctgtaccaatttgcttttcataaggttctttttcatttcttcctttttat

SEQ ID NO: 8639 - DNA, 542 bp, Cannabis sativa
atggaaagctgaaaaaaaaccaacacttctctgtacaacgagatgcaggaaaaaggcctttacgacatcccaatctcttatgcagaagaagcttaattcttgagtgaagcaaaggcttttgtggtaggcagtggctcgaaggacgtagctaaagaaaatagaaggaaggtttcagtgaagaaggattcaaaggcaaaaaaggggaagatagagggtaaggtggctggagcttttcaggaaggagattcggtagcaacacaaatcacgaaagaggcgcaccctgaagttcagggtcgcctacaaccatgaatctcttactttggaacgtccaaggattggggaacccttggacggtctgttccttacattccgttgtgagtagttacaatcctaaggtggtcttcatttcggaatcgagactgaataaggctcatgctgaaactttgcgagttaaacttggttttagtgggtgttttgtggttgaagctcgggggaagagtggcgctctcatcttgttatggtcaatggatgttgagactcaa

SEQ ID NO: 8640 - DNA, 1232 bp, Cannabis sativa
  modified_base (141)..(141): a, c, t, g, unknown or other
ctttagttagtatattgttataagtgtacctcatcacttgttctatatctctttaacacactctttttctatctttaagtcttttttttttttccttagagatgtcttcattctctcacaaaattttattttattttttanttttttttttaaaaaaaacactcattctatcttttgttcttatattttcttaatactcacactcaaattattatataatatttttattcagttaatcacattttataagaaaatcttaattaatttatttaaacccttacaaaattaattaaaaatcttttcatcaaaaataatttatataaaattattaaattgtaattacacattaatttttttttctttctctcttttcaaacaagataaaaaaaaataatatgttctatttttctttttatttttttttctttatgccaaatattaggttaaagtttggttgttgttaagttattttgtcattattattttgttatttttgttacacacatgtaatttgcttagatttttatgtttagatagagtgattaatattttattagtaaaagtaatttttttttttgaatttttgtagtttatttggagttgatttataaattcgttttgaattgctgtattattagaatcatttagaagttcatcaaatagatttttttgttctgaattaattctcacatatttcacttgttttaaaattggaacttaatttttcaataaattcattaattaaattaaagaaaaatgtagtttttttataaataattttttatcaaaattttctaattttcttttttgttaaaattctaattcatattgcaacagaattgaatgatcgttgttttatttgttataatttgcatcttaaaatgttattatgcatgcgagtacaaaaataaatatcatagtaaatatagtattgattcatattttagatcaaatttaatacaaattataatcatgcattgaagatggtctgagaacttatataataaaaacagaaaatcttacttcattattaaagacttctcataaatttttaagaaatttcaaataattttgaatgctaaaataatgactcaaataacatattacatgcatgcataaatatcaaaacatgcacgcgcacaataagttatttgaatcttgatctcaacatcctaaattatttacaatttcttaaaatttatgtgaggtcacgtagaactacattatatacc

SEQ ID NO: 8641 - DNA, 642 bp, Cannabis sativa
ttgctcaagtaagtgaggatcccactcattcccactccttgatagatcggccaccgattccaaattcggcaatctgattctgacctcctccatcagcattctgaactcaggaaagctgagccagggaatccagggttgcatccagatgtctataccatcccccttacctggaatggtaacagagcctgatcttaatatatttctagtagataaaatcccctttcacaaagctgaatcattacttcgactctctactccccaaaatgagcttctattacagtattttgcttccaagctcttcacccacagcttatcgcatttggtctccatctgccacgccagtttagaaagcataaccttattggcatttgtatcaattagagaaatactaaagtgcaccatttgtatctaacactactactataaaagcaatgttttgcattggtcaacacagctatagacaaagtctaaaattaaccgaatatattagtgggtaaatatatcgttgattttgaattcacgcaacctagcgttagtttttaaatgacgcaaaagtattttgcgtcctttgcgtcggttataaattgacggaatatatgattgaaaaattatatcataaccctgaactatcccagctgtccc

SEQ ID NO: 8642 - DNA, 885 bp, Cannabis sativa
ttgcggggctagaaggcagcctctacaaagttgtcattgtaaccagatgtatctgcagcagactcagaagcatagtggtttgtctcatcattaatagacaaacctgaagttgagatggtaggtttgggccccctacatcttttgagtatctttctcatagacatttttttaggttcccccttacacacacggtttggggaaagattttctttgttgatatcagtaccaacagtcatacaaatgatggagtctgacatattagaactatcagactaaattaaaactgatatggagtgagggttaatcatgttcttggcttttgtttcaggtggataagttgcaacatagccaattgaatgaccaacatttggcatatatagttcagacaaatcagattcatttggagatgataaggctgtcatggtaatgtgtgaagttgttgttgcggcagattttttggcaactttgtgagaaattgttgttgtattgtctaaggcttcctgttccatgatatgatgatcacgttgtggttggaattttgcagataaaccaaatgtagtaccaccaattaagttccccaattggtatttatggtggccaaaagtataaactgttattgtatccatagagcccgacatggtgtttgataaacttgccgcaggattcaaaactgcttgtgcaaaaactataggtccccttctatccatatgctcattttcttggtgaatttggggtcccatgacaatttggtctgcagccattgtagatgattaatcttggtaatttttttcatggtctgaagcctccccatagagtagtttccttggctatggctagtttctaagagggatgggagggatggggcaagcatttccttttgaaaaa

SEQ ID NO: 8643 - DNA, 683 bp, Cannabis sativa
cttttttgagatagaacaaatctccaaaatacatttttttttagacagtgcaaataccaaagttttattatctctttctatattcaacaatagctatacaattatacatttatataggcttttacactctttataaattactaataccttgtaatatttttataaattacaagtgtctatattcatcattaccttttgcggggaatctccaccccagtaagggcaagttacccataaggtcccatgcatctccgcagataaaattttcatccatgtttacaacatatatagtattatgagtctattagagactggctatgagtcttcaaatagtttaacataggaaaagtcccaaaaatgacattcgttttaaaggctctttttaaattaagaatccagaactttatgaagttgaacatgagaacgaatttatgttttaactcaaaaataaaaacatagagaaggatgatacatgttggtccttgtaattggctgggtttttaaaagttgttttcgggttacttcaaaagcacttctgttactgattaggtaatcattaattaattacatcttttcatgttttaccattgatcttgtgaggaaacaatcttgtatcatcttttagatacttgtaattttgcaaaatcctgctagaaccgctcgagtattggtgttggtggtgt

SEQ ID NO: 8644 - DNA, 566 bp, Cannabis sativa
tgtgagaggtcagcaatagactcaggaggagtggttcggccaggatgaattgaagctgattgttggtgagagtgagcactggaagaggcaattgtttgctggtgcaagcttttgcaaggagaaaaaggatagtgagtgtgaatcgggttactggtgcaagtatttgtgaggctagtgttggtgttataagtactgagattctttttctgagttgggttggctgaaaaatccattggttgtttatttttggtgttgctgtgagtcagtgcagggctaggaatggaggtagattcatggctggcaggtgtgtttgacggctgtgaagatgcagcagagtgtgagaagggggcaggcacattaatgttttgagagatgatagggtgtgtgatgtttggttgagttgtgggaatgtgaggtatttgcggcatagcaggggctgctggtgtgaaggtagtttgtggttgttgataatgtgtggagttgggagagatatgggaatgagaatgttgcagatggaaaggtaagggagtgttagatgtttcaccatcaaagagtgcagaaggaga

SEQ ID NO: 8645 - DNA, 1258 bp, Cannabis sativa
tatttagtgacacgcacaaaagtacgagtcactaaatagttaggagtgatttttagtgacatgcataattagactctaaattttcagtgttagcctcatgtaatgtgtgtcactaaaaatagtcactctaaaaagagtaaaatctaaaattttcttatttttattatttaaaaatccatggcctatagtgagacgcgccaaatgcgattggataaaaatatttcccaacccacacttttagcgcgcgtcactatatgataatactatttttttaaaaaaacaccaaagtacagctataataattaattaaaatataaaaaaaaaattatatttaatagtacatatagaaaccagccctagctatcatgttagacgcatgggtttatttaaaaataaaaaataaaataagcctactaacttcacttttctaacctaatataacctaataaaataaactttctttctcttttttaacagaccctaatataaacttttcctctctcctttctaactccagcgcctccctcactctatttttctggcttctcaactagctcagcctgttcaaattgtcgtcgctcctggggtctccaattaggaattctggtttttcaaatctcctttctcgtatacccattctgaaaaaatttgatcaataaaaaatgaaagatggggattttttgcttgatttatttatttattattgttatttcttattattctgatttttcctttttcttcttctccttcttcgttgttggtgaccagccatcctccggcaaacgacatcaaagctcctcctcgtcaatttgtcgtcgtctccgcctcgtctctccagtgcagggatctcggcgtcgtctccagtcgatcggctgtcgtctctctggctcgtcatccacgattgcaagggaacgtctgagagatcgatgttcaagacaaaatgggttttgttcgaattttgaaaactacataatatcaattttgtttcttttgaaatattctttggattttaaattagaaaaaatatattttttgttcttcagaaatatatgttggagagggagaggtcatccacttcaccagagggactaagtaaaaaaaaattcaggtacctgcttcctcttcatcttcattttctaattcccactcaacttttatttttctctaatcatctttcctttaattttttgtatagatctatgttatatggtgatatttctttctctcactcttattgaatttgtgtctgattctttct

SEQ ID NO: 8646 - DNA, 760 bp, Cannabis sativa
tatatatatataattagacttgctttggttaagcttatcttcattgctttaccaaagtgggaagcaatgttgcttagattccatcgatcagttgtattaagaaagaatggcaccaagttttaagtaaagaagaaaagaagaaagattatatttataataatgatgatgatcttagagttagttaaaatatatattaattatatttaagagtaatttattatataaattattaaatttaatttttgattataattaaataatttttaactacggtaagtacttgaccattaagtatcaagttaatagttacgtgacagtctttgattaatatagatcatttaatttttatttttttatttcaaaattaatttatatacaaataagaaaataagatgtagataattaacggttaagtacttacaaaaattttaaaaatataacttaaatattattaccgtaaaatataaatatttcttcaaccaaaaattatatataaatattaacaaggtaaaatacacttaatactcatatatatatatatatacacatgtaagttaattaattatgtgttcttgtaagacttaatttgattgtgaaaagtatattcattttagttgtaactagttatatatacataataagtataaatatttatataataaataaagtaggttaaaattgagtgttccaccccacaaacttctttgaaaaaggaaagatgtgagtattaataaactaaaggaaaggtgtttaaaagcaa

SEQ ID NO: 8647 - DNA, 619 bp, Cannabis sativa
atctttattttgagttcgatttattaagagtgatttattacactagtgtgttaaatttatataatttatgtgcatatattattattctttgtatgaatagtaaatagcgacatacataaaattttaagattataagcggcataaatttaatatttatttttagcgacacaagtacgcaatatttataaaattacaattttcttccagtttcgttagtacaaattccgttttgaatttgatataagaacatttaaaaaaaaatgatactacatgtttctatctagactcaacaatctaaaatttagaccttatatgtgttttgtttaagataataacaaaatttgtattgatgaaattagaaaaaaaattacaattttacaaatattgagtacttaaatcgttaaaaataaacattagattcatgctacctacaaacttaaaattttgagtatttatatcactattaactattattgaaatttgaaaacaaatggaatcgacaatataagtatcatttttttttctgttaaaaaaaaaatgttctaaaaagaacaagaaaaaaacataaatctacacaaatatgtggaattaatttaaagaatgaaggaaataggtgaag

SEQ ID NO: 8648 - DNA, 643 bp, Cannabis sativa
cgagttcaggtcaggggtttgagctttaggtcctaggttccgattaagggtccaaatctaggtctgggtccgggtttgggttggttccaggttcgggtttcggtcccggtacaggtctcgatcctgatctaggtcggagattggagttgaccccggatctttgtaaatattataatacaagctaatacaaatcatttgttatgtattaaataatacaacttatattatattaaaattattagacgtaataattaatacaatatattactttttccaacatagtattatttatgatgactaaattgtggcataacccctatactatcacttttttagtgattaaccacaaaaactcaaattttgatggcaaaattcccaaaacccatattatgttagcagtttagtattttaatttattttttcatgttaactgccatgtttaactgccatgtgtacacattgtattgtccacatggacacaatatacactatgacacaatttaattggtccacgtaaattagtatttaaaaataaaaatataataaattaatttaaaatgaaaaaataaattatgataaattaatttaaaataaaaataaatcataaaaatataagaacacacttgtaacgccctaatgctaa

SEQ ID NO: 8649 - DNA, 564 bp, Cannabis sativa
ttttttttttggcttcgtctcttcttaaattttgtaacttcatttttacaggtcaattttgaggatacttgcaaaggttttcttgaggttgcaaaggtgtgttggtatttttttgtgtatcttataaaatcttgctaacttttatcctcataatgtataccgtgtataacagcgataattactagttactgaatcgtagtgttactaggttttatcttcattgtctgttcaataggtagtttatgaggaaggcatcttgctttgctattcgtcctcgtttatgaccaaacctcaatataaaattttaatgattgtaggaggctgtgcatctaaccgtcagcgttatatttgaagatccaggagtccaagaattgctagtcaaactttatcagaaaggtaaaatatattattaatatcggtgtaaatgaattgtggccttgtgggttggatttgattgatcttaaaattttttggactcaaagtcgctttgaagcccaaaaactaaaaccccgatttctttggggttggaggggttcgggttgggtggttgtctttatccctctt

SEQ ID NO: 8650 - DNA, 795 bp, Cannabis sativa
tggggtctgggtctctattcaagtctgagtccaggatttgggtcaaggtcttggtgtttgggtttgagtccgaggtcctagtttggatccaggtccgagtctagtgttcgggatcggggttgaggtcgggggtttgggtctaagtcttggtctggggtctgagtccgaattcgagcctagatttgggtcggggttcgggttcaagtccgttaaggtccagattcgggtttgggtataggtccaagaccatggtaaaggtaggggcccgagttcaaggtctggggctagggtcgagaccgggattaaccccatactctttgtaaatattataatacaagcaaatacgcatacccgaccttgggcataagcaaactaggcatgtgcctagagctcacctaacctaagggcctaattaaaaatatttctacttttaaaattatacatttattttacttattttggaatatactaattttttaaaactaaaagtttaaaaatatttttttttctatgagctgttatattttatgatcgactttgctaatatgagttattttttatgtattaaataatatgatttaaatgattgtaataattaatatagtatactattattttttatataatacaatatgatttttatgcactcaacaactattaattattaatctcattaatgattgatagttccttaactatacaggactaatactatgcaggatcataatacgtgcaacttttttaatgctaataattgcattttgtttctactgcaaagtcttttaaaaacaactt

SEQ ID NO: 8651 - DNA, 1082 bp, Cannabis sativa
ggttaataaaaccttttttgagaatttttgttttccctaaacttttttgtgtcctaccacattggtcctcaaactatttatatgaaaaaaatatagttaggttcctaatttactcaagtgaagtttcaattttgttgttgttcttagctcaatatttattagggttatttatggcaaaacttctttattatttgcaactattgcattgcaattgttacacaataattcttttttcaaccattttgttgcaagagcattttgttatggggaagagttgggatgggaggcatttgaaagggaccttttattatttttaaaaataaaataaataatttaaatcatttttaatcaaaatgattaggtggaataatggaaaatgaatttttgggtgtttttgttgctattgtaaattttcctacattttttaatgtgagaatgtggtaggtctcaatggtttttagtgggtaatataaagaggattgttattgggcacaagtagtacttaacactttttataagtgttaccttacgattggttagcgatatttcttaaaagtaatttttttaagttatacgagactcgttacttaattacaccaataacgatttaacatgaaatagagtgattgacactattagtactttttaacagttttctaatataaaatatctcttttttcaatttcatatttttccacaagtgatttttttgctcacactccatgcaaaccaaaatttatgacaaacacaccctaagagctctctatttattttatatcataggaaattattttttggatagttgaagcttattttcttaaaagttcactctatattttagctaatgactctgtttagaaagcatgattgatgatgtgatactttataaatagttagtgatattttattaagtattgttattagttatcagtagtatttaacaccacataaaaattgtgaggtggttagcatttatgttgttgcaatagtgcttttttatttttgactaataaatgacaactaaggccgtttgaaatcacataaggcacgtatttacttattattggccatgctaatcattc

SEQ ID NO: 8652 - DNA, 628 bp, Cannabis sativa
gggtgcccatgtgtggaatacacatctgagtagcatactcatccttcctgggaggattttcgggtgcagttttctaatatcaagttaatctttcgcattccacaatcagatacctttctaaagaagattaagcacattaacttaattgtctcaacaacttaaagattttgtccctaagtatacacctaggcggcgtacaatcatgttacaaaggaagagttatctcaattgcacttgtaatcccgtagcgcaacccttgtgtgtagcattttcttgacagataagacatgcctcgcaataaggaaataagacaacaaagtattgttctgggagcacatgtataccctaggttgcatacatcaaggctcccccttagcgcgcgcgagtgtgaagaccaagccgatatcttcatttaatgttgaagattgctagagaattaagatcaatcaaatcccaccgattgaggaaactgattggcgtgcggagttggacaataaatgctaattaattccctccctgtaaatataatccttccatcacaatgaaaggggtgggcgatttcatttgtaagcaaaaactcagcagataatacaactagtgagtctttctactctaaaaaaactcactt

SEQ ID NO: 8653 - DNA, 1876 bp, Cannabis sativa
gaagccatccaacactaagtgtggattcacgcaatggatgttgaaatagaggcattagaagctaatcacatttctctacaatgaaaccaacatgtcattagcaacaaatggatttataagattaaatataacccagatggctcggtcaataggttcaaagcccgcttagttgctaacagttatactcaaaaacaaggtattgatttcattgatacttatgctcccatagctaagttcaataccttaaaactattagttgctcgcttgctgccattaaaagttggcatttacatcacatggatacataaacgatacttttctccatggtaatcatataaggatgtttacatgaaactacatcaaggttacactccaaaaggagtgataccaaaaaatgatgtatgcaaattaaataaaatcctatatggttttaaataagcttccgatagtggtatgctaaacttagctccactctcctcaaccaaggctttcatcaatctcaaaatgatcatttattgtttattcaacaaagatcaggtgtattcttagccattctcatttatgttgatgacagtattgtggcaaataataacactactacactaacaacattcataattcaaactcttgatgctcactataaacttaaagaccaattttaaataaataaaaaaaacaacagctataagttaactatataacaatcaaagacaataagaaaaataacatcataacaattaaattataatacaactataaataaattataaaatagccaaaaaaacagattattatttttactaaaaaagtatttttgtaaataaaaaagttcaaaacgtaagaatgatatgaaaaatcttccatgttgacataattttatatatttttttttaattttttaacttttatgtaaaattttctttatttattatatttcggtagaatttttaacccatatgacgtttcataaatcttttccataaaagtatgaatatattttttatcttgaagtgatctaagtcattgtattcatgtagtaacataagattttacagtcttgttgaccaatctcatgctaccacatgaccaactcagaagatgactcgacctcaagatatataccattactattacaaagactaataaaaaagagattatattcaattacatcaccacatctagttatgttgtcaaagagattgggatgcttataataaggtaatcctgttgggtttttataaaattacatattttatataatttatttattacaataaagaagtaaaaatcatttttgttttatcaattttgttatttacatattttattacatgattaattatttttaaacgaacatttataaaatctcaaacatatagtaagttacaattatagtgacacactcacactggattataattataattacataatcaaaataattttgtcttaagattaaatcaacacacttaaactttgttgattcagcaatctatgagctgatctgcttacacatctagtgtgatgtcttatttaggacattgaccaagatatcattgaatgtattttgttatattggactggaccgatattaattatttataagataattaagtatcattaccctactaaaaaatccagaattctcgaaggctttacaccgttgggtaaagaattctcaacggtctataaaattgttgcctatacaagcgtcacgaattctggatagaataggcgatggtaaaaaaatgtcagggaaaagaatttctgatggtttaaaattgtcagttatagtcaatacaataggccacattttaaaattgtcactatagtagattctcccaaaaaaaaatatcattgtcttcatcctcctcga

SEQ ID NO: 8654 - DNA, 826 bp, Cannabis sativa
ctcacatgataatacggaaacaactcatcccacttgttggtgaccataaattatccaacctacagcatatggggttttgtctgaaaaacaaaccatgtgaatgtcccactattcaacttgaggtcaataaacctctattttcaaactagctcataaaaaaacttcacgctcttggtgttaatagaactattaattttctcttgaactcatctaaccaactcatcaaacttagtccaaccaacttgctctgtctttatatttacttgaaccatatactcccataaaccaccacggtatctttccttccgcctccatcaaaattgaaacagagaattctcctactaacgagcatataaccttgattgttcttgtattccaaactaccaaagttcctccaaatctccataatgatggtaatcgaatccaagctactttaacctccaaaggcttacaaacttcctatccacacctcctttaaattcttgtagaacaatttaatctaggttcctccaaatctccctaatggttgtttaacggctctcatctccgctccccactactcccctcattcaaggattcttcacataaaatccttcaactccctcttttttccaagcctaaattgtccatagcttgagtcaagaataccaacttcggttgattctcttatttcttttttccctttgccctgaattgaatctgctttaatctttttttctcacttttttggcacctcactgtcttttgtttgcatgttttttggtcttccatccatgttcgtgccataaattccttacatatggcaccagctcttctattccctccc

SEQ ID NO: 8655 - DNA, 655 bp, Cannabis sativa
tatgtaggataatcttctcctaagtcctatatctaggatgttttatcttatttaacaaccttcttaattaggttggtcatcctagctaagagggttttttcatttagttcttctatttcatatgtaagtcatattttgtcttggatgtgtaagtcttctgttttggatgcaagtctttcgtcttgtatatataaatcttctgtgttggatttaaggatctcatgcaagatgaacgtgtaagtcgtgtcatcccattcgagacatgtaactcatctcattcaaaatgggataagttatcccatccgtacaactagaagaatcccttatgtcttcagtttttaagctagtttgtcttcagttataaaaaaaaaacttgtaaccaaagtctattaggtgaagacacagttgttaatttaagacatatgggactgaagactattaatttttttttttttctctatatttttttttactttatctaaaattttctcaaaagataatttttttgaaaaaaaaaaccatatttttataaacttacaggactttaaaaaccataaaaataaaaattctccataaactaataaaatcttattgttttgtttataagtagtaattttctcatattctgtaaaaaaaaaataaaaaacccaaatgt

SEQ ID NO: 8656 - DNA, 523 bp, Cannabis sativa
cctttaagaagatttatttttaaagatttattttgttagggcatgtgattaaagattgtaaaattttgtttgctgaattgagaagtatttttgttttttttttcttttttttttttttattttgttaaacaattagttaatatagtggctcataaatttactagctacaacttcttatattttgtatcctagttgttgtttcaatttgaagtctttacgttattttataactgagaataatagttgataatgtttgaatttccattaaaaaaagagtaattgacagtaaaatctcttatgttttaattttacacttaaatctctaattttttttttgtggcaatttcctcgtaaatttacttttgtttacaaatttgaggtgtcaattaaatttcaatagggattgccacactttgaacacgtataaatgacatgttttcattggattcgtgtcacgtgtatgcatatattacagtgataatcctaattaacatttaacgatgaaatttaattggtacctcaa

SEQ ID NO: 8657 - DNA, 931 bp, Cannabis sativa
gaacaaccatcttcttcatagagccctcataacaactttgcttgttgtatgaacacccattgccacgattttcaacacagcacgagtctggtacaatctgcaattcaagagtgtgtcaattcaaatctgttttatctagtcgcaaccataaatattaaggtcaataatggagtcaaaatagtaaaaataagactctgaactcaatttttaataatttttttaaaatgtaactaacaattactagcagaaacagatacagaaaatataacaagttttgttataacatttctaaattgggtcattattaaattttattttgacaaaaaaatcaattcaagatcttggtccattttttcatttaacaaaacaaaaagttcaatcaataacttttgcaaaatacaagtccaaaaaggtatttacccttgaataatttatgatctaaggagataaaataatataaaagttgtcccaataaagatttcaaacaaaagcagaagacattcgaaataatatgtgggcctacatatatggctaaataatgggctaaaagcatatctatacatcaaaagtatgcttctgctcttatagtgtttctcattattcttttatgttcttgccatggacagtattaggattaattatgtacaggttaaaattcattaagatattgatgcattcaaaaggctcatcgatgaattgagagttttaagatatcaaaaatctgtttctgtcaatttacttggtaagggaagcagttgaaaattcataacattgtagcaactgaaagaaaaaacttacccggtcagagcaagtccccaggtcgccaaggcataaaacaatttcccggcatgccaaatttcgaacatctgggtcagtttgctcacactagctaatgcttttgtcatggctgcatattttcagcaaaaagata

SEQ ID NO: 8658 - DNA, 656 bp, Cannabis sativa
ttaggctagcatgaaaaacggttgtgttatcgtcaccttccttcaaccattgaactttagttctggtgaaggaaagagagatatggtttgtgaatctccatgtattttttcctcacttccatctccttctgacataaatattcatttaatgcctgattttgtaaagcagcctgactgtctatcatattatttaaaagcctgaacatcagcagccactatatctccaactcgagttttgccttccacatgcttcttccagtttccttttaacagctccacaaagccttccatttgctgacacattcgaaaaaaattgaaaaggctgtctttccattttaaactctggatataccgttaataaagctgcacaatgatcaaagagaccttcccaaataaaaacaacctcaacatttcatatttattcaaccattcttgatttgccaagaccctatcaatttttgaatgaatccgagtagaaatttcttgcttattgctccaatttttgactttacaagcttccatacactccttaaacgctgttgatttacttactttgacagttctccccactctttcatcggggttcaatatatcattgaaatcccccatgatgagccacagttctgtactattggctgctatcatttttaattctt

SEQ ID NO: 8659 - DNA, 567 bp, Cannabis sativa
gctatgttggagttgaatgattgcacatagtatagtaagctggcagaatactggtgcaggcaggttacatgggtcaatttggaatatatttgcactacgagtcaacaaaacaaaatgaggggaataagaaaattctacaagtgaaaatccctttgtatacactgttaagtgttaacttaaacctttcaaataaataaatatatatatatatataaagcacagagtacatattttctatttcactccgacaacatcgtcccattcgattatggttagaaatgagcttccagatttaataaatggagaaatgaaagataaaaatgtgaaaagagaagtgaagtatacattattaagaagctgattaacgatctgttgaagctgctgaggaccagagttctgaggaaggtacatggctggtcccaagggagcaccctctgggtcagtcagtaggcacatcacgttgttcacaatctccatttctccctgtcctgacgcttccacctccattttcgcgtattagggtttaagactcgaaggttttgagttgagaaggaggttaaaggttta

SEQ ID NO: 8660 - DNA, 755 bp, Cannabis sativa
aattctttaatattcaatgatatccttgtttgattatgattgtaactcaaaaagaaatataaaaaagttgtaacaatccttcactttgttggatccaattcttccaccttgttgaatcgccatctcgccttaattactaaattaatataatattatctgctttgatcttaaagtccttacgattttattttacacaccttttaaaaagatttcatactaatagtataggtagaatacttatatttaagacaactcttgtttattgttctgataatatttcaaaactaatgtgatttaggaaatgatattcactaaccaataattttgtcaacaaaaaaagaagaagaatatggaatatacatttgaaggtcctattgggaaggtaagatttttctatataataataatttttttttcacaattttggggcatgagcgattgcgggttcaaggagtacgtttggcttgcctacctttaggctcggccctagatttttcttttaatttttaaatagaatagttattttactaaaataatagaaaagttcaatactttcaaatataactaaataaataaattaagtaataagtggtttcctttcattagtcaaaatatctactcatcctaaataagatatgtatgagtaggtaatatcaatgaacttccaactagttaaacattgagtttgttattcattgacataaacggctagtagttttgtagtagctactcacgattttgagattaattttgta

SEQ ID NO: 8661 - DNA, 644 bp, Cannabis sativa
cggcaaacaacttgaaccaatctcttcccgatttggcttctcaaatttattatcccaatcccaacccatttgaggttcatcccaattattggatgccttattataattctatgattcctactccatatccatatcaatatggaaagaatcctatgaatataggagttaattttatgattcctaaccaatatccgtatgtacatgggcatgggcagaattctatgaatatgggaatttacaatcccaattaaatacattaagtagtggaaataattttaattgaaaatttaatgttgttttgttcccatttatgtcatgtctttttaatttttaataattaataaattatttttcataatattgtttttcatcatatgataatagttattgttgatgctattttttttttttaagatcatatattaaagcttgcacctgcaagtatatacttttgtgatgtaaaaaaataaataaatttataatgtgtaatataatatactaaataatttagttagatagcttaaaatataaaatttgtgaaatcatgtgtagatattatatatatataaaatataattatgcaaaaataaaaaataacacaccaaaaactattttgctcaatttatgaattttttttttttttt

SEQ ID NO: 8662 - DNA, 757 bp, Cannabis sativa
tagtaactagtaaccatattgtgtatccatccatctagctaataccattattgttattattaattatgttcttcactgtttcatttcaattctccttcaatgttaaattccaagttagaatgtgatgtgttatatgcaagttctattactttttatgcagtaacaaagggaaagatatcacaaaaacatgattgtagcttagatttgaattttatgattgaaaaagtcatcctattagaatgaatccattctaaaaatgaaattgattcttttccattccatttcataaaatactaaagaccaagcaaagtatattattagagagctgaaccactataaattatgttataacaaatactaagataagagtaagggatgatcaatactaacattgacattgttcaagtacatacaatatcaagttatgtactatactcaatatggaattgatggtacattggttttatgtgaaaagcagagttgtttcattaaggctataagcatcatcagctgaagcagcatttgctcagataggtcgcctttcagtccaccgttcttggcttatgacaaatttgactcattttccgagtttcttatttacttaaccaacgagggattggtttgtcgatccaactcaaaaaacggagagaggcatggattggttcgatgaggaagcccagttcgagctcccaacgctctacagcaggctcccgcctggaaattaagcatataggaaaaataggtgaatgtgaatgtg

SEQ ID NO: 8663 - DNA, 738 bp, Cannabis sativa
gaacactaatcacatctctattttacaatagctatgttgtttataaaatgactaccttgattattttgaatacttaatgagttagtgagagacatgtattaagaatatggttttattaagacttaaaattaaatgaagatatttatgttaattaacatgtgtcaattatgtaagttaattcatgtacaacttttgtttatatgatcattttgaaaataaattaaaagaaaaataatgattgtgatagtactatatatacatatttattctatgtataatatactaaatcaattatcattatctgctttctttattaatactaatttaaattttagtgatatgtttacttttcttttttaaatttgttatttttgattaattagttatattatattaataattattaatacatgtatatataccaaaaaaaaaaaaaaaacaaaataatcaagcaaatatacacttaaaaaaatgacaaattacattaaagatattttattgtgaccaaagttaattttaggaataaaatgtcaagttgttttcttaaattaacaaaataaagaacatattaaagtgagcaacaaaagattattatcccccactgatttggtgtactcttttggatcatattccaccctcttttggtatattgatgctcctctattcatgtttgtggaaatgtaataatatgtattttgtgtaataatatgagactttgttttcatttcataattctaa

SEQ ID NO: 8664 - DNA, 631 bp, Cannabis sativa
acaaagttggtttttgagtttagtcaacaatgaaccccagcagtccagagacgtcaacggtaacagtcagtcaaagaatgactgagtcaatgtgtatggactaaggatcattaatcttggaaatccatgcttacaagtctcggggtatatccatgcaactcagagttcaaccctataacaactgatgagtagagttagtaagatcaacatactaggttaaaattgttggaggatattcgtagtgatatgttcaaaattagatcttgccaaaagcttaagagtcaaagatcttcctcttatctttccaaaacatcttgaatcatctaatttcgatgtatatagagagagtgatggtcaaaacactaaagacttccaaattgtgacagctcccatgcgagctgacgagctatcgtgcgaaatcctagatattgtgtgcctccatggggtgttgtgcgaacccatgggctgttgggagagcagggacgaattttggtgagtcgtggaacctttatgcaactcgtggagcatccgttcaacccgcaggtgaaagaaggagaggctatacatgtgtagatagacgtcatgtggggggagtgtcggagcaagggcatgggggctcgcatgtgaaccc

SEQ ID NO: 8665 - DNA, 555 bp, Cannabis sativa
tttttttttttttttaaattgtcaaaaagggaaatatcagttagatctataatacttgaaatattttagaagaaaaaaatatcttttttttctgctggttgaagtatactttttcaaaactaaataaatagaaaaaagataaatatataatagagtaagtacttaagtataagtaaattagaaaaaaaataaaaaataaaaaatcaaagggaaaaatcaagaatatcgaacacgtttcagttaagtgagccaaaatttggaaagtcctcaaagaacaaagtatcctactatccttcaaaatcacgtgcttttattgtagagccaaaatagaatccccactaactaaaacttttaatataaaaagatattttttattatttaagtattttaacctaataaaaaaaggaaacttatatttaaaatttaataattttaaatcaaatttaaaattaaaattcaaaaaaaagtttcctgtatatatacgagtccaagggtggtgttttagttagctgtgcgttgtgagccgcataaataaagactctctctttcatttat

SEQ ID NO: 8666 - DNA, 823 bp, Cannabis sativa
cggtggtggccgaacgcccggcgacagctggtgaaggtacttcggttagtacgttgcatggtactgtgcatggtggtggacgtttgcggagtacggacatggatgaggtggcaccgattgttggattgcaagtggtcccaggggaggaggttagtacaacacgtgcagattgtttgaatattccccctcaaaaaattctctctaagctacctacccctgattttgctcacgtggggttaggggaggatatggaggatttacctgatgttgggccttctttaattcagtgtcttgatatacctcatatttgggcctgtaaatctcaaactccacaccatttccctgagcccactcacttcaaatggccttcaaatgaccaggccctccaaaagctttatgttgatctactagggccgaactatacagatatgtatcaagcccaactctcattaatttcgaactcacctaatgtctcgaagatgattctccatctgttggggtctaagaaacggaaagcccatacatggtataatcccatccctgagaaattcttagactctccttttgaaaatgaaagttgtccccctgagtcgacggtgagctcagatgctgaagcaaataaactggaaggtaataatggtctcgaagtggcagttgagtctttcaagccaggttccagtgagggtgcgacaagagttaggcaaaagaagggtcatagggcaactgtttcctcaacgttgaagaaaagctcgggtgtgaaaacaagaagaagcaagaaactgatcagggaagcgagtgaaggtaaccatttcaatattgatga

SEQ ID NO: 8667 - DNA, 721 bp, Cannabis sativa
atactcaaaatcatatcactgatcccgaccaagacaatggttcagtgaaggtcagaaaaaagaacgaccttcgatagttatagatttagaaacgaaaaaaccttaatttttgtttttttagaatatatatttatgtatctttaacttttgagagaaggaaaaagaaaaagcaactgtttgcctttgctgtaagttgtaacaattttcttggaacactggttatgtgagtcatttaccttatgcattgtgctcatgtattcctgagatttctcaatcaattcctacttaagtattttttttttcttcttttccttgtgtgctgaaaagggttgttagttttacttcaagtgaagttgtgtcacactcacaccggccattgctctaagaaacttcatgatcgatcatcttctacttaattagtacaagtatttgggtgaacatgagaaatagaatctaaggaaacaataatataacatatgaatggtagttagccaacataaagaggcccccccacttctcttagggaccactaaagagaaatcaagctaatttggtctctctctgtgtctttcaaacaaaaatcttcacacgtgattcacatgaagattgaatctgatcatgatatcagaaacttagaagacgactttcttctattcaaacatgaagcaagacttgtcaagtttttacaaaggtttaaactaaattaatatgaaaaaaaaaa

SEQ ID NO: 8668 - DNA, 1352 bp, Cannabis sativa
atgcataggtacattatctttaggggcattttagagtcacacctaaaactaattaagtctaatttgttcatggtcgtaggcccacaatgcaaccattatttttgtaatacatgtaatgaatgcatctatgtatattttcttttggtgcattttgcgtagctaattccacgagtgcattacttttaggtgcattttagacttatatctaaaaaaagttaattaggtctaattaggctgtgcttgtaagcctaattaggaccgtaatgcatggcgagctttattaataccattaaaaggattcaaaacctacaaaatagtaatattatatatacatataagtttttgggaaatgcatatatagtcagtacatatacattttctttgcgtaggtaaatctataggcgcatttagcactggtaattgtacagatggattatttttgtcaccatgaaaactatcacggtctaatatttaattatagaaattattaaaaataccctgattaaaaaatcattagaaaaattatagttttctaactcaagttatcttgggtaatattatctttctggctttggggtaagacagtttgaagtagtaccatacagatataaagtgataaatgagtgttattgctacttggaatactctaaagttatacataattaatgttcgaataaaattaaactaaatacattattaattgaagaatatatatgataaaaaataattatgttattaaaaaagaaaaaaaaaaccacatactatatttaatttgaaccaaattacatttattttaaaatttatataagatgactaagtaaatataaatctacaattaggacacttattaagtctactgttaatatatcatgcatacattctaggtgaaacatatgaatgaggaaattttcttacgtcatctcccttttgaattattctagttatattggacattcgtctccttcgaatgttatattttctccacaagaaattgccttctggatgttcgtctatgtacattttctttgatcaagtgcattttgcataagtaaatgcataggtgcattatctttaggagcatttcaaactcacgtctaaagctaattaggtctaattaggccagagatgtaggcctaattaggcccgtcatgcaaccgtcatttgtgtaatacctgtaattaattcatctatgtacattttcttctggtacattttttgtaggtgattccacgagtgtcttacttttaagtgtattttagactcacatttaaggttagttaagtctaattaggccgtgattgtaggcctaattaggcctataatgcatgacgagctttatcattaccattaaa

SEQ ID NO: 8669 - DNA, 580 bp, Cannabis sativa
tatctatatgggaaaattcttagttatggctcagaatggtccgtcatttttgttcatatattaatatttttgaattattgacataaattatagaactcacttttttattagacggtatttgtaatatagttttagttatattttattaattttgaaaactttatagagctaaaacaaattattttacttgtgtaataaattattttttgaactttattttttaaacggtaaatattatttagaatttttcaaaaatttataaaatattttctataactataatatataacacattgtcatttaaaaaataaaaaagattatactttctcttaagtatcgaaaatagaaaatatccgtatttgatgataactcggagttataaagggaaaccaatatttaacaacagccattttttattatggtgttttccattttttcatatgatgtgataagagtttgttacatatttttagccttaacaacagccataataggccaaattttcaatataatatggtataattatttgaaaataataataagaaaaagttgtcatttcctaaaatcaatatttaatacg

SEQ ID NO: 8670 - DNA, 608 bp, Cannabis sativa
gaaatgatgagaaaaataagtaatgtggatatgtaaagaaaacgtttgaataattttttgtcagtgataaaaagattaaatcgaattgatttagagaatcttgagggaagtgaattgtatgtggaaagagatggtggaaaaaaggtgaaataatcgagctctatcgagttccatcgattagaagaggggagtagagtactaccggcttcggatgtagagtgaatgaactcaacagggtgtctttctgtgttaactgatccagacgacatttatttgttgttgtaaataagtgttatgggctaacgtaaatgtagtatatagtacttcattatccatatgaagaaataataagaacaaaagttttgattatatcaaaggaggtatataatataaaaatatattttatatatagggtaatggtcaaagaaaataattgaattcacatataattgtatagaagccgtcccttttaactgtgatcccaatgctatgttgtttgtcgcttattatgctctaacttcttattattatttaaagagatagagagaccaaaaacaaatataaattgttttagttcaaagtactgccaatatatatatatatatata

SEQ ID NO: 8671 - DNA, 879 bp, Cannabis sativa
cataatgtatatcttaacatttatctaatattataatacattcatagctgttcgaataattgagaaataaaattattattatatacataaaattaaactatataactacttttttttgtcttgttttctttcttcacattttaattatgttatatatatatataaatattccaaataaagttataaataataatagaccatgcttatatgtctattatacatatctagataaggtagttagctcaactcaataattcatccaattaatatataatgaatcactattatatatttacatatgtatgtatataatatgtcaagaaaaaaataataataaaaaaaatgttgaagcctcaatttcagaaatcccaaacccttctcaactcgttctgtaataagccattattcatccatggaggaaataatctttcatcctttcctgtttgtataattaggccaatatcccttaaaaataataataataagatcatcatgaaacagaagaaccttgggcttggtttcaatattagagcttcattatcaaaagatgatgatattaagtggattagggttagggttattgtgacagtccacccaactgtgggaggcatgttatctaaccttggtttaaagagaggccttgatgatactcaagatttgcttggaaaatccctccttattcagcttcttagttctcaactcgatcctagtaagtatatgtatatatatatatatatatatatataaaaattatgttgtcaattagatttatatatatgcttattaatgtatttttaagagaaagtagatttgagggctttttttttaagtgtattatatgttaattaattagtagaagtcattcatttaatttgcata

SEQ ID NO: 8672 - DNA, 1257 bp, Cannabis sativa
aagaagaaaaaaaaatcaaataattaatgggcaaaataaggaaattaataataaacaagcacatcaataatagtattatgataataacattgaaatttaaacttctattcattcatgtaatttaaacaacaaagaaaaagaaaaaaaaaattaactttcaaatctatgcttaacaaaaacataaatggcaacaaaataaaatttgaaggacaagggagtggttaagacgaacttgaggcatgggatagcaactgaagatggcggctaaagacgataattactattggattggattaaatgacactctaccctgcgcacacaataataaaagttgaagatgagttcttcacacatttagaagattaaaaattggttaaatatgtcatctgttctacatttcccttaattttgcattacagaggtttatgttaatgttgtgtgagattagccaacaatcgttaggccactactaaaatactaatctcacagtgagatctacctgaaattattaactaatctttttttgtattattattaaaataaattaattaatattattagttatctctctctcttttcttttcttttcttttttctttctttcttattttttttttcaatgacaaactatttatcatcataactaaaaggaaatttaagtttcttacatacatctccatgtgattgcaatagaaaagcaaacgaaatcggttaagcttgggaggaacaaacaagcaacagtttccattccaataccatatataattggaagtagagactgtagagtgaagagaaaaagggtaaagatatgaagagcggtggctcttcgtatgctgttccgtcaaagaagcgatggcgagggttagtgattggggtactctgcctcgttatcctctccatgctcgttccactcgtcttcttgcttggtcttcacaatggctttcaatctccaggtaacttaattttccacttccctctacttttttcactgccatcatgtctgttcagccaaatctcaattgctcgtgtttagatctgtttcttcttccccattagactgtctctactactcctctgttaatggcgatttgcttttacattctcgatttcactcagatcgacactattctgtacccgaattttgaatctattttgtccattttggttccccatggatgtttcagcttacacccgtttgctttcttttgctaaattccttcttatcttttcgtctcatgcaggatacgcgtctgaaca

SEQ ID NO: 8673 - DNA, 653 bp, Cannabis sativa
aaaacggcacattaccgagaaaggcaaaaaccatgcaaaatttccatctttctcgttgaaaatacgtacataaagaaatgtgcccatatgaaaagaatagctttattgatctttacaaagatgggtccttcacacccatataaacatggcttatttggtaacaaaatatgtcaaaatttcctgtgaattcatgtcttataaagtccaaaataaagcacaaaaaatgaggtaactatagatcaccatttcgaatgaagatttccatgttgtctatcaatctcactttcccaaaccatgcagcaacgcaaaacacaacaggacttgtaatttcttccacagccttcaaactttcttggtcaacaatctgctaccgtaaaaaccacatttttaaaatgaacataatgcaattttatatgtatattctgagggatttcctagtattaaaggaccccttttggtttttgtataagttttaatctacagggtaattttgaccaagtcaaagcacttgaaaatagacttttatttttttggggtttaccttagcataatcaactttcccaccagcttcatggattgctttcatgaccaaatctctttactcttgacaattaacacaacccttctcggcagcaattctagctcttgacaaa

SEQ ID NO: 8674 - DNA, 1542 bp, Cannabis sativa
ctctaaacgaagttgatcattaaataccaaacttcaatttcagccatcacacttcattattgtttttcaatattatacacgcattactacatatcataattgacccatcagtctcttattaaacttcaatattggtctttctacaaaaccgcccacaaccaccaaatgtttaaaccgaaagatgatttatagtattgaattcaatccctccataacgaaagtattataaaagggagaatcttgttttatttttattttttaagtggtgacttttttattaggtactccaaaaagtaccacttggacggccaggtcggcatgtgacatgtcatgtaagaagaagaatccaaccatattcatttatttatttgtttttggttaatatattactttactttagtgtaagaaatttgaatactaagtttgatatatgattagactaaaaatatatactaaaaaattttaagaaacctcaagtgacaccttggattttcaaaattggctggtacagactcattcctgctcatttataatagggccatgcttaatgcataatggttgttaaatgaattgatgaaaaccctctttagttatgacctaccttccttgtttccctttccaaccttttattttgttgtattaaattattaattaagattttatttcattttcattccatttcagactaacatagaggctagcaactactttggcttataatctcacaactataatattatatttgattttttttcctttttctgcaaaacacaagaaacttcagttaactaaagattttgatgagccaatagggactcacttccaaaaaaattgagtagaccatcataagagtatctaaacctcatttagtaaaagtgtaactcgaattattaataagagcatgtttggtattttttttgttttttattttcaaataagtatttttagaaatgagaacaaaaaaaaaagtttttaaagttttcaaaacacaagctgcattttgatagtgttttctaaaaataatattgaacaaaagtgaattattttttaaaacagaaaataacattttgttgtttttaaaattcttgttttttgtaactttattttctgaaaactgttttaaaaaaacaaagccaaacaagcctaattattttcaaaaaataattttctgtttttaaaaacaaagaacaattttttagttataatgtcaaacatgcactaaagttccttggaagtcaaacaacattacaaggaagaaaccacatctaataaccattttttttttttttataaataaaaaaaaaaaagttagccaagttccaacgaagagacacattgaccacgataacttttgcaaagtcgctgatagtcaattaaaagatcaacatcacaaaggtttagtctaaggaaggaccccaagccatgaagtacagccaccaattcaccttaaatcattgagttaatattgaccttcgaagcactcaaagctaagacctccccattctagtctcgcaccacagtaccagcggccccaactccaac

SEQ ID NO: 8675 - DNA, 857 bp, Cannabis sativa
tacggttttgcttcgccacaagtgagggccttcaatatataacagaggacgggccagtctaagacatagacatgtgatctctttctctttcaaaaaaagtatggtaagtgaccaaagaaaataattttttcgattacgcacacatcagtacatcatacatgaatgtccatgatttttttttttgtacaactgagtatgtacttagataggttcatgattactaagttacctgtggcataataactgaatttataagccttaagtgctagtacaaaagtattcattaagttgatcacaccacatgtatagatattttctatacctagaggttgttagaggtcataaagatttataaggcaaagagtaaatgaaaacaatgttagattaaatccacgatgattttcacaatcttcgcaggattaaaggtcacttggatcgaccgactaaacaaaagaagaaatagttggatgggaaccaagtcccaagcaaataaaggagacaacaattagctctttatgtcgagcatgacatcgattgtcgcctcgttctctccaggaactacgtgaagcacctccccacttgaagggggtctcttggccgagcacctcgctacatggagtacactcaacgataataggacaatcatgatcatagtccttaaccttagacacctcatccagtcaagatctgcaaccagctccctctggttgcgttcctaacactccctctcaagaatgactttaaagtgctcgggaaagaactcccaattgatatgtgggttatcacacacagatagtacacaacattgaagcacttttgcaggtactcgaccttgtcgaccacaatctgactctgaa

SEQ ID NO: 8676 - DNA, 725 bp, Cannabis sativa
gaaccctccaaaaccagaacaaactagcaagctttcctcaattttttgaagcttattttagctaatgataactagaagaaacaactcctccatcctccaaagcaatctaaggcaaaccctaaccttaattcattggttttctagggttttagtaggttttagtggctattttgggtaggactcgttgaggaaatctagggaggttataaaaggcttcctagggttgtttaagactgattagattggtttgatgtgttttggttggttgtagcaaaagttatgcaagtttgagttcatggctcatgctttataacttcatttttattgggaatttagctgtggtttcttcataaaaaatgttccttatgatgtgtatatgttctttacaaaatttggtaaggttttgctcaagatttagtgatatatgaactttttaagatcaaacaggggaatttcggaccgtcttatttctaaaataggtcgatcgtttttataatggacgacccgttttgagacttgtcccaagatcccaattttgtattttctcaatatttatggtatttccatgctatctatcaataagggagcttatggtggtgaattaaagacctagaacgggttaggtcaagttgattaattggttcttttttgttgttgtgacataaggttcgagatcgttgatctctctccattttgggtcgaccaacatacctaaattggaactt

SEQ ID NO: 8677 - DNA, 889 bp, Cannabis sativa
atatatattatattctcttactttttagctagccatcacatgaaaattattagtactaataatctctcatcaattttccttatagtgtaataaaatccaatttttttcaatatataagctataccaaaataacctttattttattttattattattaatttgtttctttggttgttgatttgcatgatttaatatatacctatataattaagattattgtttaataattttattcctataggctgcgtcaataatactatatataaattacatttatatatgtagagtaattaaatagctttatacatttctagcaaaaaaaaaaaaatagcttaataagtatatcgtgaataatttgtattatatttagacatataatatacatgcactaaaaaatattttttgatattttttggacattaaactataataaatttaaattaattgcttattataatatatatactcaaaaacatatcctatttttgttttgttttggtattcatatatatatttttttaattatccacttcgatcgtaataataaaagaacaattattttaataaattaacatataatgtgtgtgactatgagtattatatcaatgattaccaactatatattaattatagtcactaattaaataaacaaattaagagtgtgtccttaattaatttcttattcctatatcggaaatcatgaaatatctattatctaatatacatatatagatatacatatacataacacatatatacttaagatgaattgtgaaaaatatgggacaagagaagagcatttcaactctttacaaatggaatattaattaattgacgtgaaaaaaagcaactttagcatcgaaactatgtcttgataaaaataaaataa

SEQ ID NO: 8678 - DNA, 976 bp, Cannabis sativa
tgccgggactttggtcaaggtaattgagctttccagcttccatttattcttttccttttttagttatttcaaaatgtttgttaggtgagttggggttggatggactatggagtagagtttgagagtgattagattaagggtgtatgaaattcaagtaccatcaagtaggactacaaacctctcattaaaatttattttccaaacatgagttgagttttacgttctcattcccacataatctaattcccataccaaacgccccattattgtctataaccatggaattttagttcttgtttcataatgctggtgagaattatcttattttaatcccaagtccataacttatgcaagttctctaaattaaagaagtgcatgtacacaattctctaacttatatggggtttcttcctactctgaaattatagagaaagatgaacaagaacatttcataaaatttgcatttgttaagttgttaatgttggtagatactgtctcctgttaactgtaaaattagttgttttatgtgatcatgatactatttccaagtgtacgtttgttgtcattatgctattctaatattgatacatgatatgtaattggggttctttgctcatcttcttaagccatcagtaacaacaaatgaaattgacaaagcagtgcatcaaatgattattgaggctggtgcttatccttcaccacttggttatgggggtttccctaagagtgtttgtacatcggtcaatgagtgtatgtgccatggagtacccgattctcggcaattgcaggtttatttctacttgttttcttttgatttttgggtgacatacataatcggtttcttactagcaatcacctttctgcagaatggagatataatcaatattgatgtgacggtttacctaaatgtaagcttctaagttacatttttatttttttggatcttagttcgtatgctttttattcatttttaact

SEQ ID NO: 8679 - DNA, 1430 bp, Cannabis sativa
taaagtccaaacaaataatattgttttctttaaagtaagatttcaccactttgtattgaaatgttttcttgattgcaaagtagcatagggcgcatataaatgtatctttgtccttgtaaatttgttccttttctattatttcatgtcgtttatcagtgatgataatcatttctgtattttcgacttgttcttcttctttctggttttaagttgctgtacgatttctgaagcaacaagctttgcgtagtcggtgaagtcaaaatattcatcttctgcatgaatttttgttgttgttgttttctagttgttgtatggttgactctgatgttaaagtcacagtgtcgaccaaaatagcatcatcttgagcgaatccaattattgctataggtagttgttgcttatttgttgttgttgggttgttactaggatgttgcgcatctgcctgagctaaattattgtgatctactgtcatcatcatattgttgcacatcattgattggttaggtgccaaaaaggtttgtttctatgtgttactaaattttgttcacacacaatgggtaccatgtgaaatcattttctttgcttaatagctttatgtagaacaacagacttttgtcattcttgattcgtagtggttggcatccttctttcagttggtatttcagttgtatttgtgtcgtatcatggttccttttcactagttgaacgaaattgcaatctctttatagtgattctccacttgattcgtaatcaacatatttgttgtcatccgaattgccattgctctgtaccaaaatttgtagaggttatatgtcctgaaatttgtgtatttgttataattttttagtatcaataattgcaaacaactattttaatctaataaaaaaacttataaacaactatctttttcaataaatattaaataacatttaattctactgtatttgcattttcttaaaaaaaaaaactaattcatatgtttttttagattgtgttcataactctaaactttgattttttatttgtcaaaacaactgctaaacaacttaaccgtaaatgagattttatttaatagttgttgttcatttttacacaaacaatcattataatcctcgaaaacaacatatatacaactgtttccagaaaaaaaaaatagtagattatatttttatgcattagtatttttttcatttgtaatctattcttatttatttattaagatcaaccaaatttctataccattaattttttatctgattttcacgatctaaacaacatttttaaccatgaagaatacttaattaggaagaatatcattagaaaatcattaaaaaaaattgtacattgaatttcttctctgattcgtttatggataaccttcgaagtttattcaatctccttgtcttcaaattctctgggcagtacgattt

SEQ ID NO: 8680 - DNA, 978 bp, Cannabis sativa
atatcaatggtagaacaacacacttaagtcacatacatacaagagtacgagagaatatgattcctttattgattgtatattaatgaatacaagagtcactgttatcttatgactatgagcaatatatatagccaagggactttcaactaactaacagtcatgaaatgacattacacaatcgattacattctttgacaagccatggcccacaattacctatattaacagtctaacaccttcatagtctaacttagttaacaatataattctaaaccaacatatatgatcacatcaaagtagtttccacattgtcaatgttgttttgttttcttcttctaattcttttgatgattaggtttcgtaaccatttaaataactttatagcaacatgaatcgtatggagtagtgcaatcaataacatgactccagcccagcttactactaaacacagactcactttagctggagtattgagaatatcatggcttggagcagcaacaataatagcaataaggtatgtaatggtcatagctgtgatagtcacccacaaaatcactgtcaaggtccacatcaagaatttgcgacaaaagggcaagcccgtgacaagtagtaagattatgctcaatgatccaacgaaccccacggtgttactaatcaagtaagcatgataatctgacatatttgggtaataacttattattgactcccctgcaacatgggtaacatttttagaaattgactcgtcatatgaggtgccatgatcttcccaaagaccgcctggaggacttattccggcctgaaaagccatagtggcaataagggaagcaacaatcattaacgattctctctttcttactaaccagccttctggattttttgtttccttattgttgtccttttgaattttttgtatttgatgaacatgatcattacgaatctcagggctagctatgacatctcgaatgataggccttttca

SEQ ID NO: 8681 - DNA, 601 bp, Cannabis sativa
aaatatttcttttcaaaaaaaattataacaatattcatcatctatttaaatttttttaaattttattaacatgttcgataaactaaaatataaaacactttaatacagtaaactatttaaaaaaattaaaaaatttataaaattcttataactataacaaataccattattaaaaaattttaaacagaaccatgtaatttcaagtacaaaagttaattaaaaagtttaatataatattataattaggattcctctattcaatatatatagggatatgattttgtcctgttattgtactttcacggattgtaattcgtgatgtacgacagccgtcagatgaatgagttatttgatctgacggcggaaatcgatataggggtaattagggttaaaaagtagaaacgtatcctgacacttatttaatgtaccctgagactcatctaatgtaccacaaaatacattccgtgaaagtacatcacagaacaaaatcatatccctatatatatatattatatgtatgaaatatgagaaggacaataaaactttaaaccatttatgccaggtttggtctggtgccataaatccatccattttaaacaaa

SEQ ID NO: 8682 - DNA, 626 bp, Cannabis sativa
tttgtatttaggtttttcttttggtcgtaaataataagcagaatgatgatgatatgaagagctctctactttggggtgtctgtgtctagagttcatcctagggtttgtattcaatttggtgggtatgttactgaggttagaggttcatgtgatgatgttacaagttacaacatgaataaaatataaagggcagatacgacgatacatagatgagtcagccatgtgaagtgttttgtcatctagcagcaacttgcattatgaacaataaatatgtaaataaatgtggtctttgaggccaaacctttgacttccacgaggcaaggaccgaggagagggggccgaagcagaagacaatttttggggtcaaattttttaacctcaaaggcacctcaccttacctgccatcaccacattacattgtgaaggtgggccacgttgttgggtattaatcactctttcagtctttcactatggctccttccttgcgtgtctcttttttcttcccaaagaactataaaaatggctttaacgtttttcttatttaaataataagttttagtcattttactaacgctatagacatggcaagcggttcaaaataagtgtgtgacttactggatcatata

SEQ ID NO: 8683 - DNA, 674 bp, Cannabis sativa
agatggaacaggaagaatttgagttcagctctaatccggaaggagagacaacacaacctaaaagatattgtaacaactccaatgttattcaagattccttagttgtgagaatcaaaggtaagagaaatacaagtgaaggactaagtgaggagcaacttacaagaaactcaagacattgctgcatttgtcgcgcatctactcatgattatcgttgatgtccaaaacgtccacaaaataatggatctcaaaggtcacgatctagcaacaatcaagcaagagttgactcattcaatgaccacacttatacgtattttttaaacccgcgtgtcacaatacaagagtcatacaataccacagtaactcatattactagctagtttttatgatttaacttttatgatactaatcactgattcaaaaattctacttttatttattttattttatgtttgaggtaggtatttaaggtaattatttcatcttgaacaaattttaagaaagaaataatatatatctatgttgctttaaaagttgcaaatccaacataaattgaagacaaattattgatggacaactaaattagtttaggtaaaaaacctatcttataaggtaaaaatgtaaaatatttctatagtaaattttaatctaaaacttaattataaaaaaaaaaaaaa

SEQ ID NO: 8684 - DNA, 927 bp, Cannabis sativa
tttaattttaaattaatacgtatatatatgagatcgaaattttagttgcactactaataatgacctggtgatcctactctttagtatttctcttggaaaataaaaataaaagatcgttaaatactaatttatccacatctaaaagatcaaatatgaaaaagtattaacatggaaaaggtggaagtcctatgtcaacaatatttagttttaagattataatcacgttactttcattcaaaaaaaaaaaaatattaaaataacgttcattaataatactaaagaaagaaaaaaaaaagttattgttgattatatttggatatatttattaagtattgttattaggtattagtgttacctaataatttttataagtgacgtcttaatatcagttattaatatttttttaaaattatttttttaaattatataatatttaatacttaattacattaatagtgatgtgacattgagaaaggtactaagcatcaataatatattttaataattttaatatttattatttagaaaaaaaagaagaatcataaattaaaaattataaaattatgtttggaattggatagtgaagcgtgtagagtgaggaattaacaggtcttgcacgcatgtcttatgaatatatgagtcagctttgctttgctctacactaacactgtccaattgattgttgatacggttgcatggactctaccaattatacatggagcattgttattggggatcagtaatgctcagtaatttttatatttgtcactttaaaattagttagcaatattttttaaaattattttatttagttatttaagattcgctatttaattacaacaataacagtatcacactaataaaagtgctagacaataataatgttctttagcaattctcatgttctctctccaaaatgttttcagc

SEQ ID NO: 8685 - DNA, 1573 bp, Cannabis sativa
gaattagtgaatatacatatggatttggttttttgacaatacacgaaatcgacccgtgttcatgattagggggtgtttattcgattatacttaggtggcgtggaaaggaaacaatttttattctattcctttgtttggttgcattttaaagtattggaatagcatttcaatggaatgctctttctaccattttggtagaatgactatttcattttaaaaagaaaggaatgaccattccaatgtaacaagaaaaaatttaatgtttttttatcaatttttttttttgcattttaaattttattccatttctattcccattctcattcttatattttcatttctcccaaccaaacgcctctttaatgtttttaggcctatttaaattcgatttaattatatctatctatatttgatctaattatatattggatagtagattttactatttgattcgatttaattaattttagtcatctaattaattggattggaccagttttatccatattatatatatatttattagtttaatttaagtttatttaatacttcaaatttaatattttttagattgtatttatttaatattttaagtcgagtatgtattggattggataggtccaatctaaaaaaaaaagtaaaattttaatgttaatttttatatatatatagattttacatgtaataatataaaatttaattattcatctaaattaaatgaaaatattaattaatttgataggatgtattggatctttgaacactccatctatcatatgactcgatatttaaaaataacatacaattcgatcaaattattgttggatatctaatgtttgacagtcggttgtaaatggatcggtcaattcttattggattggatcgatttctacacacttctcacggtatggcaagaaaaaaatataagtttacgcacaacatgacacgaaaatatagacttagacacgatacaacacgcccgaaagcatgaattatctcgaaagaaagtatgacattacaatgttcaataatttgatagtaataatgataaatgtctattgataaattaaattgatagtaatatttaaattataataattataattattttttatataattatgtgtatatataagtaattttaattacaaaatacatatattttagtatttagtttatcaattgtaataaaaataataaaaatgcaaaaatattgaatacaaatttgaggtcatataagaaaacatgttggttaatttaagaaaaataagcttacccgaataaagcacgacatgaattcgagtatagtatgaaattatcgaatttgcgagtcgtttcaagtctactctataaaattgttgcaagtcatggcatgacccatacattacattacatcaactcagacctctcgcgtgcatccagaataaagactctaagtggggcaagctccttcttgaatatagttgataactataccaaaaaggtttgagttttcttacttaataacaaaaatgatatatctaacatttttgttaattggaaaatattgaaatcaaacaagtaagaaaataat

SEQ ID NO: 8686 - DNA, 561 bp, Cannabis sativa
aattctaagcaagcaagtatgcttagtgtagaaactctgattgtttcttctaatttttctctctcaaggttatgggttcacttttgtgctgcatatatttttactggagttgtctgctactttctttatgatgtaagtaacaccctgtctctgtatccatcactaatgtaatatatattatattagcaaataaaatttgactaatgtgtatatgtatgcaggagcattgttatatttcatcgaaaaggattgcttacttctattcatctgaacctaagcctaatcaatttacaatcttagttcgagctattcctgtatcatctgagagcagctgtagtgaaactgttgagagattttttacggagtatcatccttctacatatctctcacatgcagtagttcgtcgaactggcaaacttcaaggtctcatagtaagcatttcgtatgaacttttatcttttctagaggtgggggaggaatgtgcaggttttagatctgatgtaggtgggaattttgtgattttcatcagcattttcgcgggaactttattgataggggaat

SEQ ID NO: 8687 - DNA, 520 bp, Cannabis sativa
atgtatatctttttgagaaaaaaatactacaaataattatagagagagcgatagaaatataataaaaaataaagaatattacatgagaatgaggaagaaaaagttacaatagcattttcaccacttttcatgaatcttaggagcctattaataaaaacaaatcaactttttctatatcaaataattcatgctaatgagtaaatcatgaataattagaagtcatcgacgatggtgaagttgttgacataaaaaaaaattgtatgtctccaaattatgagaaatattaaaaattgagatcttgatgctatttattaatgttactgtcgaggtgtcatgcatacataaacaattaacagttatttaaactttaattaaataaaagaaaaaaaacaaatagattgaaagatagatggagaattttcatttaaaaaataaaagaaaaaaaaaggaaaagaaaaaaaaaagacaaagaaagaacgtgatagaaaagtatataaaataatacttatatataatatat

SEQ ID NO: 8688 - DNA, 575 bp, Cannabis sativa
ctcttcacattttttgaggatgtgtccactatatatagatggcctcctttgcttgaatttcactttacaatcatcaccttggtgtagtggtaaattcttctcaccttgtctaaaaggtcctgggttcgatccttcccaagatcattctttcaactcttatttctattatttagatgtattttatttttatatacatatttaaatatgcttggatatgttccacacttgcctccatcgtacatgacttgtttcacccttaatcttggggtagcattttaatgctcgcattttgatttatgtaataggtgtcttgctcacttcgaagcaaattatcctttttctgctatctttcctattccaagaggtatcatacttatctctatctcttccatttttgttatccctacattatgtatctagaatgcttgtagttgtggttcgtgtgttgcccttgtgttgtcagttgcatcacttgcaccctcgttggggcatacaccctcgtgtctaatgtctagtgagctcaataccttgattttacctcttaggttgggtgtgtcaaggcagcgcgtttcttt

SEQ ID NO: 8689 - DNA, 1019 bp, Cannabis sativa
  modified_base (310)..(316): a, c, t, g, unknown or other
aaaggggtttctgtggagtaagggtagcttcaaatattcctgtgtgggagtagttttggagttgcagacactgatgatattaaggtcagtgattgcactaaaaaaaacgagtgttgcagaaagcagtagtgggagagagaggaaagataccattattatggcagagaagagagagaaagaaattaagaatggccaaaagaggaagggggtttagactcagaggtacattgttgttgtgcaaaatggctatgtcattttggaagtgaatgaatgaactatgaagctaaaggaaggagagagagagagagannnnnnnagagagagagagagagatgtggtacaactgttttgtatgtgagcaaagagacgataatgcatttggctttgttgtgtattgtttttcgtttttttactttttataattattattatttttctttttttggaagaaagagcaaaaaaagaaaaggtaaagccaggaaactgtgaacagtgagagataggaagacatggaaccaagtttagattattaattaaagcatcctatgtatatcattttgttattctccaattaaatgatgccacgtatgaaattctcaaagagagaaatgaaaaatatttgaataacaggctgttctccgatcaaagtaaattaattacaggctgttcatgctgaaaaaacgaaaagaagaaaggaaaagtagataatgatattgggttttttcgaccttgaatttattggttatgggctcaaagttcaacaactataaatttttgtgaaattggcccataccattccctaacctaattagatcttaatgacaaagcccacagccgtgtaactattcaacaactttaattattatcaaaatatttgaatgaaagaggttcttcaattacaccgtcttatatgtgtataatattatattaaattatattttatgtcttatacttaagtaaaataatatttttatataaattaaaattaaatattgtattgaataataatataataaaaa

SEQ ID NO: 8690 - DNA, 964 bp, Cannabis sativa
attatctgaaacgcaatacttaattatactgatagacactaaaaaggactaggcaccaataatccaatttaccgtctctcaataataattgtgtttgcttgtgggaatatatatgtataaaaatatatatttatatattgagaattatttagctagctctttatctttatttcaagataatgaaagatgtcaaaattaaaattcaaattactcgattgcatgtgtaaaaaagtgttaaggcatagattcattatatagtgtattattatataacagaaattttatgtaaaattcgtattatttgattataatttcgatatatattttgttagcatgtatttttatagtaattgatgaaattaaattattagaagtagaatatattattattgacttattataaatactactcgtattcttaagatttttaaaaaagtgttaaagggcatttatgaagtcgggacggattcatgtgggtgagggaggctttgcagggtcaacactgaaatttagtgagctatacaaaataatatatttttcgactcttatttaaaaaataatgtgatattttttaaaattagtgtaaacatgtatatttttaaaagaaaaaaaagttggcccctagacttagttggtcctaagcacagatctaatctacttatatctaaggtcgggcctaaagttttgttttctcccaaatttttgatttatatataaattatagtatatttttttatatatataattattattgattttctttagaaaatttatatttgggcctcttaaagttttttacactttgccctccccctaaaataattgaaggttgcatctatcctaatatgagatgctatatcgacgcaatttaatataaggtctatttattttattttaataataataattatagaatcgttaatcatttataagacggtacgtagctaatgtagtcaataaaaat

SEQ ID NO: 8691 - DNA, 1019 bp, Cannabis sativa
aacaagagatcgattaacactgcagagattttccatcgatatagattattcaaaaagatgagaaagaaaattggcaaactattttcttatcagtactgtttgtttagtaagaaaattgagtctaatatcctctctctgaaagggtaattttgtaattttcttttgtaattttttcagtattcgttaatttgcatattaagaaattttattaaacatatgaaatcttagtgacaataaaaaaaataattttttttagatagaatatttttctacaatgtacaaaatgtagggtaaataattaattattacttgtggtaatttaattatttattttgtgcatttcaaaaagatgagaaagaaaattggcaaactattttcttaccagtactgtttgtttagtaagaaaattgagtctacgagtgagtgattcgaactgaatctggtgccgccgtctacctcgtaggtcttggcttggccagcattggtgagataaagggtcaacatcagtcccttttcttgataaaaagaaaattaagttaaaaaaaaaaaaaaataattactaataaataatattttaatatataaggtaattcaatagtacttattatacggatttaaacttgtttttctctacttatttatatgcccaaacataaatataaaatgttaatctaatattgatataaaccataataattaaacaaacaaataaataaatattaagaaaaaaacacacgaataatgatattattataatataaattgaaatagaaataaataaatactaattacctgagtaatttaagcacttctctcgcagaacccgataatagaggaatctttagtttatctgttgttgaaaacatggccacgttatatttggtttagtgaagctcaaaattcattcacaatccatgtgggactaagtcacttcaaaatattagagagaagaaccatgtaccagatttaccagatttatttccaacatgattctaaatgagttgtaatccaactcaatg

SEQ ID NO: 8692 - DNA, 809 bp, Cannabis sativa
caaagtttagggaccaataaaaatcctaactagcctctttttattaaaatttactaacaacagtttagtatgatactttttatgatgcctgacacctactagtctctctatcttacatataaagaaaaaaaaaacttgaaaactcatcatatccaaacttctaaaaaaaaacatcacacaaaacaacacaatactgaacacacacctttttctttttctaaaactttcagaacacaatttaatacatgttaaaattcgagaaacaaaaattctaattattttgacactcaaacatatagtgtgagacctaaaattaaaagtaggggacgcaatttttcttagtaagacaatgattaaaataaacttaaaaaactatatttttagtgaggtttgaactattgacttctctcctatatgctatctaacttaaccatttatttataaatatcatattttattacaaatatatatcgtaactaactaaaatatatatacatatttttccaaaggaagaactgtcccgcctcaattctatgtgagttcgcccttgtaaacatatgtaacttctcgtggtgcctgcaaacccacatagaggcaagacagggcagacctacatgtatgcaatttagttagttacgacatatatttataataaaaaaaataatatttatagacataatattaagttaattagagattaaatataaagtagaggtcaatgattcactttcttgcgtcaactttaaattctggatccgtcactgttcgccaaaccgaaaatatcaactttaaattctagatccgccact

SEQ ID NO: 8693 - DNA, 900 bp, Cannabis sativa
gagcaaagttcatctctcgtcttgggaaaaagtgtgtctccttacgaagtttggtggaataggctttcaggagggcagaaaatgaatctttgcttggatggcgcctaaatttatttgggccatttctagcaagcaggataatcttcagattcgttggatcaacaccatttacttaaagggacaagacttttggtcggtggctttcaatcatgatgctagttggtacttcaagaaacttttgagactcagagataaaatttacaataagatagtggcagatgctggtgataaaggtaagtttaaaactaaaatcttttacttatcctttattcaagcttaaaaaagatagtgattccgaagcacaaatttattggttggcaagctgtcaacaaccaacttttaacatgtgatcatctcagtaaaatcctatcaattactatagacatgtgtccggtttgtgctagagctcgaaagactcataattacctatttggggactctgctttcacgatccaggtggttgctgggttgggttgcttgattggcgtggtgatttttgtgattggttctcaactcctcacagaagtttacaagagaagatagtgaactctattgttattgtaatcatatactacattttgttaaaaacaaatgattatatatttaatcttgtttgtaaaactgctaaggttgtgtgtgttgatataaaaaacaatcaaatttagagtgttgggtgtgtgtaggagcatcaaaaacaaatttgacaatcatcttattaatgttttgaatagctggtaggtggctgttggagttggggttggggtagtctcgccttttgtttgaacttgtattttgtcttttttgaataaaaatttcctttttgtttaaaacaaaaaatag

SEQ ID NO: 8694 - DNA, 1096 bp, Cannabis sativa
ttttttttttgacaaaagatgaattcattagaaaataactggcatcagccataacaatgtcacacaagaaagacggacattcagctcattaagtatacaacctgacgagaaacaagactccctagcaatactataggcaaccttatttgcagatcgattaacaaaagaaatagaaacattattcaaagtacttaaaattgaacgacaatcctctaccaataacccaaactgtgatggcatttgagttgagctattaattgcttggactacaactaacgcatcagattcaaccaccaccttatcccatcctttgcgctttatccaacttaacgcctcctttattccaataacctccgctatttcaggaagaacacaaccccatctactctctgaaatagcttcaataagcttgccatgactattacgcgcaatacaaccaaaactaaatttttgttgagtttcataaattgccccatcgacattcaccttaaccgttaaatcatctggtttacgctatctattgctatttaaaatgtcacccgtagcatatacaacactaggcgactgaaatttagcaatcttccattggttaagaacgttttttgccgactgaacaacctccaaaactggtctggttttctgctaccattgcacctcattccgtgttttccatatgctccatccaatcatagcagcatcaacaactacatccacagaactgccttcgatcaaagcaaaaaaccagctagcaaagtcctcaattacaccagtaatcggctgtgttgcagcagaaaaaaaccagcaggaacgagcaaattggcagtccaagagcacgtgaaaaattgtctcaaagtccatattacacagaggacacaataaatcaacattcacatgctttgtttgaagttgcaccttagtgggaagacatccggagcaagctttccatagaaagtgatggacctttggaggtacaggaagatgccataactttttccagcagctatcatcttgcaagtataaccagtttcctctagatgactgcaagaacttgtaagcacttttaactgagtaaaaccccgaagactccatattccaa

SEQ ID NO: 8695 - DNA, 651 bp, Cannabis sativa
ccaatgtgcttttacctaacagaccaagatatgcgcatacatgagagagattaagaaaatgtacaatggaactatataagaaagcacttccacatgcatctttataacatattttgtataatatccaaacacttggatttaataagaacttatgaacacttctcttgatctattcgcaaattgtatggtgtaccagggtgataatctaacaggtttcacacgtataaattgaatcaacaaattcgttactatgagacattgattggaaaaaacttgaagaggtaaatcagcaaaaggttttgtcctaattctttgactgctcaattactcatattttccagattgattaaaaaaggatactcaatgtcacattaatttaactagaaggctgagtaaatccacatttagttctttgtatgacttattagtactacaatcagaggtaggctaattgatatagtatgctaagttgtactaccactagcttgattttaagtcaagactgaccttggaacacaggttgaaaagggtaaaacaaatgttcaaaataacactcttatcaacaaataatttgcaattaacatatacaaaacagacaaaatcaaaggtagacagatacaatgcatcccaataagatattgttcctaatct

SEQ ID NO: 8696 - DNA, 500 bp, Cannabis sativa
agtcccgaactcgaggcaccaacaacaccagagttctgttcaaccgaaatcgcttctcctgtttttcctttcccttcagccacagaagctttctgttctgaatgatctttcttagtctctgtaaataaacaattcattaaaaaccacttcaacaactgaaatcaatttagggaaacaaaatagaataatcattaaaaataccatctttttttatttcttcatcatcaagattaagagtaaccataggaatcgaaacaggactacttggaacccttcgttttctgtgacaagaaacagtaaagttagagactttctcaatttcccccattaagaggataattaaaattaaaatttgggtgggtaccttcttgaagtactcgcgggtgaggtcttggattgaagatcagagcgtttcttgtgcttgaagatgcgatcaggcgtgtcgtcaacgatgaggctggcactcaaaagtgtttcttcgtcccaaccagccatggctg

SEQ ID NO: 8697 - DNA, 1605 bp, Cannabis sativa
tttccttatgtgactaaggataagacaaaataataaatcactagtagaccagcaggatcaataataaccatctcaagaattacagagtgcagaaaaaacaagacaaaagactttgttggtcgaacaagacagtataaaagagttcgacctaaggagcataaacgatacaatttgaaaagaagtttatataagaattattcaaaaacttcatcatgatcaatgcgagatgaatgtccaaacatgtgactcccatatgtcatcttgtcactatataatgagagacacaacaaatacattatctcggtaaaataactatttcagataaggataactagcgattttcagcggaaaagcaatttatcccacatatagtatatcaaatgaaatgtggggattgtccatattttatgaacggttatgaaaataagagcgaagaagaataactgtcaccttcaaaatattataaataggagaagaatttccgaaaagaactatgaattttgagaatacaaatattctattgatcaatacttatatgaaactggtaatttgtataaacaaaaaactcagaaataagatgaactcgtagactataaaaatttaacttcaaagctacgtaaaatttctttgtttattatttacagttattttccagtattatttaattgttaaataagactcgtttattagataacgaaaatttgagttaacaatactcttgttagtttgttgttaattttttgttatttatatattattttttatgtaattttttttattattttcatataattttattgttatttttatattatttttatgaacaacataaaatatatataaaaaaaagttaaatataaaagtgttaaaaaaattaccaaaaaatagtagtttatataaattaatttggattttatttttctttgaagcaagaaaaaaatggatttattgcatacattaatgaatttattattgcattttatgcatttataaattgtaatgataaggatttatgctttcaaggattttgacagctaccatagtcaatgggtgacaaagtcaagctataataacaatcaagttcatctaatcactaataactatttatataatacatattgccatattgttataattaattaatcaaaacatttattacattataaacactcattgcaaaactaattacattgagagacaagtaagacactacataaaagtactctatttttatggtcaaataattataaataatttacgacataaatattaaattttaacttacactttgtaaagtgtaaaaaatttataagtacataactgttaaatgttaaataaattatcacgtgataatctctaattggtccaaatcattaaatttttattttaaaaaaatagtttaaatatattaataagaaaataacacgtgaataataacttgacatttaacggtcaaatatttacagagttctagaaatataacttaatattattattgtaaaaattgaacttaatatttatttacagccaaaaattaaaattaaaaatttatgccgtattactcaataattaataataatttaatcatgagtattttaagctatc

SEQ ID NO: 8698 - DNA, 655 bp, Cannabis sativa
tgaaatcagcaaaagaaaatgtaggttgagatgaatctggttcaaattcggagtgagaataagattgttgttcatatttgtttgcatataaaaaagtgagctttgaaggggatcagatcagcattgggggatccgcccaaatccgagtagttgctgtactttcacacactttctttcttctcccaaaatatgggacacaatttcttctttctttttataaatttttatttatttctttttattgtcaattggatgcacatttttcttattggaatttaaaaaataccattctatgttttattttaaaaaataaatttcaaaatttcaaaattataaaagtataactttctcatcaaaaaagtaaagagatgaatcttaattacaatttttagttaatttttacgtttgaaattacatgtagcatgtttttttttcaattttttatagcagaattcgttatagttacaatattatttctgtaaattttttaatagtttacaataccgaaaatagagttcttgatattccaatttagtacgtgtattcaaaaagctttaaatgtattttcgacactataaattatttaaatatgtgaatgcgataagtcgattcgcgaagactatatgttaggtgttagggttaaaatttcttgaaa

SEQ ID NO: 8699 - DNA, 537 bp, Cannabis sativa
cactttagagatgaatgtattgccttaaagaacaactcaaaagggaaaaggggaaagacaaaggtgaagttgatgttgcaacagatggttatgaatcaggtattgtgctgttgggtcaaatgtagattcgggtaaagaatggatacttgacttagggtgctctttccacatgtctcctactaaagatttgttcaacaatctttaggagaaaataggaggaactattttactaagagacaataaggcttgtaccatccagggaatggattttgtgacactttaaatggatgatgggattcaaagaaccattgaagaaatgtggtatgtgttatcccatattttgcaccatgacgtggcaatgcatactagtgacacgtgtctgttattctttatgcttgacaagagaaatgttccgaacagacttcgagtaatacatctgcacggacaaagtcttcctgatcgagcaaagcaagggcagatgatccgtacaataaatgaagtcattcctccgagctatgcatcaagacttaactactt

SEQ ID NO: 8700 - DNA, 615 bp, Cannabis sativa
gggttttttccccaagctagtcttcagcaagttcatcgcatttcttgcttcctctttccgcacaaacacttgcgctctttcgttaaattcattaatatttctcacgggacgaccttacaggtcatgccatagctcgcctccagctgttgaagggtcagtcgttatccctgcttaaagagcaataagttgaatattgtcattcaagtttctaactttagcagcggtagtactaaagtgactcaggttagccttaagtgactcaccctactgctgctttatgttagttatggatgttgcttcaagtcgcatatcgctagcagcctaagattgtttcttaaaatccttggacaactgttccaaagaagttatagaatggtgagtgaatttatcaaaccatctacttgctgtcacagttaacgaggttgggaataaaatgtattgtagattatttgagacattgctggctcgcattaaggtattaaaattattcaaatgagtgattggctctgtagtcccatcatattgccagatgtgagggtttttgaatccttgagaaaattcagagttcataatattaggatggaatggctcgggctcctcatctgagtcatagcc

SEQ ID NO: 8701 - DNA, 751 bp, Cannabis sativa
tttttaatagtaaatgtgagtcaaaattgttttctgatttaacaataataaacacatcaaagtattagagagcagaatatgtcaagaaacagaagtaccatttaacccaacatacttatttgtactcaaaacttatcagaagccactcttatgcaaaagttggaaaaaacaaggtttttaacaacaaaaaactatgattaaccttccgacattaaatttctcaaaggagaagtatatccacttcatgtaaaagaagaaaaaacttatgcagcatcatttagcagatgatgaacttgacgacagtctttgactacgagctttatcagctttttccaagtagtcttgatgagactgatgctttgcccctgaaaagataagactcaagcatattagataggaagataagattgaccataaataacaattaagccacataaattgaatcaagagtcagtcatgcatagtataccacatcaggcaataagattagccaatcagatgaataactaggatcaaatattgatatgaaactagagaaaatcttactttcaatatagtagtcagattacatgtaaacatagatattggtaatatgtgtatcttatccataatgaagcctaggtaagcctgttataagatctttgtttctctttaggcaaacaaccaacaaattgaataaagatgagtaataaatcaaccaacaaattgaaaagctaaatacatgtatgctgttctatgattacatttcaac

SEQ ID NO: 8702 - DNA, 796 bp, Cannabis sativa
aatcttaggaaactcgtagtcaatttaaaaagaagcaataggaaatcaggaattaaaaattaaagataaagaaagaatttatctcaccagacacatatttaatcattattgtttttaatttttatcttagtcttattgttgcttaatttatttacttattttaaaagtgattgaatcacattaagattgaaaaaggaggaatttattgttcctctttttctctttttaaatttttggccctggcagttcaatcaggagacgttgcagtggctccaaggttattgagtctgtggggattcgaaccttggaacgaatgcctaccggcactttccaacactcctccttaccactgtcacccctttgggtttgttcctttatctttattaataattaagtgtagtttggagtttttagtattataaatcttcatttgtaattttttatcattcaaatagaattaagagtaatcaatgtaacacttaataacattgccttcaaataacataattactatcactttattacttgttaaacgacaaggttttaaaaggctaaatcaagaaccgagacgttttcccataaacgacatatgcacgtgtgtcctaaattatcacagcaataacaacatcaaatatttgagtagtaacattatggtttacttttgtaaagcataaaaagtatcctttgtaattaatatttttctatgttttccaaaaagatcatgcaatttagtgtacaagctctagctaaccaacaatcctacttgtttagacatacaagcacactaagaaaccat

SEQ ID NO: 8703 - DNA, 1051 bp, Cannabis sativa
atctgatattactgtatagctactcagattaattaattaattttgtgttaaaacaataaattaatggttatttaagatatttgccaacatgacatatgtattattatgcctttgatttttttaggttgttattttaaatgttgtaaattaattattttgtcaaattttatgtaaacaaaatgataatatgttgttacatcagcagcactacatgtataatttaacgaataaataaaaaatatacattttaaaacattcattaaactaaaaattatttaataattaaaaaaattacgtaaaactaaatttaaaataattaaattattttttaaaaattaattacacacgtgtcggcgttgacatggcaacttattaagcaaccatgtcatcgttttgtttgtcatgcgtgataaaacttgaccgaaagattgatttataataccctgaatagtttagggaccatttgtaacgagctgaagttcaggtagaacaataatacatatatcataattcgaggataaaaatcgtaaatagcctaaaataataaattaattattgtttttatgtaaattaattaattattgttttcatgtcgatggatggttgtgtggtgtccaatttttttttacgtttattgattatttagccgatgagagttgcatagaattgtatcgttttttctttttaggggattgtcatgaagtcgatctagtacgtatccataattagaacaattttaacttacaatcctgttggagtaggtcgaatattagtgtggtgatagtgtctactttgaattttaagagctagtttgttgatatgttatggcaagagactatcagtgtgcgtaaggagctagctatggtggctcgcgcaatttgaaaggttggaaatgatataacttagaaagacaatacttctttagttagattgatgcttaatcaatgacaaagtactcaactaagaaaaatggggtcattatttatgcctgatagtctgaatagtgtcttagaacattgggttaaacgatatttgaattcaattaagataa

SEQ ID NO: 8704 - DNA, 608 bp, Cannabis sativa
ttgtagaagtacaagatctcttccggggttggaacgcctaccttttgtagtttgcacaagacataccatccgacaagcaaacgataaacttgtgggatgaattgaaatagtgccacttcagccacagcgcagaattttgcaaagtagcttcttagtaaaagatgcgctccccatctctacgcgacctcaactccaaatgttaaagcctccttcgacgcacttactagacatctctccacaaacagagagcctattctagaataattttggaacactttggaggccccttttggtcttgtatttttggaggttgtaataattatggaacttgttctggtaccgatccatcccacagagaagaattcaatacaagttttggtgcagcggcctccttcgcaacaatgtcttcctcatcaactgccacctcctcataattatcttcttaaggcatgacaagctttgaaaggaatcaaaaagaaaatactacgcagttaattacccatactaaagaaaatagcatggattaaaaagaatcctcccctataactgcttggagaggtaacctaagaatcttacatctagaataaaaatgaaattccgtattttaa

SEQ ID NO: 8705 - DNA, 1503 bp, Cannabis sativa
atattttgtattgatcagaaagagtatacactaatctatgtgacattcatgtacaattgtatgtgtaattgtatgactacataatctaattgttttaatctagttagtggttgaggatgttgagcatagcaactcttgttttgatcaaacgcctgtaaaggctctctactccatcttcaagatcttgaatgcacaactccaagttttggagttggttttgcgccttatcttcgagcttgttatctgttgtctttactttctgactgatgagcaaattcaatgcaacatcagcgtttgcaaagtcattggattcgttggtagcctcgcaagagactcttttggtgttcatcatcttggaaactaatgaccagccaattgattttgattgagactttgatccagagatgaaggaaagcattgattcaaaaacagttagagtgattgattcgacttctctcaacatgctaacaatctcaacggtgtcttgttcttttttaagggaactgaggctgcatctgttttccatggccttgaggactgttttcttcaccactttcctagaggctaagaatttcttgatctcgcttgtgagactcatttcgcctcctctctttctgcgcaaaattgattgtagttcatgtgtggattcctttgtctgttgtagggcatccttaacattgttgcacagatccaagagtctaagagatccatccaaaagtgcatcaactcgtttttgattctgctctttggacaatgcttgttgatttagaggcagtgaaagcaatgtatcaacacaatcatgaagatcttgaagagcacttagtttagaggctgatgatgaagaggcttcttcagaagacctcaatctgcgaaactgctcatcgaactcagaaatgacagggtgttgcctagagggaaaactgttggagcgaacatggtaagctgccattttaatctgtttcaaaggaaagaagaagaacttgatcgctttagaataagtttagaatttggttgctttcctttggcttatgctctacctatttatataccgaaaaaggtaaaagggacaagaggaatctcatcctcttcaatacacatgcaatgagcataacatgaatgtgatttggaactaaacaatactaatgtgaggttgttgatgttgtctcctcaccatcaactacctatctttttaaatcaatatttatctttcagagatagttccaattttcaagtaatatttataagttgcaataatgcacgagtggttccattcaaaccggatccgcatacctccataagggacaagagagattttcatgatatatatctcataactttacttggctatgtttccaataccaaataatactttgaaattggtaatcaagcgtgtagatgattccatttgcctcctaacgagagacagacagcctagtttcattgcataaaagcatatgcataatatgtaaagtcttctactatttgaaaaataatatagggata

SEQ ID NO: 8706 - DNA, 782 bp, Cannabis sativa
ataaaaataaaattggctccccggtctgcatatcttagctccggtcacttgtcatcgaactattattctaaaatagaactataataactaaaaaattacaaatataaaattaataattagcaaaaactagtgttgtgtggtcatcgagaagataaatgaaaaattgcaaatatatagtgtcatcgagaatggggtactattggtattatttgaatatttagtcagtggggtcatgcattcgtttcataacaagatggagtattgttttttggttttggtaacataacaagacaagaggggtattattggtatgatttggatttttatttcatcatactgttgtcacaatacaaaatcataatcgtatgttactttatcatgacagagaatatcatcgttacaaaaagaaaacacgcaggataagcattaattgtcttttatcacagaatagcattacaaattttccaaatatctttaattatatatagacaaataggactcttagaagttgtttgctattatttcagtttttgtttttttaaaaataatttttaagagttagaacagaaaataattttttgttattttaaaaattaaatagtgtttggttaatatttttaaaaataagttttaaacaataaaaacggaaaacatgttcggatagtaaaaacaacatgtttttaaaaattattatttaaaaaaaaaaaatttaaaaaacaataaaaaaaaaaaatattactgttatcttttttagtgttgtggtgtttttttttaaaaaaaat

SEQ ID NO: 8707 - DNA, 1085 bp, Cannabis sativa
aatattactataaagaaaattgtcacacgtgctataaatatagatgagagatactgaaatattaatttaggggtgttctatgaatttttcctataatatataaatatatttaatggaggagatttgaagataatttgtgtattaatggaaatttgaggataatttaatttattgataaagcaagggtaagggacaagaataataaagtgatttagagaaagaattagtttttaaagatggtaggttggaaaatttgtagtagtagttttgattaaagagtattatcgaatttaattgtagtacaagttcttagaaatttaaaagttttgtcatttattttttcttgattatatgctgatcatatttttttctttttgatgttgctaatattatagtattataaaatttattatttaaaatatatatttattcaaagtatatgttaaccaatcgacatattgatgaggggcttaaattatgtttaatacgacaaatatcaacaaatatataaaataaaaacttagcagtatacttatagagtgtatataataacagtacaaaaaacacaaaagcaagtataaaaatctttgtaaaagagctgaaattacaaaaacaccctcatctcgtttatccttgaagcttaatcccaatgccctgaacagtaatttgacctttcccaaacttaggtaccaaagtgacaaccacactatcatcatcatctgctcccacttcctccaacagatcggaaatccccaaattcagaccagtcttcatcgtcttactacttcctctcctctgcccatgcggaacattagcaaagctcccggcgaactccgccgtatcaggtcctcccatgacgtcatccacgtcgttcacgtacacgtcaaacttcaccggaagacttcgatcgaactcgatcccttcgatcaccagaacctcttcttcgtcttctttctccgccttggttctcgattttcgtggcctgaccaccactcgcttgacagctccgtctagcttgatcggataatcagccgccgcagcaggggacggtgatgatgataatgaggtagcgaagagtgttccgg

SEQ ID NO: 8708 - DNA, 863 bp, Cannabis sativa
cttgtcttcttcaaatctagccaatgcagccagcttgaaaacttggttggccaagctgtaaaccaaaccatttaaaaactctggcagtaaccacttgagaaagagagcaataaaaaaaataagtgctcatgtgactcttggtccatctcacacacaaggcataataaattaaagacgaaatgcttaaattgatccgagctaaaagatctcaggttagcaggtttgaattcatagactgtcatagaataaatctatgcttaggaaggctgagcttgttccatatattttgatagttcaagactctatcactagcaagaaggctgttaccgttactgaattaaattgcaagccttacaatggtcaatttatgtatggggttacagtgggcaaccatgacaatgaagtaagacccaagtcacaagaaaagtgactaagaggtgaacctacttagtgacttggggggcaaccatacatggactagtaagcaataacacactcacttaagtagatgtaaaaatttaaagttttttaagtgttagtgcattactcaatattttgagcaacctatatatggtaaatggtaaactgtaaataaatgtctacgcatagtatggtacataccagaaagaagttaacacataaagccatatataatgataaaagtcatgcggccccatagcaaaagaaaaagacatagcatatgagtgtcttaaggtaatagagtcacgagatttaagactgctcagatagtcacaacaatagtaaaagcatcaaatagggtcaacaaacaagtcaccatggggattagtactagtatcaaaatcctcaagattgaggtatgaataaccttgcgtttgggttac

SEQ ID NO: 8709 - DNA, 1082 bp, Cannabis sativa
ggggctgcgaccatccaagatcataacggaaccattctcaaaattctcacatttcagaccaaccatattgaggcgctccctggggagacgtttacagtgtgtaaaggggctgagttaatggcccaattgggatacaagaatgttgtcttccagtgcgactcctcaaacgtggttgcagctctgaaggccaaaccagcagctgtccataccctgcatttcaacatacaggagttggttaaaaaattccttgctttgactggtaacctcaacctgtgggagatccattggattcctagagggtgtaacggtgtagcccatgcggtggctagatgggcaaatcgaaacaacagctttggtctaatcgatttgcccaattttgacgatttcctgcagcaggtcgatgcagatggtcgtgcagactcttctattagcctcggataattttcgtatacctgtagtttttcttttttttctagaggattagcctctttcgattgttagttttctagtccagtttgttcctgctttcagcagttgtttgttttcttctttggcatgttagtgttctgttttgttttccctgctttcagcaggttggtatttgttgtttggtgttgcggttcttggaaccattataaaaaatatatatatatgccatttctaattattttttctttcgccctaatgaacaaggccattgaccatgacacgtgtggtggaagcatatattcacaaataatgatctactataaaggtttttttttcgttcatactatttaaatatcaatatctctaatgaagttgtctttcttaagtaaaactatgacaatgcttagtgtaggaattttattcccaatttaccctacacacagcaatagattaatcaatataccaagatcaatttaaaccttttactccaatcaaacccactgttgactcctggaatgaaaacccaaacgacaacccctttccgatgagctacaggtcgtttaacacacacctaagaaatcctagataacctcgatacttatatatcctttattattcacatacacacgcggcacaaaccctagcagagcccc

SEQ ID NO: 8710 - DNA, 809 bp, Cannabis sativa
ggagtttgtatttagacttatgcttgtcttaaattcttaattgctcctattgatttattgtaatacattttcatgcttttcttaaaaaaaaaaagaaacttttccaatccaaatcaaattatatatatatataatggaatatacgtggaattatgctttggatatatcactattacacgtaacagtttcttctcataaatgaataaactttgttccgtaacaagtaccattatttaattgatcgaatacttatgggaccattgatatctcatctcatgtacggttaacttatatactaagattaaagtttaagatttcaataattaacaataattcgatcaatttaactattactttaatatatatatatatatatttaaggtgttatacttacaaattttacctatgaaaatcacaattttcattttctgcataattgttttgatgaattatatatgtatatatgtaaaagggtaggaattaagaaccaaaagaaagaagtgtctttattaattttcttatgtatatatatgtgacgtatcaatctagctagctaactactattcgtttgtgtgaccccattaatattagtacaccactattttgacaatagatgattcaaatactataagataagcttaaatattagtgaactttttaattaatgctaattattaatactttaatcctatacagacatatctttactatatacaaataattcagcttattaattactagtacggttcatatactatttgatgatatagagacaattaaccctgcaataagtcaatttaacttaattc

SEQ ID NO: 8711 - DNA, 650 bp, Cannabis sativa
cggtttgaaaaaatctggttaaaagaagaagattgtgctgacataattctggctaattggagtcacaacactaatagctctctagctcaattgactactaatatatcgaactatgcatcagatcttcacaagtggcactttgcaaactttggtaatctgaaaacagagattaaggactcccatgcccatgtagctgcccttcataactctcccagtactgatccgcaacactttgaggctttaaaaaattctgaaatgattttggatgagttgttagcaagagaagaagattattggcatcaaagggcaagaatctcatggatgaaatcaggggattcgaatacaaagttttttcatcaacgtgcaaattctagatcaaccaacaatcgaatcaaaaaactcaaagatgctcatggtaattctcaaaccagtatccctgctctgttagacattattaccacatattttcggtcaattttcagcagccaagaggttgatgaccatgccattcatactatctttgattctatccccactactattgatgaaaattcaaggaatatcatttcggctccctacacagcagaagaggttcgtaatgctctacgcacaatgagtgatgataagagccctggttttgatggtatgtc

SEQ ID NO: 8712 - DNA, 753 bp, Cannabis sativa
tttggtgatgaaactttccagttcttgtcagttgttgccagtgactacaatgtcgtctacatatatgagtaccatgataacaaacttagtgtgcttcagcatgaaaaatgaggaatcagacttggaactttcaaaattccacttgaccaaggtgttcttaagttgctcataccacacccgtggcgcctgcttcagactgtaaattgatttctgcaacttacacacatggttaggataggtcttgtcttcaaaaccttgaggttgagccatgtatacatcttcttcaagagtcccattcaagaaagcattatttacatctagttgtttaacttcctagccaaaagtaacaacaatggttaaaactactctcacagtgcaagctttaataacagggctaaaagtctcaccaaaatcaacaccacgcctttgatgaaatcccttagcaacaagtcgagcttttaagcgttgaactgacctatcagtattgagctttatcctgtaaacccacttgttgccaatgatgttgtagctgggatgaggtggaacaagaatttaagttaatagtttcttcaaggcttgattttcaacagacatagcattattccacccctcatgctgaagtgcttctgcaacagagacaggttcatgaagagagagattaaatttggcttgcccaacataaactttgggtttgaaaacccatgcttttgggtttcaacaagtgggtcttgaattgtttcctctaccacctct

SEQ ID NO: 8713 - DNA, 579 bp, Cannabis sativa
aataatttagaatgtaatttggaagggaattctaaaataaagtataagcacaaggggtaatttcagacaatgatattttcttcaataattgagtttatattaaataaacattgataaacacgtacgacttccactatgcatggtctaatattgcagttctttgacttgaaaaagttttctttttttttttccacttttattgattatttaaatgtaataataaaacaatattatatcattatatggataatgaccttttcgttttattagtcattttttattcgtgtttttggtggcgtgccttttggaccattgtattttcatagcacccaaagttgaggtcattatcgttgtgctcaagggattaatataatatatgtgtcccttaagtataagttctattattattattaattaattaatgtagtttattcaacaatattagtatgattcccccaacacacacattaataaaatgaaaaaaaaaattgattaattttttgagactgtctaaaattaattattagttatagttattaatagttagagtaatgctaaatgacactagtggtgtctagc

SEQ ID NO: 8714 - DNA, 508 bp, Cannabis sativa
ccaaccaattcttgtcttgttaatgtataataaagttgtgtttaattacaatctcttaattcatttctactttcgaaatcacatattagaatattttttatttattttttttcataacaatatttgttatagttacagtatctgtaaattttttaaacagagttactaaaaactttaaatatattttcgacagtataaattatttaaaattttttaaacatttacaaaaataatgttataaacataacgaataacgccataaattaattataaaaaatattcctttttaaatatggaatttgaccgaaatattataataggagattaacagtaccgatcttcattataataatgcctttggaaattcagttcaactaatttcatatttcgataatttattatatctaacatcaattcatcaaaacttatttaacatgaactagagctctaatataaaggcaactatgatattctctaaaggatataatattttgaaccaataggaatg

SEQ ID NO: 8715 - DNA, 667 bp, Cannabis sativa
caatggcacaatcaaaggagattcatgaaaattagccttcggatggcaaggataattcccatgatgaactagctgtgatccttaatgacaatatttccacttttatttttgataaagagctggaaatcttagatactaagagaaagagaattgatacagttgcaaatgggcctgcttattcgagttctcccatggaaactaagtccacatttttcccctcaaagatagctgatggacagtcaaaaaacgtcaatatggtgggtcctggtggtgtccaggcccaccaatcattatgagtataataatttggaattgtcgtgggcttgggaacccacgggcccaacaattccttgaagacatatgctgtcaaaggaaatccaagtttgtttttctatgtgagactttatgcaaaaaagatgttgtgggtaaaattcaaaaacgtttgggctttgaagcttcctttaatgttgatgtccaaggtagatcgggtgggcttgcttttctttggaaagtggttgatgaggcctagctcctcaggttctcgcagaaccatatcaacgttcgtatcgatcttcctgggattcatccctggcgcttgactggcttctatggcgaaccaaatcacagcctccgatcgagaacatggaatctcctcaggtctctctct

SEQ ID NO: 8716 - DNA, 1099 bp, Cannabis sativa
tttgtaaatcgttcaacatgaataacctgtccaaaccaaactgaattaactcgagaaaaaatgtaagccataaaacttgacaaaaatataacctgtttagtctttatattaagcgggttagaaaataccaacccgtctaattaactccaactattaatacatatggctttattatatatatatatatatatataatatacatgttaaaaaatattcaaaatactatgtttgtttcatgatatttgatgtttgaatttcctctatttatatttatctcattattataattaattaaaatgtaaaagtagaatgtgaaaaaaaaaaaaattagtgatcgatttaagcacttgagcaaaccaaaccaaacaactcatcgggcatgttattttttttttttgaaagtaaatatagaacttttataaatttttcaaatcagctaaaagataaaattgtatctcaatagaaacatcacccttgttgaatagtccatctgaaaatctctagcaagactatgagcaactatgttagcagatcgtttaataaaaaataaaaaaacattacttaaagatccaagaagtttatgacaattttctataataactccaaaatttaactccaactccactttccgccatgattaagttttaatccagcttagcgtttcctttatactaattgcttcagctaaatccagaacgcctattactaataaaattgtccgacttagccatcactaattccccttgagtgtctcgagcgactataccataataaaacgtaactcggtcacgaaaaatagtggcatcaattcaacttcgtcacgagtttcaaaaattaaaaatgaagcctttgaacctctattttgagctaatttccccttgagtgtgcatgttattttttttattatttttgttctgaattgcacttaaatttttataactcactatctatgttgaattaaataaaatgtagcataaaccgaaaaaaccgaccaaaatactctaaattgtagtaatgagaattagatacaatttaacatttctatttggtttcccacctttttgtgtcaacacactcaactcaacaatggcggtaacac

SEQ ID NO: 8717 - DNA, 769 bp, Cannabis sativa
cccataatatttgtggcaattcttcgatctatcttcttttggccacgtcgaacttcctcttgataacatccttgattgtcttatttactgcttctatttggccatttgcctgcggacggacaactgttgagaaactctttataatcttgttcctctcacggaattcagtgaatagatcactatcaaattgagttttattatttgatattatcttcatgggaattccaaaccgacaaattatgttgtttaacacaaagtttaaaaatttctttgaagtgattgatacgagaggttggattctgtccaatttgtgaaaaagtcaacaactacaattgcatatttgacccttcctcgtccaatatgtaaatgagccgatgaggtcggttccccatatcacgaacagaaaaggagaagttatcattcctaattatgtagatgacaccgaaggtatgtgtgaaaacctttgatatttatcactttttttcacaaactcatgcgtgtctttattcaactataacactgtcatgaatttttttttttcttaaaatgaatatttaggcatatatttttggaggcagaggttaaaaaagagattgtaattagcactattatacattgttagcatttgtaatttatcataaagtttcttaagtttttcttagaaaataaaatcttaactttgtcactgtaaattaaattaaattactttgaataacatattaggttaataatgatagtggtccctaagaaacaagagtcattttattct

SEQ ID NO: 8718 - DNA, 1054 bp, Cannabis sativa
caacatagatataattcttgaggaggattgttaaatagttttcccacattagaaaacatacaaaattattactacagtatataaatatatataaaatatttgtcacacctcacttaataattgtaaaatatttgtttttaagaaataggttaataatcacattatttataagtatagtactcacatatatagagtgataataatatatattttttcattggcgaaaaattgatgataatattactacaatatcacaatttgatttcaaagtcttacaaaaaagagtttgattttataaattaatgtttatacataaaaataattaatacaataatttgaagtattttttttagtaaatcttgaaattttagtaatggcaagtaaaataatagtcttcaattcaatgagacactttccctgttagggacattactagaattaacatttgaaaaacgagccaagtaattgtttaatttataatctttggacaaaaaaattaaaataaaatcagatgaagaagaatgtaacatcatcacaattaatcttaagaatactatattatgtaccatccatcgttcagaagctataacagaaacttttgtagcaagttcgttcaatttcgtagcttgagcactctactattgtgtaaggtacgtaactgcactataaataacccctttagtcgcagagcacctccactaataatgatttgatggcgagtcatcgaagtacaaagaagaaccaacatcaaaacaaaataaaataaaactatgtcatagagacaagactaaaacacgactatgtcacaaagacaatactaaaatacttaaaaccatgtcacatagacaagactaattgtagcagcaaaaatcgaattatagtatcaaacacaaccctaaccaagctgcacctaagcttaagcaaaatcactataactagcctaaaaaaaaatacatgcttgctatatagatttagggacgagaaaatatatttaccataatttatgataaatgtaatttttttaaatatgattaaatccaacttgttaatgatc

SEQ ID NO: 8719 - DNA, 813 bp, Cannabis sativa
aataacatatgaataacaaaaaataaaaaaaaagtaccatataaaaatacattaaaagactgtattttatgtaaataaaatcttaaaaatcataaaaatatttaaaattctatacaatcatatttttatatttttttaagttattttttatgttttttaaattatctgtaaaaagtagcaatctagaaagattattaatattgaccgcgaataataaattttaaattataatgattaatattattatttttaatccaaaagattataaactgtttaaattgaccaaaccatttacactgaattcatttagttcagtcttaaataatttaattcaaattagttgaagtttgaaacacatattagagattatataaataactctactaaaatattgttccatactctttgtatcaaaaataatatatcattacttttgataggtgggatctatcgcaaataaaaataattggttaaagttacttgttatataaatatggggatatgattttgtcccgtactttcacgaaatgtattttgtggtacattaaatgggtctcaaggtacatgaattatttgttaagtttgtatatgaattatttgtgcacatatcattacttgtgtttgtataatctaataaatattgtaccaaatattatttatgttttctcatatattttcaaacaaaattctacatattacttaacttatttatttttgctccaaagaataataaagttatggaatgaaaacttcacttgtatagtattttctaaacacttttaattcataaaaaatagaaataatatattttct

SEQ ID NO: 8720 - DNA, 1474 bp, Cannabis sativa
tgaaaagaatcccacatggtttctgaaccattttgggtgttgtagttgtatgtataagtaaaatatttccttctttacttttatttgtcacaaaattagtatatagttgaatgaattattgtaattaattcaatcttgcaaaattagttatattattttattgttctattaaaattttaattttataagaaaatgtaaaatattacgaattacgaaatatttatatatttatataacggaaagaataaaaggtgacatattttttttctttctatttttactaattttttaagctttcacattttgagaacaaaatagtgtgttcaaatttgatacaatataatatttgttttgaaaagaatcctggtttatgaactatattggatgctatatttgtatgtataaataaaatatttctttctttacttttatttattacaaaattagtatgtggttgaatgaatctttgtcattaattcaatcttgccaaattaattatattttttattttattgttttatcaaaattttaattttataaaaaagtgtaaaatattacgaattatgaaatatataaaatatttgttatgtatactaaataattaattaaataaagaaatattaggacaaataatagatttatatttttaaattttttaaaattttaacatcaaaaaatattatatttattgttaacaaataatattattttcttagctatatcttatttatagctattttttttataaatattgtaattatggagaaattatttttatctatatttacatgtataaaagaagtacataacatgtaatgtgacgtgctaaaaaagtttcaatataattactttttaaaattttagtgatttcactccttagtgatttcactccttacatctactaaaaagaagtatattaagactcctaagtatgagttctgtagaaaacaatcacaagtacatattgtagaactacttaattttttgaaggcaagaagaattatcatgtttgttggtcttacttcagattaattgtttctctttattatattttttgtaatgtaaagatttttgttaagaatgtaaatattatggtacccacaaagataattactttatatcttttcatatctctcttctaatgtttctcttcatagtgacaaaaaatttataatatctcctccttgtagttctctttctaataggctaaaacatatttaaagtttttttaatatgttatttttataagtttattctctttcacatgtaatttgagatgaaaactatagctattatatacatataaatttgtatacatttaaaattttaaagtagcttaagaaaaactagaaaatgacatttgataaacatatatttaaaatgttttttaaaaacatcattcaactacatgtgcgaagcacgtgtcacccctagttatgttagtaaacctaatgcgactttttggtatataagt

SEQ ID NO: 8721 - DNA, 599 bp, Cannabis sativa
tatatatttataattcagaaaactctaatctctttatttcccgatacctctctttctctgtctggattccctcgtgcagcgttggaaccagactagagtcaccatctctagcacccctctcacctcaagaggacctcgagtcccttttcccgaaaccctgaaaatccccaacctcgaagcccagcctccctcttactccctttctcctctaaaccctttcattatcacgaagttgccaccaccatcagctcaggcgaagccaaacctgagaacccaaggaaaacccgaagatcttgcaaatcctctctctctccctatttttctctctatttcctagcttctctctcatcggagctaatgttttctagccccaattgcgtcatctccagtccagttaagtcaaacgagctatggaaatgtgttcaccttgtcaagggcttcgagaatctatggcccgatcctccatgcacctcctttgagcaagaactgccaccacacacgatggagctccggggagggtctaatggtttgagatctgatggagcctaaaaccctctaaaattgtgatttttttaagtgatgtttcatttttttttttt

SEQ ID NO: 8722 - DNA, 956 bp, Cannabis sativa
aaagaaaaatgaatagtaatatgggcccgggaatgagatatgagaatagaatgagtggacacgactccgtcactttgatttttggtttggtagttggccaattaatgctatatatgtgtatatgatatgtgtatgttgtatactatatatggcccaatctaattactcacccattctgattcagtgcactaaaaccttttcccactccttactataattgttatttgttactatacctattttgtcataaccaaaaaaaaaacactttttttattatcataaaaaaaaaacactttttttattatcataaaaaaaaaacataatttacaccataaatatttatgtttaattctggattacagataaatacttaaatttaatttttaacggtattaaaatcatttttttaaaacttttataggtaactgattattaagtgttaagccaataactacatagcagtctctgattagttcaaattattaagtgtgttatgtaaaatttattttcatttattaattttatttaagccgtgttcggggttgggtctgggtctgggtttgggttctaaatttcgagttcagggttctagcccaggttggagtcagggtcagggtccggggccggggccgaagtctaaggtcgggttgaggttcgggtccggggttgaagtctgaggccgggttgaggttcgggtccgaggtctgggtcggggtcgaggtttgaatccagggtgtggggtctaggttggggttgagtttcgagtctggggtccgaggtcgggttcgaggtccgaatctaaggtcctggtccgtgtcaaggtccagagtcgagttcggggtccaggtcggggccaggatccaagtcctaagatctaagttggggttagaattcaaaatattaattaaaaaaaaaaataattaaaagaattttaaaagtggcttttttcttttcaa

SEQ ID NO: 8723 - DNA, 1338 bp, Cannabis sativa
gactctcatgccgcgccgccccccattgtctcttcatgtcacatcattcaagaaaagcggggaattcctcgcttcgcccatgccactttggtcttataaaataaacgtctcactaaagcctattttcaccacctcccgccaattaagaagaaacgaggttcctcccatctctcaccataagtgaattcaagtgtaacaatcctttcaataacttaatgacccgatcaagtcatgggaaggaatctccaaaggaaaaataaggtacttcgaggacatacggaagtttacgaccacaacacctgttaaagctaataaagaagaattttttcgaagggacaaggtagtgggagtgtgatcccagatgttagtacgacctgacaccctactaccattgcctgatccccataagtttagtccacaagccttcctctcatagcacatgttccacctaaggtccacagagggtaacaccacttgtaaccatgggcctttagagcctcctataaatattaccccttcatttcattagtgaaagggagctgaaaaatcttgtaacaaagaagagtgtgataatttgaatacaaaattattttcttagaatacttaagatttcatctctttttaaatcaccgccacacttttacttaatctctctatttgtaactaatcgaaggttttcagtcctttaacttgttgacgagtttcagccgtcaacatggatatttccagcgcaaatgaacttcactagctttgttgcacttaaatctttatataaattttttggtggtaaaaattaatatgtagttattttgccgcacttaaatctctacataaattttctagcgaaaaaaataaatatttagtcattttgttacaattctagtccctttgttgtcacaagctcaaggacaatgttgccttatatgtttaaaaattagaatttttgctaccaaaaaagaactacataaagatttttgctaccaaaaattcacatagggatttaagtttaacaaaataatctacgtagaaattttggctaccgaaaaatctacataaacatttaagtggtacaaaatgaattacgtagggattttggtcgcaatttcctttattattattgtaaaaatagacagattaaaatttgtaaaaaaaaaaaaaaaatacaactacttactaaagaaaaaaaagctcttctaacttatttattattttttttatttgctatgatattaaatttgtaaggatgttacacataaaacataagcatgaaaaaaatagctatttgaaaataagtagacaaatatgtaatttaaaaaaggaacaattacataacaaatt

SEQ ID NO: 8724 - DNA, 798 bp, Cannabis sativa
tttttgtgggtcgctatgtaccaagtggagggaagcagcattgggtccaattcaagtttgagagactaccattattttgctttaaatgtggtatttggggtcacgagcagcaggcttgtaatagctcatgtgtgacggtaaggggggaagatgggcaaaatgttctgaaatatggtaattggttgaaagaagaagatgccatgccaaattgttttcttgcatttcaacaagcaaagttacaacaagtggagacagagggtatccaggaggaaggtgaggcgaggagggggagtagtggcagtgacgatgattggggggagcttcggagtagagatacggtggtggtcggagaacgatcagtagaggctgacggtggcgcagagggaggagcggttatgggagtagttcataatgggaaacatgttgttgaacgtgggaatgggatccgtgaaaccaggggaacggttgtggaagaaactcttggggatatgggcttgggaaaaggtattgggccgagaattgatgggcttgatacagtgggctccaacaatctgaaaatggataagttggatattagcaaatccattttatgtgataaatatgatattgcttcagcccacttagggttgaatgacctggatctcactgaacaagatagaaagaaaaggaaaaatgctgcacaaaggagtgaagaggaaagagaaagagatcggagagctagagataaaggaaagcaaattgaggggaatgagctgggaattggaaatgaaggaatctatgaggtgggtagtggtgttg

SEQ ID NO: 8725 - DNA, 1142 bp, Cannabis sativa
caatttgtgagattttccaagacatcaagattcacacacataaaaaaaaatatttgacaatggtatattacattttgacaaagccattttttacaattttggcagcagggtggtcaagcttgttgtgcctcaaagaaaaatcagaatttgaattgaaaagatgatgactatggcattgaggtgcaggctgagatgctttatcatgaacaggtgaagaggagagaatactcaactaagtagaattgaatttgtacaatccattctcaatattcccaaccaacaaaatcctctaggtagcacgatccttgacacaacaagaaaaggggtaaaactcaaaaaaatacattgttatgttgagcaaacttagatacacaaagcagatttttttttatgaaaggaacatgtaatagactattgagagacaatgattgagataaaaaaggaaagttgatcagggacctaccaacactttcaatatttaggccaacaccattaccaacaagaacttgctcattacttgcataagatgtgctggctccaagattggtagaatttggtgtgagattgtgagtggcacttgagtcaaggtaccagttgtcatcatggacagtttctggtgtggcatacattgtaggcatctcagcaatgtgagcagtggcagggaaattggcaaaagactcagggccagtaaatgacttgttgaagcaatagaaacattgcttaaccaaatgaccaaatttgtgacataattgacactgagctttttgattcatttggtattttggccacgtctagggttgtaatagccaccacgttagccaggggcacttttttttggagtaggaccacctcgagacatagaataccctatataaccatcagtgcgagggggactaccacggctgaatcaaaatggaacagctagagctgagtacgatgaacgattatatgagtggaaaccattgaatcttgagtgagaaagattggctttagctttcaaaatatcaatattctttatgtgtttatcaatgcgagcagattgagccattaacaaagcttcgatctctgctacaatgtagtcatctttccttgtaataatagaggtgacaaacacatcgtaagaagatagcttcaatatgatc

SEQ ID NO: 8726 - DNA, 621 bp, Cannabis sativa
cctgaagaaagatggtgatgtgaaattgcataattcagggtaatgtgccaagtaaactgaaaaaaataggaccaaaacaatacaatagtcaggaactaatactgaaatcaagccttccataggggagctttggtataaagagaaacttaacaagaattatgtataatcttccataagagattcagagagtttcatatgttcattggagcttttttaatctgcattagttagatcagttgtaaccaaagtaaccagtttcagaataaacaagcttaaatcatgcatacacttgtaagcttttatcactcaagcacatagaccagttcaaatcttggatgattggttaactaaagccaagattcagacactaatcataccttttagggctcgtttggtacaccgtgatgtattgtattgtattaattgtgttggattgtattgtattgtattaatattatttaatacaatactatatttgatattcacttgtattaataggttgtgtaagatacaagaaattcgaccccaacatcgatcacgacctggactcggatcctgacccgaactcagacccaaaactgaacccggaacatgccccgaaccctaactaggacttggact

SEQ ID NO: 8727 - DNA, 561 bp, Cannabis sativa
gagagagagagagagagaactaacgcatttttttaaatccaaaatcatgaggaatgatggtgtaaaattctctgcagaaaccagatgttaaatatataaattaagacttaaatgaagtaaaaaaaaattataaagtttctcgaataacaggaaaaatgtcagcaacatgacatgtaatggctggcaagttagaataagaaaatcatagccaggcagacaatctaagaaaacaccattccaaattattaagagaacaaacaaaaaacttacccgcttaactgctccagcagtctcctatttgactgtccaatcacttcagcaattcttttcagaacttcatagccctacacgtcaaaagaaaagactcgttaacattaaaattaatgagtatttgatcagtaacaagcaaatagtgtttttcaggtatttcatctcacatggctcgctgtaaacaatagaggaacactaagatctttcagggtacagattcaaaagaggctcagatatggaagaaacaaaaatctggtagcagttcagtcctttaagacaagggcttttagt

SEQ ID NO: 8728 - DNA, 725 bp, Cannabis sativa
taaataacacaatttcattatatacttctctttaaatagtttgcaaaaaaaattattatctagtattaactattgtacatataattataatatataagaatttatttaagaaatttttttaatttattattaaaaaattaagtcgaatcaatttatattaattatatataaataaaaataacttttaaataataattaattatatattttttaaatattatattaaaaaaatatatctcaatataaaaataattatattttaataaaataaatacatataatttatgaatttatttataaaagattaataatttcattttaaattgtaaaatatgtataaatttactaaaaaataattttataatgatacagcattaagaattatttattgccattgagagttttgttgtgttttaatttttattttttttcgaattaaactcttttatagttataactttttaatgaaaatataatttatttagagttttattttaattacttagaaaatattgtcatagtttgggataacacattattatagtgttttgcataattattagatttatttttttataccaataataacaatatgagaaatataacaaatttgtgtggacatatcactaattatatttaattaatttttatattgtatgattaacaataacattaatgatcatattttaattgttatatatatgttattaacttaattactatat

SEQ ID NO: 8729 - DNA, 1096 bp, Cannabis sativa
taagtgcacactgcacacatacatttttattgctgacatttacatgattgtcatccatgctagcaaactcattagaaatcctgaaaacaattttaaaaacacagttgttaatacaataaatatatattaatattattttgtgggcaataaattgacaaatggacagtgggatggaataaatatacctgcaaatgtgtctgccacagtgtataaccttttacttgaagatggtttcactgtaaatataaataataggtcactcattcgtaatattattttagttaattaggatggtcctcagattttgatatctatcaaatcatgttcttcgaactttgacatatactaaaacatgctctctgaactttcatccatgttagaatttttttactaaaattggacaaaaatccttaaattcaacaatcttaatagttcatgagacatttttaacaaccttaaacatgatttgatacatatcaaagttggaagcaaaaaaatcctacttaacctattattttttgataaacaaaaaaaaaatggtaaattcgtcaatattagattaagcatgggctggaaagctttgtgggctgagacaaactgggccttaagaaaacgacaataactcagcttaccagagtcgcaatttgaggttgaatttgtgctcccacacatgcaaatctgcctaatgccgtctgaaccgtatccgcacgtgccgccagtcgcctcacacgctctacaaaactcatcattgccgtgaacagagtacttcacacgtatcccataaaaccattcattgggcccctcaactctcaatggggccagactataagcactactatacccttcacactctaacttactcagattaatggccttaatagcctcaaacgacaatgcacagcattcaggtgggccggacccaaacattgagcccatacgcttatggcccaccatatcccatgccgggcacccgtaatactcctcacaactcatacccgaaacattcctacatggcaaatgtttacccggaaacccttgaaagagcggcgatcgggcggagcaaccgataagcatgaacacgttgtctgcggccggt

SEQ ID NO: 8730 - DNA, 1024 bp, Cannabis sativa
gagtttatactatacaagcttaaagaaatgggtaagataagtccagaagatatatcactaatcatggttgaatttaatgatcttgatattgatcaaaatggaactttgacacattctgatataactttggctcagttatctcctccacacccttgtattccaaaataatatcattaattagggtttttttcacaatgtaacattagaaagagaaagaagaactagttatgttttatgagtggttagtggttattcaaatattaaattaaaatatttgaaataattcaatatatgatatcttatttttgtactaagtagtaatgatgattttttaatattttttgaaagtttattatgtacataaatattattatttattaagtcatctaaagtcatcatatcttatcttctcttaagtatgttaatgatattgccttaaataacaacatattaagtggggtcatttgtggggtttgcttttttatttttgtttttctcataagatgctttttatgatttttttttttgtttttatttttaaataagtaattctaatgttaaatttcttcttcttcttttttgttttgttttaaagagaagatttgttcactaatttaaataagcaaaattaggtctagattagctaaaagagtaagatgcttggtcacaactctttgttgggtaatatacggtactcgaaatgagaaagttaatttggaatcataaaactcccatcgcatcaaacatctatgcttttgctgtttcatttcttggccattggaaatctgttcataattccaaattggagtcatctcagtcaggtttgttggccgagaatggggctgagcagtgatgcgtcccccgtgtggtagcatcaagattatcgtagatgtagtggtgtttggaagtgatcataaatatgggattggtttggtttcaagagacaattgtgaccttttaatagagggacgcttgaagctttttaatggcgtggttcgtccggagttggctgaggcaatagggg

SEQ ID NO: 8731 - DNA, 1038 bp, Cannabis sativa
ctcaaaaaatgattagtattataatcttcccttgttgctttaaggtggacaagaggttgatgcatctgactcattaacccaattccgctttggctccattacccaaaaatcatacaaaaaatctcactttaagaattacaaaaatttgagtagcagctcttaattttttcacttcccaaaaattgccaaatcacttaataaatacaatttatcaatccaaacaatgaatagagccaatatctcaacaatccatcatgtaaaacacaataattctatgaatactcttaaattcttcaacaaagtaagataatcccaatataacttaaagaaaattccccttttatcttgatatgaacctctgtcgaaatttaggaagtaattatttccttatctgtgcgcaggaataaaaagggcaactagattcgtctttagggaacacggtgtctagttctttcggcatcacggtactggacctgcttttggatacgagttgtcactggctgaagaccatctgatcacggagctgaagtatgttcttaaaagttcctatatcttctcaaagacctactagtgggcctttgatgctgacctggattttacgtatcccttgctagaaatatagataatatttacctcccaagcttccagatactacgcatggtggaagattgcatcattctattagtgtagacatgtagacgattagaagtaatatcatgactttccaggttttaatctatcactgaaggtgacttccatcttcaattgtggtacacctacgtggcaatcgcctagtggtagaagaacatgtttatcgaggagttattttccaaaaatgcttttactttgatagttggcaactttttggcacgaaatttgaaaagtagcatcttcatcattgatatgcaccacgattacagtgtgaattaattgtggtgacactccttgactgctagaatccccaatcgtcagatggagtttgtgtttctggagactcgatcttggatcatccattctctttcacgtggattgccactt

SEQ ID NO: 8732 - DNA, 583 bp, Cannabis sativa
aaaaatagttttggtaaatttttttatttgttgtagtattttggaaaaaaatttaataatataattttatatgttatagctattttaagattatttgtaaatttttagaaaattctaaataatttactgtatctaaaataatgtttaaattattatttaccacgcatataaaaaaaataatcgtgcatgccatagacttggatttaattttaaggtatatttagttatacatttaatgtaatctaaaataataaatgacaagataaatttaagtggtacgataatttagcaacatccttctctcatgtaaatttaaaacattttaactaattgttttatttaactacgacttatatatgtaagcaacaattgtatattaatatattttcaggtctcgggtggattctagtcccccctcaacacctcttggtttgtttatgaagtgtataacaaaatatataaatctaatttttagtattgtaaattattttaaaaaaatttataaatagttctaaatagctataatatatacgattatgaaaaaaatttaactaaaaactttcttaaatttcaaaagagataa

SEQ ID NO: 8733 - DNA, 1367 bp, Cannabis sativa
atgtgttttgacaaaagaacaagaggatagaaatactcttggtagtaaaggccacaattgcttttggttatgtgttctatgaatgggccaaattggtggaaatggtaaaagccttgatctctacgagtcggaatccttttaaagtcgcataaaaagtttatttcatgagtagttgggataggccagttcctaaggtgataaaatatgaagaaggtggctagaattctataactattggggtttatctggtaagggcagacactgaagaagtcagttgtggatataaaccatggatgcaagggcaagtaagcacccgcattcatgtggaatctctaccaagcactatagcaagtattttggaaacccttgggagcaccatgtcaaggcttccgaataacagtttcaagaaggcaataatcatcccaaattgtttgagcttgaagcacggtaagggtattaggcacaagagtcctaagattaaaggctcaatctctcgaatcatcactttcaatggcagctttgagaagctcagttgccatcacttttctaccacgccctttgtccaagttcttagacttaggcattgtcagcttagctctaatgaattgagcaacatggggatcatatttatctagtagccttttgtttctcttcatcctagtcatctcaggttcaatagtttaagctacttacaactcaaggaaattcaaacttggttggaaaaagtcaaagtaccttggaagaattttttaaggcataagaaaggtgttttcagatttttggaggtttggaaaaattatttcgaggattttatgagtttaggagtccttcaaataagatcaaaaaaaaaaagagagaagaagaagaaaccaaaagaattggtgtcaagggggaaagaaagaaaaaaatgtgttttctaccttgaagtgaagaaggcttgaaggattgatgaaaatgaaatcctgaggtactcactaaattctataagcatgtggagtgaagaaggaatcatgaaaaaattggttctcaactcacttattcatagttgagtccaatttcctaatcctaaagctaattggagtcttttaaatttgaagcttcttaaggaggaggaaaatgataagtaaacaataattatatcttttctcttttcctttttcaagctaatttcgaattcctatccaactaggaatagaaatataaatttctaaggtaacaaaaattcctaatgctattgggattaaggaaaaattagagaaattaaaggaaaaagataaatgatcaacgaaaggccaaaagtcttttctgttcttcctttctctatctaattttgaatggaatattcaacagggattaggattccaatc

SEQ ID NO: 8734 - DNA, 1397 bp, Cannabis sativa
  modified_base (426)..(428): a, c, t, g, unknown or other
gatttccaatattatctctactactcatagggtcttttttttttaaaaaaaagtcctataataaaattgtcctatatattcatgtgtatatatatatataaatagatcatcttgattggaagtttatataaacatattatttacaaatatttgaaatctatatttatgtattcttctaaacaaatttgattagtggggtttaaaagaaagctagcgcccaatatactgctaatggcctatacatacgtacgtttgtatgtgccacttccaggtaacgttatcaattaattttcaaaatatagaactatttctggagatcttagctggtactacatatagtttagtcacaacatgagagcaggaaagaacctcttaacctttgacttacatccatgaatatcatttaatatataatatatatatatnnntatatatatatattcatatatgttacgagctagccactaaaactaaatgatgattggaggcgtagtgttagagtggtgcagtcttcttataatattatttattcaaatattaatattaacacaaacataaataaatacttcggtcattaatagttatcttaggtatagtaatacagattctattcttttctcaataagtaaataaataaacttcatcacatacggtacaacaactattgcacatttactcttcagaatgaagctagctatgtcattattatttaattgcaaatgcatgaacaatgtcaacgtgttttctcattatgtatattaattaaattattaagcaattgacttacgctccaaatgcacgttatacacatatagtttgtcagatatagtgagataatatatataaatattataacaccattattatgtgtgatcaaattttaggtttcgtaacatggctcgagaaaagaagatcgtggatataactaatgcgtttgcagataactaattcagtttatttgttttaaattaattaatgttacaagataattagttgattttttaacaagatatctgccagaaaagtggcgtgattatataaatttctagcggaaattcttataaatatattatataattaattttctacacgaaactctcgtcgccaaaattacatatgtcatgtttaattaaactggacacaatctgtccttatatatggtataagtgttggaatgtaactttcacatgtactagtacacgtgtccgtagaatatttgacaaaatgatttgagaattaaattattactcacttttgtcaactaacacatatgctctcgaaattaaatggattatacgggtttactagcaaggtcaactatcttttggagtttttgctttgctacaagggagataattattattttacatataattgtttgtataattcattttttt

SEQ ID NO: 8735 - DNA, 853 bp, Cannabis sativa
aaaatattattttagactttttattttataaaagtaattaattgaagtatttgttttattaaatgattatctatatttttcaaaatagtaaaaatatgatcttgaactcaatttttaaaaattttattttttaatataatcaaatttaagacaatttttaacccgaatggatacagaaaatgtaaccagttttgtcctaacatctctatatcataatattattaagttttattttgacaaaaaatcagttcagggtcttatttgtaaaattttagaaaatataaagtctattttgttatttaaaaaatagagagtcgaataaataacttttacaaaacataagataaaaaatgatatttacctaaaaaaaaatatatattctcacatatttttttgactattttttttatttactcagaacattctattctctttctcaacattctattctatttttttatttacaatttcttacaaaaggattgttttgatactatttttatctattttggtattcaaatgatttttctagtctattttctttttgataacagtggatgttgtagctatgatcaattataaacttttaacaactccaaataatttattatcgtaaaaataaacatcaaataattacttacttatcataaaaataaataaatgaaatttgaaactattaatatattagatgggcagaataaatgaagtaaaaatgattcaatcattctttcaacccaaaaaaaggattcaatcataaactaaacctggaagttggaactacttagaaaacaacatgaggtttcaaacaaaaaaccaaaataattttggaaaaaaaacccaaatatagatcgga

SEQ ID NO: 8736 - DNA, 703 bp, Cannabis sativa
aatttggtaaagtatgcactcacagattcatcacattgatgaaggtaggtaaaggttttattgagttcaaagattcttggactatttacttgattgaatctattgttgagcactgtccacatctcagcagcagtgttaagatacattatgctacttttgatttcgtgagacacagaatgaagaatccatgacataatcatttgattgcaccttgtccaagaactgtgaagagaatcagtagggattggttgaggtaatgtaccttcaagaaaatgagttttgtttcgcatgccaatggagagtttgaagtctcgtttccatggctgaaaattacaattgatgagaagtggtgttgggagtgccagaccaagatgatctgctctgctgagatactatggagatctatgtcttcatacgcagggcgatctatttgttctgatcatgaaactggaacagggggttcatttcgaggcaaagtgccagggaaattatgagatggtggtggagcaatagaaacatcgaccactggatgatttgaatcagtggtgatagctgaagtggttgctcgagtgcgcaccattattgaattcttgatgaagcttcaattgagttcttgaagtgctacgttgtttctattgataccatattagttagaaaaatagacaaaagactgatttttattattatcattaaaatgattcaa

SEQ ID NO: 8737 - DNA, 927 bp, Cannabis sativa
gattttattaattcatttttttatttttttttccactaaaatccaaagaaaaaaaaaacaaaataagattagaaaaagaaaaaagaaaaagtgaaagagtcgtcgtcgcgtacgacagtactcagcaattccaaatccgattttattgaacttcaaactctctctctctcttcctcatcacctttctgatcatcatcctgattttctagagagagaaagtcttcacattgtcaaaatagtgaccaaagcgcgtacttgttacttcctctcaatctcaatcccaatctcctccagatcttgatcaaaaacagcttcaatacttccaattctagatcgatcccattgctagggttcccaattccatcttatctcccaatggcgaagccaaggcactatcgtttaccttctcggaaatcctcttcctcctcgaccaccctcatcttcactatgctcgttatgttcagctttgtcgttctcattctcgtcgcccttggaatcctctccgttcccagctcctccggtgactcccccaaggctaatgatcttacctccattgtacacaagactgcagataggtatagcaattctctaatcgcttcggctttgcattttggtttgaattggattgaatgctgatttgggtaattatgcttcttctctttttaataggaaaacggacgatgatggcaacagcgaaaggtgggttgaggtcatttcatgggagcccagagcgttcgtttatcataatttcttggtgagcctttttgaaattactgttaaatttgttaataccttataaatttcattcaaatttgatatgctggatgtaaattctgttgttgtttgcttttggtattatgattgagagtggagaattaaaattgacattatctcaaaaaatttaaatgtcttggagagagttactag

SEQ ID NO: 8738 - DNA, 611 bp, Cannabis sativa
gccggccgatcgcatggtgctgattctgatgtaaatgcttctcctaaaatcatggatgttgattgtgttgaccatggtggtgatcatgatcccatgaaattaggaagacaaaagaagaaagaaatatgtatggaaagtgggcagggtgttcgacagcctggtgtttatggagaggctcaatctttggctcctgatgaggacaataatgatgatgaagatttggtggtattgttggatagcaagaggcgacgtacagggagggttggtgtagtgcatggcgaggtggcagtgcatggtgaggtggcagcttcggctaagagtgtaagtggagatgatgggcttgttgggacaaaaaacgattcacaggtgggccttggtatgcaggcccacccatcatcatgagtgttatctcttggaattgccatgggcttgggaacccatgggctcaacaattcttgaaggaccttgtggtccaaaagaagcccaattttttatttttgtatgaaacacttgctaagaaggatgtggtggagagggttcgtgtgacgattgggtttgagggtgctttggcggttgattgtcaaggtaagagtggtggtgttgctcttttg

SEQ ID NO: 8739 - DNA, 893 bp, Cannabis sativa
ttcggggcacgtgcaggcattttcactggtaactattagattgagataccttaggcattcctttgccacgtgtctccatcctaataaataagggataccagtatttaaaccccatgatacaaaataattcttacttatttccctctcattttcgtctctccccttcccttacccgggttttcaaattctcaaaaattcctctaaattttttgaatttctttcaactgagaacgatttcaaaggcttcactacctatagaatcatccaggaagaactttatttgaaggttcgtggtttaccctctctgtaactgttttctttttcttgagaattcgtatgtgttctgtgcttttaggggtagaaaaatgcataagagaatggatttactatttgctttacgtagtttaggcaaaatattgtatttttttggaaaatacacgcctaaaacttgaataatcgtgggtttcaggaagaacacttcaaatattcacgagttttaagaagaaaatcttgaatactcgtgagtttgcctcaaatattcgaatgcataaaataactttatctaaccaatagctaaactttttgaccccgtttattagagtttttagctcttaggccttttttagcttttatgtatttttgccattaaaactatctgagttctcaaaatggtgggtgtgtctcattaacttaatgttcacgcggttatcgcatgccccttgggatactgtgacacgcctaaccatttcttgagacatgcagttagttttcatttttcttgcattttattcatttttggaactgactagattctcgaagtggtgggtgtgtctcagtgacttaatgttcatgttagcaacatgatcctgatgacactgagatacccccagcca

SEQ ID NO: 8740 - DNA, 839 bp, Cannabis sativa
tacacgagtactgacaacaacatagggtcagcactagccacacatcaagctacacgagtactaaccctatcccatggtcaatactaatatggtaggttttgtctaaggaggagcctcaccaaacttgtcacacaagtattgacactttcctacggccagtactcgtccaaatgcctctttacacgagtattgaccctcctttggtgttcatactcgcccacaacaattaatgctcttaaagaagaggtccctccagcacatccacttgaccccgagataatttttttccaaagcaacactagacatattttcacatttcaattaattatgttccgcaacaccaaacctttttcatataataaattttatatgattaacctattaataaatatttccatttactttaaatatatatatacacaagtatatatattttgataattttctttcattttttctacctaaaaaatttgtcaaaatttgacttcaattttagatacattgaataatttttgtaagcattccattttaatttctttcaaatcaaacataaagtcaatttttctacagttacattccaatattaaaataagaaaagcttgaattataaatgtgaatgcataagagcctcacaaatgaattggatgaatattaatttattaactattcataagccatgttttattattattgccttccacaaatagtttctctgtaatttttctaaggaaacaaacaaaatgtttaagagaaaatgaagataaaaatagaagatagagagagagagaaagatgtaattggtccccattaaattgtcatttattttcattttctctctc

SEQ ID NO: 8741 - DNA, 1782 bp, Cannabis sativa
gttgtcattaaatattgaatattctaaatttttactatttttctaactctaactgatgatgatgaagatgctgatggatgtatacaatatttttcaattatattttttctttttaatttatcattttctcattgttgttgcttattgtcgttaaggattgattataaaattagtcatttttatcgttgacaaagttaaaacttaacataaaagtaatacattaaatgaaagaaattatcatctttaaaactaacgagatatatatatatatatttaaatatagtgtattgtagtaattacctttgaatgatttcacaaataaatttgttacaagtatgattagtttttcatcgattatgtcagatactttttaggtttcattattgacaaagcaaccccacatttttaaattaaattggcttgaaactaaaaatttgaaaatatttttattaaaaaaaaattaaaaaaatttaattagtatatatataatataatttaactaaggaaatttaatttattttaatagaagttaaaattagtaagatcctttttatttcatatgttgttgttatattttttggtggcttgacttgtattgcgaccgctaatatatctgcattttgaatgttcaaatattttttgatttaataagaaatttgcatagaacgaaaatattataaatatattaatattacattaccaatttcttctttagaagacatgtaggggtccaagtcattaaaattaactattttgtaccaaaagttattggtttttgtcttcattttttgtcagttcttctatttttgttgtagaggtaagtatccattgatatggatgatttttaaaaattaatggtcatgtgctttagtaacacattacttaatgtaataccattgatacatatttaatatatatttctaagtgtatatatcagattaaaaaattgtagtttctactttatctccagtaaataattatataattgtagttaataaatttagcaaatgaaataaataatattttatgtttaattgagtattaaaataaataatttacatttgtattaataagagttagttttttatatgtttttacaataacttatagtcaattatcatctttgctgttgagtcacttgttgttgaatcgatattgttgattgtggtcttgtttaattttatgatttttatgattaataaatttaaaaagtatattgttaaaaatagaaaaatttataaaaagagtataatttaaatataataaatgtaatattataattgttttaaaaaaaatgtaatattatgaaataattaaaaaaccactttaagaaatcgtttaattcttttcaaaaaaaaaacaaattgtaaaaaattatccttaaatggttttaaaaacccttttaaaaaaaatggttttaaaaacatattataaaattattaaaaagttaaaaaaaaaaaaaccttaaattaaaaattagtgtttctctcgatactctctctctttcttcttatcctccctcttctcgactgcttagtgcttaccaagttaaaggcacaagacggcggagtcagaagatggctgatcaatcatactccggtcgtcttgaaatatgattgcctgagagaaattgtgtgagacaggttctcagccattagtggcctcccttttgtcgccgacaataatagagatttgtgatgaaggtcatcgtacaggttgatggaggcgggagagagtagagcggttcagatttaggtttagtgatttttttcttttcttgtt

SEQ ID NO: 8742 - DNA, 861 bp, Cannabis sativa
tcttattcttggagaggcattttatggggaaaggacttgatggcttcggggcttatttggaaagtgggtaatgagggcagtattagaactttggatgatcattgactttctaatcatagacacaagttttttatcaataatgatcctcctccttcttcttgtttattgtcctactttgtcatggattcgggaacttgggatgttgggaaattgcaatcttgttttgataatgcaatgattaatgatattcttgaggtccctgtttcaggatgttatggtcatgatgatttgatttgggaaaaggtaagttttggattgttattgttaaatcaaattatcatatggctttctctcatcaagatctcccctcttcctcctctttctttggttctaaaaagttttggacaaaaatttggtcctctgttaccccccaaaggttaaactttttgtttggagaatgttgtctcatgccatccctgtaccttcatctttgtttaaaagatgtgtgattgatccccccctaaatcctatttgtaaattggagactgagactaccaagcatgctctgctagattactccagatccaagaaagctcggcgatatttcaggtttgctacttattatgatacttttaaacacttgaatattgatgagttttttattggtcttgttcaaactctggataaagataatattggtattttgttttgtttcatgtgggctttatggaatcaaaggaataactattttcatcatcaacataccattcctccaagggaagtgtatgattggagtctcaacttcttttttaagtttttagatgtgcagcaggttcatgccacaggtcacaattctgctac

SEQ ID NO: 8743 - DNA, 681 bp, Cannabis sativa
aactcataacaacgaaaccctaatgactcactagctagctatatatagacataacaatataaaatttgaactaaaagcttttaggtataatatggggagggcaaagggtaatgaggatactgggaagaaaccaattgatgatcaattggctacaaaaccgatcgacgaagctgtaacaaacgatggcggtgcagccaaatcatcagttgaacccgcgaaaaaaaccacaccaacaaaaacttctgaagaaataccaacggcgataaacgcagccaaatcatcagttgaattcaaggaaaaaaccacaccatcaacagcaaaaaaatccgaaaaaataccagtggtgggaaacagaggcaaatcatcaattctatccccaaaaaccacaacttcaaccgacactactactgagtctgaagttgttaattcgaggaaaattggggctaggtcattacgaaccacaccaaaatcaacaaataataatcatcctgaagaagtgaagaagattaatggagtggattcattaactaataataataagtctgaacaaactgctagtgatcatcctagtgctgataaagtgaccagggaagaaggaaaacactcattaataactgtcaagggaactaaatctgctccaaatgataatgatgatcataataataactctggtaatttgat

SEQ ID NO: 8744 - DNA, 783 bp, Cannabis sativa
taatgtaattgataactcttaacattttatttatatatttgataaaaaatttatatactttcaaagcaaatttaaaacttttagtgattttttagtctaatacataatttatgggagctcaataataaatttggacaaatataacattagtatacttgttaagttaaatttagtacaaatttacactatttgcatggtctaaatttaaggttttcttgaaaaaatatctcattatgacttaaattgaagtattattttatttcatttgtttttttccttgaataacctcaatgcaataacaagaaagaaagaaagcggtgatcacattaatcacctcatggaagcttaaaaaaataaagttagagattgagtaacttggtacttaaccaaagtatgagcaactatatttatctctatagtaaaccaaataaccttacaactaaaacaatttcctgttgcaacatgcccacaccagagtaagaaaattcgaaattaaaataacattaaacaaattcaactcatgaatcaccttagctccagtaactatagcaaaatttctcccctctaaggcatccttagtcgtcaatctctctacaaataaggcttgaacatcactcccctcagatttaacaaccacaccaacagagaccattccaaactttaaatgcagcatccacatacacccaaggccttccttcaaggacagaatgctccactgaaggaggcgaagaatctttaaacaccctgaattgaggctccgacataaccagctcccaatgttca

SEQ ID NO: 8745 - DNA, 515 bp, Cannabis sativa
cacttgatgtttgaaaccttctgtcgccttttctagctcgctaaatttgtatggacgaatagcaacatcctcaagaaaatcatggtgccactgatctgtaatctttctgtattcccacattctaaatttgaatataagcgcaattgaaatcgccaaggccataaggccaaaacatgaaagcacaatgccactgataaaaattccaatttgaactcgttgacttcttcctttagttacccctgttgtggttgcgagcactttgaccatggtcactacatagctatttgtctgatctgctttggcatatctcagtggcaaccttagtttgttgcatgtgttggttgcatatatagcaatttcacaattacaatcattcaagcaatcttgctcacaaacactcttgttgttcattggaacaatagagtaggagttgttttcccacaaaactccattaaattccactaccgaaactgtattgtgattatcacttttgcaataatctatcttactctttc

SEQ ID NO: 8746 - DNA, 697 bp, Cannabis sativa
atttatattttattcatattattgattgtttttacaatgtatctctaataaatggttgaactaatatattcctttctatttcgatattttataaaaaaatttaattaattttttttttttgtataattgtatatgttatagttatataagaaattttatttaaattttgttatcaatttttaaattgtttcgaattttttaaacttttcaaaaatatcttatataataacaaagaccataaaaaaattagactaaaatataaaactaatatggatacaccacttaaaaaggggtatattctaaaattttccttttatttagttatttattaaaataatcatttatttattcaaataacagtaaataaaagatggaaaagtaggataagtttaaaattaattaaaaatatttaaaacatgtatataatatttttataaatgctaagactgctttagtagacaataaataatattattttatttaaaaataatatattgtattaattattacgattaaaaattttaatataatataaatagtttgtattagcttatattataatatttacaaaggaggcagagttaaccccaatttttgattcaaatttagggacctagacctggacgcagacctgaatttcggttccgaaccgaacccagacaggactcgatccgacccgaaccccaaattcgaactc

SEQ ID NO: 8747 - DNA, 1107 bp, Cannabis sativa
cgttgttataacggtgggagacgacatattcatcataaatataatactgtgagagagttcctctctcttggagcattaagagtggatcatgtatgcacttataaaaacttagccgatcctttgacgaaagaattagctatagagaaagtccttaaaactcaaaaagaattataaccaccactttatttacatcgcttttacaatgaaaaagggggaaaacataactttataagtttaggtatcaaaaatagaaagttttaaaaaaattgaggtaaaatggtgtaaaaatggtagagatagggaattttttaggggtggtgaaggttttggtggtgggtttctctggtttcgactggctgctgctctttcatgatgtagaagacaaagtgtggttcgagtgctgaaagggtttgataaataaccttatggcgtcagttttatcaaataactgacgccatatgctataaatgttacatgtgtcagtatatgatatggcattgattatttaagaaaaactgacgatatagaggggttttttgcactctttaattctgattttaaaaccacttctaaatatcaattttgaaccatccgggtatttctaccaatataaatacttataaatgatcattgcttctaatccaagtctaagccaaaaatttccccaacaaacaaaataattatctaattattatacatttaagcttcctatggctctcgattagtttatggttttgcgtcttagatgaaccataatactttagagatgtgttgttagtataattagtttgtacacgttcacacgcaaaactattgtcttgtatgtggttccaggccaaaactacacaaataattcgtcatgttttttttttcttttttttttagggaagatttcataaaaccaacaaaaataattatacttttattcgtccatgtttttttttttaacaaaaataattcgtgcatgttatactttgcaaatacgtcttctaattataaaatgtgatcgaccaaatcaatgtacttgtcacataagacaagaaactatatataactaattatacatctattaaaataacataagcaaccatgacatttttttttttt

SEQ ID NO: 8748 - DNA, 589 bp, Cannabis sativa
actagaaacgtcttcacaggatctcagtagttacctaggcacccactaatgtcaattagggcactgacacaatttccaatgcgtaaattaatcactttagtcctgatggttgggccccaagattatttctttcttgccacaagttaaaagtccatgtcatcaaatcaaatttttgcgtaaatatttgccctcaaaattagtatgacacaagtgtcatgctaacttttccatatgaactaagcccgtttcatacaaaacactagtttggcatcactttttggtatgtgaccttcatttttagccttctgctaagattctctatgatttgggagtttttaattttttttttaaaaaaaagataatttttcaataatttcctaattgcattaggaatatacctattctcttttcagctccacatgcctatagcagttagagtgctttgttagggcttgcttcaacttgcttcgagattttcattttcacaggtaatttcattttttttgtttctcgaagaacacgactaaacgataatttcaacagaatcaacgaaattccaaaagtatttctttctcaaattcgaaactta

SEQ ID NO: 8749 - DNA, 1366 bp, Cannabis sativa
gtgtggagaagaatctaaaactctagaacatactttattttcctgctctagtttgattccaatgtggcatcaattgggggtatggtcggtgctctgtcgatgtgtacatggaccaatgccaaaaattatcctctttctccttgaaaaattatctcgtgaggcttttaaattgatgatgattaccatatggttgctttggtatgattaaaactcaatattgtttagtaatatgcagccaagattagatgttgttccaaattttttccataatcacttgtcgaaatttaaagagcatgtttggaagggtcttcatttgggattgtgcttttcaaaccaagctgaaaaatgaccttcttggtggatgtcaccgcctcctaattcctttgttcttgcgactgatgcttcagtagttcctgggaggggctttgtcagattgggttgaatagtacgggatgttgcgttgtggtttggttagcttggtcatttggtgttttaagttattttttttgtttatgtgacagagcttcttataattagactgggcctgacttttgcgaattaatttggttttagtatttctattattactagtgattcgactgtgacaattggttagattaataatctttactcaaattttatttttcaatctactgtattagatattaattctttattagcttctatttgtgctagtttttacagtgtcgtttcgcgatttacgaatattgttgcccacacatttgcaacctctattataagtttagtagagtttgtatgaacggatgtctgtccacaaattctgtgctcttttgtaataaattcatcaaaataaattatgtttttcttaaaaaaaaattggcattcaaaaaatttagaaatatggtccaaatatctgtaaaattatggatatttagttccttagtaataatatagccaataaaatacgaatcttgtgaaatttttttgacacaatcaaaagtaggacttcgaaaagttcagcaggtcacaattggggtcaaaatcattgagtgaaatctgtaaattcatttagaaaaatgtaaatgaagatgtgcttttagtcaaatcatgtcgtctttattagtgtgtccttggagaacactgttatgaaacagtgtacacttgtcgatgaagaaacatgaaacattcatgttaccgtaggttaatagcgtaatcccatgtcgacacgtgtccttgtcagttaattttcattgttttgaaatgatagtgaaatccacatggatttaataataatgtaaggcccccattatgattgtgaacaaaacaaaagctgtacaacagtacactcacaaaggtctcgatacgtcatttttcactgttccct

SEQ ID NO: 8750 - DNA, 1515 bp, Cannabis sativa
aaaaaaaaaaaaacgcgtaattttttttaaggagattaacgtaatttttataaacaaattaatatttttaattaaaatagaaactatgttattttaattcttttcaaaattatgttatgattttaatatgtacctaaaaagtgaatattaatgagtacatagtattataattgtaaactaattaataattataatataaatttagtaggcaattcttcatttatacatcgtttatacagttttaaaatttaattttcattttagatattttaattttttaattatttattaattttattttatacatggagttattattaatgagtaaatattgtaaaaaactaaaatgataaaataaaatcttaaatttgaaattaaaaaatacccaatttattgacaatatttaaaactagggaatatagtcggtcttcgcgtagctaacttaattttttttagtattataataaataattacgtaaagatataattctaatatataataaaattataaatatattatcttatttcttattattaataatttatttattaaaaattaaatgcacaattttattaattattatttagaattatttattaagaagtttttttttttttgataattatttattaagaagtttaaaatttattaaatgtagtattttaaattgttttgttaaaagaaattatttttataaaaataaataaataaggtagtgtagattaaaattactgtgttttccataatgcattattttcatatctcggtcattcaaaaatattgttattattatatctcacttatttttatcgttgtatctcacatgttgtcatcattgtatcacatcccttgtcattgctgtggtttacttgtagttgtcactattatatatatttcccaaatttatatcttaatcttagatttcatctcgaattttaaacattttttaacatttttaagacattagagaaaatttatagtttgttctgttatttttttgataaatcagcaagtttattattaatccacaacactttgtacaatcatttacaatgaaagagcatctttatgttaaagacctcatgaacaacatatctctcttctttttttacaatgaatggaaccaatctttatcttgttgaccaattttgtttagccaaaataattttattctatgtttaacactatttttgattctttgtacaattacatctttactttctatatgactattccaaatttggtcatttctagcatgccaaatgaccaaatggaataaaccaaatgagcagcaactgctgccgacatatttcttctaaacttgctgatttttgccttgtgtatccatttgagtagctgagaaagatcattagtttgtgccccccatgacagttaagttttaacctgttgtaagcagtattcagagaagggacatctgaaaaacaaatggtcatgtgtcttagcctgcatcatacacaggctgcaaaccaggtcatcaagcagccagaatcgtt

SEQ ID NO: 8751 - DNA, 615 bp, Cannabis sativa
accaataataatttgttatttcttataatatttggaactataaagtgcaccttatcatttctctatttttaattactattatttactataatatacatattcttatgataattaatagtaaatattacctaaaaaaaatataaataataaatatatatatgtagttagccaaaaaaaaaaaaaaaagaaataataaatatatattatatattaatttgatgaacttatatccttctgatattatcctttgtaaaaaaaataatattttttattaataatataaagtattgagtgtacatttagaattaataatgtgtcatttcaacaccaaatggtttttttttttttaataagttgtttaaaataacattaatgaaaaatttgatcgaatacactcaatattttatataatatatatttttacaaaaaaatacaatcgatctcacaaacaattaacattgtttttagttattattaatttttgtgtatttattttttgcaggcaaatgatgttgatctttacattaatggacacgatcacagcttagagcacattagtagctcggataagtaagtggatacatataggaaatttcataaaagtgttattttaaa

SEQ ID NO: 8752 - DNA, 639 bp, Cannabis sativa
tttttaaaaaatattttaatttttgtaaattataaaaagtataaaataaccaaataattttttgaccaaacatattcaaattagttttttataccagacaaattagttttctcgatgcaacatgaaatttcgacctcttttatatttctattatgtcttctcacagatggatgattcaaagtaaaaataattttttttaagtaatataaagaacaattattatatttttcaattattttttagtggtaaatctctctcaaactatcattctggtgtgtaaatcaagtgagaactaacataactacttgctcaaaaaatttggtgtttggtacgagaaatagcactatttcttacctcaagaaattggacgataaacaaaaactttgagatgctcaaaattctatcaattatttcagtaagtctagtaagtatattaactataaagacttttaaaaatttattggaaaatgaagtatttttttagcaacaaaagtcaagtattcagtagcttaaaaatgtagattaaaatactaaattttttcattaatatatgctagtacaagattttaaaataatctgattacaggtatctaaccattacaactatatttcataaggtgctacttttgttatattggt

SEQ ID NO: 8753 - DNA, 552 bp, Cannabis sativa
tgacatccaaacaagccacccagccctccgtgtcaccaattgcaccccctaaccaccagatctgaaccatctcgctagagaagaaaataactccaattgatgaagaactacagacactgcaccaatgccgcaacaaaggaaaagccaatctcatagcaacccccatgatctagagaaaacatgggttcaaactagttcacaagctccaagatccgtaaattcataggagaatcaaagaagaaccaacatcaaacattatctcgtagtgtaatctcttacattaatattttttaattttataaattaattaattaattttgaaaattgaagctagttttttttatggtacaagtaatgttatagcttattaactaattgatttaaaaacttaaactagaaaaaaaaaaccgagccgggtcaaacctaacccggtttgtcaagactaacccgtcccaactcaaataacttgttggggtgaggcaggggataattcgaggcaaaaatctagctcaaaatgcaataacgaattacagagaagagagagagagagag

SEQ ID NO: 8754 - DNA, 852 bp, Cannabis sativa
gtgttgcttgcatactaaattagattcagcattaagagaggaaagaagtgttagtcctttagggagagtcatatggacctcttcattgagatcaccgtttaaaaggcattgtcaatatcaagttggaggatcggccattgttgaatggtagatatggcaaggagaagtttcagtgtaaccatcttggctacgggggagaatgtgtcgaaaaaatcaagcccttcttgttgtgtgtacccttgtgcgacaagtcttgccttgagacgttcaacactcccatcactgttgaattttattttatatacccatcgacatccgatagcacgtttgtttgctgggagaggcacaacactccaagttttgttgccaatgagagcctttagttcatgattcatggcatgcacccatttttcaaattgaatagcttcttggtatgtttgaggttctctcacggttgcaactgcaaaaataaaggctttatatggatcaaatatatgggaatatgaaataaaattagaaagattgtgtggggtggaagatttatcctgtattgaggaataacactcgaaatctctgaggtaagaaggaggcttagtgacacgagttgattttcttgtaggatttgaatcagaggcctgcgtttgcatactggacgtgggtctggtgtttgctgtatcattttcagttgagatgtttgagttatctgagttgtttgtcgcatcaggaacaatatttgtggttgagtcaggtgtttcctgctctgaagaaacctgttgaggcatagaaatattggtgttgtgttctgtgggataatcacagacagtagtgtcgttaatcacagtactaggtaag

SEQ ID NO: 8755 - DNA, 513 bp, Cannabis sativa
acaccatgtgataggtgtgtagtgcaaagggaaggcaaattcttgaagtaaggcttgaatccaagcaatttcagctgagacttgagcgagggcacgatattcggactctgtactagatcttgatactacagcctgtttcttggatgaccaggatacaagtgtgtctccaaggtacacacaatagccagcaacactccttcgatcatcaggacaacatgcccaatcggcatccgagtaacctgtaatagcaagtctgtcagaggtcttgatgtgaatgccatgatgtatcgtgccctttaagtatctaagaactctctttgctgctgaccagtgtgctgtggtaggagcttgtaggaactgacttaacttattaacagcaaaggataggtcaggtctggtgtgtgtgaggtattgaagacctccaataatgcttctgtattcagtcgggttgtgaagcagttccccatctgcttttgacagtggtttgccgactgtcataggagttgaacacgg

SEQ ID NO: 8756 - DNA, 526 bp, Cannabis sativa
agatgagttatttttcaacacttagcgtttttcctatttgaatggacacgaaggagaactcatcatgttggacgagatgtaaccttttaagtcagcaataactttctatggattctgtccctatttataggaatataagttgacagttattccttttagaataattcatttacaactattaatgaaacatgaacattcttctcatttcatttattcacacattcctcatttttatcctctagacgaatttgagagaaaaatatttattcaaagactaatattgtattctttatttcagaaaatatccataataataataaggatttgtgaaatatataaattttaacttcaaaatcacgtaaaatatttagtgttattaattatgtgtttatttctatagtatatttattaaaaaaaaagactattaatttggttaataaaaatctgtatattgttaaatcttatatctttttcggtatcgagaggtgcaataaatagtatttttaaatgtttaaaattatattga

SEQ ID NO: 8757 - DNA, 656 bp, Cannabis sativa
gctctcttacaaatggtgattttttaacctctttacaagtatctaaatgcgacttttatacttgacttttaatgactctaaaatacaagtggtctcaaaagtaaggacacaaaattctgtttgtactgtgagggttagcatattagagggatagtgaaggagtgttggtcggatattagctcgtacttagattgacacaaatgatgtatccactacttgtactcgtcatacccggtgtacgaccacctcctctctttaggctttgttatagacgtgctagctttaacagactcatcctcaatcgtacatctctttggtatctttctcatcatagcctatacttataatgataaagcaacatttgaaaatttgggaaagggagcaatacttgaaactttggctaagtgttgagagagggagcaatacttggaactttggctaagtattgggagagggagaaacacttgaaaatttgactaagttttgaaagagagaacaacacttggaaatttgactataagctttgagaaagaacaacatttgaaaatttggctgagtgttattgcttccaagtgggaaacaagtggtggtgatagaaggagggtatgagaaagtgatgagtggagagagagagagagagagagagagagagagag

SEQ ID NO: 8758 - DNA, 519 bp, Cannabis sativa
tatagtaatactctttgcattaatataagaattaaatacattatgattattaatattatttctctacatattagttactagtatctattttgttataacatctttacctttaatttttttttttcaaacaatatctttattattattcaaaattaattaatgtgtcaatttttatttatttattattagggtgatggaatatgaatcatatgatcttaattatttgagtgtaatactttgatgcatattaattttaatgcatatcattactcttctatcatacaccaatgaatttctcatttgctaaaatatttattttatttatgtgaaaacaatttatgtatgaagagatgttttggaatttggatggataagatggaagagctagaattgatagttttgtctttgtaataatccaagtaagttcatatatatcaccatactcaatcataaattaatcataatatttgggtttcatattattgggtggcagataagattattattatatttatatta

SEQ ID NO: 8759 - DNA, 525 bp, Cannabis sativa
tcaaaacccacaaattgaaaattatgtatcaccaaagtaattacaaagcttagataaatataacaaaaccatcattattggcctggtttcaaatctaaatatgaaagtacaaagaggtaagaaatcattgaaaagaaagttggggatcttagagagagatacctaatgtagaacgaagcaagaagaagaagaaagcaggagaggattgagcttgagtgcagtgatgcaggattgagcttgaatcttcttcttcccaaatatatcacacatatagcttaacaagaaataggaaggaaaggaaatttaggagggatagaaatggaaaatttcactttatgttggttaaaatttaaactattaaataatcaaaattttaactatttaatattggtggaataacccttatttgaaaattaaattattttatgttggacaggttgtagagaatggtcctaaaccagttctctcttcttagagcttggtctttaaccaatctcttgcctgtttgattctctcttgcgtttt

SEQ ID NO: 8760 - DNA, 747 bp, Cannabis sativa
aacttctcccttctcccataataccatatttgatgattcaataggggtctgaggtgtggtttgatggtagcccgatgctacattttttttatgttattgtacgtaaaaaaaagtagtatcaagccaacatccgaccaccatcagaccatattctacatttacagattttaagctccattcattaagcttgtcaagaaggcattgagccaccatcggactaccatcggaccatagcatcgggccaccatctgaccgccatcagaataccatcgaaccatagcattgggccaccattagaccattatcggacattcttctacaacctttaatcattttaacaataggaaggcatcatgccaccaacagactatatcaccggactaccatcggaccttcgttttcaacctttacttattttaacaacaagaaggcatcagccactctcggaccaccatcgagcctagcaaaaaaaaccaattttttcccaaaactcaaaactagccgttttcgaccctaaatctaacatctactcatagataacaaacattaatcatacaatttattcatttgataatattgttgatggtgaaaccgtggttgatggagaaattgttgggtccgtaggtcgttgggtttgtggtggtcattgggtctgtaggttgttgggtctatggttgtggtggtcgtgagaagggaccaaggttgtgggtggtgggttgtagatcgagttcttggagtgagttcaaa

SEQ ID NO: 8761 - DNA, 1374 bp, Cannabis sativa
taagaaaaaataaatacaacatcagtgcattctaattaaattgttttattcattcttgaagagatctccccatctccttaggatttgtgcacactccatttttttttaataaacttatcagttccttttacttttccttttcgaaaaacaaaacaaatatatgcaaatgtagatgtaataggtccataatatacacgcgcatcttatatcgtggtggtactgggttctaagttccactataaccaagattttcttctttcttttccacagtcattagtactttttcacagggacaaatgtgcttgcacataatttttgtaatcaaattcttggccatttctgtaatgaatactccttatttcatctactatactccgcacactcaaattgacatcataatatacttgacatcacctggccaccaacttagggtcccctaaagcttatataatagttactagttttttctttattaatggactaattttcactttgtgatcaagttgacacgacctattgaaaggttgcttcctaactcagcaagccaaaacagagacacctctgatttccatttaattagatttagcattaaccataactacaaagtctcaaatctcaattatataataagctgttaactaaactgattaattatctaacctcacttgtttgcgtaaagtttgtactccaacaaatcctaactacacaggattaaactgaatgatttcacaattaaactataagcaacttaattgtcctttttaacataataagatccaatttgagaaataataatgacaaaggactaactttttcaacgaagaataaagtgattactgagctttcttctctctatatatatatttatataactttatatggtttcatgattataacattgcttcttattctcattcttctgtgtcttttttatattctatcaatctaaggtgtaagagtcttactcatttaatttcctcgtggccgtgggacaacttacaccagctttgagtgttggattggctagagtaaaatgtaagtcttggcatgggccatgccccatcttgttttccagtttggtacattcagtgggccaagagttaaggttttgggctgctagtgtcacaactttcttttcttttctattttcctttttaattgaaaagaaaaaaaaatgaaatgaacagattatatatgtgacaacatatctcatctacactcaatcaccaaatgctaattaaatgtttggtcattttggtgtcttcttatgattgattactctaaagtgggacacttaaattgtatcagaacaactacacaatttaaagtcatatgtgatacccttttaaaaacgtcaacataaatttaatgtat

SEQ ID NO: 8762 - DNA, 802 bp, Cannabis sativa
tggcagaaaaaaggaaattgaaaggatcctacaaatgaaaagctcggaggctgggggtttttatctgggaaatccgatgtttctttctaagaatcgatctagtaactttggttttattgtagaaaagttaaagaactgccttgaagggtggaggcttaagactttgtcttatgttgggagaatgaccgcggtcagtgcagtggctttggcaatgccggtgtattctacgtcaacctttactatcccactaactgtatgtaggaagatggatgctcttgtaaggagattttggtagaccgggggtatgacgaagacacattttctggcctccagaagttgggactccctttgccagccaaaagctaggggagggttgggttttcgaaaatttgaagatattaataaagcccttgttactaaactagcttgggaaatggcttcaaatgatgagaagttgtgggttaagatttttagggagaaattttgttattggaactccttttgggtggtggaaaagacggcggttgatccaagcatttggaagtctattctagatgcaagaaagattatttttgaaggggcgtgtactattattgccaatgggatagacattgacatatggcggcaaccttggatccttggatgggctatgaggaatttcgctttactatggaggaagtaaggatgaaagctcctaatttgagaactgtctctgatttgattcttcgtggtcaaggcaaatggaatatgggatatgtgaactatctttttggtcaaactgtgggtagacaaattaatgcta

SEQ ID NO: 8763 - DNA, 512 bp, Cannabis sativa
tgagttgcatgtatggaggaaaaaaaagcaaagagtacaacaatttcacctaagcctttattgatatacatgtaaaattggtttatgagaagaagagtaatggtcttactggatacaatatattagtatggaaaatcgaaaaatgtaaccatcattgaagcaaattaaatatgcatgcaaggtacatacattctttatttatacaatgatatatggaaaaatttatattaacatatatataagagaaatgctaaagagtattgttggtgtctaacactcttattcatactactattgatttaattaagtactaagtctcataagaaaatactttttagagaatatcgctaactaattttaaagtcccacttatagaaagtgatggacaccatttatacccaataacaatactctatatataatcaaattaatcggggcaaatattccccaaccccgccccacctccaacttggggacatggatataccataattaagataatcttttatggc

SEQ ID NO: 8764 - DNA, 1254 bp, Cannabis sativa
  modified_base (1126)..(1141): a, c, t, g, unknown or other
atatatatacaataacaaagcaatcgtggaagtgaagacgaatgagactggcagcaatacgaggatcagtctgcagagcttgttgaatgacccctcctacaatattggtcacacttgggcagctttgcatgtaaaagaatggagtgagctgagcaaaccctccagccacaaagccaatgcagcaaagacttattaccaaaatatattgtgatgagcctgccatttttttggttttattaagcccaatatatttgatatgaaagtactaatgaagtgctctttatatatacgctgaaatcaacaacaaatattgtttattgtgggcagaacattaaacaatagtcataaatgctcattacgaagataagacaaaactaaatatatatgaattagtcaaataaagatctttatagattagatacgtaaatatattttgttgaaataaattatggatatgagggatgtttcttgtctgcctactttgcttagaattttcatctttcaatcaaaataataacaattagaataggttggatgaaaatagaaaagtctttattgataaataatatatttctatagccgtctgtttcttctttctctcctttctcctctctttcaaaaaataaatgattttgtatactgcattctattagtcttcttctaaataaatgtacggcttttaattttatattatcctatatgagctatttagtgcatgactttaacgcaccgacatatagttgatatacttttttaggtttaccatgagtattatattagtttattagaaagttggaaggaaaaatcaatacttttgaattattgaaggctgcacgtccgaacggagttggtttgaatcaagtgaattattgtatgtgaagatttttcattgctagatgcaatgatcgaatgttgaaaggaactagggcataatatgggttgttgtgatcccccataaacaaataaaatatttgaccgtatttatttttgaggaattacctcatatacttttttttttttttttttcaaatttacgatttgggcttctaaagtggtttttttggtaattttaatgtagattgctatacgattttttgtagcgatttaagttacagcgctagttgcnnnnnnnnnnnnnnnntagaattccgtaaaaatacaaaaagaaactgttttaaagtgtaaaaataaaaaaatccctttatttttttctacttgctatgagcatttaatttttcataattaaaaaagaag

SEQ ID NO: 8765 - DNA, 557 bp, Cannabis sativa
atggcaaggtggctgtcgtcaccggtggagccagcggcatcggagaagccacggctcgaaagttcgctgctgatggagcacgcgccgtcgtgattgcagatatccaagacgagaaaggccaaaacgtggccgcatcaatcggcctggaacgctccacctacgtccactgcgacgtgaccgacgaggctcaagtcgcagccctcatcgactcaacggtccaaaagtacggtcaagtcgacgtaatgttcagcaacgccggggtgccttgcgagtcggatcagacgattctggatttggatctggtggcgtacgataaggtgtttgcggtgaacgcgagggggatggcggcgtgtgtgaagcacgcggcgagggcgatggtggagggtggagtgagggggagcgtgatatgcacggcgagcaatctggcgagtataggaactgagaagtacacggactacactatgtcgaagcacgccgttttggggctggtgaggtcagcgagtcttcagctgggggcgcgtggaattcgcgtgaacgcggtttcgccggggccgttg

SEQ ID NO: 8766 - DNA, 674 bp, Cannabis sativa
gttgttgattattatgtatgtatgtttcagattcgacctttgtggagacattattttcaaaacacacaaggacttatctttgtggttgatagtaatgaccgtgatcgtgctgttgaggctagagatgagttacataggatgttgaatgaggtatatatatatatacatatatacatataatcattgtattgtatctaatgcagaaaacatcattttgggcatttgacacaatgactatattgtgtagttaaacacaacattcttgtttttacatacaatacattaacacaattacatatcaaatctgtagtacattttctaaaagggtgtttctgtaaacaaactatttgttttgatattcaggggaactttttaattcaatttttttttcattatttgaataatttatagtgccaaaaaataaagttcaaaatatctaaactttgttttcgataatgtaaactaatataatttttttgaaaatttataagtgtagccttaaataactacaacgtatatctttatgaacttttttttgtttgactagataaaaggtctaccaaaagcactttactgtagatttatcctaagagtctcttattattattactaagatcataatgtaatgatgatgggcaaacaggatgaactaagggatgctgttctgcttgtgt

SEQ ID NO: 8767 - DNA, 901 bp, Cannabis sativa
cactcactgctcctctttctgtccctcttgcacttataccctttcttacttgtagaaaatcaactttcaataagttaaacttcttttatgagcttttctatgttccagatgaaaataaaattacttccaagtctcttcctctcttaaatccatatcaatatttcaccaagactccttcttcttttactagatccattaaagcacttattacactatccttcaaagctttaaaagaatacattcacacctcaaaattcagccaatgccaacttgcaccaacaacataagttcaatttgtgactcttgaaaactcaaatcaatatgtatcataatataacactaataggttgataaatatactaatataggagcatcaatattattaaacaagatatttaatagtattaatataagaaaaagtgtgtgaataataattataaaatgatatatattttaatactagttggcattaaatgctactgtgacaacataaaaatataataaatataataaatatattttattaaaaaaaaatgctactcagatagtttataagagtttttaaaagttaaatataataaatagtaacaacataaaaatatatatgcatacatcaaatagtaattaggtaattacgtgttgtttggtgtagtaataggaatgtttttttaccgattttctttcttatttggtcaaggattcaaattaatctctcataggagccttcgagctgcatacctatgatctaattaagagagcataaagtataaaactcatataattaatacgtgattttcgagattgtttgagctactgatgggtggagaaggaattttcaccctatgatttttttttaagaaaaaaaaatgtagtaactaagtaaagtaattatgattgatca

SEQ ID NO: 8768 - DNA, 1804 bp, Cannabis sativa
aaacactagcatatttattgactctaggatttgaactaaggcggtaatgtttagcaaactgacatgattcaccatctaacgaagataacttactatattgtggacaaagctttttaagtagaggaagatatgggtgacccaacctacaatatgtgttgaaaggagattgtacacctgaacaagcaattgattaaggtattggtgtatcaagaatgtagaggcctctatattcatgtcttttactaataatttgtttcgtcataagatcctgaaataagcaatgattaggataaaaagagatacaatagttaatattatgagtaagttgactgacaaagactaaattaaaagaaaaattaggtaaatgtaagatggagacaaaagaagcattagagtaggagtgattgtactagactcaataaaacgagatggtgacccatcaactaaggtaacagttaagtgaaagcgtgaggttgaagatcaaaaaataagctagcattacctatcatatgatctgtagcaccaaaatcaatgactcatttggaaaacgacacgaatttgatttacttgaatcaacaatagtagtgatagaagaagatgaatacttaaagagactcttgatactgtaataatttgacatattcatctgctgaaacaagaactggtctaccagaaaccattaaaaatatgttcgtcccaccaaactaacccaaacaacaaaccaaccaacaaattcgataaaggagtaaacaaattgagacaacaagctaggaataaaatgagatattgagctagcaatcaaaaaatctcacaaccaaaataggagaacccaacccttcacatgcacaaatcagcgaagcatataacacgtactaactgaaatggacaacggaaccacaggggaggtcgaggagaacaacgagaagaaaaacgacggcctagaacagtgccacgtgccgacgtgtgggaacagtggcagcgaaatgaggcggcacgtggggcccacttgctggtcttctaggcaccaaactctggcaacaagtagattgttatttggatttccttcatgtgtgggtggtaagaactaagatgcactccaaatacggtttccgaaaaaaaaaccctaaactccaaccctattttttttaactttttaagggaacctaatttcaaatttcgaatcacaatcctaagtaggctctgatgtcatgtagaaatcggtaaataaattgtatattgtattctatagaatagtatatatttatttacaaatacaatttaccttaatttttttaattaatacaaatagaaaattagtaaacacaatttacccttatttttataactaatatacagttactatccttagttggataaaaattaaaggataatgctatacttgaaccccactgtctttggcagtccaagctatccacaacaaaacgtttctcccatctacgttggggatgttggtccatgactgtcaacatcttttatctgagttgtctaatgttaatttgtcttttgttaagcattctactaataaggccgcacactttcttgtgcgtagcttttattatttgtcagatcacatctttgatgctagcaattcaccttctgagttggtgaacattgtaatggttgatttcaatttttaataaagcatcttttttcattcaaaaagaaaaaaatatacagttaatattctaacatattcattaattttcccaaaaataagtcttgtattctcttcttgcagacgacgagagttagatttgtcttcgacaacgaggccctggtttgt

SEQ ID NO: 8769 - DNA, 689 bp, Cannabis sativa
ttaaataataattcatttttacgacaaacaactccaaaaggataaatataaatcaaatttatcaaaatatcttcagataaaatatagaactttttacataaaaataaaaatacaaaaaccaactttatttatcaaaatatttttacacggcaaaagtcgtacgtgtaaaagtcgtattgtattaaataacaaataatattatatttgtattgtattaattattacaaccataaattttaatatgtgagtcctattatttaatacataacaaatgacttgtattagcttgtattataatatttacaaagaattttggattaaccataaccccgatctcagcccccaacccagactcggacacggaccccagacccgagcgcgacccagatcccgacctggacccaaattccagaccgagacatcggactcgaacccagaatcggacctagtcctggacctgaaccccgaactcagaccctgaccctgactcgaaccttgactcaaacccgaacccaaacccgaacttgaacctcgaccaagacccggaccctggaccgggaccgggacctagactccaaactaggatcgtgaccgagacccagatcccaaattgagactaggacctggaccccgaaccccacactcggatctaaatcccgaacttgaaccctgacccaaaccttgaccct

SEQ ID NO: 8770 - DNA, 743 bp, Cannabis sativa
ttaaaatataagattgctttgtgtcatcagctcaatgagagtatgctagtcgcaatccccctcgaatcactctcatacaagtaccgatattggggattaaccctgacggaaaactagtcagaagacatcgatgcgaattcttcaaagtcattttaatatcaaagtgttatgattattattattattgtacttattgttcaaagagtaaagaatggagtaagtcaaggttggtatattttgaacaatttaataaaaaccatactttaaatattgtttccaataatggaatattgtattggcttcaaaccaaggcaatgattgcatttgatccttttaagaaagatgaaaatcatcatcattatttcattaacaatattccaacaaaatatagccaatttttatgtattggaagtgttggtgggaaactgtctttctgagctctatttcaatcaaatttggaagaaaaatggtttgaaagtttgggaattgagtaatgaagatggttttaataaatggagtttggtgaagaatgttaagttggagttgaataataataattattgttattattttgataataatgatattaaaagatcattatgtatgataagttttcatccagataatgagaatgtgatatttttaaaggtacaacttataggagattatcgaaatgatgttggttataatattggttatggtattattttatgaatatcatattgaagaaagaaagttaataa

SEQ ID NO: 8771 - DNA, 569 bp, Cannabis sativa
attcaattttcttcctttgaattatgactttaattttgcctaagttttatcctttttttgttcaaaagttttcccggcaaaacaataaaaatcattgtaaatattgttttttatccacattccactcatattttcaaacaagttgctaattgacatgtataatatggtatgggagtttatttaataattttaaactacttaaatttaaatttattaccactaaatatataaatattaattaactttaagaatatgtatatacatggacggttttaatattaaagattaaagtggaggcaataaagaaaattaggcattatggttgtaataagctcatactgtacataaattataacatcaattcatctgttttcaccatcaattaaggtggcttttggtttattgaaaaaaaagcaatagaaatgaaatatgaatagacataaaaataaaatagaataaaattaaatttaaaaggcataaaataaaaactaataaaaaatttatttaatattttttcatttttcatttttcattagaagagttattctaccaaaataataaaaagatca

SEQ ID NO: 8772 - DNA, 897 bp, Cannabis sativa
  modified_base (794)..(804): a, c, t, g, unknown or other
tagaattgtttccttgtatgtcttctattatattttatataataaaatattatatatgtacatatatattaacatattactcatgacattttgcttctctgatgaacctaccaggaatttatcgtcaagggggttaaaaggagaaattgcaccatctatcgccgaactcacttcgttacagcaattgtaagtacatacaaattttgcacgtgtaaatgtttacttaatattgtgtttaattaattactacaaaactttcaggcacatatatatttattatatatacgaagataaaaatattattataaataaaaacataatattaattttagtagcaacaaattgtaaattttcggatctattatgtacacactctctcttaattagctagtatcgcaaacattcttcgtgataacatgataatattctttgtaaaaacagtatttctcagtatgtgttttagggttttctataatatcataataacaatactcactataaaaaatagttatcttttagtgataaatttttttagttttagcataaattttttagttttagcataaatttttttataattaaatgtaacttttaatcacaaaagaaaattacttgtgattaaaatataacatttagatataaattatcactaatttatttttagtcaaataaaaatatatttcattacaataaattacaatttttacaacaaatacatttaatcatgaattttttataacttataacataaaaataataatttataattaattaaatttttttaaattttattnnnnnnnnnnnattgtgactaaaagtaaaattttaattatataatgactcttaaaaataactactaaaaaataaattaagaatgtacttattatcatttaattt

SEQ ID NO: 8773 - DNA, 899 bp, Cannabis sativa
aaaacacattcccttgcaagagatcagaacgaaccttatgaaggtcctactaagttttgctccccctaggtactggtgtagggttatctttcgtgactaggggatcttcagaaggatatttgatgagactagacatttttctcttcgtttgtgattttcttggggttgcagggggctttcttcattttcgccaagtgttggtgggacaacgactggatcaacatggaggcctgcctgagccaaagcttgttgcatggcatttaatgcctcttgcaatctcttatttgtttctttttgctttgccaactcgacatcacattgtgttgcatgtcttctgagagacacgagttctgcatactcgtcttcttcaccgtcttcgtaggtttctccttccaacgaacatttgggaccattggtatcacctccttcaccatttactctggaggctatcctctcctctaagcgtattagatcatcagacaattgtaaaggccgctgactgtttcttgttaccaccattcaaatgcatgtttaatttttttgtgaaagcttcccacatctctcaataaaagcaccaaaatattaaccgatattttttgcaaccactaattatgtaatagtaaatagtaaagatgattaagaaaaataaagaaattttttttacgtgattttagtattaatgaactgtagtccacgagtcacttttatttatagtgagaatgttctcttaattagagaatatttaagttatagtataagagctcacttttgtatgctagtccaaatgtccctttttttattacacttccaagtatttataggaaaaagaagggtcaaatgacgaaaaaggtacatctctcttcggtctataggtgctacttagccgttgtggtaggagt

SEQ ID NO: 8774 - DNA, 552 bp, Cannabis sativa
aatccctccccttgacagtttaaagaaccacttttggagtgtctagcactcttagcaagttcatcaacaaaagaaattgtctttcttccaataaaaacaacattacactttgaacaagagtctaaaagttggagcagtaagtagaaagcgctagtgagctgccaattcggacaattcttggtggcaatggcttccacaaggatcttagaatcagaggcaattgtgaagtcatcccatccatagttcttcgcccattgcacaccacgagacacagcttccatctcagccgcaagcgcactgtcgcaaaaaccagtggcggtattgaaattccagttcgttgaatcacggctcatgaagacagccgcgcacccaaagtgtccgtgagagaaggatccatccacaaccactaaatacttcgacgataacttgagagaaacatcatggaccggtgaggggataatggaactatgagcagtataggacgaaactaactcttgaaaccggttagatatgacccttcttgcttgatcaatgctccaaaccgcctcccct

SEQ ID NO: 8775 - DNA, 1149 bp, Cannabis sativa
  modified_base (667)..(668): a, c, t, g, unknown or other
tttttgctaattaggatttttgttattaaactttaacatgttgaatatgaatttttttagctaataaaaattccctctaaactattgagattgttggatttaaggatttttgttcaattttgttcaaatcatgtccccgtaactttcatttatgttaaactttctttactaaaatttgacaaaagttcttaaatctaacaatctcaatagtggaaatttttaaccaccttaaaaatttaagggacatgatttggtacatgttaaagttcgggggacaaaacacttaattagccttttttttttctatgaaatcttttgattcatagggtcgaattcccaatatagcttcttctcctttggtaaagtttttcctgtttttttttaatgaatcttggtttcttgaataggttacaattggctatgattaagttgataagcattcttaggcttattcatactccaactcagttactatgttagtatgctattttacactcaatgtttaaaaatgcatttttgatgcgcgcctcaagttgaggcatttaaagattgcaccacaccttgctgaggagaagagaggtgtacgccttaatgagtgaagtgctgaattgaggcgtgaggcgttgaggtgtaagtgacgtgcgcctcaaattttgaaagttaaatnngctatttgagccctaaaaaaaaagcccaaattataattttatatttgtatttccgctacccaacttaaaaaacctaaaaaacctttaaaagccccataaacattaatgaaaaagtccaatgaaatattaaaataagtccaaataaaacttaaaaataaaaattctaattctatcttcttcctatatccctctcttcttcacagcagttgtgcagctgcttatttcttcaaccaacaaagaaaaaaaaacttgatgcttgcttccttcaaatgtgtggtaggatagtagaatttaggattttaattctagaaacataattatttttattttagtttgagttttatgagacatatctattggtatttttgaactttatgtgacaatttatggttattatttttatgagatattttatagtatgtttaaaattatttgacaatttatttatttttaagtgctttaaaagtattgattccattat

SEQ ID NO: 8776 - DNA, 1124 bp, Cannabis sativa
ggtaattcccctaaaataaatagtatttacatctttagttttttatttagtaattttatattgagtattttgtagtataaatacctaagttcaactctcagttgcaaataaatatataattttaatttatggcagtaataatacttaacttacttaaattcttaaacttctgtataggtatctgactattaagtgtcaagtaaattaccatgtggcaattcctgattggtgcaggtcattaagtttttattttttatttgtaaattaatttgaatatactagtaagaaaataacatgtggatatatataatgacttaacatttaacgactaggtatttacaaaaaattaaaaatataacataggtattattaccgataaaaattaaacttaagtatttatctatacaataaagagttaaacttaagtatttataccacaaattactcttttataattaaaattacattaatgtataatttataataatttacactataatattttatatatatatataaatatatatattgtcaaattatgatttctcaagtgcatattagtttatgctttagaaaaaaaaaataaagatacagaaaaagagtattttgcataacaacttttatatattttctcattatataaattaaattatttgtaatatagcattaccattataattagaattttatactatattatatccattatttatcatattatatatacataattaattatgtgtatattatatttttgttgatgagatcatattttattatagtgggtgtattaaaaatttatttcaattaattgtaacatacttaataaataaaatacttattaaaataatatatatattgaaatttatttagtatgagtaaatttattttaataaattacatatgacattcattttaacattttaatgattaagatcactctaattatatcgtttatcaacactgcaatacaattattttaattcacatggaatttaatatatagtattttaaatttttctttatacataacacaaatattacagttattttttctgcagaatatcatcaaactagccctaattgcaacatatcattctcaaacttttagttactcgtactat

SEQ ID NO: 8777 - DNA, 680 bp, Cannabis sativa
aaaattggaaaaactagggttccataaactacgccaaccggcacgcccgtttccttactggaagaccgattcggtagggttcttggggaccaatcaaaattccagttttgataggtcccactgaactagtcgaccagtttagtgcaggaaaaacctaaaaccccacaacaacctcaattcaaacaaaaatgctaccaaaccttacagagtacctaattacaccataataaacataatccatgcaacaaaacccaaaaacaacccttgaaactcaaatcaccattaaagaccaatgtttgagctttaaagctcaaaccatgcccaacaacataaccaagccatcaaacaacaccaaaacaactcaaataacaataattcaactacaaaatacgaatttaaacaccgtaaaataccttagaaccctaaccttagaaaaaccatgcaaaaacataactttgagcttaagaaaacaccaagggagaggctagaaaatttacctaaagttggatacactctaatcttgtcaaactacccagaatcaaactggaaatcttccaaccctagcaagttgcttgagtgctcgataaagaaagagagagataagagggtttacgtggttttctttctaaattggataaaatgaaaaaatggttaaattaagtgtttatgtaactaaaata

SEQ ID NO: 8778 - DNA, 1187 bp, Cannabis sativa
agttgcaaagtgtattgtctttgtgagaggaaaaggccatgtgaagcacgagcaatctcgaagccaagaaaatacttgagctgtctgagggctttgagtttaaattgctgatgtagagtagcttgaagctgatgtaactcggcaatgttaggtctagtgatgacaatgtcatccacatagacaagcaaagcaataaacttgtcatcctttccacgagtgaagagtgtatagtcggcctttgattgcatgaatccctcttgtaacaaggctgctgtgagtttcttgtaccactgtcgtgatgattggcgaagcccgtagattgatttatggagcttacaaaccagatttgtacctgtagaatcacaatcagcaagtgttaatccaggtggcaaagccatatatacttcttcattgagatccccgtttaagaaagcgttatttatatcaatttgtaaggtatgccattgtttaattgtagatatagcaagcaacaatttaaaagtaaccatttttgctacgggggaaaaagtgtcaaagaaatcaaggccttcttgttgcgtatacccttgagcaacaagtctagccttaaacctttcaactgaaccatcactattgagcttaattttataaacccaacgacaaccaataacccttcgattaggaggaagaggcaccacactccaagttttattgttcctaagagccgtgagttcagaattcatggcatcaagccattgtttgaattggatggcttgttggtatgtctgtggttccttcaaggaagtgactgcaagtataaaggctttgtaagattcagtcaatcttgcatatgaaagatatttatttaaagcatggggagtagaagaagtgtcatgtattgttgaaaaacattcaaagtcgcgtaaataggcagggggccttgaaactctagtagttctgcgaggaatgttgtctgcattttcagatgcagtttcttgcatttcagtaacacttgctggtgtgttatcttcaggaagggcatcatcttcatgattgttatctgcactggaactggagttagtaggattaatagtaatcggttgatattctccaatatgagtctgggatatatgtggggaaggtataacagtggtgataaaaggatctacagcagtattagtttcatttaatttaaagaaagggaatat

SEQ ID NO: 8779 - DNA, 702 bp, Cannabis sativa
aagaaatactgaagccactgttttttgtttgaccaagctgtccaacaaaaatgaccaaacacatcggccatggaaaggttcaaaacatggtgttaacatagcactagcttaagacagacaaagttttgaagcccataaaaaagggaaacgaagtgataaaccaaccgaatttccttgtgataaagacaaagtttgtagcttgttggaagcatggattagggatggagaagtagtactgccgtctgtcacgaaattacccactccaaaagaaaagcaatatgacctctattgtcatttccatcaaaaaaattattcatccaacaatgaggtgttacacgctaaggaagatttttcatgagtgactggagaagggagacgtggggactcgcacgcgagctatgtgtgctggaaatgggggtcgtgggtgatgtgagtgggggtgggcgtcatgcgacccgagcatgcaagtggagtgtgcgcgaggggtagtgacgagcagtgtgtacactttggagggatgtaggtgtagggaaggaaatgagggcatatggataaaggtgaagttgagtaagaactccaaggacacggcgtgcagaggaaggcatatacccacgccttttgaaacctctgaatgaaggggagtacaagtagcggcaataacgaacctggatggtctgacgacccgaccaaaggtacaccatg

SEQ ID NO: 8780 - DNA, 714 bp, Cannabis sativa
cttatgtaattattccatttaaaagtgctaaaaatgaactttaaaagtcttatttatataaccctaaagcccatttaaatttagcttataaaaaatattattttttttttgcgaactatacagacgtgtgtttgcctgtggtcgccccagtgatgcttaagtaccgttggggcagaggttgctagaaaatttgtgtcgtgtgccccagtgattcactgatttctgatctatattgataaataagattatatttgtcgaataattttatactttcgtgttcatacaaaagaaattcaatatctctgtaaactccaccataaatccaaggtcatctcttattgtgaatcaaaacccataatcaaccaatataagcttcgcacttaattcatttccagaaggcctcttcttgtgaacccaactgtgtaaagccctcattgttatcatacgaacatcagtgatggaagcacgtgcatggccgaggatgtgtgtgagagagaaaagttatgagagggagaaagtgagaaagagcagatctgaggtggtgaacaacgttagagatggcgatggtgatgacaatggcaaatgacagagattgggatctcgggtttgggtcttggtctcgagattctcagtgatggcgacgattctcgatcttattgttctcggggcgggtttgaggtcttgaccaccggtgttgggatcggtcgggtgaat

SEQ ID NO: 8781 - DNA, 724 bp, Cannabis sativa
catggaatggcatgcatgaggggacaccaatggtgtgctcgtcactgatgcaacttagccctatccaaggctaaaaaggagaaaatgcttgctgaaagtccaaaagacgagcctagtaaggggtaatgaagtctagcccaaggcggggacacagacatagatccttactttagggatcctgtaggaagcttcagactgtagtagagttggaagaagtggaggatgatcccacttacccaataagaagtctaaagatcggtaaaggtttgtctccagaaatcaagtcaattttgatagaatatctaaagacaagcctgaacctgttcgcatggtcagaatcaacccctccgtgataacccatgcactgaacattgatccaagcatccaacctgtttagtaaacaaaggggctatttgaccaggagcatgcccaggcgctcaaagaaaaagtcaaaagttagaggcccaatgacttcattacagaagcattctaccctctattggtatccaatcaagtgccgatacctaattccaataagaagtggagagtctacatcgacttcactaacctgaacaaagcatgtccaaaggactgctttttgctgcccaagattgacctgcaagtagatgccatgaagtcctgagtttcatggacgcatattgaggttacaatcagataaaaatgaatccacctcattaggagctcaccaacttcatgaaggatt

SEQ ID NO: 8782 - DNA, 1067 bp, Cannabis sativa
tcattacagcttttttgcttggttcaaattaaattgaattagtcattgtagctaatttagttattgaaaaataatttccttttttcaggttgaatatccaattgacgagtcatttaccaaagacgaacaattcaaacgatggaagtacacaacctacaatttcaccttagccacattctggacaccccatttggtaaaaggccaagaatcagacccaaacggcccaaccaaaacgggcttgttcagtctctacttggacgagttggacgagacatggacgacccaagtggaggatttcgactatatcatactctcagggggccattggtttatgaggcccatggtcttctacgagaaccataaaatagttggctgccacttctgccaactaccaaatgtgaccgatttgggtatgtactatgggtataggagagccatgaggacagctatgaaagccattaatgggttaaaaaactacaagggtgttacttaccttaggacttttgcaccatcccattttgaaggtgggttatggaaccaaggagggaattgtgtgagaacggcaccgtttaggagcaatgagacccttttggagggtccaaatatggagttttatatgacccaagtggaggagtttaggaatgctgagaaggaagcaaggaaaagagggttgaagtttagattgcttgatacaactcaagccatgttgttgaggccagatggtcaccctagtagatttggtcattggcccaatgagaatgtgactttgtataatgattgtgttcattggtgtttgcctggacctattgacacgtggaatgatttcttgctcgagatgatcaagactgaacggttgagatctgctgcggagagccttcagttttctgaccgaaaattgctagtgagatagatagattttattttttctcttcctttttgtgtatttatgaaagagtttttttaattattatttacttttactgattattacttaattaataagatacgtgattaaggtttgagattgatgcatgtttttgtaattaaagtataaatctatatatata

SEQ ID NO: 8783 - DNA, 1244 bp, Cannabis sativa
ttaagtagatctcgagtgatcaaaaatcaagagtcaaagactaagagtgattatgaggactcacggttaagtatggggatttccatagagaataatctactctagttaatatagtagtcaaaagccaaggcaatcctcctcagtgtacggtacacaatcgtaaatcgtaccatcaaatttctaatatttattttttattttccccccaaataattgtttttaattattgaattcgtaaaattatgattttggcccaaaaaaaaaaaaaagagagagaaccataattaataaaaaagatatattatttatcactcaaaaagttgaaaattatttgcaaataatgaaaaaaaattaatattttttattcaataatatatatagcttttattcaatatataatatttgcatagataaaataaaaatacgttttgcaaaaatatataagtttagataaagataatggatatgttgtggtacaaaagcataagaaatcagcattaataatctcattattagtattatgacatatattaatcttacccaaaaaaaaaaaaaaacattatattaatttacaagagtgttgtggtacgtacttgtaaatataaaatataagagccaagatattttagaagtagacagcttttaggaaaaaaaatattaattaaaattaaaagtcataataaagatcactatagtccaatcttattctgtcttcttctgcaaggccgacattgtttctatattggcaacttgaattttatttttttatttatttcaaatactgaaaaaaaatagttagttttaattataatataggaaattcataggaatatataagatatatttttttttaaaaaaaaaatcgttatttcatatttgtaaacacaagacaataattcaatttgaagtgtattataaaaaggaataaaacaaatggcaatgtttgccgacatatgaacttctcatctcacttcattttttttttccttcttgtaataattttcaaaataggaaatttgcatttttttgtttatttcgagagtatgatattttattaaacaaattatatataaacttataaagtagtattataatttaaatttgggaatgattgtaatgaaaaatgtagcttgatatgtatgtcgacctcaaagtagtcttgtctcatcaacaatgacactcgttcttattaaaaaaaataacaataatgagatttgataccacaccatccaaattttttgatc

SEQ ID NO: 8784 - DNA, 600 bp, Cannabis sativa
aaacttgatgatcaacaaggagaagctcttgaagacccttcctcatatcgacaaattgttggcaagttactctatctcaccctgtcaaggccagatatcaccttcgctgtcaatattctcagccaatttatgtcttccccacgtactcctcatatgcaagccgcacaccacctgcttcgttacctcaaagggagcccaggccaaggccttttatactctacatcttcatcattacaactgagaggtttttctgattcacattgggcttcctgcccgaccacgagacgatctacaactggtttctgcatcttccttggggattgtttgatatcttggaaaactaaaaagcaacctactatctctagaagctccgctgaagcagaatatagagcattagctgccactggaagtgagattacttggctacaatacctccttcaagacttacacattccttaaaaccaaccggcattcatcttttgtgacaatcgatcagccatccacattgcaaacaaccccacttttcatgaacgtacaaaacatattgaattagactgtcatttcattcgagataaaatcaaccgctctcaaatcagattg

SEQ ID NO: 8785 - DNA, 636 bp, Cannabis sativa
acatagtacctataatctttgttcaacataaatttgatcaaaattgtgtttacctcctttaaaacttaatattgcaatcctcacattcaacggtactcattcctaagtactacttaatcatacatttattaataattaaaatttaattaatattagatagatagatgtcagagaaaaataatagtgtatgtcttattgctttagcagtactatatatagctattcatattagtatctctcaatactaagaaaactataaaactcatacatattaaactttaattacccatttatttcagaatcttcataagaatgaaataaatcaaacttttcaattcatatttaatatcccatctcccattgattactacatccccatatttataatttattattgtaaagaaaattgaatattttaacatatattttgtggcattggttagtattataagtatggtctattttggttttatttggttagtatgatcagtttttttatggccagttggttagttttgcttcaatttttgtttggtacgcagttggttagttatttattttgtaagatcagtctactctaaaaaaattatcagatatactgaaatgcttattacaatgaagatgaaacacagataa

SEQ ID NO: 8786 - DNA, 928 bp, Cannabis sativa
tttttttggttctatttattgctcttttatggggcttaatttttgagtgtctttcttgatttcgtttgatgccccttaatagtagctcgattagtattattttccatgagcttgatggggctcaaagtgggtttggaaaaagcttactttgagtgttttctccatgagcttgttgatgctcgacaaagtcttgatgtggctttaaaagaagataatttttaagttttttttccatgagctcgatagatactggtagggactcgatgtgggttccatatactaattttgagtattttttctatgagcttggtggagctcaatatgggctcaatgattcgatagaagttaatatcgagccaaaccccatcaagggcattgagttcatggaaaaataactcacaattatatatcatcaactctgtatcaagttctcatcgagaacccatcaagtcatcttcaaccaaagacattcttcaaatgaaatcctccatcaggtttacaacaaaattgtatcgattttgcttcaatactaaatcaaacctattagactctgtatcaagttctcatcgagaacccatcatgtcatctttaaccaaagacattccttaaacaaaaccctccatcaagtttgtatcaagattgtatttatttcgcttcaatattaccttgaacctatcgtgtttaaacagaaactagtgcaaaaagatggtaaatttcactgagttataaactagttcaaacaagctcaaaattaatctctatgaaaaccctccaccaagtttgtatcaagattgtatcaattttacttcaatattacatcaaatatattaggcttaaacaaaaatagtgcaaaaagatggtaaatttcattgagttataaactagttcaaacaagatcaaaatgaatctctatcaaaaccaaaacaaa

SEQ ID NO: 8787 - DNA, 835 bp, Cannabis sativa
aaacttcataaatcatcacttcaaattagctaaaacaacttaaccaacaaaagcaaaaaaacaactgaatcttatagtaatacctcgtcaaccattattttagagcaattgaagcaaacacaacgcattatactaagaacagtcttcaaaaacccaatgtgaaacataggcttagctaactcaagatgtccaaaatgaccaggacactcagccatattcgctgtacaagtttcacacttcatcttcctatcaattgtaccaagtcgagggtcactcaacccagctatcttaggtttacctcccatcattgtctcaccatgctcaatctgtacaaccgacatttgcctctgcaaatcaaacacacaaacatcaaatacagctctaattcccccaaatacatatacatgaattagaataaacgaaaaagagtagtagtaatatgaatgaagaattacgatctcatctgggctgagtattccgaactgaacagtacggactttggctacctcagccggagagtaagggaatcggatatccatggcgatcgattagggttttgagagagtgaagcagaaatttgagttggtgaagttttgttttggcggctacaattaatttcgttccttttttttgaaaattaaaattaaaaataaaaattgatgaaattgttttttgtaatttttgggagagaaagatccgactgcttagaatggagagaactctctgtctctctcgcagagagcctaaacgaaatgaatttggagccctagacctctatttatagaccaatgggatggtatgggatgttcgattgggttcgtaaattacgaaattg

SEQ ID NO: 8788 - DNA, 1005 bp, Cannabis sativa
ttgttctttaattttatactaactaatacttgagtttattcaataacaagctatcaatgaacagttgactaagattcttgaattgcatcaccaacagggtctccttaataaaaatgcgaaaacgaatagatggtgtctagtagactcttatgttttaatattactattagttcaactaagcattaagtttcatatagtttaatgtaataatttttaatgagtatcgttagtcaattataaagcggtatgtttagaagtgttaagcatcactaatttctaatagcaatattctatgatatactcaaaccttgataaatgctagttttccaccgaattatgactctttctcttgatttttttttttaaaaaaattcctcccaactatcaaatcgttgcaattattcttgttatattatgttcaatctgttaaataatttgctcatgtagcactagtctaataataaatttttaaaatatatatataacagttgtatagtccaagccaattttgcttttgtgggcaaaattgacaattattctattttttgttttttttttttttttggctaattgagtatttttgcttttaaactttgacatgtactaagttatgttctttgaatttttctgaccgttaaaaatttctcctaaactattgagatttttaaattttaggacttttcttcaatttcattcaattttacattgttcatgtactaaattatgttccctaaattttgatatttatgaaatcatgctcttcaaattttgacatatactaaatcatgtgctctaaattttgatttatattagactttctttactaaaattaaataaaagtctttaaattcaacaatcttaataattcaaggaaatttttaacaataaaaaaagttcaaaaaatataatttaatacatgttaaaattcaataaacatcctaattatttttttttttttcgtgtgttttttcaacagctggagtcataataacacaaagaagttac

SEQ ID NO: 8789 - DNA, 716 bp, Cannabis sativa
ataaaataataagtggcgcaacgagagagaaagagtatacataaagggatcttttttgaaaaggaaggaaaaagaaaagaaaatgaaatggggttgataatagagacaaatcatgactcatcatgctacttggtcgctagctcccccactaatgtccaaattcttataataattataaattattattttttttaatatttttttttagaaaaaattaggagtatttatcaaatcgtctacaatgcataaaaatacaattttaaatttttcttggtgagttatagtttgcaattgtctgatcgcacgatacaatgtgattttaaatttaataattgtagttcaaatcatatcacattatatgttacaaaattataaacttttacaaaaaaatatctgtctttttcttttcaagataattcaatataataatttaatgattaatatataaattatgatgttaaaattttaattgatcaaaaattgatcaaaagaattaagttcgatctactaaattaatgattatgatttcaagatcaagatgagcaatctcaacccttcattagaagcgtgacatcatttaatgatcttagattggctcgaaataaatattctcaacatatattctagtgtttgtaatcttttaaatatgtagtcatcttttcttttcctataaattggaggctgatttagtttattttttacactcttattatgat

SEQ ID NO: 8790 - DNA, 1113 bp, Cannabis sativa
actttatgagatttattcattgaagatgttttgggcatttgttttttcaattccatttctatagagaaatttattatgcttactttacttgcgtttattagctaaaaagttttgggatttctatatattttggatgttatttgtgttataaattcgcacatttgatttgattttaagttcaaacatgaaatgatagtaccgaataggcctttaggaatagtctcttttcaaatcttctgatatgtttaatctgtagtttaaaaatgtcatatgctgcagctcagaaggttcagaatttggcttttttgtgccctgtattatgattattattattattattatttatctatggttttcttttccagctatctcaatatcatatttgagtttttctggtttgatgcgtttttttcatggtagttttcccttattgctgaatgaaactcaccggttgctttgatgtgtttatttagaaaacttataacgggacttgtatgggttgttacatgtagatagaaccaagttattatctgtattttccactctgtttagtttcttgataatctgttccctaattagtaattagtgatcaatttgagatttttagtcatgaatatttgtggtgtacactgtatagtttatataaactcgcgctatatcactttggcaaaaaagaaagtgaggtttgatcgagttggtttcttaatacagtattaatgaattctgaaggttgttgggtgatattatagcttagaaactctcatactcacagtcacatctcacttatcagacaagcagtaaaacaaataacttgcatactctatgcactaccgaagtgttaaattgtttatgaacttattttagttttccttcagccctgcattccaaagatttgctgtgaggacatcaaggagaattgaagacgtgtcaagtttgggtatagtcttgaattgaataatatttgctggtcttagataactatactatatgcttaggttgaactaatgtcatttctcctcgatgtgttcttgtagctcaaaagaaaaggcaagaacttgctgaacaaatgaaggacctatcaaagaactttgaggtcagttgttttgcccaaaa

SEQ ID NO: 8791 - DNA, 902 bp, Cannabis sativa
tttctttctctcaattaatctcaaatatcacaatttgcttatactagccacctctctgatagcctatcaaaaaaccctagatatatttttgggtcaaactcaatctcattcacacaggtttggatagtcatcataatgaaagcagcttgctctttggattattattattacaactttattataaaagtttggaactttatcatatatttctttttttcctttttaaataaactcggtagttttcagtcaacacaagaaaccaatttgtcacattattttattctattaacattattattattccttatacttttttaccattaaccataccattgaaaatggtatataaggaataaaaatgtgaacttttttttcctcataagagaaagattgtattttcttagaggagtgtttataaagactaattaagatttttatttcttgaatttttacatatattaaattatatttttaaaatttttaagatcgttaaaatttttttctaaactattgagattattaaattaaatcacttttatggataaatgttaaaacttcagagaacatgatctggtagacatgtgaaagctcgagtggtatgatttgaaagatattaaaatgtaaagaacatgatttaatatataaacaattactgaattattaaaattgaatgaaaatctaataattttgagaaatttttaacaaataaaaaagtgtcaaaatttaagagaaaaaattctgatttagtgttggtaaataatagtcagttattttcatcatcatccactcactccgaatttaactgctgttttaaagacaccacaattgcccactttagtggccaagactcatagagccaagtctcacagtcagtcaccaactatgctacaaaatctctctct

SEQ ID NO: 8792 - DNA, 574 bp, Cannabis sativa
tctgtcatcgcagtggtcggaccagattgccaaacagcgttcggcatagtcgtagaaatctgattgtttaaaaggtagggatttctcttcaaattcaaaaaccggagatgtaatccaagccgatcgccatagcttggaggtcagagaagctcgaattgcgtcttttggaggaagaagtttcaatatgctttgaatgactggctccggaaggtacgagttcggcgtgggatgatccatgatggaacgatcaccatacgttgcttgggtctgaaaaaattctagggtttccaccttccattgatgaagagaactcagatggttaagctccgattattaacatgcaaatatatgttaattccatttcaaaataatatctatatatatatatgcaatggataatgaattaaaaaagtatttgaattttccaatattttgttgatgtattaaattttaattaaaaaaagagtttatttaaaaataaataaataattaataatatgaacatctcaataattgtggagactcatttttttttcttcaattatgttctctactttataaaaaaattcaataa

SEQ ID NO: 8793 - DNA, 739 bp, Cannabis sativa
atttcagaccaaggaggcatatcctaacctaggaccaaaaaagtgacatctccactcctaggaccgaaaagaaggcatctcctcacaacacctcctatcaacacttcctcgtcaccttgggtcaaactttaaacctaaacacaaccatattctgttcagatttttgaaaaagacaacataaaagttatagatcttttcctcaacttctgaaactcatcttgaatcaactcatttggacattgtatgagaaagttatgcatgttttactgagagaggttgaagaaagaaaattacgtcgacccttgcacatatcacctagccctaggggcctatcacacatcacctcagccctaaaggcctagcacacatcatctcagcccttagggtgttagcatgcatcacctcggtcatgggggcctcaatatgcatcaccttagccctaggagcctcaacatgcatcatctcgcccctaggggccctaacatatcgtctcgaaccaaaagtagagccttgccatcatgacatctcaacctcatcatctcctcagaccaaatgggggtccttacgcctctatcactttggaccaaaatagtcatctcagccttatcatcatctagacccaaagaacgacctcacactctcatcaccttggcccaagatgaggctcaacatgcttgtcatctcagcccaagatgaggagtatcccacgttcttttcgccacctactaacaaaattgtc

SEQ ID NO: 8794 - DNA, 842 bp, Cannabis sativa
aacattgagattgtttaaacatgaattcatctacatgcttaacgaaaaccaagaaacagaatgtatgaaaattgtcctccaaaactaataaaatcaaaatataaacgtaaaactgatttctcttaattcaatcaagatatttcagattcatcaaaacagctaaaagttcaacatcatttacaaaaaaaagaaaaaaatgtataccaacagagaagagctacaattcaagctatcaacacacataagaaagaagacaacaccatgttcattgactcttcttccctcgtaaagttgaccctattaaagtcaagattcataaacagtacagattttactaacccttgttataaatttgtggatccacccacccccacaaaactcagtaacatacaaaataataacacaaaaatcatagattgaataacaaagacaaacaaatactgatcacaatacacgaacagaaaacacaaagcatcaaaaacccagttctgtaaaccactaaacaagtccgacccatctaaataaatacaaatataaacgcataaacaatgttcagagatttcatggaatgaaaataaaggaaacccaggtgagaaatacctggcatgtcgttgaaaggttgtagagatgtggaagtgaaggaagaagaaggtaggttttgggggttgaatggtggagaatgattgggaaggaagagagggtttaagagaggattcgattcacttaacgaacaagcgatttcttgggtctttgattttttttctttgtttgctaaagttggctcttttgaattggattctgtattatacattgtttctcgtgagagagtttggtgtttcaaa

SEQ ID NO: 8795 - DNA, 686 bp, Cannabis sativa
ttttacattgtatgtaataattttaatatttctctttacattatttgcatattttttaagtagtgtatatttatttttattaagtttatagtcttttttttttatcttaatatctaaaatataaataaatatatttacattttatttattcatttatgtatactttttttttataatgtgagaaggaagaaaaaaaaggaaaagtgtgtataaattaaaatatattttatgtataaaaaattgcatgtttgataaattttggaatgttaatataatgtccttaaaagaatattcttatttaatgttagccttacaatttttttttttgattaattactcttttattgataatctccaccattttttccggtgagtaatgttcactatgaccatatatttggaaggcaaatgtgaaacaatgtcatgaatattttccaaacaccaatatgaatgaaattgtcaaataacatttgaaattgactcagatatcataaatcatatcataaataactataaactcaaatatacaatttgtatacctttggcatgtgatcatcttctagtccccaatggctctgaactgatattgccttcactacctaggttggtatttaagtaatatgtatagaataataaaagaccagcacttttgaattttaagaaatgttaaaagacacatgtggtgc

SEQ ID NO: 8796 - DNA, 1378 bp, Cannabis sativa
ggcttgcctcaacatcaaaaggttggcttcctcttggtgaagtcatagtaacctgcaggatcctagcaagcacatgacttaccaggtcctagcaagaccattgctggctacgattgacctggaatgatcatggccatctaggattgacctggccataccatggccatccaaacctcccccgtaggtctatgggtgggaaggattaatattctgaaaaattagatatatgcaagtgcacctagtcacaaacaagtaatacaatgataaataacgagtattgtctacacaaggagtgtaaaaataaaatttctattgaaaaagttcattaccaagcaaaatgctcaaaaaccaaattggaatgattaatgctttaatgaaataaactagaaagaaagtaaattaactcaaaagttgttgcacaatgaaaataaaaatgaattgtaaactattaaaatgtgaaaggcctaaactattgaatccccctatgtttagcagaaactgtgcgttttgctgcagtaaaacgttagtaaaaccttagcaaaaatctcaggttaacaagaactccattaaagtgcataaaactattccaaattttatgatatcaatctttgaacctaatcaacatattcctatgccaatcaagctcaagaatacaattttcaagcacagttctcaaatgttacacaaggacataacatattcctatgttatttctaatctaatctaacaagattaagaacttgtgtcatccaagttaagtcatttacatgtaaccattccacaattaaatataacttaacatcaagctattgctggcaaatatacaataagaaattaacataaagcacacttgaatgaacatgagaatttttactaaatatttgcatgcggaaattactaaactaaaacaaagggttctttaacaattcaaaccataaaaagtttagctcatagctaacttataaaaaaccattacaatttaaaattcaactatggagtttgactggtagagttagatatgagaaaagaaaaaagaaagaaataacaaacaacaatggaggagaagttttccaaaggtagatgatgaaatcttcttgtcatcatttttttctcttccattttcttctgttttctctatttcttgctctatacgaatagagtttctatggcagaaattgttcttctcctattctttctgttggaggctatcttgtacagaaggtctttaaattttgtaccctttaccaaaactaaaccctacacatggcatggatctaatatctccaaatatttgctccagccaccactcgtagaacgccacgtcatccccaaaattgccacgtcatcttttgttcatgtactttaacaatcagctact

SEQ ID NO: 8797 - DNA, 1218 bp, Cannabis sativa
ccccatgattcccaacagagagtatttttgtggcttttgattctcaatctaattgagaggtagtattttcccaccttctactatatccacacataattaaatatctattttgaataattttttatttttatattttaaaacaatttttttggttcatttttacagaatttcacatagaaatcccataacaactaatagaataacttaaattggaatcaaaatccacataacaattcacataaaaactatcagaacaagtaaatttaaaaaaaaaaatgaaaaaataatatataaattaattttcctaaaaaaataaaaatgataaaagtctcaatttcggggagatttattctagtgcttggaacatcaattttgtagatacattttattgttgaattaatttttggcaccaacactaacaataactaactctttttgataaagtcaactttaatttctaaaaaaagaaataataatattaaaaaactaactgcatgcagttccactaactcttgagtattcatatttttctttcactatgtttccacctctgaacttgtataaataaactctccatttttcttatccaaaaaccaacctctgaacctcttctaccttcttgcttttgcattttatttttaccatttatagtttcttttttttggatgataatggctatgtttggtagccaaaaaggagggaagagcggacagcaagatcctaatttaccgattgctaaatggaagaaatggtctaatttcgtccctcttgttgtcgcccttgctgttatgtcagacatggccttcgtgggtcgtctcaacttgttctttagggctccacctgcaaatcgagtagacggttgtaaagcctggctccaaagttcaaccaattttttaagacttcaacaggtattattacttgcttctccaaagttcatttgaatatgttagggtttgattggtttgagattttaaaaaaagtttatatatttgaaaatttaaagagtaaggtgtccacataaaaatacttaattagtagagtattttcaaaattaaatctgaatataattttaccttttagactgaaaaatgaaaataacaattgtatgttttatatgtttattttaaattattgaatctaaaaactcttcaaatattcttttgtttttttttattttgcgattgccaacaatcgcaaatttaggtgccgtttggtaac

SEQ ID NO: 8798 - DNA, 1326 bp, Cannabis sativa
aaaatttctaatttcttgcttgggtgctagggctgtcgaaggggaagagagagagagagagacttggataatatttggtttttgcttcttttctttctttataagctctaccccttttattttattaaacttaattttaaataaacttatctaactaatataaatcccaatttcagccaaaaatccatataggacaaaattaatatccatcaccaaaatgactaatttacccctcttataaccctaagactaaaatcaactctaggagtattttggtcatttctaattttaccgatttaacctacttctcaacattttaacctagtccggtataactccaatataacataatttcaaccactgtaatatttctgaccactccgtcgagtttttacggtcgccgaacctaaaaatattttatttaaagtggtatttacaatacccatataacccgataaaacctccataattaataaattacgtttcattcattcatttactagatagatactaatcaactcataattagtttaagtaagattataatcttatcccattatccgaataatcacatatttaataaaatatgcttaactgaacacaattatatattttttttcaggatattacaactcctctccttaaataaatttcatcctcgaaatttacctgaataactcgagatactgctcccgcatctgtgactctaactcccaagtcccctcttcaatcttgttgttcctccacaacatcttaactagcggaatagtcttgttccacaacactttctctttcctatccaggatctggactggttgttcttcgtattacagatctatttggagctcggtatctttataggatatgagtcgtattagacacgtactttcaaagcatcgagatgtggaacatattacagactccatataaagcatggggtagggctagctgataggctacctgtccaaccctttctaaaatttcaaatgggccaataaatttgggactcaactttcccttctttccaaacctctgaattcccttcattggacacaccggaaggaaaacaaaatccccaacctagaattcaatatctctacgcttcatatcagcgtagctcttcttctatctactctatgaggcaagcatatgagctcgaatcctctcaatggcctcagttcagttggtggtatgcgaggtatttgtgaaaatctttgacacttatcacatttcttgacaaattcgtatgtgtctttgtttatggttggccagtaatatccttgtcaagttatcttcttcaactagctttgccaacctgcatgatct

SEQ ID NO: 8799 - DNA, 786 bp, Cannabis sativa
tgcacaatagcatgactagcacaagggggtatcaccccaatccacatagcacttgcttcacaatccaaagcatatttggctaacaaatgagccgctttattagcttcccgaacacaaaaaagagtcctgtcacagccgaagtagtcaatagcctgcgaatttttcatcaccaaactgtccgcctcatgacaaccatgatctgcattaagcacaagctgcaccgcctctctacaatcagattccacccgaaacccacgcaaactcctatgcaatcccacctgaataccatcccgaatagcacacaattctgccactaacggggtggttttctgcgaacaccaacagctagaagcaaactccacaccacccctatcattgcgcactagaatacccacccccgaacctggtacagcccccgaactccagcatccacattgatggtacaatggccatggctaggcagatcccatttcgcttgagcacgctgctgttgtagcttcgattgcggcccaacatcactaaaatccgtcatataccttccacaccattccaacacatcactcgctcgtggagccgaacccccatgaagaacagaattcctaatagaccacaggtgccaagaaagcagtaaaaaataatcaaacatatcagaattccatgcctcaaccccaccaagaatgtaataacatcagaagctcgctgccttttcatttgatcccacaacccactcagcttccatatatcgtaagtactccgacagccccacaacgcacaaaacacatcttc

SEQ ID NO: 8800 - DNA, 1264 bp, Cannabis sativa
gaagaaaactgaaatatttcattaaagacacagtacaaaaaagagctcaaatattaaacaattagatccataggaacaccccaagaaccatttaaaacattaaattaatctttgtccaattatcaaaactctaatattatttaactacttagactattgcaatataaattctgcaaattacttgatttttgaattattattagtacttttatcaatatttgcttgtcattaaaagcaaagagttttattatcataagacaacaatgacacaaagctgcttggactctgcaaaaagcttagttacaatttgggaattgagaaaattattataataccaaaatccagactgtctcactgtttctattattattattattgcttctttatctttaacataattaaaactctctttttattctcttctttttgttcttttcctactctacactcttatccatacatatagaccttggaccatgggctttgtccttaatgggccttgacatatctaactcggcccatttatgatttatccaggtaacagaggcccaggaagaactccattagactggaccacaaggctaaaaatcgccgccggagcagcaagaggattagctttcatccacagttcctgcaaatctctccggctcatccacggcaatatcaaatcaacaaacatcttaatagacaaatcgggtaatgcccaagtctcagatttcggattatccctattcggagccccccaaccttccaaatccaacggttaccgtgcgccggaatcaaacgacggtcgaaaactcacgcagaaatccgacgtgttctcttttggggttcttttattagagcttctgaccggtaagtgtccttcggcggtggatggaggtggaccagggtgcgggtaaggtggggttgtggatcttccgagatgggttcaatcggtggtgagagaggagtggacggcggaggtttttgatttggagctaatgaggtataaagatattgaagaagagatggtggggttgttacaagtggcgatgacgtgtacaacgtctaatcctgatcaacggcccaggatgagccaagtggttaagatgattgatgagattcgtggtgctgaggtgtcaccgagtcatgatgttgttgactcggtttctgagtcgccttctgtgtctgaaggcacgtgtggagcgagtcagtgaacgagtcgagtaggaaatagggaaaaaaagaaagacaccattttgtgtaaatcacggtttttttt

SEQ ID NO: 8801 - DNA, 1156 bp, Cannabis sativa
aaaaattctaccaatttattaatttattatatttttttcaagagaaatagttatgtatgaatgatggggatgtagatttttctcatgggatagccttgcggggacccgctcttaatgggaccgggattctttgtccaaatagggaacgaggcgggatggggatggcactccctcacttgagggagacccattaatattttatttatattttaataatattttatattttatgtttgtatttttagtatcatttttataaattttaagttgtgttttgaataataattagtatattgaataataattaatgtataatagtttaatttgtatgaagtttaatatttttatatatttaaattttgagaaattattttatatattattttttagtttttttttttttaaaaaaaaaaataaaatttacagttttagttatgatttaagttattctgttaattgttatagggatttaagtgtgaaattctgtgaaaatgtaaaaaaaaaattattttgaaatgtaaacaaaatttttttttaaaacttttaatataaactttatttttatattagagtattctctgtcattaggaattgggttgagagacttaaattcagggatgggacgagtagagtactcttccccaattttctgttcattgatttgccttttttttgcaatttggagaatgttaagtttctcttacaaattttgtgtcaatcactcactaatcacatatgttttttttttctttctcttttttttttttttgcttttttgttgtggctggactaattcttgtttaaagggtttgttttaccatttttttaatatgtaattctagattatattatctggagaatatgtcaacttttttttgtaaatatctgcttacacattgatcatttgaataatatcaaagtatatttccacccatcagaacagaatatattaataagataatattttttattattattttaactggtattttaactgttataaaaagtatattatttttttaaataaattactaatatatttttgtttgttttataaatttgtgtaaatagaattacatttaaaaagtcaattaaatatgtgtatgaccttcgcaataaaaatgaaaaatgaaaagaaaagaattatgacctaatt

SEQ ID NO: 8802 - DNA, 874 bp, Cannabis sativa
tatattccttcttcctagttgaactgtgccccatcaagtcaccatcaccataaccagcgcactgtccataaacttgagtgggcattaaagatcaatcagcgagttggaaacaagagatctcttcagaataaaagtcaataactaatccaaatccgacccgaaacttagttagagctccttcgcatggaagacttctttgaagttcgtgaaaaaaatagttgcggtttgaaatggagaccgggctcctccgatggcaaatcgaattcagatcgtatatgaatattacgaacaaggaagttgggtagtgagaaacgccattgagtgaagctctgaaaggttctgaattcgagttgatggttacattaggttgaaaaaagcgtcgatggcagcatcagtgaagaagaggattcgctactactattgctctctgagcctgatacactttctccacttttctcaaattttcctcaattaaaaatgtggaaagtgaaatttcaattttagttaaaaaaatttcccccaattttttctatttaaaattttttcttgcagtttttcaaagctccaaacaaacaaaatcattattgtttactttttttatttttcaagttacaaacagaccctatatataaagaatggagtaaataatttattagctctgttaatatatttgcttagtaatattttatgttcttgttggcgatttaaatatcatcatagtttagtcaaaaatgtgttttttcattgtgggagatcttgaagtgtataaaactaaggtggtgacttagaaaagctcaaaataacaaagaaaatttttgccttcttaaatctacattcgcagcaaaatggctaagaaataaggatgtttggcccc

SEQ ID NO: 8803 - DNA, 815 bp, Cannabis sativa
tcaaataattagttttgatgaactactttattcagaatttggtgatatagattttccttgacttcttaacaatgtaatgttataatatattcatgtgtgatcatactataaacaaccgaaataatatttgtgattgttggcttgagtaatatattaatttattaatttcaacttttccttttctgctaataaaatgaatgttgaacatactttatggaatgactattaattaattaactaactacatactagtaccattaatataataatactcgctataagaaaaatagcacgaatagataatcataaaactaataatttgatttttatttcataattatttttataaaatatcattttccatctataattttaatattttttaattctatctaatatatttagttctgtttttgactctttacgaaattgacgagctagtttattgctacaatgtataggaattaagttattgggcttaaatcaaagtgttcaaaagatagttcttcttctttttttttagagtgatcataaaatagataatctaaactattatgcacgattctaatcaaatctgcaaagtgtcaattgattaaaatcttaactttgtacgtagccacaacttttaattaatttaattgttaatgttgcttatttgttgccatgggtgagaaattagttgttatgtgtgattggagaatattagaaaaatttacaaaatagaccaaaattatataaaaataataataaaaaaatagagacactcaaaattcatacaaaataaagatttgaaatttgaaatcatagttagaaaa

SEQ ID NO: 8804 - DNA, 627 bp, Cannabis sativa
ttctgctacaactccatatggtgcctcacccttttccccagagtggtttcattaatgaccttgtcattgatgatttcaacttgtttgtcatactcttgagaaaggatggtaagcttttcttgtttctcttggacgtgcgctttgcttgcttcaagtcagcttccaggtatttgatcttagtgagggtgttagagtgtagatccttatatttatctctacgatccctctcagtcttggtagccttctttttgcatgctacgactttatccaaagattcagccaccctttgtttaatgatagtctccatcctggtgttggcctcagctaaagttttggtagcctcctctctcctttgttcagcattggtacgctctgcgagctcataagctagctaggtgaccatggagtagttcctctctgccattaagttcacacgtggatgaaaaagtgcaaatgaatcaaacaactaagagaggcatattgtttacctaagttaagtgaaagtcaaacttacagcattggcctgggtcctcatagcatctcctacatagattggatccctatttgccatcatgggaaatttgtcagcttcgagcctgcaacttgtggtatcactttgatccaaca

SEQ ID NO: 8805 - DNA, 762 bp, Cannabis sativa
actgcttaggattatttagcctgtccaatgtatgtaaccattcgaacccaggaggagtagctcaaatggtcttgtttccacaattctgaggttagagtctctactagctacctacataccaatagctatagtttctaggcccccatatattgtaggaaggagggagagtaggatggatggagagtatgatggagggagagtttaggaaggatggggaggatagtatctctcctttgtattgtttggtattaggagaaaggttggaaacttggagaggaaattagttggtaaaattactataatatcctttccaatattaatatttattatttttttgaaggatagttttgatatttggtatattcattttgtctttttcttaaatcattccaaatgtggagggattacatttttgggatttggagggaaaaggtctccctccaactctcctttccctccctttctccctcctaccagacaatggattccaccagtctcttctactctctccctccacccctcttcatccacccatctctcctccctaacaaacatagtgttatttaaaaaacaaaaaagagtacatgagttagagactcaagtggttggttgagtgagtgcatgttagtggtgttgcaggttcaagtccctgcaaatatatcttatttgtatgtttgtaattgttgtactagtgaatggttgtcttatggttctaaaagttattgtgattttgtatgacaatgcagctgcatgtatgacatg

SEQ ID NO: 8806 - DNA, 626 bp, Cannabis sativa
aagtatgagatgaatagaaactactcacatgccatcaccaaactcctcattgataatttccttgatgctctcaccaaagtgcattatggcttcattcaacctgcaaattcagaagtcagcaaaaggggaagaagaagaaatacttaatgcctatataactcttacaaaaaaaacacatggggtattctttgtcttctcagtggagtttcatcttgagtgatattagaaactcattatgccctttaaatttacttaatcaatgagcaattttttgtccaaaaaaatggtgtgttacatcacttaacaccaccttgattataaagaggactagtaaaaactactaaggtgttgtttggttggaagtaataaaatggaacagagataacttttattttattcctttatttagctgcattttaaagtattagaatgattggaatcacattctatatgggaaaggacttaataatctttttatcaattttatgagcattttaaacttgattttatgtcattcttcgttcttattttcattcctattttctatgtttatattctttccgaccaaacgccacctaaatgttcaaactttcatctatgctaacataaaatcaaaaatatgaaat

SEQ ID NO: 8807 - DNA, 500 bp, Cannabis sativa
tatgcaagtaacattactcattgaccaatgaacattgtaagccagttatgtttagtattttcttaacatgtagtcttccaattagttaaaaatattctttaaaagttattatattaaattatatgagacttgatacttaattaacgatattaatatgtaggaggtgctaaacaatactggtatcttttaatatttctcttactcattactttatataaaattggaaatttttatattagaccctctaaaggatcgttttggtagattccgtatttgttttggcatttagaaaatgtttttaatctaattcttttttatgatcgcattcgttatagctatttaagaccatttgtaaattttgaataatttacaaagttaaaaataaagtttgaacagttacttattgaacatataaaaaaaaataatcgcgagtacaataaaatatataaatcttgtttttatcattataaattacacggaattttttaaaaatttacaga

SEQ ID NO: 8808 - DNA, 861 bp, Cannabis sativa
tactaaatgaatctgcagctaccaagtgatctccatcacatatattttccatgttacacactccatcaagattcatacttttcaagtttttaaagactgtaggattgcactccatcaaggtagaactaactatatttttaacaccataagcatcttccaattcaaacaactctaattcagggaaaccatcagcatttgatgcataaatatcaatgttctcatgttcacatcccttcagctttaatgtttggcattctttcataagcataccaagaccacatttcagtcatcaaacaagcgtctccaatctcaagactcttgaatatgacgcgtcatcaccaaaagaaaaatgaatggcctcagttatttggcaatatataatgtgttcaaaggaagcaaactcaactctgcaagactaactttacttcttttccataattcatacaagtttctcaagtacaactcttctaactttgtcaagcttgagaaaacattaggttcaatcaccatgagattataacagttatctaatcttaacaattgtagacgagttaggtgttccacctgtcctaacattgtgtcaaatctagactctaaaagatctagacattttaagtacatgaaacttcctagaaatgtggtgtcttccaaatcacatttatttagacaaagagtttggagactcttaaatagaaaactaaaggatgaaggtggtatgcgcataaaggctcataagtgaatgaaacaagctttgggtatgccaatctttcaagtaaatcggtcttacaatcatgaagagataacatttcaaggtcattttcttgtggcagttcttcacactaattacatcatgaagtactt

SEQ ID NO: 8809 - DNA, 503 bp, Cannabis sativa
taagaatccaaatttattatccaccaataaaattgttttcagtattttcctcatatattattaggtggattatcaataacaaaagagtactccgtaaaattttgtaaaaatagctttggtatattttaagtttttaagtcctaaataagatctcgtggacataaattaatcaagagaaatctcatctcaagaactatatttgtaaattctctattaattagatttaatttacaagcttggtcaattgcaaaagttagcaaatggaactttcactagcttagctatataggtaaacattttatatttgatccatatatatatatatacaaaaactatataaattttggaaattaataactttatctttgatcagatcttaggtggggatgttaatttatccacaaattgacttggaattctatcaataaaaatttgacttggaaatcatattacattaatttcagctcaattagattaattttaattaccagacatatatatat

SEQ ID NO: 8810 - DNA, 780 bp, Cannabis sativa
aaatatatatgataaatataactaaatttttaataaaataattcttttttttaaaggaattccttcattcaatcaaaaatcattataaagaaatggcaaatcatgtatcactacataacgaacataaagaggatcaaccccaacccacgtagcgttagtatttttagccaaagcataattagctaaaaaatgtgccacctgattcactcttctacgtacaaacatcaaaccaatgacaccatgacattgtgaaaactatcacacctcatgaccaacccatatgtatcttggcacctttcaatttcatccacattgtgaattaacttgaatgcctttaagcaaccggtttcaaccttaaatctacttagttgccgctgaatgcccaccagtaatccatcctgaatcgtttcaagtttaccaacaagaggtgatggtgcactaactctaaccttagcattcgcaaagaccatcataccaccatgattctgtaccataataccccagcaaaatgttgcttactcacatgattcttttggctgctaccacttaccttcctcatgagacatattgccacattttctcttaacttgactatcttgaaacacttgaagaaattttccacaccattctaatatgtcccctgcatttggtttacattctccatgattcaaactatttctcacataccatactaagacaccacttcttttctgaattcaatactaccttggtaacccccactataataattttagtttttaggggcgaccattttagaag

SEQ ID NO: 8811 - DNA, 679 bp, Cannabis sativa
caaatttgaaattacaaaagtaccccatttacagaatgattcaaaatacaaaccatccaatgaaataaaaaagcagtgttctacctgaaaccttaaagtcaaaaaagcaaataaaaaattaacaactttataagtttatgctcaccaactttccctgcttttatccttggcttctttttcatacttctgaatagtacgatcgtccacctgaccactaagaaaaagtatctggcctccagttgtggacttaccagcatctgcaaacaatcatagtgtaagttaggaacatcaaatatcaaagttgatgacggcaacaaaacgagatcgaccaattcagagacaatacaacctaaaatactatgacaaagggcaaaaacaagggcaaaacaaaaagccaaggatagcaaataaaagtagattgtgaggacaaacttttatgcgagaacacaaattcatgctggcaattcagacacaaaagaatttaataaatgatttaagtccaccgctatagaaatgtatgctttatgtacatcttttaaatcgcataacaagggccataagatacaggaaagcagcagagtatttgccaaatgaaagtgacaaaggtagtcttgcaacctatgatgttgtaatgatgaggactcgcaaactagtcgcaagaaaaaaacattagatttca

SEQ ID NO: 8812 - DNA, 1334 bp, Cannabis sativa
  modified_base (823)..(825): a, c, t, g, unknown or other
  modified_base (949)..(952): a, c, t, g, unknown or other
attatagagtaatagaaatgacaatcagctagctatataaaaattatgatatataattgaaaattcgaaagaacgttttgtaaatttttttattatttttgtaagattttttttcatacgcgtcatcaacttattcgaatatgttttagtagtgcttataacttttcgttggtttctatatgttgtgtggatgataatgattgtattagtgacaaaccaaggtcaagtcatcaccgcgcgagatattgtataaaagtttttgaggtttggacagaaatttacttctatatacatgtgggtgtggctgaggggtgaagttgtaaatgaaacaagatgatggctttgccatataggattgactttgaaattcaaaagtcttcgtcaactgatgcattatggaaaaaatgaaaggagaaaattatcacttataccaaaaagctaatgaggattcctattccacaccttaattaaaatgtccaacaccacattaggagtgataatttgtattcgtgagttatgttcttgtggtgtcgagtgttaggtcttaccaagaatatgtcatatttaaatttgtctcgtttattaattaattatgtcaaaaactaaaaatctaaactcaatccgtttctatatgggttcctaactttgacatgtaccaaattatgctccctgaacttttttggccgttaaaaattccacctaaattattaagattgttagatttaagaacttttgtccaatttttgtaagaaaaaaatttaacacggatgaaagtttggggacatgatttagtacatattaaagttcgaggggcataatttgnnngatatcaaagtctggggagcatggcttagtacataataatcaatgaaacagtaaaattgaatgaaattagacaaaaatccttaaatctaacaatctcaatagtttagggggcatgatttggtannnntcaaagttcgggaggaaaaaatcctaattagccaataaaaaatgttacccatataattataactttaatcatttatttataagaatggtagataatgaaaagtagttcttggttggtgtggaatggcttttcaagtcattttatttaagaaaagtaattccctactttatatgaattacaatttctattggaatgagttttccaatttaaatacttgaatgatctttctttaggaataacaattttatttctacactcattcatataaaccaaacactagtgtaatttggttagggagaaagagggaaaataaaatttgtgaagtgagagagaaagagaaaggggagagaagaaatagttttaagtatatggaggtgtattt

SEQ ID NO: 8813 - DNA, 602 bp, Cannabis sativa
caagaaaaccctgttaccaagaaacaaaaagtagaatcacatttcatatgcatttcattatcatttctacagtatgaattattcattaaaacaaaatgtagactaatcatgcaacagagcaagcaaaaggtactgtgctttaaaacaaaagggtaataaacatctgagacttctaacgaaaatcaaatatgtaacattgagaatgtccttagtgtgtgaaagctagaaaaactaaacacggcaactagagtcttgagatgtaggtaggtgtaggctgtagaaggataccaaaccaatcaattcaaaatggtacacctgtaactgtaagtatctaacattttctcttcaacttgcctgggaagaattttataacaactggtgcctggtggatcttaatccacaacctaattttctcttgcttgtaagattcatactacacattagtgggccaccatgacagagacttgaaaagaaaagaaaaagagaaaataatcaccacttctttctttctgaatattttttttttgtgccaactacttctttcgtattgaaatttaagaaataaacaaataataatcttcaaaatttccaaacatatccat

SEQ ID NO: 8814 - DNA, 613 bp, Cannabis sativa
accaacatgcttcctagacctacacaatgtatcccaagccacgaaaccaatgccaatgtcaattccattgtattccctttccaaagaaaatatttgaaaatttgtgtaaattttaatcaaaacttacttgggaagaataagaattgagattagtagttatgaatcgtgagaagaacaacattgattaaggtagatattctgagtacaccaagttctatttcactgagtcattttttccgctaggcacttacactcagctgctgaaatcttctttgaacaattaggaacattcgaatatctaaaatgcatagagctttaggagaattttgacatatccaaactcgctgcacttcaagagagttcattccactacaaaacacatcagttttagcttgcaaacccgaagtctctgagaacctttgaaaatcttggagcatcaaataaatcgagattaagtcaccatggaaaaatagaagcaactcatcagcaaaatggagatatgtgtaagcttgattttatcagcacatcaagcatgaaattggaaatttgactctcgagatattttagagagtatcctagaaaatacccccgtgccaagcacaaacagaagagg

SEQ ID NO: 8815 - DNA, 516 bp, Cannabis sativa
cttattcttttccccatctgcattggtgatgctcttcttcttccttttcctttgctttttcttctgacgttttaaacgtctttttgttgttcgttcttcagcagctttcaaacgtttctatttgttttgtatcgatcggaggactgctgaactcgacttcattaacaggtactggttcgttccttgtggctttatctatttcatttatttttcccttttcaattttttttattttaaatttctaatctgcttgtttctatggtttctcaatgattttatactgtaattttatcaatttgtgtttataatcgtgtccaatggttctttaggaacaaacaaactaatgactaatcaactatatatatttcattgtaaaagaagaaaaaaaaacatttggattatatcttttatctcctttcatgggtcctttggctaccctgaaaccaataaatgagggcaaagtaccttcatcttttgttatggtacactcaacctgaaatgaagaaaataaaaata

SEQ ID NO: 8816 - DNA, 694 bp, Cannabis sativa
caattgagaactcttgttggtaatatatttattggtaatccattcattcaagtttaaatacggaattaattttaagtgaaaagtttgataagtagaataaaactaaactaataacgattttcttccttaacggtaccatcctcactcctcatttgcttgaaatcgtatacacataattgtaatatgtaatgtaaaggcaaatttgtggtgaggaaaaggaatgtgaagagataaagagagaaatgttggactgacttggacacaacagttaattacatgcatgtatgtctaatgtatctaactatcactttctttctttctttctctttaagttgtcaatattggtttgaaaaaaaaagtaaatatatatatatatatatatatatacatatgtttggaatggaacaaattaggttgtttaagcaacataatacagtatcttcaatctagtatatgtgcttaatatacagtcaaaccctgtataaatgaatggcatttcgagtgttaatttgatcaagattattaattaactgaatattaatttatcaaagttatactgtgtatatatactatgattaaaagagagtgctaagtctcaagcttaaaacaaacaatagatgcatgagatgttatagatatatgccaaatcttattttttttttcactactcagcctaaaacaagctcatattttg

SEQ ID NO: 8817 - DNA, 600 bp, Cannabis sativa
ttttttttttttttgtattattttgaaattatcccccaaaaaattatagttttacacattgtataaaacctcgtaagatgtgtgatactgatatctacattacataaaaattgaataaaaattcatattctcctataaaataaaataaaaataaaattgaattttgtttggtgcagttatggcatgggctgtcaaagaccctagcagagaagacagcttgggctttggcaatggaccgaggagtgaatatggtgtccattaacgcgggcttgttaatgggcccccaattgacgatcaacaacccatatttgaaaggagcagcggagatgtacgaagacggagtattcgtgaccgttgatttggattacttagtggacgctcacatagccgtcttagaagatgtctcatcctacggtcgatatttatgcttcaaccacatcattaatcagacggaagatgctcttcaacttgctagaaaattagccccttccactccttccccacctcaaaggtttttttttcatctatttaatatttaatatttttaaaatattacatttttatacacaattttttaataaatatatttaatatttttaa

SEQ ID NO: 8818 - DNA, 621 bp, Cannabis sativa
atctgaataggataatcaaattgttatataactaaaagtaaattgaagaaggtattgatctgaattaatattttaataaaccaaatttaggtttcaaaattgaaaataaaagtgacaggattgaagaacaaacccgtttcttgctgtataaatcgttgaatattgctttatgagtgtagttgaagttgaataaaacactcctatactttgagtcatgcaggtttgatgtttccaaaatgcattcaacaacattaaatacttcatagtctttttttgacactgagaaaaaaaaaacaaagatatattttcaattagtaagcacgatttgacaatagtaaaacttcagggaaaaattctaattctaaataaccgtgattatgagaaatgctaatgataaaattgtttacccgtggtgactaacgacaatatgtcatattgctattataaccatgttaagaacagcattggtgcctaatgacaatgctcacatgattatttactaagtaaaatgataggagttgtagaggagttgtagaaggtagaagaactcttacttgtggttgcaaatatctctaaggctgcagatggagcagaacgagtattgttgatgtactcattcag

SEQ ID NO: 8819 - DNA, 667 bp, Cannabis sativa
aatacaaagaacaatgttttatttatcacttgctccaaactagaaactcaaaccttttcttttctttcaataaattttctatgcatcagcctatcaagacaacttgcaatgaattttccaacatgctcaatttatttatttatttttatatagttagctgccaaatttcttagactcttagtcaaaatcttagttgttttcatctgtaacaaactggaacttgtctcacagactgactttgctgtatgccaatacaactttaactggtatgactaatggtagagaaactagcacatggtagagagagagagacttacagccccagctgaccaatgaatagatttgagattgtcccgctctagaatgcttctgtgcaaatcattaagggctatacttgataatagaatcatatatcatattagatataacatttatattgcattttttctaatgacatctaggattcatagggcgtttaatttgaagttgacacaatccatggtcaaaggaaatcatacagatatcacaacaagcaaaatgattatctcctaaaatctattcgatcaggataattgacagggtttacaaggtaagagcttatctataaattatttatgtctgtcttcatgttcaacaattgaacatgtatttctatccctcttggaat

SEQ ID NO: 8820 - DNA, 1638 bp, Cannabis sativa
tataactacacgttcttagtgggtatatatatatgggtcaatttagcaactctattctcatacgtaagcaatgttaaatgattggtttggtctaattaatatttatatgtattggaggttttaatatatagttgtattgaaggttatatagttaatactgtatgtaattatgagcattgctattaggtatcagtggtatgtagcaccttcttaacatatcacgttgcgattggttagcgatgctccttaaaagttattatattaaactatatgggatccgatatttaattggaccaataatgatactgacacataggagggtgctagacaccactagtaccaattaacatttctcatatataattataatggttatatttatttttagctgttagattattattagaccattataattaatttaaaattttactaaaaataattaataaattacatgtaatttaatattaatttgattttatttatttctttaaaataaaaaaattataaaaattaattattttaagtatataattaatttaggtctaaaaataaaaaatttatttgttcctattataggaagtcataaaaaatataatgtaacttaccattttaatgtaaccattaaatacatatataactataaatacttattttaattaatgattgattatgaatgaaggttatggatccattaaaaaaaatcaattaattagaatgtgtttgataatacttttttaattagcttttaatttttttaatagaaaagtgaaaatatttttaataaaacatattttatgtataaaactgttttcattttttaatattataattgagaattaaaattttaaaaaaactttgaaaataaaaaaaaaaaattacttttaaaatttttttaaatgattttttttcttaatcaatattttagactccgactataacctggacctcgggacttgaactctggcctcggtcccaattttgaacacggaccacgatcccgaccctgatccgaacgtagacctgatttaaataaaataaaaaattaaaaatgaaataaaagctataaaacacactttaattttttgtttttaaaataaaaaaaaaaagtaaaagtagttatagaatacatttttattttttaaaaataaaattttaaaaacaaaaattttatttttatttttattgttattaaaaaattaaatttaaaaaaatattatcaaacaccttattaaaatattatattattaaaaaaaatatgatatttatatttctgtaagtaaaagtactcttttctaataatgttgtgatatatggtccctccctccggccacttgcttggcatttaagaacttttcttaaagtaaaaattagtttagtggccatatcaattatataaatttttatatctatgcctttatagtatttaatataaattttgtatatatttactctttttatttattttttaaaacttttgctcccattatgtgcagactttttgggtctttgagaacttaatattaatgttataataataccatatactgtttaagaaaataccaaaacaagttattaagaattaatgttctctcttttgctaattttgttcgaataatattattttaaaataatcat

SEQ ID NO: 8821 - DNA, 797 bp, Cannabis sativa
cccatgttgattgcatttttctataatggattgttgttattatcacttatcaaggtttttaagatattatttatcgttcagtccccaatttttttataaaattgacaaaattccaagtttgttaagaatttcattaaaaaaaattgtgaaagattattaggacttaatgggtaatataatttaaaaactttgaatttttttcttttcaaggattaatgatcaaatatcgaacaaattaagaggtattatttttattccaatttggttccctaaaattttatggatgagcctccgtcaaaattggaactaaaaaataaaaataaaaataaagactgttcgcatcacgaaaaagattttctagtgtgtgtttattcattattatcattatattaaattaaaatcattcattcattaaaacatacaaacatacataaaaatattaaattaaattaaaagaaaaaaaatcatagttaatttgtcaaatttatagcttaagaataaataaaaatattagagtttgatatacatacattttttttattgaacgaattatagttttttttgtgtatatgattggattatatattagtatatatgacaagaacaggtgcctataatcctagtcaaaaatacttataaaaggggggcaacacactataattctttttgaaaaatgcaaaggagataacctaaaggtgtgcccaaaagagttagtctgtggcaccaaaaaatcgccatcccacgccagttctttctcatctataagggcgttcttttcctctgcttctattcctgta

SEQ ID NO: 8822 - DNA, 1174 bp, Cannabis sativa
tatgttacatcactctacaacaaaatactactactttaatttatatttgaaaaatgctataggtattagtacaacaataagtgattatttcattataaaatttagggttaataatatttgtgatcttaaaaattatagattagattttttattttgttaaattataatttaaattgtattttttaaaatagaccctgaacttaattttttgttattttttttttgggtttttataaaaatattagattttaggcaaaaatttacaattttactgtcacacggaattttttacaaaaatatgtctttttataaaacaattgtaaaataacaaaatagaaaaattaaaacaacattggaacaactaaaaaacaaccgtggaataacagtgaaaacttaatacacaatataaaacttatacagtatttttgaaaaaaattctaccgtacattaaaaagataaaaaaaattgaaaatttcagtatgtggtgtaaaaactcctttttatctaatataacaaatctgaaactaatttttagcacaataaatgcaaaaaaaaaaaaaaatacatatataactactattgttataatacttttaaattaggttattattaaattttaatttgatgaaaattaaacttagtgtttattttgtattattttaagggtcttaattattatttaacaaaataaataattaattaattaataacttttataagatacaagtcaaaaattatatttatccttaaatttaatattaaatataattaataataagagataattatagcataattatccaaaatataaatattataacgtttgaaaccagaaaagatccaagttgattgtttaaagtaaaagaatcactctttcagtaactttggatagtattgctgccaaaaaaatctgaatacaaatataaaattttaaataattatactgtaaatatctctaaataattattaaatatactaaaaggacacacgtccccaatgcaaagctttcctcacatatcatctaatcttcctttgaaatattgtaaagtatattaagaacttttcttatccttttatttgatgcatcgattgactctttcagtagtacctaatttcttttatggattactagtgagggtactcgtgctacgcacgggcacgtgaggtatttcta

SEQ ID NO: 8823 - DNA, 1166 bp, Cannabis sativa
tgattggtctgagaaggtttgtttgctagaaatcatacatcactctctagaactttaggactggcaatgaagacattatgattggtctgagaaggtttgtttcctccacttatctggtttaggtctgaccctatgaagttttcaccaaatctattgtaacacactacaacagagtgaccatactttctacagaccaggcaagttggttgagttgtattggtgtgacctcttccacaaaattttctaggattgccacgagtgcctgaaaatcaacctccactaccagaatactgattgtgattgctgtgattatttgagccacgaccacgtcttgctgtgttagatccaaagttgcttttggtagcaatgttagcttaaggattagtagggttgtttggtttgctgctgatggtaagtgtctgtaaccttttgattttgttgtcaaaaatcaaaagtatatcttgcgatttcttaccaagttgtacttagtcttgcttcgatttggaccacgatcgagaggtactctgcatccaggccagataacaaatttgctttaaggtgtgcctctggataaggatcacttgcaagagcaagaatgtcataccgatttttcttttgtcgtagatattccccattggggttgaacctttgggaacagtctgaatcaaggtccttgtgtcatccatcttcgatttggaatatgctccataaaggctttccaaagctctctacagacctactgcagaagtggatcccatagcttcagtgacaattctttcggtcatagagctgtaaagccaacccatgagtagttggtcattaatgatccattgtttatactagtttctaactcacctttgtatttagcttcaccagcaataggaataaattctggtgggcacattttagtgccattgagatatccatgccacatgtgtccacgaacaatggtggacaccatcatcttccacaaggtaaaattatttctatccagttttaaagaaaatggttggtttagggtggtaattagttgttgagaaaaagtgtttggaagctgagatggggatgcaccatttctgttggtgctaacagcaaaggagttttgagatcctcctttgacaggttgctgttcttgtggagtagccattgatagaggtcaatatttt

SEQ ID NO: 8824 - DNA, 680 bp, Cannabis sativa
cgatggggctgtctttgaaactgagaatcagtttgggtttggctttattcttagagacaagaatggtacgcttcttgaagctttctcaaatagaaaaattggtatgatttcccctgagattgctgaagtgtcaaggaagtcttaagttggattaagatgaagaagttaactgaagtggaagttgaaactgattcgttagtagttgttcaggctatttataagggttcagttcaaatgccatctcaatttggtttacttgttcaagattgttgcttgctactctctgagttacataatgtttttctttcttttgttaaacgatctgcaaataggattgctcattacattgcaagacagttttgttttacgtcaagttgtatatttgatgagttttttgctccatcgaatttgctttctattgtaagggagaatagtttctcaaattgaataaaatttcacccccttttatcaaaaaaaaaaaaaaaaatcctagtattccaaggcttaacattgtactcttctatccaaaaatattgacgtgacaagctgaaaatttgacaaataactatatctcacatctccaaagtataatcacggcatatttgtgccttttatattattgaattgatgaatagtacacccaaactattaacattattgaatcccacacgcttccctct

SEQ ID NO: 8825 - DNA, 520 bp, Cannabis sativa
ttcacacatatataattatgaatatgtacagatataaataatttaatattagttatttagtttatatttattattatatgttatttaatttatgatagatatttctatagaaaatttattaaaataatagtaaatatcaatttgtaaatttatgctataataaaatattaaaaataaggaaattaaagagaaaaaaatgagcttttgagagattttaaagtgacatgtcacgtctcatttctctctatatctacattgatatattgatgattagacacactaatagtactagaatcaccttaatataaaatctaaaagaaatttaatgcttaatttttcttttacatgtaaataatcttgtataagattaataaattaacacaactttcaaacactaaattattactaaagctctcctagaaagaaatatcattggatatactatttaataaattaaagacttttggaagaaaaaacaaaaagatcatcaaaaaaatttaaataaagtcatatatttata

SEQ ID NO: 8826 - DNA, 1022 bp, Cannabis sativa
tgttttggtttttaagtccaatttctcttttatattcgtatacattatataaaataatggttaaaaaaatattattaatgcttagtactttcttctcatgctattagtgtaattaagtattgaaacttatatatatcactaattaattttatatatggaattggttactcgtgctcaatagcaatacttattaaagatattttataaaaaattttgtaatttgaaataatttataatataaaaaataatatttaaacaatctatttcacacgcgtataaaataaaataatcacaaatgtaatacactattcaaatcttagtttcgacatgttactttttttttgaatttcttaaagttttgtaagatgtcttaaataatcataacttatctgactataaaaaaaaatttaactaaaaaattattttaaatactaaaataaataaaaatatatctgtacatctttatacattgtaaaactatcctacaataataataacaataataattattataatataagaaaatgcggttacttaataataaattaataataataataataagtgctttcatcatagtatttatgcctttattgaaggagttgactatgaaattgatggagtggatgtaaaaaataaagcgtgtgatgtttgaatttttatttatttaattaaattaataagggaatccaaaagtcaaacatataaataagagttaatgaataattactaaagcaatgcccatgcaagctgtcattataatttaatttttgtatttttataaatattattattcctatcatcacatctcaattttccatttgcatgcctcttttaatgaatttctctccattttttgttttaaaaaagaaaaaaagaagaaggaatttttcagcaataattttagatttgaaagtaaacataaagattgtgccttagtagcaactacatgttattatttttatttaataacatatttttatatattttcaaataataaatatttttcttacagataacaa

SEQ ID NO: 8827 - DNA, 1034 bp, Cannabis sativa
gtttgcttttctttgactaaaagcaatttaccattatgcgtagtagcgcaggtgttttaccagtacacttatcacttatccctttctcttgtttaacatttcatcatcgtttattctgatttatgttttgcaccaggcctaccaagataccaaatttcatttgacgtgctcaactgagccaggcctaccaagataccaaatttcaattgtagctatttatttccaagtcaaaagcgtttgctttaatagttggacaagaaatttgagcttgttggcttccttaattgttgtcctacagggacaaacataacactaggagaatgcttttcacatccatatataatcaagctaataaattcttcttttgttggatctgattgtctgaatgatacgaactgattcttttcagtgacaggtggaaagcagaaaagacagattatgttggcttatgaagaggttaaatcccaaaaaatattttgcgccaatgggtggggcaggggtcgattccgagtttcacagaagacccacgaagtaagaatgaattacagttgttgctgtggcgaggttggtagtattagaaaaaagttaagcttcttgatttgtttctgaatcacatctcccttttgcagtacagcataatgaatttaaataacatctgttgcagggtattttgctatgaggattgaccacagttagccaatgaactgaactcctcaacagaagggtcttgttttttaattaaaaaaaaaacaaaaataaaaagaggtgttatgaaatggtttaaaatgtgttccattcaaatcatctcaaactgagtctgccagcaggcttttgagatatgctgccaattttataatatatgttgttctcaagagttggtatgccacgtaggcagacaaaagggaacaaaaaatcatataatgatgccttctttaccttcaactgcacgccgggtttttgttccattctgatcactcactcattcatgtcttcttcttaatgacttaaggcttccatctctctctctctctctc

SEQ ID NO: 8828 - DNA, 547 bp, Cannabis sativa
caaatgtaccaagtaaatctaaagttttaaaaccccaatactcaattagtacccaatactcaaacaaaattgcaccaaacgtaatcatatcaaaccaacttaaaaattaaatagtaatgataactaacacttacagagagtatataagacagatcttatgaaaataacacagacatatataaaattgaagatttttaggcaattcagttaaaaagtgaaaggaaaatataagaacaagggtgtagagttataaattattttatttttatttgggccgggcaggattgagttataaattcctcagcccatttccttccctatttaaataaaaaaaactgtatttttttacaaaattaacatttatatttgtagttttattttcaccttaaaattttataaatacaccttattttaatgatttttattttacataaaaatatatatctttaattatattaccttttttttcaaaagctatagaaaaaaaagatggaaaaagtgccctaatgagtctattacagttatggttttttaacaaactttctct

SEQ ID NO: 8829 - DNA, 524 bp, Cannabis sativa
agtatatttaatatttttctataatataatatttgacaaatattattttgaattcttaattttgcaaacatcacgaattgatgtctttgtttttataaattacaatgcaaactttgtatttttaaaatagtacataatattattcgtaacccaattttaatcaattttattttaataaagctaaaatataacaaacttataaataattttaagcacaaaattgaaaaataatattttcataacatttggagggtagattattgttaggttctattttaaacttagagtattattatgttctattttaaaaaagagaagtgttaattataattttttattataatcttttttttaacatttgcattcgaagacacttgtaggaatattttttaatttttttttttacaaaaaaccgtgttattatatagttataatattgtttttgtaaattttttaagaattttgaacagtgttaaaaatagttttaaaattttttgaatatgtgtgaaaaatgagaatatcga

SEQ ID NO: 8830 - DNA, 819 bp, Cannabis sativa
tatatattataaaattttagaacacgacttatatttatttcattcttaaaaaatatatataaataataatcccaaccattttcaaatgtttgaacataaagaatatccattaattctcatcttaaaatatacttaattagaaatatgcatattaattgtttggacacaattaattatataaattgtgttttagatctgttattatcaatgcatgaatcttgtgttgcatgtattgtttttaatataatattattaatatctataaatctataaatttcaacaaaaatttcaattattataagagtaatttgtggtataaatacttaaatttaactccagttgtaaataaatacctaagtttaattttttagcggcaataatacttaaattatattattaaaactctgtaagtaagtagatgttaaatattaagtaaattgctacatgacgattcctgattggttcaggtcatgaatttttattttttctaaaaaataaatttaaatacaccaataaaaaaatgacaaataaataataatttgacatttaacggctaggtacatacagagtttcaaaaatataacttaagtattattaccgttaaaaattaaacttaggtacgtatttatttataattaaaagttaacttaaatatttataccacaaattactcttattataataaattatatataaaataataaaaaaatcgatatttattgatgagtaacccaaactttgaaattgaagattataaaataatttatatatgtaaatgcttaagaaagtacgtataagaaggaaataatgataaaacga

SEQ ID NO: 8831 - DNA, 981 bp, Cannabis sativa
aaaaaaataatgatagttagagagactagagtagagaagaaagtacaggtacttacgtcaataacaccattattagcaatggagatagcgacgtaaggaacatctgctaagggatgatggagcagtagttggtttccattattacgagctctgttttggtttaccaagagtagcaatttcctcacttgaacgatggcgtgaaagcagcgccgccagagggacccagcctttctcgtagccggagtattattatgatcagtacaactcctaattggtagcaacgctactactactactactactatgctgagactcgaggtctaaattacccaccgatgattcacctaataatattgtcatcgaatatcgatccagaatgatccgctgagactcaagctaagctagctagctagttctaattaagtaccaccaatggagatcatccgttgttgttgttgttgttgtgttagattttcttttatttataataatgtcgtcaatggtgattaaaagcgtgtggtggtgacctggctatacttatttaacgcgtacttcgtacaatcctattgttttggtgtatatatagtttgattggaatttgaccttatgcaaaagttaaccgaactttgtgttttgttaaatataaaaatacatcgtgtatttttcaaaataatagaaatatgactcaagcttaatttttgacaattttttttcaatataatcaacttgaaaataatttctaatacgaacagatacagaaaaggtaaataattttgtaataacacttttagattggattataattaaattttatttttacaaaaaatcaattaagaatcatatttgtacaattttagaaaatacatgatccattttttcatttaacaaaacagagagtctaattaataacttttacaaaacacagggtccaaaatgttatttactctaacttaaaattattaccaaaattatacaaaacgt

SEQ ID NO: 8832 - DNA, 623 bp, Cannabis sativa
agaaccaatgtacaaagagccttcagagaagcagaaaaaaagaatagacaagcgtctttccaagcaaacgtcgagaccaacatcaggtaatataatttgatagattgctgataatattatcgtaattttttaatttcttactctcgtctttcccctcgcagatatgactttctataaataggctcaagtcttcaatcgcaagtcaaaggctagtactacgatgtcgtcaactgcaacacctcaaaagaggaaaaatgatgttgtccctaccccggtggttgactcgctgaagaagcaacagaaagttgctaaagacaagggaaagaaagttgtgatcgaccctgccatgaaggctcgcgacatcatggtcttaaggacaagttcgtgagtgacgagttcgtctccaaagttgaggggactcatactgaagatcgcattcctcgttcagctgaacttgcctcgcaattcatgacaatgtttttgcaggcttttgttgcgggtttcaaagatctcgatcttctgaaaaaacagaactcggctcttcaagaaggtctgaagaaagaaaaatgtgatgcgactgccaacgacaaggaaatcgaggatctcggcaaggtcaaaggtca

SEQ ID NO: 8833 - DNA, 784 bp, Cannabis sativa
tgaaagaaaatatgctaatcaagataaaatccactcattattttcagtagacagcactttgtagagaaaaagcataatgttcaacatcatcacgatacctgtctccaagaagccagactcgtagcaatcagccgcgagagattattaagagtgttttcatcaaagttggagtcagctagaagagcgtcctctgaggtgaagtccaataccaatgagcaaatgcttgaagccatcataatgacagattggtcatcaaggccctctgcaaaacatgttggcaaagttcaataagatttggaactgacaatatcctttttttctctcttttaaatgcatgaaagcaagagaagtttgagcatctacttccttggaaaaatcaggcttaatggatgaatatcacaagaaatatttccatttagctagacattgattcagcaagaaagtgcaccccgaaaagtaaacgcaaaaagttattggttggtacccgtccaagatgtcaatgctttcaagagattgataacagttgattcatccaaagagatttgcagttgctctttctgctcacgaagagaaacaataaaatatcaacagatgaccaaaacaaaaatgatcagatacagtatataattcccccaggacatcggtgtagtggcaagggttccttgagtacacgagacatctcaagttcaaaccccagcagatacgctaaggttctgttgtcctcctgggacctggcggtggggcctacgggtatccccctgtggggttagttggggtgggtcct

SEQ ID NO: 8834 - DNA, 1019 bp, Cannabis sativa
tgaccttggagggaccggcagggcagacctcgccttggtcctcaaccttttggactttaatgtcccctcttgtagttacttcatccttgcttggaggcctggcttgctccactctaactgtgcaaatagtcaggcaaggtgaggatcagtttttgaggcctaactcatagtctgcttggtccgtgccatcattctacatttggacggtttctttgtattagatgtatgccttgcaacagtgatagcgatatcagttatggtagtactccttgcagatggggttacccgaccctctataagtgtgtctacaacaccaggttggacactatacgcctaagaagaagaaagatagcgccttcaacctttttttgagttcccaaatcaagcagccatacccttctccacgtatttgctcagggtattggtggtgcttcaccacgggctccgagactctatacggtcactgctcgcttcccaatcctcaaaactagaattaatttgaaatattttcactagatgaagatgaatttacacagagtcaaggatgatcttcgtataagagctgaagtagattctggtcgatatggtgtttgcctccccagaactcactagggttcatctacaaaaagatgggagacaagagatgagagtttgacaggggaaaaggagaaaaacatgtgtaatatgctgaccatgtcgattaaagataaaaagaaggaatttcattctaaaatggaattcccaaacccagaagttcaaaatcatgaataatatctggaaatttattagaaatccatgaatgggtgaatatgaaaaattttaggccaaaagtgatacaaaattagagaaacagaaggtctaaacgtatgttagtcaaagttaaaagtcctaatttcatctagtctatgattagtcaagaacaatttaagaacatagaaatctcgcagcaagaagttcagaaaacaatgcatgtactcaacagatattgcataaaaaagaggggaagacaacttacccac

SEQ ID NO: 8835 - DNA, 815 bp, Cannabis sativa
ccgctactacgcatccgccaccaggaacggctcggcttctgagccacgcacgcgcttccacatcgtataaatccattgaactagcatagacgtgagcttcaatagaagcggcgcgtaattgatcgtttcccgatgcgcccaatttcaaacccccaatcacgtagaaaactccatcaaccgatgccccaatgcatccgtaacggctcctggacgagtgagcaaccacgcgccacttatcttcatcgggatcatactcttccacagccgtcgttctcggaccaccaccagcgacgtagatcttacccgagacagccgcggcggcaaatttcttccgcgagatcatcatcggagacctggcagtgaccgtaccagtccacgtgtcgtaacgtagagtcgcattccgaccgacgatgtagattctcggtccaacggcggagaggcgcgcgtgggaggggaatccttggttaccaagagtcgaaactacgttatcggggagaaaagctgaaactttccatgggctttcagtgttgttattgtcggtttggtctgggtgaaaacgtatggtggcagcgaagagggcggagtcggcggcggagagagcgaagagggtgtggcggagaaggccgtgattgcggcggagatcggagaagataggggagaggaggagacgagtccagcggcggcagacgagggagagattgggtatggaagagggtgggacacgagagaggcaatcgatgaggatgtcgtctgggagtgaagagatattggaagagaggcagttgttgttattgttggtaatggaagatgaggat

SEQ ID NO: 8836 - DNA, 623 bp, Cannabis sativa
gtgagaagtgagaaaagcatatatggagttgggtaagatcgtcaagaaatgtggattatagaagatgtgaattagaggacaggaaaaaacaaaaaataaaaacaatttctcttctattggataagacatatgcatgttcagagttgtcaggcttaatctataccagttatggataagaagcttttatctgaatatgatgataccatagaagaagaagttgtctttgtcttttgttcatttcctatatatttatctatagacactaatatattctgcaatttttgataccaaacttaaaatgcttcattcataaccaattatcatgatttggacggtcaactttaatgttcattaataatttttttattttttttgagaaggtgcatataattaatttagagacttgtataatgcatctaataataatagtaatgataataatgaataagatgagaattaataataacaaaattcatgttcattggtcaatacttaatactagatatgaatatgaacaagtacatacacacatggcttgatattatatatgctgatgcaatttcctttcaccagaaacattctcatagttttcacactagcttttttcttttttcttttttatt

SEQ ID NO: 8837 - DNA, 2093 bp, Cannabis sativa
tcccaaagcagctcaactcatccgagccacaccagccgtatcagacagaaacgacccaaccactccagtcgaatcaatattaactctggccatctccccaaatcttcgatccgtacatacataaatgaatctcttacaggtactgattttctcttccaattttccctattcactgtcaaatcgtttcagaaaaaatgggtttcaatcgatcaatttagatacgtttttggcttacccattaaattactgcatgacctcagtaagttcaaagagattttgggtaatgggaactctttcaaatcaatacacagaaggggtttaattctttttctcaaaatggatttgaatttctcattaactgctatctgtaaatgtgatctgcctggtgctcctttccaatcctatgtgcagcaactctgttaaatattaaatgttatggatttgattgttactgaattggtttgcctcagttatgtgggggtttttctatttaagggcaggttctttcgaagccccctcattcgtgttttagccatatataggtcttccactttacagagaaatccctcgccttgttacctattgtatgctatatgtcatatttcctatagtagttaaatttccttcctgtttagtctctcacttctcagacagttgcacgcactcggtcactttggtgtttgccatagtcagtttttattccatgtagagatatagattatcttgctccctgtggtgttgtatagtccatatatatgtatattatttttatagttcaaacccctccctgttcaatctttcacttagttcattgttgcacacactcggtcacctcaatgtatgatttaaccaattctctatctgttgctctcaacctcacagaaactgaatgtaccatccaaaccctccatgatcccacccctacaaactcttctgaaaccgagactcatcatgctcctctttatcttgttgttaaagttcacacggttaagtcttttaaccgtaagaactttatggaaaaaatgactaaaaactggaaccatatctcccagagtccagtggttatcactgatcgttccaatgtccttttccttgttgagtttggttgtgatggagataggcgtcgggttttgttgcaacaaccttggacttatctcaaccaagctattctaatggacattccaaactctttggatgtcctcaatgaggatagcttgctcaaaatccctctttgggttcaagtgtttaacactccatttcttaaatgctcggaagaattggcggttcttgtctcttcctctctcgatcatcttttggaaatttaccgaccttcttctcgtgagacctggggaccctattttcggcttaggggtcatgtttgatgttgctcagcctcttcctcgtggaatacccgtccatttctcgggtattaataaatttgtttggctcgagttaaaatacaagaatctcccagatatctgctttttctgtggcagaatgggacatagttacaacaaagggtgcatggattacatgaaagcgtgcgatgaagcccccttccctccggagctaaggtatgatatcaaaaccatatcaggcaaagttaaagttaccactaacgctttgttgttccctgaacagcttaacttcgccaaccctccagtggcttccttcatgactactaacccggctagtgcagtctgtgttgcaccccctgagaacatgccaccatttcccacctatggctcccaagataattgtcttccccaaggccaaacccaacaagtgggcttattcaagtctggcccatcatcctacacacaagaccatcctcaatggatccatgctgaggcccaaaccagcacaacaacccccaacccaccccacaaccccccacccgagaccatcacatcgtcatacaccgcccttctcaatgccacgatgagcaatactagtgtccaaaaagcctcacaaacttccaacccgagccatgccatcacacctcaaaactcaagcggctcccactccactagctcaaaatattgccacgtgcctttacccgaaaatattccgctccttgacactagtaaaag

SEQ ID NO: 8838 - DNA, 500 bp, Cannabis sativa
aatggatgcagccggcgttttatgaagcttttggtctgactgttgtggagtcgatgacatgtggtcttcccacatttgcaacatgtaacggtggtccagctgagatcattgagcatggcgtttcaggcttccatattgatccttatcatactcatcaaatggctcaccttttaattgccttctttcaacgttgccagaaggagcctgaacactgggacacaatctctgctgctggccttaaacgaatctatgaaaggttcaaaatacatataatattattaatatatattcattagctaccacattattatttgaagtatattaattaatatgtcctataataatttaggtacacttggaagatatattcagagaggcttctaacattggctggagtttatgggttttggaaatatgtgtcaaaacttgagaggcgagagactaggcgatacttagaaatgttttacacactcaagttcagagatttggtaagtaataat

SEQ ID NO: 8839 - DNA, 648 bp, Cannabis sativa
aataaaaaaaaatggtattttgccataagtaaaaacaaaatttagagtttttagcacaaattttctgataaaatgtaagacttaacaatcaatactttcaccaccaaattctttcattgttatttatccacaaggaaacataaagttaagtatttgcaatttcatacatatggggtcataatatttcacccatattttatagtattaaatgaaaaaggatggtatatcttctctgcaaacaaatggcttagctaatgttacttggtttgatgttgggtaaaacttattaacatttacaaaaaagcaatataatatacttcataattaaacattcatcaattatcgaacaaaatcaaatttatgaagattttggtgttttagatctgaggaagaaaaaaaaaagatcatgcctaaatttgaacatatacacattaatgtcttatttgattaagctaccacatcatgtagtagtgatgggggtttggtttagtaattgagacgaaaccaacattccaactatgaatttattggtatattaggatttattttatttattaatataaaaagagagagagataagaaggatagttactttccttttagtgattttgagcatataatttgtggtgtacttgagcagataccaag

SEQ ID NO: 8840 - DNA, 568 bp, Cannabis sativa
aggtgtaggtgtgtgtacaactttcatatttattttttgtgcagcaaatttaaggtattatttcttaaccttttttcttatgcaataacttcgggacatattcacttgatttgatcataaataataataataataataataataataataatatctctatagacccttatgtaataaatattaatacagcaatacttcccacaccaccacctatttatggaccctctcatgtaagattattaattatttgatccataaattttatattgaatggttccaacaaccctttgatgcaattcataaattctctcttgggcatcgaaaatatcataaattaatatattatgtttagaggagaaatcaaaaataaaatttaaatagggcgattacactctttgtgaagtgtcataagttattgatgtaatttaatatagttattttatttttaataatgattgtagaaaactaataaatatttataaggcatcacagtataatcgtaataagaatcatgatgcttaatagtaatacttattctaattttttatattatgtgaacttcaatatt

SEQ ID NO: 8841 - DNA, 949 bp, Cannabis sativa
ggtacagagaaaagagagagattgggtttagttttttgtatgaagaatgttctgtagatgaagaagattcttggagaagagtgtgagagataaatactttgagagaatccacagagaatcgatcttgagtgtattgtaccatgttcttgctcaatcaataaaaaggattttggttgtgttccagaactaaagtagagtcatagatcatatcgatttattggacttaaaccagtatatatcttagtgttgattttattattttattgttttatcaattctgttcttttaatactctgttcatccatgctttaatctccgatcattgtgtatggattgttaatcttgtcattactaattgtttgttgattaagttttaattgttttgattcctcactttagttgtaattttcccacaaggtctaaaactcaagattacaagaagaagattctagtgagtttcttacgcactactatgaaggagggttttccattatttttttagtaacatataagagatttgtttcgattgtcaaaactaacgtaataatcataaacacaaatagtatttttttttttcattggctgtcaaatgatgcagatgaacaacactgtcaattataaattgacgtagaacatgaaaatccccattttttagtcatcccagcagttttgcaaagacgcaaactacaaaattaaaaaaaaaaaaaaaaaaacctaaatctgaagtcggttccaaatctcagattatatgccaccgccacctgcaagactcaccccaccacctcgaacccagccaagctatgcccctaccaccccaaacccattttcttatttattttttagccaccccaaacccagtcaagccttgcctaaaaaaacaaagataacgagagagagtgagtcaaatagatagtgggagagagagagagagggagagagagagagagag

SEQ ID NO: 8842 - DNA, 1508 bp, Cannabis sativa
ttctggtgtcacagtaggaaaataaggtaaccattgtgggtactggctgggagttagtgtagaatcggtgggtgctaatggataggtgaaaccgtgagcaaatggaaactcattttcatcaaaggagacactactagcaatatagacatgacccgaactatggagacacaagtagcctttgtgtcgaggactatatcctatgaacacacattttgcagattgaaattgtaacttgttagagttgtatggccgaagataaggataacaagcacattcaaaaacttttagaaacttgagattatgtgttaggccaaagagtttttgaataagacatttgtagtgtaagactggggtggctaagtgatttatgaggaatgtggcagttaccagaatctttgtggcatacgtgagtgagctaagagtgtgagaccagtttcaatgatgtgccggtgctttcgctcgacacaaccattttgttgatatgtgtgtgggcaagggtgtcggaaatgtactcctagattggtgaggagaggagcaaactttctatactcaccacccaatctgtttgaacagttttgatggtggtggagagttgccgttcaacaagtgcctagaagttcttaaagacagtgatagcttcagattttgttttaaggggataaatccaagtgtaacagctaaaatcatctataaaatgtatataatatcggtagcctcatgacgagataaaataggtgatggtccccaaatatccgagtgtattaagtcaagtgcatgttttgactcctttagagagagggagagtgaggcttatgatgagctttgcctaattggcagctagagcaaaaatatgatttagatggtaaagatttcttttcattaactaacacatgtttgagtacattaagagacggatggcctagcctaaggtgccataagttggactcattgacacacgcttgaaaataagaggaaattgactcgatcttgggagtagagagttgatataacccgttgctaaccatcccttgaagtagaaccttcttcgaatccatgtccttcaaaacacatgagttagcatagaatttagcatatgtatgttatcttttgtaagttgtgacacacttaagagatttttggcaatattaggcacacacaggatgttatttaacttaacaggttttgaattactataagattaaatgactgaatgaccaacatgagtaatagggagtgattgaccattacctcctgtgatttgggtcttaccattgtactcagcttgagtttgcagatttgtagaattgtgagtcatgtggtttgtggctccactatccacataccagttggtatcatcagtgtgtggctgttgtccagagttggccaaaaatgcctgttgaccatttccattgttggcagtggcttggttaggatgatttattccattgctggtacttggaggaacaaaagagacatcaaatcagtgataacattttgatgcagggtgt

SEQ ID NO: 8843 - DNA, 1188 bp, Cannabis sativa
agctaaaaagaagaaaaaaggacctacatcaactgctgatattaagaaaactaagtcaatggaagagatattaggggtggaaccaatggagctaacggatgaggaggatgagggtggagctgatgcggttctaacaacagcagcagccacagagcgagacttaatgcctgaacctctgtctctaaaatcctctttgagatcgatacttcagcaggacatacgatctgatttcgcacacttcatggaggctaacaggatttgttcagcttcaattgctaaaggtaactcgatcacacctccaattctcagatctgagaatgtagttaggaatctagagtctacctttgtcaattctgaaaaagcgagtaaggttaagatcactttggaagacattgaagaagaaattgcctactggaaaacagctatagtttgttatgtgttgggagctaatccaccattatcaattttggatggatttgttcggcgcatatggagtgggaaaattgataaagtagggatgctctcgtatggtgttttcctgatcagatttgatacaatggagcatagagatgaagttcttaatggaggctatatcttcttcaataagagagcggtaatcatgaaggcttgggatcccaataccaatttcaaaaaggaggacattcggactgttccaatctgggttcagcttactgatttggagctgaaatactgggggcaaaaagctttgttcaaaatcataggccaagttggagagcctattatggttgatgcggctaccaaagagagagacaaactaagctatccaagagttcttatccaagtctcaattcaccaagatttcccaggtacaatttactttgaggatgaatatggtaacaatatacctgttgaaatcttttatgaatggaaacctatcagttgtggaaattgtaaaggaataggccatgctactgctaattgctgaaaaaaagaaagtcagaaaaaggaatggatagtcaagaatgataagaggaaaccagatgagaaagcacaaacagcagatggggaattcaaagaggtcacaaaaggttggaaagttaaaggaaaagctccagagattgggccctctacttccaactcttttcaagtcctgcactcgacttctattactgagggggatacaacagaattattgactgatccaca

SEQ ID NO: 8844 - DNA, 991 bp, Cannabis sativa
attaattcacataattaataaactgaaatcttataaaaagaaatagtaaatttcaattttatattttcttgtttaactaattaatgggaaatttttatctttattggttttagggtaaaattttgtaaaaatatcatttaaaaaaaaactaaaaatattgaaagattttaaaaacaatataagttaactggttacaaaataaagttcaaaaaattaataattacataagacactattttttgtaaaaaaaattatatttttacgttaatttgttttttaaatttacacaaattttcataaaaataacacgaaaacaacaagaaaattaaataaaaataacatctaaataacatcaaaacaacaaaaaatatcatatagataacaaaaaattaacatgagtacaacataaaaagactgtattttctgtaagtaaaattaaaaaaaatcataaaaacatatttaaaattatgtgaaattgtatttttgtaattttttttttgttggttttgtatatttgtgaaataatcccttaaaaatttttggaaaaaacaacatattttttagcacattaaataaaaattcataaattaagtaatttcacttaattaattaattaattaagcatttttaccttagacaaccaatggagactataagaagaatggaagaagtgaatgaaatcattaggaaaaagccttccatagaagctcccaggcatggccatgacaaagcataagggcttctttcctaatttttcattattattatttttcaggtacttttcatgaaaggttggaagccattgattgaagactgtgttgaaatcatttccaggaagatcattgaggaacacttgaaatgtagtgaatggcttgttcttcttattagtacttatcatttgggccataattacatccaaaatgtaagatgtaacagtgagagcatttgggcctgaagagcagcccaaatcagctattctcatacattttgg

SEQ ID NO: 8845 - DNA, 1892 bp, Cannabis sativa
attatccagtagtacttcacactttttttcagtgcttacatattcatctgttggcattagttttttaatatttctggtaaattagtcactacttaagtttccagtcgtagtctgtatagagaatcttgtaattaagagcttatatgatataagcaatccaaaattttcaacaatttcggatgtgtaatcatcttatctttgtataagatatgtatacttggtttttccatgtgcacttggaaatactatttttatgttgaaagcagaatagtcaaataaacaagcaaattacacgcgaatatcaactcagaacaaaacaaataaaggccagcaaaaggagaaaaaaagaaaaaaaaaatgatagataaggttgatgttgccgttccaatatcttcaataatctcattaaaggaaaagaagatatatatatatatatattcatatagagagagagagaataagttataggaatagcttattatgggatatgtgatgagatcattggataacttttaatttaagcaattttcaccagttaaaacatgtgcatgtactgtgcttttacccaaacaaattgttgcgattaatacagtatcatttttcgttggtcacattagagaaagagaataagtttcgggaatcgcttatggaatagtgtttagtagtatgtaccattcttttactttatgtctttattatgataatgatagcataaagaagtaagtgatctcatcccaccagattatgttttaatcttaaggccttttttttaggtaaaaaataaaggatgattctacacacgtccttcgatatccaataaataattatcaaaagcttgcagcttcggagaaagaaactactatgactactctcctttattcattatatataaattaaaatgagttatcggtggtattataatattatgcttgctttgtattaaaataactaatgagatcgtgaggattaataaaaatattatagttcaaaaaagacccatattgatgtgggtctctatgataataaattttcatatatagcataattggggtttgtatttgggtcaagaaattggaagtggtcttcccatctggccaatgatgacgtcgagaatgacactttttctggccccatcatgctgactaagctttgattatttgataatagctaattgcagttggtgtgtaattgacttgactccatttacaatccatgctactcttttctctttaatttttaattgaaattgatcaattgggtattgttaattttgctttgaaatccccacttcattggtctttgtttgtttgatttcctgtgttgtcttttgtaactcgattaagggatttgtgaatatgtaatgttcaagggagtctctcatatttagaatctagttttctctagtgtgtttttgtttattcaatgtgtcatttaaatgataatgagttgagtaaattttaatttttttagacaaaatgaatggagtaaatttatgttaccttatgacttatgagtggagtgggttgatatcctactcttataatttttttttccatattttattgaaaatattctcttgaaaaaagtactttacatatattctataaaaacaaatgttctttagtacaaatataacccatcaactaagggatcatgtgtgcatatgatataaggtgtctcaatttttctttccttttaccaacccaccataatattttatattagaagaataaaatacccaacgaactatgaaaaacattttttttcaataaagtaaaaaaaaaaaaaaaaaaaccttgataaatattgaaaatcaattgaaatagaattctccatgtgatttgttttacacataagtctttcatcgaaaaattaactcaaatacaattgac

SEQ ID NO: 8846 - DNA, 750 bp, Cannabis sativa
atacctatatattaaatataaatatttggatgattctatatgtatcccttaaaatatatgtgccgatgtatttatatctcttttggtatttaaaaaaaaattaaatttttatttataattatgtacattataattatttaagatatcttacaaaattttaagaaacttagaacattttacaatataaaaatcaatattcaaacaatttattttacacgtataaatttctcatacacgaccatcaaaaaatagactaaaaaagtctctcaaataaataaaaaaataaataatacatcggtatattacttttagagatgattatagaaattttttatattttattggacttcattccaataaaataaagaaaatcgtgtacattacttgtagaggtgattatagctcacacaagccttaattggatttcattccaatcatttacaaatattaattcatcctttttttttccttcttagtttagtcacttgcttaattatgttttaactttaactctttattaggactatatatatatataatattattctggatatttgtggagcttaacattatgctgcacttattaagtgctaatttataagaatatttatcccactataactaattaaattattaattaatttaaccttatgctttttgtcaaatgtttattcgtgtaattatcctttttatatatcccactacataataaaaacttgataatgtgacatttgttaatatattaataaa

SEQ ID NO: 8847 - DNA, 808 bp, Cannabis sativa
ctatatttatatagataagaccttgcatcgaggtctctgccacaattaattgtcagaatattttgacaatcaattaaaaaattaaattggaaaataaattaattgatgaatcaaaaactactcatagaatacttatatttattaaataattgttttgaaatcaatcatgaatataaaatattcatacgcctaaaattaattaaataatttatacttaatataaaaatattctaatattcattcatttagtcagcatttagatttacacgaaaattaaatatttcgcattacataataaacatatgaatcgtagagatatgttctctttatatggtgagtattatcttccatgtattacaatatatttattatataacactgtattttacgtggcaatatacttaagcaaataaaccataaatcttatgtttattctagtcgtctaaatataattttctcaaataaaattaaggtgcacatgaatataaaaaaatattaaaattagagtttcattgaataattttaattgtacaactaaaaactacatatataagggctaactaaatctcatatttattttatgatccttgaatttgtgttgcgacatgcatttattcaaggatctgtatgatcacccaattcaataattgcatgcttattgaccacttatcacttctttatgactaaatacttattattgataagctaacttcaacaaaaaatttctgccataaggttgaattaattgcaaactttcttaataggttgaaatataaatctgaagtctaggcctagtatgaaactctac

SEQ ID NO: 8848 - DNA, 1413 bp, Cannabis sativa
cataactacacttcaattttttttgccacaaattctaaatatgcttaactaatcctattattcaactgagataatagacctgatttaagttatcattattcaatttttttgaaagaagctatagttaattcaattaatgcattaaattttgctagttaagaagatgtaaattagttttgcttcttagttcagttcggtcctaattggatcacactaacaaacttcagatagaatttgtgtttcaaaacgtgtcatcaacttatgtttgtatcttattttaagtgatctgttttatttatattttatgtcaggcgtgttgatttattttttgactcgtatctaattttctaaaccctatatcatattcgtgttcacctactttgatctgttttgctattattgaagctgaaatggtaaaaaaaaatgataaatttagtttctattagacaacttatacacatttacgtatatgtagttttttatatatatatatgtaacaaaaattaaatcactaaatatatagtttttttttttaaatattttcaattttatttttaaaaaaataaaattttttaactaacattaaatcattaaatatatagttttacatatttatattattatttgtaattttttattttattttattttaaaaaaaaataggtcaaacatgtcaaattcgtgttaagctgattgagtcatgtttgacccatttctatttcgtgtcaagtctcgtgtcgtgtttgtgtgttgtatcaaaattcattttgccacccctaacttttgtacaaaccttaaaagagtataccttgttgaacctgcatactgtatacccaattcttaaactctactacaaatcaaatcaaactaatctttatattctagctttattcttttaggcataacccaaaacactcttttaccatcggtaagaattctctgaaaagtatgagcaatttaccacactttttgagactaaaaaataatttttttcaccttccacaaatgataaattaaggctgcaaaaacaacattaaaaacttggtttttaaaatgacttattcctttggctttacgaatccaacaaataagatcatccaacttatgaggatgagcattccatccaagccaaattttcaatttgctaaggcaatttgcactatatgcacaaacaaaataaaaatggtgcacatattctgctttatcctcacatagcaaacacatcttatctaactttgattaaatctaaataataaagttctagtgcgaagtttctcaagaactgccaaccaaaaataaatctatgctttggcatactaaaaaaaagaaaaaaaaaaaaaaaaaaactccatatgataaaaatttgattatttacttaaaagtactcaacatgattatataaatatatatata

SEQ ID NO: 8849 - DNA, 581 bp, Cannabis sativa
gtgtgtcaagactggtatttggtgaatttgtttcactaacctgttgtggtgaaggcactgctgctgttggagttgaagcacttcgagacagttcttgattatttgtggtctgagctgtttgactgtgttgttcgaaatgaacattaggaagttgagaccatgactcattttggataacaagatgtttttctggtgcatatgtgttcaagaaacctgtgtggaaaggaaattccctttcattgaagactacattccgagaaatgtagactcggcctgtggtgcttaaacatttgtaacccctgtaggattcattgtatcctaagttcacacacttcagtgaatgaaactgaaatttgtgattttggtagggtcgtatacacgggtagcaagcagcaccaaaggtctttatttgtttgtaatcaggtctcttacagaacaaggtttcaaaaggggttttgtcatgtagaataggagttggaagcctattgattagatacacagaagtttgaaaagcatcaacccagtactttagaggcatcttggcttgagcaagtaaagtcagacccatttcaacaatgtgt

SEQ ID NO: 8850 - DNA, 623 bp, Cannabis sativa
gtgtttgtaacaatggggattgaaatcgttgagccgaattcctgcataagaggatgctgtaacagcaattccattcctcttcatcttccaccttcctcttactctctcatttcccccattgctcgaggtacgtatctatcttattcttcttctttactttcatttcaactgttttgagattgatcgattgattgtaaatctaactatggttatgaattatgtggatgtgagtataggagctgaaagtgttgtgtatgaagctactttgtatggaaagagagttgctgttaagaaacctgttttgtcaacttctgaagatattgataagttccataaggagttgcaattgttatggtatgtctttatatctatatctatattggaaaattcttaggttttgcccctttcatctttttttggttataaatgtatatattataattatagttgttgttttttttttagaaaatttgaataatttacaataactatatatatatgattcaaatagatattttgtactcatgaaactcaagataatttacagtgctgaatataggattcgaatatatatacatatgtatgtattatagttattgtaggcattctgtttgatgtgatca

SEQ ID NO: 8851 - DNA, 763 bp, Cannabis sativa
agtctaccagctccatccgaaggagttctgtgtgtaattttagtaaacacatcactttccctctccatttttaaaggccttgttagaaccttccttcaaatagttagtatcttcctcttttcctcttcatcttcaacgccaccaccgccttcattgtcatcaccaccctcatcagcagattacagggaaaaccattcagaatcatttgaatacagccgcaatccgtcatacacttacattgaggagtttcgaagccgagttccggccataagatatgattctatgtgcggctgcaaggaggcagaagcagggcatgactgctcagtttgtctcagtcagtttgaacctgaatctgagataaatcacttggcttgtggccatctttttcaccaagtatgcttggagaagtggctggactattggaacaccacatgccctctttgcaggactcctttaatgtctgaagaagactctacttgcttttggtgataggcttattcaacaaacaaagattgtcaagtcaactcaagtgaagaaaaatctcatgtacagctagtgtgtagaggtatttagaggaatgcatcggctggcctagtgttggtatacccttatgttatgtatatattttgtgcgagtttaaaagctttaacatgatgttagagacaccaaaccgaaattttattgtacatatttttgaggtttctgaactctgatgtttctctgtctccactaccaccaccagtaccacttccagcagcttgag

SEQ ID NO: 8852 - DNA, 880 bp, Cannabis sativa
atgatattataaactataaaacatgaagaagccttctgcaatatgaagaagccacgggtgctctacaaggactaaaaatttcacgatctgccccttctgtatcgcacttgttttttgctgatgatagtgtcttattctgtcgtgccaatcaacaatcagctcggtctatccatagttgccttcaaatatacagcaaagcctcaggtcaattaattaacccagacaagtgtgtcctctctttctcagaaaacacaagacagcaggaccaggtttttttcaaagacctccttagtatgcccattcaaccatgtcatgaacaatatttggggttaccttcttttgctggaagagataaaaaaaagctttttggaggaatcacagataagatttggaaattgcttagctcatggaaagaacatttattctctgttggtggaaaagaagttttattaaaagcagtagtacaagctattcccacatatgcaatgagttgctttcgattgcctgttactttgtgccaccaaattgaaagtatgatggcaagattttggtggggttcatcagcttcgggtaataccattcattggaagaattggaattttctttgtaaggccaaaattcaaggaggattgggatttcgcaatttcatccactttaaccaagctctcttggccaagcaagcttggcgtatcattgagtctcctaattctcttttaagtagcctgcttcggcatagatatttctcaaatggtaattaccttcaatctggtcttgggactaatccttccttaacctggagaagcattgtttgggggaaggaattactcttgcatggactgagatggagagtaggattgggtctgaacataaactgtaaaac

SEQ ID NO: 8853 - DNA, 600 bp, Cannabis sativa
aaatggctttctaaacacttatgttggtgaacaatctttaatcattcacaatgaaacttggtcatagctacctaatcttcattttccaatcagtgcaacatcccctgctgtcacatccactcttcgagcatcccctactgcagcacctgttcttcctgatcagtctcccatctccagtcaaccaaacaggtccccaacatctcctaatatcagtactgatatcactgaccatgctcatattgttcctgatataccaggttctgctgaaggtgtttctttccctgctgcatcaatcaatacaccagatgaagttccttttgctggtgttatcccaaccttaacacgcacacagggctcacatcccatgataacccgcgccaaggctgggacatttaaacccaaagcatatgttctcacctctgacaactcttctacttcaggtgaaccatcctcggttactgctgccctcaagattaagaggtggaaaacagctatggatgatgaaatttttgctctcaaacgcaataaaacttggctcaaggttccagctgctgtcatccaaacttggagtgacatcttcacccctgcgtttgagaggtg

SEQ ID NO: 8854 - DNA, 2448 bp, Cannabis sativa
tttaattattgaaacttacgcaaccaaaaaaaaaatcaaatctgaaatccaaaactcaaatattgcaaaataataacagatctcaaattatataaaaaaataaatatatatatattaaaaatatcaatgagttctccaaaaacacttaaaaagaaaacaaaaacaaacaaaaaaattcaatccaagaataaaattgagaaagagagagagatagtcaccatttcttgtgaagacaattgggcgtggaggacgaaaactgcgacttcatggtttcatggcttcgacaatgtggctttgatgttgctgcttcaatgtcttctgcgagctgaggacgtcgagtgcggggacgacggagagaaagaagaaagagaaagagagggagaaagagtaacagggctgacggtcgaggtggggacgacaactactgggcgatcaaggctagccgagatggtaggtgttgggctactagaaattgtgaaagagagaatgaaggagagagaaaagggctctcttttggttggcgactgagaatgaaaggggagggtagggttttggtttagggtttgtaaaaatgggccacattttatttttggctttatttttcttttttctttattttttctaaattagcattggttttaaacactcgctaattttttaagggtcgatcctcaaaaaaatcataccatacccttaaataaaacactctctttatttcccctttcattctcaagcaatctcctaggcaatggaacttgagatttgactatcacatgatcaaaattggttccaacaaaagtaataagtatgattcttgtgtttatttcaacaatcacatttacttgttgtatatgtaaatgttattttgatcattggcaatgataaatcaaagatagatgaactaaagatatgaaactcaacaatgaattcaaaatgaagacctaggagctaccaagagaattcttagaattgacataaagagacctaagccaaatacaataactttgtcttagaaaggttacttacagaaaatattgtgcaagtttgccatgaacaaatgcaaggaagtttccacacttcttgcacaacatttcaagcttattgcatgtcagtctccaattactgatatagagaggtacaagatgagtgaaataccttatgcaagctgtgtgggaagcttgatgtaatccatgctatgtactggacctaatctagctcatgccatgagtgtagtgagtagatatatctcaaatctagggtgtaactattgggaagccctaaagtggatcatgaggtatataagtggaactctaaacactagtctggtgttcaacaatgagagccaatacagagaagttactggttttgttgactcagattttgcagtcaacatttggcacaagaagaagttgtaaaagatatgtttttaatgtcctaggagggtgtgtcattgtggctctttcctccagagaggataaatatatggttggaactaaagccatcaaggaggcattatggctaaagggtttgaccagtgaattagggttcaacttaaagtataacactattcactgtggtaatattgctttacacctcatattaaaaattcaatattttacgagaggtccaagcacactgatatcaaaatacatttcatcagagatgtaatgctctcaaataggttcaagcaaggaagatccgcactcatgacaatcttgcatatatgtttacaaaatgtgtgtgctgagacaaatttcatcaatgcttgaacttgcttaacattcaagattgttaagtcttgtcagaattttcttttttggttcactgaactaattcaagtggatatgttgggaattagttcactaaacgagtgactcatctgcatagcttttatatagatggagcagagatttagttggccagttaccactcttgtcacttactctctcggaccaaccaacttcaaagattaagtgcatgtttgacatcataactaaaaaactgtttttgtttttaaaaacaaaaaattgttttttgaaaaaaattaggcttgtttggccttgttttttggaaataattttcaaaaaataaagttataaaaaataagaattttgaaaacaacaaaatgttgttttctatttttaaaaataattcatttttgatcaatattgtttttaaaaaacactaaccaaacacgacttgtacgttttgaaaacttcaaaaactatttttttgttcttatttctaaaaatacttttttgaaaacaaaaacaaaaaacaatacaaaacacgctctaaaatattcttatgtcaactcatctcaaataaatttcagcacctagaggatttgctctctctctcaacttcatttttgtctctctctcaacttcatttttgtcctagaaaattagagtgtgaaggagggttgtaataattaaaagggtttct

SEQ ID NO: 8855 - DNA, 1892 bp, Cannabis sativa
agatgatgaagatcaggccataatgcttcttagttctcttcccaaatgtatgaaaattttgttgataccatcttgtatggtaaggacactctcaccatgactgaagtgaaggcagtactcaattcaaaagaacttcaaaagaaaggtgatgagggtggagatagcaatggggagggactgttgattgtcaaaggaacattttccaagaatcacaaggaaaatcagagccatcataagccaaaccagtctagaactggcgctaagggttcagctgagggatcaaattcaaggggcaacaatggaaaacagtgcttctactgtaagaaagaatggcatttcagagatgaatgctttgccttgaaagctaagttaaagagggacagtcaacaattaggaaccagaaatcatggggaagctgatcttgtagatggatgtgagacagttgatgttctagtggtaccaagttctgattcaagtggagaattagtgcttgactcaggctactcatttcacatgacaccaaatagggaattactcagctctttcttggaagaacacagtggaacagtgctcctaagcaataacaaggcatgtgcaatttaaggaattggcacagtcgagattaaaaaccatgatggaaaattacagaccctgtaacaagtcaggtatgtccctgaactcaaaagaaacctactatttattgggatgtttaacgaatctggctactctgtaaagattgaaggtggggtgatgaaaattggtcatggaacacaagatcttatcaaaggtcaaatgaacaatggcctttactttctggatggtaaaacaatcattggaagtgcaacacctactgtacacaaccctgcaaaaagccaagcaggctttggcatctcagacttggacatgtgagccaaaggggacttgaagaattaaacagacaagggttgttcaaacagaaactgcaagaaaggttagaattctgtgatgaatgtgtgcttgggaaggcctgcagggtaaaattcaataaagggaaacacactaccacagagaaactagcctatgtacactcagacctttgaggaccatcaagaaattgatgagtatcatagatgatttcattaggaaagtatgggtatacttgttgaaaaataagaatcatgccttgatactttcattgagtggagaacgcttctagagaaccaaactggtaacaagctcaaggtactcatgacaaacaatggcctggagtactgctcagggaaattcaagatgttttgtgctctaaggtctttttaagcacaaaacagtggtgaacacaccacaacaaaatggcactgcagaaagaatgaacatgactttgttagagagtgttagatgcatgcttgtaagggctggtttggaaagaccattattgggagaagccctcaagactgcatgtaatctaataaacagatgtccctcagtaccaaacaacttttaagacacctcaaaaggtgtggacagggaagccattaaactttgaacatttgagggtgtttagttgcaagaaaatccctttataattccaagaaaatccaaactcttcaatcattagaatttcaactcaagataaataactttttaaactcaatttctgtgtgtgtgtgtgcaatcaaatcatcatactactaacattcaaattaattcatgcatgtcaacaatcaatgtttgtctcaaaataaatgtgtatttcaacaaaaatctactccataagcttaattatcaaaccattctccactaatataattacacacaatctaaagatcaataggactttatatgcttgtaatgtaaggctagggtgaaaggtagataaataaggttcatttagctcaaatcacaccatagcatac

SEQ ID NO: 8856 - DNA, 759 bp, Cannabis sativa
atcagtaaaaacctgaaaaatatcctctcagaagaagctaccaaagacctggtgtgcatatgagctgatttacttgagtagtgattgtgctgctgtgcatccaaatatttgaagaaataattaacacaccaatcaatgatattattagctggaataacactatgattataaagatcattattccttttattccaaagagcctacaaaaaatagtataaaatactaacataatccttatcctgaatatctataatacaccttaaaaactcattgatcgatatcaaggtatttgtaattatagtagcgattcacaaacattgaagatttctaagctttcctcgatccggagcactctaacagagcatggttaagtgtttcaagacttatcttacagatgtgacaaatgggagaatcaataacatgcttaacaaaaagggaggaggctacaggaatggcattagacactacactccatacaaaatgtttgatttttagaggtactttagagttccatcttacttcagaattttttagagtttgtaaaagatgaagtataaggcgcttgatataatgatttagaggatatataatccttaagattttatagatcatttgttaagcctaattaaattgtattgtattttatagtattaggttacatatatttatatttttgtataatataaagaaattttaatttatatcaaaattaagtaagatagtcgcttttcgcgtattaatttaatttttttagtatta

SEQ ID NO: 8857 - DNA, 703 bp, Cannabis sativa
ttttgtatttttcactctgtcttaattaatttgttcccaaatttccccctttagagacaaaatttccaaagatttcttaattattatatataaaaacaatttacagaccttttattattaaaaattaagaaccctaaaattggccaaaaaaaaaaaaattaagagccccatccacattttcactttgtaattaaaacaatttttttattatttattactatttttctaataatgaacctttttattatttatgaaatcttagataattttcagttgctagttcgtaatgttttctggaattctagcaatttatgaaatctgaatttcaaataataattaaaaaaaatagttagctagctagcctgtgtggcttcgaattttttatgatgttcttaataaggtttaccattaattaattagtattctcttcttcaaaagtaattaattttctcttacaaaatattataagaaagaaaataatttctatttatgatctaattaagcttgtaaataaagagtacaattttgtaatcgatcctaaccgtgtgagattgtaattaacagttccaatataatgagatatgctcctgtttgactaaacttgtatttctgtttttttttgtttggataagtattatataaataactttttttcttcagttatcaaaaaaattgtattatataaattaaaaattaaaatatc

SEQ ID NO: 8858 - DNA, 1073 bp, Cannabis sativa
taaaactcaaatttttctaacattatccgctcatgggtattactcattaaaagtgcactcataattaatttatatatctatacggtaattataataaattatattataattattatatatattatttaagaagaatattactatcaatctcttagtcaacccctacctctgtgtccaaaaatatatgccgaaatatttactaaccaatttggttgatattgaaatattattatataatttattaaatattattatataatacactcatattttattttatttttaaacaaacatataatgcactccttttgtttttcttttttcttttttgaacaatgcactctttttttttaacaagaacaatgtgctctttttattagtaaaatctcaaattattttcttttgttattgattaaaaaaatgaatatattttcatcctataaatatataaaggcaccttgttcattataaatattaaactaatttatttttaatctattttttttttcatgttttacattattaatttttttttttttgtattaaatttacgtatttaatttttcttttcttttatagttttttacaaatgaatatttttaattattttttctttaacatgaaaatttatttttaaaataataggttttttttatgtaagaataataggtttttttaaaaataaaaaaaaataaaataaagtaagtataaatcctaagaaaatatttatgttaattttcttaaaaagtggggtgccttaattaaataattatagtaaaaaactaatatgttcataaaaaaaatattagcttcggttaatattattaatgttaaagataaggagtaaaataatacgtactataatactatgttaaaaataatacttgtcaaaaattaaagagtaaataatatttgtggcgaaattcaggaaacaaatccactaattgttccaaatataaaatattggtctaattaaagttcaaatttatacgtacaccactatttttattattattattttacaaatctaaaaattaatatgtgtggaaaattattcacatcaataaaacaag

SEQ ID NO: 8859 - DNA, 765 bp, Cannabis sativa
tttttttttttttttgaaaggtggcttttggatgtggatagacatcaaaataaaatagaataaaattaaatttaaattatataaaataaaaattaataaaaattttaataatttttttttttatcttaccttaagctagaagagttaatataaaattattctattaaaataacattttaatattttaaattgtaataaaataaaaaaaaatagaataatttttttcttcattctattttattttgttatttctaactaaatgtcacttaagtttgtatgggtcttaaaatccaatcatttcatatgagaagatatatataatttatagtataaatactcaagtttaacttaataaaaatttaataacgtggactaattagggattgtcgtgtgataatttacttcacttaataatcaagtacttacagaagttttaaaaatataacttaagtattattattgttaaaaattaaatttaaatatttatttataaatagaagttaaatttaaatatttatactgtaaattattttattttttttataagttagtaattatattgcacataaaagattacaaaacaaaaagacaaccttaaataataataattacatctcaaaaaatttctcacatgtaaaatattttaaacaaagactagcatccaataccaaaaagtatatgaacacattgcaaactagaatgatagtcaaaaaagaggtgagaatggttatcattctccaaacatcaaatgcaacagtgagtact

SEQ ID NO: 8860 - DNA, 1697 bp, Cannabis sativa
tgaagtagcagggttaatagtgggggatttcactgaagctaactatgaacgtgatgttattgtagagcatcgaactaatggacttcaaagactaacagatttacacccaagcttcatgtctatgacatatccattgatacacccttaaggtgaagatggatacaggcttcacgtacctttcagagctgtaacaaaaacaactttcaaaaggaaacaattgacaatgttgcaatactattcatttaggttccaacaaagattaaatgagggacacaccctacttcgagcgggtaaactattgcaacaatacatagttgattcttacatgtcaattgaagaagaaagatttcactatgtacgaaagtaccaaaataaattaagaactcacctttactttggtttaatggatgctattaatcgaggtgattcagactgtacaaaagtcggaaaaacaattatcttgcctttatcacatacaggggaaccacgatatagagcacaaaattattaagatgcaatggccattagttttcttagttatcatatccacccaaaataaatttattatacacaatatttattttacaactttcaacataatcactaaaatgttattttttttttacaaattgtcacaggtgtctacacaattgagttccaaaaaagaggtttacctcatgcacacatactacttttcttcgatctaacaatgaaaaatccttcagcagcccatattgacaaaataataagtgcaaaaatcccagacatcaatgtcgaccctgatggctataatgcagtaaaaaagtttatgattcatggaccatgtggaaagctcaatgcaaattctccatgtatgatgaatgataagtgcacgaaatattgccccaaaaaattcaatgatcaaactacaattgacataaatggctttccaatctacaaaaggagaaatacaagtactcaaaattataattacaaaatttagaattcacatttagttaattatataacattttaacaatagtaattttaaaaaattcatgagataagctataatattattactctttggaaatactatacttattttcatcaattcatttaaaaaattcaaattcttttatacaggtgttcatgttgaaaagaaacatgtcttattagataatcgttacgcggtcccttatcatagaaacttaatagtacaattcgatgcacatattaatgtcgagctttacaattactcaaggtccatcaaatatcttttcaagtatgtccataaagagtatgacagaacatctgcaacagtggaatctatcgacaccaccgaagagataggcgagactaaaacatatcttgactgcaaatacatctcggcaactgaagcttgctggagaatcttccaattcgacatacattatcgaaagccattagttgaaagattaccgttccatttacctggagagcatacagtaatatttggagaagataagtgcaccgaagatgtcttggccacacttggagtagataaaacaaaaataacgaggatgcatgagagctagcttcttctgatttccctacattttgggtttgcaattcaaaatataaaatatggacaagaagaaaacatggagttgcaattggaagaatatactttgcacacccttcaacaagagaaggcttctacatgaggatgctattaa

SEQ ID NO: 8861 - DNA, 1114 bp, Cannabis sativa
ggtaaaatatttccaacacttatctgctgccatattcttccatgtcgcttcaacctcggttgtattaaaaattcttgaaaggctgtcattatcttcatcagtaacaagagtgggaatgcattgaagtgttgtggaaagggttgcttcatcaatgtcttggccataaacattacagcaaaatagttgtgcacaacttcagcaatatcaacctttgaatgaactttttgccctctgctgtcaaaaagaaatttacttctgttgttggatttattcgagcaagtcttcaagaattgcttcaactttcagcaattcatttaaatcactgctggtgcgggcagtaatattgttaagattagtcactttgtcttggcaagcattgatcttctttttcatttttccatattttcgaatatgccatgattgtagagattcaacacatgagttaatgctacaaaagacagcactaataggatcagcagaagtcgaaatattctagttggatcgaataatatcttggcttttaggatcggatagccacagcttttcgaaagggaacctgcttctttgttttgcctcagtgactgttgttgattatgtgttgaagatagccataatagcacgatgatccgatggtaatagtccaaatgatgcacagttggagtagtgaaattattctcccagtggttgttaacaaaacacctgtctaagcgctccttaattgtatttaaagttgaacggttcttaatccaagtgaaagggtctccttcattagggacaacatggaaacaacattgatcaacaatacttcaaaaagcagtcatttgtgttttatttcggagattaccgcccgacttgttggagttagagaggatttcattgaattctccaatagcaagccatggagaaagaggagcaacatccgctaagcgcttaagcaaagtccaagaacttgatcgattataaatattcggagcaccatagaaccctataaaatgaaagctttgttcatcttcattctttaagtagcaatcaaagaaactggagccataattgagcaaggtaacatccacatcatttttccaaagttgcattagtccaccacttagaccaacac

SEQ ID NO: 8862 - DNA, 2293 bp, Cannabis sativa
cttcatagcaagggttctagatttcttagaaagggcaggcagtgtatctgcacccagaattttactttgtagagatcctccttagaaacattctacagcattgttggtgagtgaagcaaaataagttagttaaaatagtgccaaggttcactcgatatgatccttaatttgtctcctgcacaaccaattgttagtaagaacatatcagaatgcaattcagaaactacaacttcaaaccggcacttatttctctagaaattgctcatttttttatgaaaatctttgggttaacgacattggaaaggcaacgagcaaccaggaagaattttggggattgttgtggttcgataatgttagattcagagagagtgtagacctccctttccttttcagaaagaacaaggtttgaagtcatgtcgtgaagaatagaaaccatacagaaaattaaaacagagtatgggaaaatgaaatgaaggaatagagtgtataggctcagatggaaaccataaatagacccttgagagaagtaaaatttccaaatctgtaagacatcatgatgcatgatgagaattggtggagttagagggaagaaggtgaagaacatgggttcaggcatggcgcacaagaaggagaggaaaccagaaaaatagtaactgcaatagagaaaaaccccactcgggcactattttatttctttagttataattttacggtgtccataaaataacaagaaaattacatgaaaacaacatacaaataacaacaaaacaacaaaattataatacaaaataacatgaaaatattaacaatccgtattttttgtaaataaaaatttgtaaactgtaaaattatttcaaattccgtacaattgtatttttatatatttttttaactttttaggtgtttatgtaaatatccctatgtaaagttcactcaacagatatattacgagaaaattatactgtatacctattttttgttttttattttaatttttacctttattttattactttttaatttatactcaattttattcatatcaccattatgtgtgttagggacactctaattttaataagttatgtgaggttatatttgatcaaaaatatttatattttagagttatatttaattaatgtgtaataaaaagaatattttttaacttatccccaataaagcatttagctttttttttttgcttctgttattttggcacagatcttttttgttcttaaaataaacattttaaaaaaggtataattatcctaaatttttagacccccagtaccgagctacgtaagagcatctccaatggaagtgtaaataagtagtgaaaagctaaaatatagctcatttaacaaaaagtatactctaatagtatgccaaaaagtgatataaatttggcacatagtaaattttgtgccaaatttggcacaacatttgctatgatgtaaaatttacatcacaataaatgtactactttttcatttatatttatgtcatttttattaatttattagtatatttaactacacatttaattatgaaacatttacaatatttttttattatcttatatattaaaataataataaaattgattataaagtttttagattttttttaataaaatattaattagatattaaattttacatcaaactttcacaattgtgtattggagcacaaaaataaaaatttgtataaatttactacaaaattattttttgtgccaaatataacacaatttttacatctcctactccaccatacctaccatttgagatgtctaaagaacccatattttacctcacaaagcttgatcgaaatcgagaaaagtaggccataccagcccatactaataagcccaaataaatgggcccgacccggaagcccatctttatgctgtcaacagtgaataaacaaaataaaacgaaacatggcgggctaagaaccaaactgtattttcaaagttcaaaccaaaacgtctctttagtttctctctcttccactgcactcccttctgcaagtctctctctttcttgaaatcgatagcagtgctatggagccgatatggacgaggatggagtcgctgcgtatggcctgcgacagagacaaactagctaagcagcacaagatcgacgcctgggcagactcgtttagagaatcccgaacgttgatccacaccaaaggacaagaaaccatcaaatctcaaggtactcattttcacgacccccgaccgaattcttactcattcttatgctctcaattaggggttttgagactgaag

SEQ ID NO: 8863 - DNA, 600 bp, Cannabis sativa
aatcaaaccatttgatctagcctcgaatagaatgagaagggtaattctcatgataaatacaaaaaaatcatttttgaggtataaattatatttttgaaacttctctaagtatcaagttattaattgtcaagttaatagttaatatttacgtgtcatttttttattaatatatttaaataaatttttaaataaaaataaaaaaatttaataacttagaccaattacaaattatcatgtggcaattgacttgacatttaataataagtaccttcaaaaattttaaaagtataacttaaatattatacctgtaaaaaattaaacttgtaactgaaaattaaatgtgaaactttttggatagcataaaaaatgttctctttttttttcattttctaatttctacataattttatgagagttaattattttacttttccaagatcaaattgtgagagagacaattaggctttaaaactcccattaattctcctttaatctctctatatttctccattaatacttaatgataaattttgtttgaatttaagttatacattagtaatagttttggctttctttggactcaaacttcttacttcattt

SEQ ID NO: 8864 - DNA, 731 bp, Cannabis sativa
atcatgactaggagtgggaggaatgcctttcttcgatccaacagggcatctctggcctgaactaactgcaagaacagtcccttcgcacaagacaactgcaatcgaagccagagtcattgcctcctcagtctcatcttaatcatgtccaggagtagaagaaggcccgttgggcatagagatagaaccaagaacataagttggctcccagtaaaggtgggaaggtttcatgatcaaattaagggcacctctagataatgaaatgtctgtcaagcttgcctctttcatatgatgtggcacgagcagattcatagcaacccttgcatctttagaaagatcaaaatacttttgcaaggtgcttaaagaatcgatactaagcccaagacttccatcgttgctcaaaaaaaagtaagagactaggtcagatggagtaaaatgtgagagactaataaaaacaaagcaatacacccaagcccatctcatcaagggagagatcatcaaggtcaacatctcaagatgggtcatatcctccagcctcttgcatttcaatgtctctcactggatcagtaaaaatgtcaagatttggctcaaccacataattctctctctcatcatgcaccgcaggaggaatttgcttagagaagtcgcaaatagagtcctttcttggaacatcaaaataagttgagcccaagatcctcaagaaagacacagcctctctacacctgcacatgtag

SEQ ID NO: 8865 - DNA, 677 bp, Cannabis sativa
tgggttgacatatttgaataaaatttatttataaataaattatacagattatgttgtgtcaacttatttataaacgagtcgtattaaaatttaattttttgacatacttattaatcgaatcgtatttagatcaagcatatatctctaatacacgtattttgatatgacacaaatactactcgcgaacacaaattaccaaatcgaaagtaatattatgagtatgaccacaagtggcccacatttcataggccgaagatttcttccagcccaataatgcaagcccaagcccaagcccaagcccaaaacaattctaatcgaaccagtgaaagtgaacagtgaatagttgtaggcgtgagactgtttagtccactgaggcgcgtgggttgttatttctttttcagcgtggtaggtaacgcacttctaggtaagcacacgtcatcttctcacatacatgacgtcataactgaatagataagatcaacggttgacaatccttgaatatttgtactgtttggattttaaattctgtttggacggtcccgatgacttggagaagacagaccacagagcccagatcttttgtccacactttatccttgctcgtttggtagtttagcaaataaatggagggtattttggtaattacagatattgtactttgttgcatgcgaaattat

SEQ ID NO: 8866 - DNA, 617 bp, Cannabis sativa
gaagggtgccaatgccatgtggagcaacaatcagcttcatcatctcctctcacacctggtctgtcttccttattattggttaattttccatttacaagtttatcgctagtactacaaaatgtttgactgccgacatccctccaaattaaaatccttccacatttatcaccagcagcaacaattctctctgttggatggaatgccataactgtcacactctttgtatgatgcaagctaatctttttagctacagcacggtcagaatctgacctggggacttgccatatatgaatcgtgcgcttgttatgcatcccaaaataacttcctgagggactaactgtaagaaactctggctggggagtctgtccaatcataacaacaaatcttcaatcattctaaacaaagtaaatagagattaaatgaaaattgctgaagttcaagactgaataatttgacgtaaccctttcaaatgggttaccagatccactttacacaattaaacaaaaaagtgttaggtgaatagtcaccttaaagtcctccattgttttttattatgataaatggtctgaattatgtgatctatgtagtacaagtacaggacccgcaactaatcttgt

SEQ ID NO: 8867 - DNA, 792 bp, Cannabis sativa
ctggtgatgattatcggttgcggtcagtcctacacatacttgaaaaagctcaatgtgaagtcactagcgaagacactcatcaagtgatttgagttatcacagttggtactgggtttcattatcacaactgttatgttatgtactttggttctgctgctttgttgttaaacctctatggtgttgttatgttaggctaaatatagtgttcagtctcaaacacaagcttccatgtgtcttgtaccgtatattattgataattcatgtaatttttttttattttttgtactgaaattgcttaagagtttctaacactaaagccaatgatttaatgacagtgtcatgaaacttaattaccatcataaaaaattgattgtatgtaaaaataaataaataaatttgtagcagcaatcctatgaaaataagactttttaaacgaaaaaaaatgtcatcggtaattccatacaaacttaaaacactttagtaaagataactttttactcagatgtcgatttgaaatgatttcgtagataaattttggtatttctattttctttttcaagatgtacattacgtggcacattattttctagcacatcgttttaaatgaggttttattataacatatttttagtttaaaactatttagaatgtgtagtagaaccttaaaaacaaaattgtaatcttgtgtggaggctaccacagttgcatgaaatatttatgatattgtatgtcagcatctgactctttcctctcaaaatttgttgttacaagtttcaacacattctataagta

SEQ ID NO: 8868 - DNA, 522 bp, Cannabis sativa
ccaccgccatactgatgtggtgctgctcaaataagttccctttttcatattctttagtgtcacattagagacaatgtgccaattaaatttggagtgaacttttaaaaaaatttagttttgcattttagtcttttttctgtggtttttgtgtttgtgtgttatgagtcaatcttctaaatatgagtcaatgtgaaagtaagtgtatagcatgatttgaaattttatttatatttcgaaaaattcatgtgtttggtgagattatattcttgattaatttaattttgtgctttaaaagaacatagaatcacaataagtaaatttttagcaattgaattagtttatgtatgctaaatatgaaatgtggaaaattatttgaaaaaattctagaacttgcttatttgtaatttgagacgaaataataaatgatacgtgatccggaaagtaatttagccattttttagatcgattgtgcatttaacgtcattcttgtaaatttttatcttagtttacccttgagctttg

SEQ ID NO: 8869 - DNA, 525 bp, Cannabis sativa
taataagtataattaatattgtattatactaaatttgtatttttcattatttaattgctaatggtttattagacttttttagtttaagttattgtttgaatttttttttattttattgtaaacagcttgataagtctattttttttgtttttgttaattttgcactataatttatacattcaaatttgtctaatatagagactcggttttctaagaaaaataaaatggagaaaaataataagtatttacatataacataatttataggattttttttttatttttataattcaaaacagttattttattattattatttttacaaaattctatataaaaattcttattgcaatcaatggaacaacttaaattgcaactaaaaattgtataacaacccatatagaaactaccgagaaactactttaaaaatccaaatcgtaaatttgaaaaaaagaataatatatgagataatttctctaatttatattataattaatttaccatgaacttattttagtagtttca

SEQ ID NO: 8870 - DNA, 1396 bp, Cannabis sativa
cctaatattgattctatttgtttggcattgatttgctggttactacagataggaagccagtgtttctttcataaagctgaaggggttctttgcagatgtaaaccaagagggagtggagtgaagtctacttaataattttgtcgatgtagaaaaataaaaaatttgaatggaattcgcaatttcctggtatgtttccttttctttcagattactattatatttttatttaatgttattgtagcataggtgttgatgttagaaagtttcttagtttctttgtatagaagactcaatgtgaagttgttcttttgcaggaatcttctgatttttcaaagccaattacttctgatgatgtccaccaagtatttaaaaatctaactaataagtagaggcgtaatagtgttattattagaaaaatatttactaatgttttatgcatgtgtcaatcaaaatgttaaatgcttaaaactatacttagtccagattcaaatacattaggaaagtttattcatatttaaggcttttcgtaatcagaatgttttctcttcgtttaaacacatcaagcatgtttgtaggtgcacatttatttatctggaagtttatgcttgcctatgtgcttaatcacacatgtgacactcacaacactcacaaaattaatggctttcaattgattagtttatatgtcattgttatctatttcatgacattgttcatgacatgtatttattatactttgtacatgtgctcctctgttttttgtgcattgtctctgaataattttggtacaagattattgaaaggaaaataaaaaattgcagtcctttatttaaatggtaatgattattctcacatcaattttgacagtatttacatgaaatcaaataatcttttttaccatgttcattgtctttggagaattcagcatgaaatgaatttggtaagtaaaaaaacacactgaatatatatttttctaatttttttagtttggtatttgttcaactatttttagttgtaaactttcagtgataagtattctctttgttcgtataagagaatattttcatattacttaattttttaaaaaattattattatattttctactattaagctttatattaaacatgatttattttttactatgatttttttaaataatttcacataaaattaagtattaaattaaatatataaacattgcacgtaatattaatctaattatatgtggatccaaatattattatatgcgaacctagatagaatgaaaagtgtaaaatacaaacattatagtattgtctctacctaagcaaaagaaaattaaaacccaaccactaagcgtattttctatttttctttactcgaatttttaaataaatattatcttcaattatcaaca

SEQ ID NO: 8871 - DNA, 1034 bp, Cannabis sativa
agaagataatttattgagtaaacagccaaagggtcatatgatcttctatagatgagtaaataagatcatattagaatgagttttatttagggcataaaaccccccaacaatcccacatgcactaatataataataaaagtgtatttcaattaatcattgatcttgatatatatcaattgtagtgtgcttgactttatctgtgcaaaaagaattggaaggttgcaatcagcatcaaccttcttcaccattacagtctcttgagtcacaagacttttcgtgcagctttagtggccacttcatcagaagtaaacttagccaacctatcaaacttggtagcatatttagtcacagtcatgctaccctgtactaactatgcaaactaatctacttgggcgacacgaatggaatcgttataatacttctcataaaatattgcctggaatgtttctcaagttatggtattcaaataatgaccctgagatgcctctcaccatatccaggcatcattatgtaacatgtaaacagcacatcgtggccagtcattatcctcgcactgcataaagtcaaagacagaggtaatcatactcatccactattccgccttcagtggatttggaccaccttcaaatataggcgggtttggtttcctaaatcactcataaattggctccataagatcccctatattcagttgcactacctgaggtgccagtataggtgcaggacgagcttgttgctctctctggcctcgaatctgcttttccttgctatcgaattgtctcttgtgttgcagtaaatacttatttctagttttgaggtggtggaggatgctcttcctcaccacctaccccgagccccaactcgtggcctacacagccagatcatcactgcatgatttaatgcacatgcgatccaaaacttctaaccatttagaattcaacatgtattcaatatcaatatgcatatgcccacacatatattcctatcacaatcatctctatgttactttccctaacatactttataatagtcta

SEQ ID NO: 8872 - DNA, 1018 bp, Cannabis sativa
tcagagctaaatggtaagcaattttaacattaaaaatccctttagggtcaaagccccaaatcaaagtttcattgaagttttggccagaaattgggacatgaagaatttcatcaatgagtgtgttatcaaagtaatcttgcagcttaccccggtcccaatcaccagaaggggaaatgaaaaaatataagctaggatcaggaggagaagaggatgagtaagatttgatctgaaagccaaggagccaatgatcctctatagtactgatatccataccgttttccaccttccaaattaatccctgtttgagtaaatcacgtccccacagaaggcttctccaagaaaaagagggcctatgaccaagaacaacttcaagaatacatgaattagggaaatgatgagctttaaagatgtcactcaataaagaatcaaggtattgaagaattctccaagcttgcttagcaagcatggcctaattaaaatgagttaaaaatcgaaaccccaaacctcctacaaatttagactgacaaacactcagccagttcttccaatggacttagcgagactcctcaaaggatccccacaaaaatttagagctcatggattcaatttccttaaaaatatttgtaggaatacgataataagccatggcatgtgaggggatagcatgaaggacaaccttaataagtgtttctttacccgacctggaaaaccatttatgattccaagagtggaggacagtggcgattttatcattaagaaaagtaaaagctagatatttcacacgagagagacattgaggcagacccatatatttagtaataaaaggccgattttccagctgaaaagtgctaaagaataaatccctaaccccaacacaggtgtttggagagaacaaaatagaagatttggcaaaatttaccatttgtcgagaggctttggaataagtggtaagtgcacaatgcaaggcctcacaagagtgttgatcagcagagcaaaataaaaaactatcatctgcaaa

SEQ ID NO: 8873 - DNA, 988 bp, Cannabis sativa
actaaacatgtggatgttttttttgttatgtccagtttgtcatggagcaagtgaattagttttgcattgtttagtttcttattattttgctcagatttattggcaggtggttagtttggctatgatttcggttgatgcaaggtcgtttgggaactggttctttcacttgttttctcggctgggtaaggaacaaaatgctcaggcagtgatattggcgtggacaatttagttcatgcataataaatttttgtagaaggtaggaaaagtcagatggagtttgttgtcaatatggctcatatcactcttgataagtgaaaaaaagtttaagaaagaagtttgttttcttcagttaatacatggtatctttcgatggggctgagctgccgtctaaactaggtttcagaaaactcaaggtgaatattgacactgctctttttgacgagaaaggaaggtctggttttggcggggttatctgaaatcaccgtagacaggtagtgactatgatttatgggttgtgatatgggcgagttctgctagaaatggttgaagtcgtggttctaaaagaacttctttcatggttgaagcgtgattcccgagtgttagtattattaaatttgactgtctgttgttagtaaaagttgttcaaaatttgaatgtattacaatcctggattgtaaacaagttctatcttcttttagtaatatattttttttttgtcacatgctctactaattgggttgctcaccttgtgattagagcgtctcggttacatgctaattgtatttttttcagagtctaagttctcttataatgtttatgtcattgttgatgccgagttgatgtagttaaataaaattttcggttaaaaaagatataatatataaatgaataatttacttacctgtgtaattttgttttaattaattattaagtaaattacaaaatgacacgtgtacaaatgtagaacacgacataattacagtttcgt

SEQ ID NO: 8874 - DNA, 764 bp, Cannabis sativa
agatcaagagattcattttctctctctttagtttcttaactggtatcagattttcaggctctctttcttcgtttcttgatatcaagatcctgaaatgacgacaaattccgctgctcccttctctgttcttcctcaaatggatccaccggagaatccccaaggtcgtgttcctctagctccaccgccgccacttccacctcatggttttgttttcccagcaaacatggcgccacttaatcttcgactaactcgcacgaactatccctattggcgctcccaagttctaccgacagttcgttgttacgatcttgaaggatttctcactggcgagcgtctccaacctccaccgtctgtagcagatccggccgatccctcccgtcagatgcctaattcggagttcagtcgctggttacgcatggatcaatttcttatgagctagctctttaattcaatttctgagaatatgctcggtcatgtggcaagatgtgcatcctccgctgaaatttggtatgaactcgctcaactcttttccaatcattctagagctcgaatccttcaactccgaagtcatcttcaaatgaccaagaaaggcgctacacctgtggatgaatatatcctcaaaatgcgatgcattggtgatgccttaatggctgcaggacaagtaattagtgatgatgaattgattctttacatcctaggaggattaggccctgaatatgaatcggtggtggtaaatcttacagcaagggattctgtcagctttc

SEQ ID NO: 8875 - DNA, 953 bp, Cannabis sativa
tatgattaaacagatgattgttggggagaatcaaacagagacgagaaaggaaatttaaaagcgaaattcaaaacttttccttctggaatcaaagctctggcagattacattcatgcaagaggattaagactcggcttatattctgatgctgggtaaattttatttgaatatatagcattaatttagtaatcaataacaaacaagtctatatagtttggaaatagaaacctaaatactttaatggtaaaattattaaaataaagtgaaatatataaagtttccaaatagaagatattaaaaaaaaatattttcttcatttgttgatgttatttttttttaattcttatttcattttttattatatagtttcatgacatgcagtaagacaatgcctggctcacttgggcatgaagatcaagatgcaagaacctttgctcaatgggttagtttatatttaatatcaatattcataatatctaacataattatcatgaatcatttttccatcaaaaaaattaagattaattactttttttttatgaatcagtgtaattttattgctcacaacaatgtttatacaagctatacacaccttaacaaagtttgctaattaaggtcttgatatgtctatctatacataaatttacaaattgttaaaccaagtctcatatctttttgactttcttaggccatacaagaattactctttgatttacattttctttgatcgtgacagttagatgtacccaattaggctcattttcttgccaaattaactcattcctcgttttccacacatggtaaacaagactagctaaaccaacagccatcactttccttgaaaacctgctggttttaattcggttaatccacttggagactcggtttagctcagtcgtggcttgcgctccccagccaagccaatgtgcaatttcaagattaattattattat

SEQ ID NO: 8876 - DNA, 626 bp, Cannabis sativa
atatacttagcaattagagaatgagaaaataagttttttgtacaaagatcttgaatattattttaatattggcgatctctattaatttctcttctctttgattatgtgagagatagttatattttactcatcttatttctttgttcttacactatttactgtgttattattatttgctttgtgtttatgaatctttattacttgtcatgagttttattattggtttccaattttccattgaatatgttatttctctaacatcttttgattgagtatttaatataaattcatgtctttttttacaaatggtcactaaacctcattttatgtatggttatatatttgataacatagatatttttgaaaatattatttataattgttctaaattttaaagagtaccatttcttagagaattagagtattggtcaataattttataatctctatcattgacttcaacttaaaatgtaattattgaattgtttgtgtgcacccgtgccttgagagtggtcgcttttcttaaataaataaataaaaaagaagtaaacttctggaataaagatttttagctagtggaatgaaaagttataagaaaatacacaaactttcaaacacaaaagtac

SEQ ID NO: 8877 - DNA, 640 bp, Cannabis sativa
tacacattacccaaaatttatatacacttttttttgagataaaatattcactattattataaaacaattgtcatttacaacaaacaatggagaaaacaaaatgaggaatttcacccatccaatccaacgtacatcttcatctaacattagaacatattttactaactcatgtgcagcttgattaacatgcctccgaacatgagaaacaataattctagagagagaataaaagataacaaacatcagctattaaatcagaaaaagaagacaaatctaaagatattgaatgcaatagagactcgtaaagcatcagtttcaatgatcgtgatagaaatttgtagttgacttgcccaattgatactatgaaaaagagtttttgcttccatctcgtcttatcgaaaacaaccttggactaatttagataaggcagcaataacaaacccattgtgatctcgaataacagctccaatactcaaggttttggtgttcataatgaccgtagcatcaacattcagttttaagccatttagatcaggtggcttccatgggactccctttatctgcttgggaagctaagttgattgaaccaccatggagaacgcggttcctttctgtacaaataacccacataatacaagta

SEQ ID NO: 8878 - DNA, 540 bp, Cannabis sativa
cattacaagttctgaaaatattacaaaacaaacaactagcaaaagaagatctgactctattacaaaaataggagtagttgtcaatttcccatttaggagcctccctggaaatggaattgactactgcctagttggaatcgctctcgacaataataaacttagatgcatgttactttatgttagattatgaaaatactataaggacttattagtaatttataaaatatgtgaaagtctataaatatgtaattgtgtagctattgtaaaatatgaaatgaaaaaataaaactttgatttaattggagtttgacactaacaattgttagatagtagtcctctttgagacaaaacaaatctcgtaaaatgcactctttgagtctgtcaaactccaattgagccaaagttctattttttcatttcatatttcacaatagctacacaattacatatttataaactttcataccctttacaaattactaataagctcttatagtattttcagcctaacactctatatttttttttttcaaaataaaa

SEQ ID NO: 8879 - DNA, 673 bp, Cannabis sativa
atgtttagaatggtttgtaagcacatgctagtttctaaaccttacaaatagactgggaggtaaagcgtatatgaccagcttggaatgtttttggctgccataattcttgcatcatcacagttttaataaattattgtatctcatagttgcaattaatgatgctaaattggtaagtagcaaactaaaaaaaaaaatgaaggaaccagtgaattattagtccggactataaataattgtatcaaattattgagcaagtgaaaatgatttacacaatgttataaacaattgtaaaaattataatgcaaattattgctttattatttctcctcaatgtaggtacataagtaacgatagttgttttcattttattcctcgttgtgggaaaattataattgcaaaatcaaattaactaaaatttaatcaacaaataattatgagaagattaacaattcacacacaattattggagactaaaatagagatgaatagggtatgaaaacaaaaaacgattaaaacaacaagacaataaaaataagagcaagatatatactcattaaagtccaataaatcgatgtaatttatggctctactctagttctggaacaccaccaaatttggtttattgattgagtaagaatatggtacgatacagtccagatcaattctctgttgg

SEQ ID NO: 8880 - DNA, 695 bp, Cannabis sativa
ttcgagggcacagactcgacggatacttgactggacaaaagccatgcccacctgaatacattgctgcagacaccattgttgaaggagctgcagaagttagtctcagaacaaacctagatttcgagatctggatcactcatggccaactcctcatgggttggttatacggatcaatgtcagaaaacattgcatctgaagtcatgaattgccaaacatcagcctccttgtgatctgcacttgaagacctctatggtgctcattctagagcaaatgctgatgatctgagaaacaaaatacatacagtgaggaaaggaactcaatctatgctggattatcttaaacagaagagaatgtgggctgactttctagctattgcaggtgacccttatcctgaaaaacttcttgtatctaatgttatttctagtttggacatagagtatttgtttattgtcgttcaaattgaagcccgtgagcacacaacctggcaagagttacagagcattcttctcagttttgacaatcgattggagagacttggtgctgtgtcttctcaaaacaagcttctaaacacaccaacctcacctccttcagctagcttagctcaaaaaccaaacaaatatggatatcctcgaaaaccagcttcaggaaacaacaatggaggaggcacaggctataatggtggggcaaatcgtaga

SEQ ID NO: 8881 - DNA, 536 bp, Cannabis sativa
ctacccccattctttctcttctcttctctctccctctctccttagcgccaaggaggtcttggcgccgctaccctcatctttttccttcttttctcttcctccctccttattctttctttctctctccttggccccaccaacacccttggcgccaaggacataccttctccacttttctttctcttcctctctccttgatgccactaacactctaggcgccaatgagtgatctccattcctttctcctctcatttttcctatctcctccttttggcaccaagaaagttttcggtgctaaggttgctcaaaaatctccattccttttatcttaccacttagtgaaaaaacgaaacacaagtcccatggtctaaagaaggtgaactagacgccaaattgtaatggagtaaggggagtgaaaggcctgacaaaatgtcctttagagtgtgctacatactaacttgacctctgcacccaaaaagtagtggtaacagagctgtgtacaagggaatcagctgctgggaccacggagttcttta

SEQ ID NO: 8882 - DNA, 598 bp, Cannabis sativa
tagaggatcttgtttagttgattcttaaccccaatactctttttctgtagcaacactttgattggttcattccttattatgtttttcttttatttattcttgtaatattgaatcaactgagatgctgctttgagttactaatattgaatcaccgtagtagattgtattgctctgataccactttgttacataacagatattccacaaaagtaaataagaagaagaagaataagaagaattttattgaatcagttaaaaaatcttagtcacaggtttccaataattggagtcgcttggatcattctgagagtatcaatattcaatttacaatttatccacacttaaaaaaatgaccttatatttctactcttatacaacaagaaaaagtaaaattttcttcttcctataagtaccatgttaacttttattgacaaatcaacactatctatttaaacacttcttaactttttgaatagactataataagcggcgtaacaaattaaaactaatattttatagagttaggtgggttgtaaaagaccaaaaataaaattctcaattttctaaacatgggattcacctaaacttcactccaccc

SEQ ID NO: 8883 - DNA, 700 bp, Cannabis sativa
aaaaaaaaataactaaggagtaaaagggtatggataaatgtggacataaagtgagtgagtgagtgagttataatatattgtggaaaatgatgcacaaggtagccatctatttaagtgaaagaacaataaagtaagagtaagtttagtactgccggggattaccaaagctggaaaacaagaagtggatgaacgtgtcaaagaccccaaaaaagagagaacaaaaccaaaagtgcatctcaatttttgaaacttgaaataagatgttttagatggaacatttgttttttaaaaaaattatacaatttcatgggtttagtattgtactactgacaatgttttattattattattattattattggaaattaccatttccatcttcttaaatcttcttttattcgtaccaagaaagttatttacctttcctaatcctgttataataatattattacttgttgataattttagtgaagtgttgactgttcctacctatgaagttgacacgtggctgagtactttttttggctctgtacattgacgagtgtatttgtgacagcaaaccagtgccgatgagacatctctcacttagggttgttaattttagaggcaaacttaccctagtcttattaaaaaataaatgtaatactaaagagaaaacattaatagcaaaaacatatatcctattatggttaaaaaaagc

SEQ ID NO: 8884 - DNA, 562 bp, Cannabis sativa
aatttagggattctagcttgaaaaggttgaatcttgcccctacttttcatatttttggatcatatgttctgaagaacacaaagaacctggtttccatggttcctctttataaaataggttattttagatctgttaaaactatggccaacctatgcgaggtgttttcaccatggccgactaattagattttgcctgtatgatttttatgttgtctggatgttcatctccctcttctcttttgcataaatgaactcgtgcgaatactagagaggtgaacaccagatagactcagatctcctcagccttttctttgaggattagcctgtactccaggaaagtagttcatcatctagtgattctccgaccagctctttgagttattctgacttggaattcaatagtggttctcctgacaccccgcaaaaaggacgtagatcgcccttagtgaagaaaccctctcaggctaaagttgttatcactattgcacgatacaccagtcaggatccaaacttgactaggacaaagcaaacttactgtgcagtgccttctaacgatccccata

SEQ ID NO: 8885 - DNA, 611 bp, Cannabis sativa
acaaagtgactcaagatcgtacaatggtgaaatttgctcgagtcctggtggaagttgagatatcgaataatcccccccaaactatatcctttatcaatgaaaggaatcatctagttgaagagaaggtggagtatggatggctcccttccaaatattcggcttgtgctaatttggggcatatagtggctaattgcaacaaggagaaaaaggtggcttggaagaaaaaacaaacagttgaaaaagagacagagatggaaatgaaatctactgatgtaaaccaagaagcaggggaaattgcagaaaagagtttgtcgacagaaaccataatcaataaaacaaagcagaatgcaaagcgagttaatgaagctcaggagacaatagtggagaaggaatcaggttgtaatgatactgaaagcaattggattacacctaaaaggtgagatcaaaaacaaatggtagcttccaagtctatggaagttattaataaaacaagtagtagcaatgggtatgcagtcctacaaagagctggtgaagagactttggctcttaattctaaacaaattcctaatggaagtctgtaacatgataggatggaatgtgaggggtaaaaa

SEQ ID NO: 8886 - DNA, 630 bp, Cannabis sativa
ttgttattaataccggcggagtcccgtcggtattaataggtcccgccggtattgttcgtctatataaacgaaaccacacccggcctcaccatttttcccccttttaaaattttccaattttttccttctacctccgcctcctctagaaagccctaatttttcccaattcgccactgcctccgcgagcaacggtattcgtctccgccagtagcagctccgcctccatctccgatttcggtccaaccttaaaaagtaggtattttatatgtgtgcatatacaattttatattgttttatattatttttaaaatatttataaattttacagtaaacgtattatttatattgtttttgatatttgttgattgtatttgtttaatttttgatgtaatattttttgttatatttttcagattgtgtagaagacattttaaattcttggcttggattagagaagttcacaaatattcatttgtgtaaagtatgtatttatttttgtataaattacagtaaatagtgtaatttataatttttatgtttgtgatataaatctgaaaagtgtgagtaaaattggcgtgtttatactttggaaatgtattttagttgtagtttataaatgtaaaatgtatt

SEQ ID NO: 8887 - DNA, 637 bp, Cannabis sativa
cattattatcttttttcattagagaaaaaatattgatattggtacacaaatttgtaaacagatgagaggaaatttgatatatatcataaactttcaataatgccaaaaattttgaaacatatttaaaactacgtaatctcaaataaataaataaatataaaacacagaagaagggcataattgtaaatataaagtttttcctattaataatggtaaattttatttacactccataaaaaataattaacttaaattaatttttaaaaattattttcaatatttttttaaaaatttctttttcacattattttcttttaataccccaatagttagctatattttatttgcacatttttttttaaaaagttatatatattttttttaataaaatttcatgtaattttttacttttatttgtttgtgttaatatttaaaatatattttattttttattttataggtatatttttaagaactaaaattgccaaaattattaaaacaaaaattaaaagtagggtggcaggaatggatgagaaaaagattacatgtaaaattagaaattggattgatcaattgtagtaaaaaaaaaaaaaaaaaaaattcagcctgaatttaggccgatgagatttttacaaaa

SEQ ID NO: 8888 - DNA, 617 bp, Cannabis sativa
aatattgacaaattatgaaagaacacaaattgggagccatgacacatatagtacggtggagtagaatttgtcaaactcccagtcccacctggaaaaatggcattatcattcatttgaattttaatgtcttttttcaatgccggatcaattaatagaatattatagtgtccattaaacatcatatactctcttaaggtactaatttttctttccttcgacagcttttcagcaccatcaaatgagtttattttctatttcacacgttgattaactatgtgtacaatacagctttcgataatttgcataatatttcatttcatatatgcattgcgtaatttgctgtaagataagaggatacaatacaattaacaaccacattattaagaccaattctcttaaactaattactttttatacaattaagtagttttcaatcgtgggtagggttataatcacaagtttgtgaccaattcacattattaatgcatatttcggaaccttacaattgctaaacaattccatctagccaaccttacgatacattaagactgagcataaaatttaaaaaattaaaaaaattgttctaaccgacctactgaatattattagaaccgaaa

SEQ ID NO: 8889 - DNA, 774 bp, Cannabis sativa
aaataaatttaaaataattattgcttaaatataaaataaaattgatacatataactaattattagaaatatatttttcacacattaaaatattcagaattttataaaaatagaacaacaactataatttagtctcttctataaaataaaaataatttataatcttttaatatattgaacataaaaaaaaaatattcctacaataaaggccctaaataaaaaaatagtatgatgtttttatctaattacaaacatatatccttatatttatttatatatatatatattattctttttgacttttagtgaaatttgttataaaatcatgaccatttattattatttactactaaccaaacaaaaaatctcataatgactcaaccttcttattacgtttagctataatttaacatacacatatatgttaaaatatttgtaagatattattaatataatctgattatattaaatatttagatcatataattttatcttatttttttcatttttattatatagtgtaagtaaccattgcttaaaaaaaataacaagttattgtaaataattttattattatatagctttttgtcactaacaaggaaaaaacacaacatcaaaacgtttccataatccataatttgtaaagtaaatttataaattctaatcagtacatatttttctttctctttatcaaatatttatttttttttaaaagaatgagtatattctcttaaagaaagttaattggatatatagatggaataattacataaga

SEQ ID NO: 8890 - DNA, 1043 bp, Cannabis sativa
gaaacatattttttattcactgtttatggcatcatttctttcttcatcattacgttactaaagttcattgtaaaagtaagtcaactatcacaaattgataaattagtaattaccaaacacttattaatacgacaaccctaaaaaatcgaattgttgaattaatctatagaaaacctgtaaaaatttctagaagaaacaaaaataaatttggtataaaatatataatatatatatatatatatattttctctttcacctaatcagtgaaaaagcctccatattttattttattttatttacttatttatattttttgcggggattcaatgaaaaagactttttagtcaaatataattacacattacatatcttacgtttaagtaattaatttctcctataaattataatcaattcactctacgaagaaacacatgacatatctaatcaacagatttgaagtgagagatctgttggtgaccaaaaccaaagcccaataatccaagaatctaatgcatctcatcatgtcaaagtcaaaaaatcctaccagtacttgtctcttgatcatcatcaccatatggataagccttgtaaatgaaagccagtgctgtgatcaaattaagaacaaaagagccttattcgtgtttggggactcactatttgatgctggcaataataactacttcaacactgctcttcgggccaactattttccatatgggcaaacttttttcaactacccaactggcagattttctaacggccgcttaatccccgatttcgtcggtaaacattattattattgtcatgaattaactattcatttctatgctataaatctttaataagattacttattggtcaataaaatatatatgcagctgagtatgccaagttgccattaattccaccatatttacatcctggttatgttgactatacatctggagttaactttgcatcttctggagctggtgttctgattgaaacacaccaacaatatgtatgtctttgtcttattacaattgcacatttttagaacaccc

SEQ ID NO: 8891 - DNA, 1093 bp, Cannabis sativa
ggtggtgctgggcagtagcttatttgtgaaatgagaatctatatatgtaatgggaataaaaaaaacaacttatttttactcatcaaaactatgaaaatgtgttaattgatagtatgagtaacatttctaagggcttgttatactaaacatcttattaactcgtattgtaattatattatattaaattggattatatattatatttttatataatagtactattttaatttatattaaatattacatgtttgagtgcccataaaaattaatatatataattttacataaaactagtatataaaatacaatttaatatactatataatatacaatacagtgtaattcgatataccaaacgaattctaatatatttgtataagtttcatgaatgtcgactgtatggttaagttttttttcatggtatgtcaattgtgattagttctactttctagctacattgtaagtttataagtatgtgatatcccaccacaatactaaaaggaaaagtattatcattaggcattttaaggtgtccaacactatattaatgtggtgtattgtaaatagttaacggatacttatattatatgtaaaattaaaatatgtgaaagtcaatatattatattacattattaatagtatgacactacctatagtgtttaacactttaaaatgttccttaacattttgcataaaaaaggatgtatcatacacctttattattagagagattgttgactatgcattcttaaaatattttatagtttaaaatttttggttaaacttaaagagacttgaaatgcaaagaaattaaaaggactttgaaatacgaagcattatcccaaaaatcaccttaatgaaaacgatctgaaacatggcaaatatgaaagaggttgagcagataagggacctttcaggagacgctccagaaggcgttggttggctgtatagaccagatggaatcgtcgagcactaggcatatgctagacaaggtatgtcaaccaaaagtctgagcaaccaaagagccatctcacaaaaagcatccgaccagcgagttcataagagaaaatatctaaattcattccaacaaatt

SEQ ID NO: 8892 - DNA, 522 bp, Cannabis sativa
tgctttccacattcacccaaatggacgttttgtcgaaccgaacttcagatggagtgagccaggagggcccaggcataatgacaataagagaaccgcagacaaaccatggacgtctcgcaagaacgttcatagcatcctccctgttagcaaaagtgaattgtaacaatccaccttcaatctccagcgcttaatggaatgccacgataactttaaagagccctgaatggccgattttccaagcttatatctactaacaattttgccaagcagtacaaggttagattcttggggttcatcaacctctccagggtttagactaaaggtgatatcgctttgggatatctgaactgcctcttcgaaaaggttacaaacactagaggaatccatgaggaagagaataatattgaacggggattagattgaagagcaattgtgatacaatcctttatagacttcattgaagtatactcttagagagcattcacatccaccattctgtttatactagttaatcataagtaa

SEQ ID NO: 8893 - DNA, 1479 bp, Cannabis sativa
ctctctctctctctctctcaagcaactatctttctttatagagaattggcatttttcctaatcttcattacagtgtcttataagttgagaatacactctaataaaaaaaatttatccatttcattaaatttataactccattcttatcctaagtgttgaggctgatctggaagatctagttcatcaagctcatatagctttggattggatgatcgaacaattataccaaaagatataaggatcattgataggcatcaagaggtaaaatcttcactccaagtagttagatttaatttatgatatattgtcttgagattgagggtttaaggttcatatcggattcaataaatattttttaaaaaaaccaataatctaattttttgtttgactttgatatggaccctaaaaactaacatcatggttctcacattatttgggataatattttcttatagactcaattaattgatttaacaagttaattacaatttgaaaataagttatgttttgtttacggatttttatttaatttgggtaaatttgagaagaaaagagaaataataatttatttgttaattaagatattttgttagtttaattagtaaatatatttaaattgtatttttatttgataattattttataattattaaaataaaagttagtatttaaataattaaatttgataaatgataaaattggaaaagacttttttatttcattaaattgaaataaaatggcaaaaaaattaagggattacaacacatattaaaatttctaatttttttatatttttactgtgaggcggaattattttaaaaaaatattatattttattttcaaaaatactgtgtaagttttatactgtgtgttaagttttcacagttattttgtagttattctactattgttttaattgttttgttttgttgttttatggttcttttataaaaagcagtacttttataaaaacaatatctatatgacagtaaatttgtaaatttttgtccaaaattcagtatttttgtaaaaaccccccaaaaatcaattccacgggctttccttagtgaattcggccatgaaggagattttatgcccatttgttccgtcggtcaagtcgtttctatcaaacacttgcccgctggccttcgcttccgccgtccaccgtccgccgtccgccattaccgagttcactgaagaaacctaagacctcaccgaaaatggacaggttaggaggaaaactcaaggtgttgctttccatcgtttcagtctcagcactctcaatcttaatcatagcagagtatcgaaggcgtcggacattaaagtgcccccgaagttcatgttatttacaagctgaccacaagccacagttctcgttcaagcgtgttttagctgataattcatattctttattcaagcatttcaagatcacaactgattctactaccagtggtacatccttttttttttttttttttt

SEQ ID NO: 8894 - DNA, 676 bp, Cannabis sativa
ctctcaaccaaacgccaccttattctcttgagcaaaagtttaaattacgactcctttgggaaaagatagtaaaaattagaggttagttgtgctttgttttctgggtgaatgctaaattaaggtgagaggttagatattgggccgattaaagaccattcaagtatatgcttggctttggtgcctgtaaaactaaatgagtactgcaagaggtaaagggcttgtataaattttttaactcatttgcacatttaggaaaaaaaaactcatttgcacgatataagttagcgtttggttggaggtaatgaaatttttgtttgcttgcattttaaagtattggaatgttatttcaatagaatgattttacatgattttaatagaatgattattctattttaaaattaaaagaaagactattccaatacaaaatgaaaaaaaaattaataatttttttatgcgttataaatttgattctattcctattcctattcccattttcatatctcatttctatgttttcattccttctaaccaaaacgctatctaagtatcattgaaaaataatctttatataactgtgagttattccttagcttgtgctgataaaacttgctattgtcaaaattagtttttttggttaatgaataatgtgttgctctcaagaagaaaccaatattga

SEQ ID NO: 8895 - DNA, 1260 bp, Cannabis sativa
taactttaatttttaggtatttaattggcatgacttgctagttaagtttaattggcatgattgtaagtcatgccaattaatttcgctaaatgttgtactaactttatacaaatatttttaggtaaaattttgtataagtactaactttaatttttaggtatttaaatatataatattttagtataaattaaaatttaacataatattatataaaaatagaataatttgcggcataattacttaagtttcattttcagttgtaaataaatagttaagtttaattttttacggtaataatacttaaattatatttttaaaactttgtaggtacgtggtctttaaatgtcaaatcattatccacgtgtcatttttttactggtatatttaaactattttttttagaaaaataaaaatttaataacgtggaccaattaagaaataccacatgacactttacttaaaacttagagtcaggtacctacagaagttccagatatataacttaggtattattaccgcaaaaaattaaacttaggtatttatttacatctgagagttaaatttaagtatttatatcataaattactcataaaaatatgatatataacccaatttaatataacatatataatacaatacgacttaatatgttagagagtcttacattgctaaggtgtgaaaatataatagaatatataagatccataaactactcatctcatagtcaattaattttgagatagaaactcatgcatcttatcttgaattctaatatggtatcagagcaaaaaaaaaaaaaaaaaactgtaacacaccaatctaatcccaaaaaaaaaaagttgaacgaaacaaaagtagaaaaaaaaaagagccgccaaatctaaaaattagaggtaaataaaaaataaccggttgtgatttaaaaatagccagtcattaaaagggaaatagtattacattattaaggtataaaaagataataatgtatataagattcttgaaactatttttcttatagccaattaattttaaaataaaatattacaaattacaatgacatttctaataatacaacacaaataagcacatttttttatgattggattcacattaacatgtttaaataacttgagttttcacatgatttgcaaaaactatgaaacactcaaattttcaatacaagtttctattatatccttttgttataagggattttatcattaaaaaaggcaaggggtattctttaattagaaaaataaa

SEQ ID NO: 8896 - DNA, 1501 bp, Cannabis sativa
taagatcttggtaaaataaattcccaacaccaacttgaccttttgcacttaacttttatttgtttccctacacacgctttgagacttatttatattttgaggagcttcccctctattattgcgagtgctctttcttgtggggctatcattaggctttcactctcttcttggactgcttggggtagctaatccctgtattccaaagagtttttggtttttttttttgcttcgttcactttgacaattttaattgaaatgtatagtgagcaagtcacaaagacgtgtgaagagtgatgaactccatatgtagagtgaaaacttaacatttcattgataaggtgaacatgtaatttcccaaatacatatgcaacgttctgaggtcaacctaagtgctctctttgatttagtataatttactaaaggtaaacttaccattgctaggtatgctctcctatattggaacttcacttttaggaacatcttggatgtttgatttttacaagttgtatcgcaaacttcacttgaatgtatcagcttacgattgtttggggtatcttctaatagaccctgtaaggatttgacaagcttcccaaagaacactcacttgtattttctctatagaccttgctaccttcatccacacgaatgtctttctccactcttttattttgaagtcatctgtgccatctaattctctttttagcaaattcccccatagtctccttccaggatatagtctagcagctatgaaaaacttgagttcatctttggacactttccctactttggtaacttcagtgttgaagtgctggatgtagctttgcaagatttatgtcttcccttgctttacattggtgatactagtgacgggcataatatgatcacatgcagcctgatattgttggaggaattcacctaaaagttacttcaaagatgtgattgtccccagtcctagccatttaaaccatttatatgtgacttcatttgatgtgaccatgaaacattgacatcttgccttacatgacacattttcatcttcattagctcatcaaatgcaccgagatagtactttggatcggtggtaccatcatatggtgtcacccataactccttaaagtttggtgaaagtggttccatttgaatctcccttaaaaaaggagattcttaatcaaactcctcattatcatccatgtctccatccgtggcgataactatctttcaacgtaggtcttgcatccctgcttccatctccttcatcctttcactaatcctctctcgagggttaacaagtggaacttgggccttttttgtggtttgccttgggcccgtcagaggtactcttcttgtccaatcagtatgtgacttatcactaaagttgatggatagggctgtacgcttgccttgcctatgtgcggagacataggcgaggtgcgccctagtatgagacctcttggatgaactctcttcctaagattatggtgttgggttttatgacctaaat

SEQ ID NO: 8897 - DNA, 543 bp, Cannabis sativa
ttcttatcagttaagaaatagagatataatttacactctacccaaaaaaacatattaatagaattagtgaaaaccaatagagattgattcacaaagggatatcccaaagacatttccggatttatgtatcattagattatgggtattgtgagaagccgcataagctaaagtctaagatgacatataagtctaagacatgattatgattatgtaagagaattgattatcaaaattcatgttcattacatgaatgtgattcttaatcatcatcttggttattaacaggggagctagcaatagccaaggcattaaagatggattgaaccttattgacatagttggaaatggtaagattacttttttgaatatgagaaattgacctttcagctaaagtcgatgagccttggtttgactcgagaatttaagttcaagacaacaccaaacaatgtaggaagtgtggtaatttgccacaaattacagaataccctctgtcatggaagatcaaattcgagagagtaaaagttgataattttcatttccttt

SEQ ID NO: 8898 - DNA, 717 bp, Cannabis sativa
ataccattaaaaattttaaatgtaaaaaaattccataggagagtggtaaacttataagtaggactgaacatcttgattgagtttgatccggacctggccaacccgcttgaacccgactcggtcaacatgtaaaatttaaaaacctattctgttcgaacggatcgggtccaaccctataaactttcgggcaggttcctagattgattttttatggccatcgaattttaggttggacccgaacgcgcctaccaaactagctaattttttttttttacatatgtatattatacagggatattttcattaatatatttataaataaatattttattcaacttgggtaatggtaatatgaaaattcgttcattaatatcaaagttttcttttaacaatttactaaacctaaagaaaaactacataaaataaacttttttttttcttaaaaaacaatatacatacaaatattaattttgtttaaattattactttagaacaagtttaaaatatttaagtaaaacaggattatgaatttcacaactcaatactaagttttaagggattttttttgataaaacgacgaaatatatacaaatagttaaaagttagacctcgctgtcattacaaaaataatagtcaagaatagaggaaatttcaaccatacccgaaatgttctgatcagaggcccatctagctacattgtgagccgtaaaattacaa

SEQ ID NO: 8899 - DNA, 1000 bp, Cannabis sativa
tgaagtaattaatgaatgttagaaaaaaaaataatattttacgtagttggagcattaatgagtcttagtctacaagtcactgtattaatgagagtatttattataaaaaatttcagtcggtccccatttatgtatatcactgaggtatttatagacttgtgatggtggtcaaaaggcttctattgtcgtgtttgtctataccatacttggtacaatttctcaaccctaactttgggcataattacctatcttatgatggattttaggttgtctataggagttttgtgggatgtgatttatcccttgtttatgatttgacaactcacttatgcagccgccgattgatgtgtggaggttcgtgaaatcaaaaaataatgagcttaaacccttaaacacgcttggcaaagtaaagtatgttgcatcaaatgtatgtagagtgtcttgatccttgagtgacatgccatctcttattagtgctctggttccattcttcgtatgtacttcactcgtggagcggaaggggcgaaagttattcgtggagcaaagggatcctcccggagatgactaccatgttattactccttggaaataatgagtttcgagagtaattaaggcaatatgtcctgtacacggattctgctgccacttgacccctttttggattgacacgtatactgggagaaattctacacaacaggtattattactgtcaaaaattaaacttaagtatttatttgtaactcagagttaaacttaagtatttatgttacaaattactcttaagtttaacttgcgattacatatatttttttagaatctttgtatgtacctaaacgttaaatgtctaagtgaatgaccacatgacagtcactccttggtacgtttgaaagttcaagaaatataacttaagtatttatctgtaactgaaagttaaacttaagtatttacattgcaaattattcttatttgtttagtttttaattctaaaaaagataaatac

SEQ ID NO: 8900 - DNA, 1291 bp, Cannabis sativa
taagttacaacatttttacttacctataacccctttaaatattattatatgttcatcactatatatacacatatagatttgaagaaatgataatcacaacaagttaagagtgggatacaaaatacaatagcttcattgaattttttttattacagtacaagttaagagtgggatacaccacacaagtgcatcttcatggaattggaaggtggcacaagtcactcggtcatttctgacgacaacccatgaaatttagaattctctcaattactgtgagccactgctcgactttcatgacatctggacttcctaaaaaaactagaggcgcctgcttgcaaaatctttcatacaaaggctccatacggttgcaaataacaggttgttctgttggtactgctagaaccaaagcagcaagcacttgcggtggaggcactgtaggaggaccctgctgtcttatcctttgtatttacttatcttgctggttaatttgggcttgcatttatgcaaacttttgctcccaatcctgaggagctggtggtggattttcatgtccacatccttaacaccttccacgacctctattgtaatgccctaatgaatatgcatgctatggtgatcttttgattattgtgcactcttttgctaatcaaagggttttctcaaaaattataataaattaaaagttttaactaacattaaactttaataactacaattacgtaattatacaaaaaggtcgggatcccacttttaaacttgtttacatgttcaaaataaatgttataactctgtcgcacaacgactacaaaattagcccaagtcgtcccaagaccgaactctccaggtcataccatcttgacatgtacaatcatccttgagctcaagactcattgctgcttagccttagtcttttctctacctacacatgcaagcaataaccgttatagtcgacaaactcaataagaaaagtatataaaatacgatataataccgacttgtatttagacgcccacacacttatccacaaggcttaacagatgattaagaacattcttaacaaaggtacaatctctgtaccacatgcactatgtaccgctattgtactagtattggtagagtttgaaccgtacccctgagcagttttctttgaagtttcacctaccttttcttttctcttgtccttatgaggatcataggttctaggatttttaggatcaaccttctcggtaatattaccttttggaatcgtttgattggttctgcttgtagcggttagtgctttgattacaac

SEQ ID NO: 8901 - DNA, 1320 bp, Cannabis sativa
taataataataataaaataagactaccaaaaaaaatataataataattctatttacactaaaaataattttgatgacatgtacatcaatatttgaaacatgacaagaagaaaaatattcctggagtgaagaaacttgagtcatagtagacaaattgagaaatgatctttaagcctgtgcctagagtgacttcaaggttccagaatgggtatttagatccaacaaaattgtttctaagtcaccgtattttagtattttgagtaatgaagacatgaagaattcaagtccaaggctcgggagctgaaaatacatgaaacaacaccctaaaagtcaacctgggcacctagggtttcacccagtgcccaaattgacattccaactaaagtttcagtttttgggattgtcaaagtgaaaatgggtcaaactttatactaggacatgaattggacatgtcacaaacatatttgaggtatcaaaatcaaattcgggacactttcatttttgagcacccaaagcaccaagtgcctcaggcacacagtgccgaggttaacatattgtcaatttgggcgcacttttaagcattaaactaaagaactatcccgaacattttctttgtcttcatacaaaatgagaaaacaagtgcttttaggggagaaatagaccaacctggaggccagaataagggccagcacctaggttaacaatcaatctggcgcactggcttcaatcacttaaatattgcaaattcttctttcagcattgtctctgacatggtcaaaaacagggtaaaagacctcgtcttcaatttcaagaaccttagacatattaaaacgacatactagaagctctagaaagagcacatagcgccatggttgacgtatgacctggtcgtgggttctgcttatttgattttcattctgtcttgagcgtctgtctagtttttcatagtaaacgagagctatatatgaactcaaacaagttaaatttacaacttcatttttattttatttttgctttttttggaaaagtgacttagtcacaaatcaggtagtttcgagtcttctaattttacgaaacataaacatctttgagaactggtgaacgactttaccagaacaaagaaattgactaagtgatgttaaaatatcacttaggtatctaaagatacatccccagcgtatttttctactcacctagcatccaagttgatgtcatatgtcaacatgggtgatggatgtcaacctaggcattggtatcagagtagacttcaataaaatgaccatcactcactcaataataatctgattgacgcgattcaact

SEQ ID NO: 8902 - DNA, 598 bp, Cannabis sativa
atttatgtgtaataatggaattaattaaggagaagcttatgaaaattaaacatgtaattatatatcacccaccaaaaataataagttgccatatacacatgcccacttacatacttaagaaattattacaatcactaatattttttttcttttaatttatatatatatatcattaaagtaattaataataagctatatatagctctatcaaaaaacaaattaaagtaaaactaattacatagttgtagtggtgattattaacttataattaattacttggtgaaactgcaaaatcactatataaatataaacaatatttttcttataaattagcatgtaataaattaatgaaattatatatgaattaattaatttcaagatgagcagtatatatattgaaacaagtagttttctatatatatccattgaaccttactgacttactgatcgatcatattgggaggcccccctaattctttaagataattaatatgtcatataatttatatatacatggaaaatatcaatctgtttctattgaaaatagaagttttaactcttttatttctttagtttcttctataattattcaatcttc

SEQ ID NO: 8903 - DNA, 723 bp, Cannabis sativa
ttctcccatcatttatatgctacatgaatgccattatgctttatagagtttacacatttttattaccaagattaataataataaataaaaaaagtaataatcaacaaacagtaaaatcttgtgtccaatcataaacagtaataaaaattaccacaactaaatggtcatccttcttgcaaactgctgaagcttggctcagaaattctggattttttactttacctggtgatcaaccatccccataaataaaacatagataatgtcaaaaaattactcctgtatatacttctttccctcttaaagatgcaaaaaaattaatctgaaattttcaacaccaattcttgattacttttgatgttcaattcatgcacatcgttttttaaaaatcatgtatatagttggtaaaggaatttgatgtcaaagtttaccttcttgggtgatgaacatgtaaggaacgttcaaggcgccttcaacatgactcttattaaattcctcaacggttctgcatataatataacaagatacttaatttcataacatatcattaatagaggcatgtgtgtgtatataaatatttgattaataaaatttctatcaacttagattagtaaaatttctgtttgtttgaaactcagattttttggtagagaaaatatttgattagtgaaaatgcagaatagtagaagaataaaaacaaaggagagatagtgctaactaacctga

SEQ ID NO: 8904 - DNA, 596 bp, Cannabis sativa
gttgccttcattgtcaacaaattaagtcaattcatccacgctcctactacggttcactgggaggcttgcaagcgcctctttcgatacttgaagggcacaattcatgaagggttacatatcaaaccgagtctgcacatgagtctccaagcttactcggacgcggactgggcaagctgtcccgatgacagaaaatccacaggcggctatgctgtgttttttggtggtaatctagtttcatggtcagctaagaaacaggccgtggttgctcgaagtagcacagagagtgaattcagatccttggccaacacagctgctgagattcgttggttatgttctttgctctctgaattgcacatgtctcaaccaactccaccaatcatttgggtcgacaatcagggagctgcttctcttgcagcaaaccccgttttccatgcgcggtccaagcatattgaaatagatcttcactttgttcgggatcagatacttgcaaaagaagttgaagtcagatatgtgccatccttagaccaaactgctgatatcttaactaaagcactcagcaaagacaggttcctatatctcaagaacaaactcaatgt

SEQ ID NO: 8905 - DNA, 682 bp, Cannabis sativa
actacttccttaagcttagtatggacattagctttgttagtaaacaatagacaagttttaaagcaagcccaagaagaaattgatcgcatagttgggaaagaaagatgggttgaagacaatgacataaaggacttagtttaccttcaagccattgttaaagaaacattacgtctctacccaccagggccattatcagtgccacacgaggcttgggaagattgtacagtttgtggatattcagttccaaaaggtactcgtttgtttgtgaatgtgtggaagttgcaccgtgacccaactttatggtctgaccctgattcgtttttgcccgagaggtttctcacgagccatgtaggagttgagggttcgggtcaccattttgagttcatcccatttgggtctgggcgacgagcttgccctggaatgacttttgcgttgcaagtcacccatttgactcttgctaggcttcttcaagggttcgaatggtctacgccaaaggaagctttggttgacatggttgaagggttgggtattactttgccaagagtgaatccacttgaagttcttttaagtccacggttaaatagtgaaatgtattaatttagaataaatttaattgttaaatgtataaagtttagaagagaattgtgcttgcatgactttatatggtgttttgttttagtaa

SEQ ID NO: 8906 - DNA, 784 bp, Cannabis sativa
aaataattaaatgataattataatctaattataaataaattatgaaaaacagcattatttttagtaaagaagtatttttataaataaaaaagttcaaagtgttaaaataaaaatttatccccattgaagtagttttgtaattttttttttttaaattttggtcatgtaatttttctaaaaaaaatatcaaataaaaaacttgtttgatatgtataataaggatcatattttattaaataacaagtaacaatacgttttgttaatattttgtattgtattaattattatgaagataaatttaatacaatgtaaattgtattatttaatacataacaaataatatgtattagcttgtattaaaatatttagaaaagattctaactccgacctgaaaaataaacttggaacttgatccccgaactccaacacaactcgaaggtcaaaatctagaaatgagactgagattggggttggggttgagtttattttaaaaataatataattttacataacttgctaatacaattgaatatcaaaaataatattgtattaaataatattaatataatataatataacatgttgaccaaataaaatccaaagtgtaataaattttacgtgatcaatttagaaacggacaaaaaattaaatattatgacgcaatctaatttgtgatttttaaaatatataaatgaggtgtacctaaataattaataaactttttataaatatttctttcttagcttcgtttaccattatttgatcggtgatattaatagtggtc

SEQ ID NO: 8907 - DNA, 533 bp, Cannabis sativa
taattatgaaaggtgatcatagattcttaaggatttctcaattatataagacactataagtttaacttaatattctatatgtattgcgcaatagtgtcataaaactattaatatcactacaatatgtcatagtgagataaaactattaatgcaatttgatataagatcacaaataattaatttaataaaaacattgttattaggcactagtggtgcttagaaccttttccatatatcgtgttgtgattgaatagcgatactccctaaaaattattatattaaattatatgggacttaatatgtaagagggtgctggtgcccttagcatttctcatttaataactatagtaatacttggtataatttactattattttataaacatataacttactacgttaatacctatgttagacaatccataattctcattagcatttattttaaaaaaaaaaaagttgaatgtgtaactaatttgagtaatgaatgattaattattacctgaggaattatggtgtggaggagaagactta

SEQ ID NO: 8908 - DNA, 1360 bp, Cannabis sativa
ttcagataattcttttctttaacatggtatcagaggaggttatgtttctcattctcgttcttgaaactcgttgatgcttagtcacccccttttcatcgttgatcatccatggaatcctcaccgactctctcttctgcaaccagccagaacagagctgctgcttctggtggttcaccatttaaccccgttgttttctcacagaaattagctaccaagcttgaccatgataattacctgttatggaggcctcaagttctttccgccattagaggccacaaactccagcaatacatctcagagacgttcactcctccacctcaatttctttctgaacaagatcgaatcactgataacatcaatcctgcgttcttggactgggatcaacaagatcaactcttgtactcttggcttctgtcttctatgacggaaccgattcttactctcgtcgttagctgtgaaacttcaccaagattatggtctgttctctccacgtattttgcttcacaaactgaggcgaaaattgatcaattcaccactgaacttcagaatctcaagaaaggtgctcataatctcaatgagtatctcttaaaggtgcgttccctaatcgataaactcaattctgttgggcataaaacttcacaaaaagaacacatagctgctatctttcgtggtttgccttctccagattatgacacgtttgtcatctccgtaaattcaagagccgaacctattgatgttactgcccttgaagctcttcttctagctcaagaacatagaatcgaaagaaagaatagagatcttgattctgcatctatcaacctcgcaaactccaactttcgatctcgaaacaactctgggcagtcaggaaacaatcaatggaatccatatgcaaataatcgatatggtggaaactcaaatgtccctccatacagaccaccaataccagggggaagaggcaataacttcaattcttttggctcaactggaaacacaaacaattcgaatcgtggctcaaatcaaagcaacaacaaagttatttgccagatatgttctcgggctggacactatgcctcaaagtgttaccaaagattcaatccttccttcccaggttttggatcacaaagtcaagggcacccctcagctatgttagccactgcagaaactgtaaatgacgagtcttggtaccctgactctggggcaactcaccactgcacttctaatgaagacaatcttgcccagaaaaacgaatgtcaagcaaatgagcaagtgtacatgggagatggtaatggtctgcctgtgcaaaatataggtaaaactcaaattttttttggcttcagataaatctacaatacttactcta

SEQ ID NO: 8909 - DNA, 898 bp, Cannabis sativa
aagacactttgtgttgaatgagcattgaagaagtaaagagcaatatccaatagctctgtctatattaaatttcagctatagggattgcttggtgaccaagcaatttgatcttttatttttcttaattatttaattaactaatttcttagaaattaagctcttttcctatatattgtctcatcttttagctataaatttaaggttttgaagaaccgttttttactctattcaatgcacttattattgaagtgaaaattctctccaattccttctatacccgccgcccactctccattttcttccttctctaatttttcatgtagtgtaattgaggaaatatttgcacactattcgacttagtaccttgatctttgtgtaagactatgaagaaagagatagtgttcgtgtttgtttgaagagtagggttcaatacttggtgacactttactatatataagaatcaaaaatttgagtactaaacggaacgagatcattaattccgctgccacaactctataagtactctcaatctcaatctcgtaaaataataatacaatcatgatattaattttttcaatataaagttctttggtgaagtattttgtctaacatccttacttttcgtgtgaccttagctactagaattccaatcaatgatctgtggtgtctactttgtggtggtgaggacgagacaacttaacatatttttatgcattataactttgcgtatcagctttgacagtttttgctttgggattttataccaattgggatgtttttgtatgcaccgataaagatgccaattgttaaaaacttacattgtatatacgtgacagtaaattctcaaaattaatgaaaacatgtgagatacatataagtatatataataactatacat

SEQ ID NO: 8910 - DNA, 880 bp, Cannabis sativa
aatctaattttaggtgtatggccatattatatttttttacatgagttttttttaataaatagttttgtaaatagtgtagagttataatttttttaaaaaaaaaaaataaactactattatattaaaacaaaagttataatacaacaagcatgagaggagaagattcctccaaccatgaacatttagcattacctatagccaataaacgtttagttttttttttcatctttttaatgataaaaattaaattactaaatatactattaaaaagtgtatgtttgtggctcttgtgtttccttttttttttttttaataaattacaattaaatcgaaacattttgtggatgaaatcaaaacttgagatttaaaattgaaagcgaaactacattaaaagaaataatgtagcagttatggcggtttaaaattggaccatgcgattgtctccagttccttccatggttctcttcttagccacgtggagtttcccgctcctctgacgatgatggccaaattcacatagcaaagaacaacatggtggcattcaattgcctcacaattataggtttttcaattcctttttttttttcgtatcttaactttttgatttgatcttaccatttaatcaatcgttgaagcattcagttgagtcgtattataatttataaatgttagataagacattgcctattacacatttcgactgcttattctcagatttttaaagttattgtgcatttttcgatgaagatacataacaattttgtgaaatgatggctccattgttgcggtgtttgatttggctaaggatgtcctttgaatagacactatatatatatatatatatagtgagtctggatctgggtggagatgaagatttcag

SEQ ID NO: 8911 - DNA, 1010 bp, Cannabis sativa
tatataaattagttaataaatttattaaactgtagaatacaaaattgttgcaattttaaatggataaataaaaaaatattttatttcaatactaacacaataatttatttaaaatgtttataatttatttttttgttgaataataatgttgttattgtttattatatattactaatgttttatgtttattacaacagtggtttacaaaaatttaaattattttaaaatcataaaataaacaatagaagtggaattataataaattaataataaacaattttttttagaaacataattaattattataaaataaatgtttattattcattttattttgattaattataatttaattattttttattgaaatatagtaccaaaataattatgtatataaattttaaaagtgtgtttatttaattttagttttaaaaaacagttaaatcagtattatatattagtgtgtttcaagttaaacatgatagttatagtactttatgtttattatgacaatgatttaaaaattcttaataataaaaaatctttataaaaatacaaaataaacaaatttgtgaaaattgtaaacgtaaatattaaacagtttttaaatttataaaaaaaaattattaagaaatctatgttctttactcattttattataaataattaaattttaattaattttatagtgtgtttataaataattttaaaaaataataaaatgtgtattatatattattgtgattcatgtgtgatatcataataataataatgcttcatgtttaatttaacaataattttgaagtttttaataattaaaaatgtttataaaaacacaataaaaacaaccttgtgaaattatataaataaatattaaacatttctaacatttataatccgatgtatcacccacgcaattcaacccagatatcaaagcaaattcggcaatactaaatctaaccattttacttcttatagagaaccatatctcttcactattgggttgctta

SEQ ID NO: 8912 - DNA, 532 bp, Cannabis sativa
aatgttaagaaacctaagaaacatggtccgacgtctactacggatgttaggaagactaaatccatgatagaggtgttgggaatcaaaccagtagctttcacgaatgatgaagatactctgttggtggagtcaaatcagggtcctctcgaatcgagatcaaagcaggaagtggagttagcaataactgatatgtttactgaaccactgtaacccaaagcctctatgggatcgattagcaacaggaagatatcaaagcagacttcaacttctttcttactgctaatatgcaatgtttcaagagcatctcacaaggtaatcctactaatcctcctgtactacattctggtgctattgtaaggaatttagaaaattctttcaattatgaaaaggagtgaaaagttaagattaccatggaagatatacaataagaggtagctttatgggaatcttcaattgtttgctttgtgtttggagctaatccaccactctcaattcttgagggctttgttagaaaaatttggaaggataaagt

SEQ ID NO: 8913 - DNA, 518 bp, Cannabis sativa
tgtatatgtgtttttttggtttgccgcgcttaattttaattatatgttttgtgacgtgttgtgttaatttataacattttatcgaagtttatcaaagcctacattttctttgtacctaattgtattcgtgccagtttgatcattctagagactaatcataatatattttttttttttttaaaaaaaacaaattattttcatggtggtatatttgctccatttcaattgtttgtgcatgtttgtcctagttagagttggagatgcatttgtttgtttttttttggcacgattgactgaatattgtttatgtcatttcatttataaaatccacgtggctctgtgaattaaagcctgacttataaaatcatttgtcctctcatctcatccttttataaaattattattaacttcctgaaaagaaaagagagagagaaaaaaaaacattccatttgccttaggaaataaaacgacacgtcgtttctgcacttagataaaacgacaaaaagaaaagaaaagaa

SEQ ID NO: 8914 - DNA, 881 bp, Cannabis sativa
tttatatatttatattacacacaattattttttctgaacggttcaaacctaatttttaacaccgtaaactattcataatttttcaaaaattaacaaataattctaaatatctccaatatataaaatttgtattgcacttactattacttttcttatatatataagtgttcagaatttttctgtaaaattagaataatttttttttttaccaaaggaggttttaggggtatactactgaaatttactttctgtttttttttactattacagtcttaattatttatttatatataaataaaaagagagtgaaaaatgtaatctaaataaactaaacccaaatcgatcgaatgcccatttcctatttgcaccgacgattttggattgagttttgagtcagagactgagtttgagtttgagtttgagctgagaagatccatggcgtcctctctctctacaggaggaagatacatggcttactcaccatccccatcatcgcctcacctactctctgctcttcgttcagcttcatcaacctctgcttctctcatcgtcgatcaagaaaagtaatctcttttttccatccccgatccactttctcattctcatcgcttatatttattactcattactcattgctccactctctgtttttttttgttttcttttgatttgatttgatttgatctgaacttgagtttttcgtgatctcaatgacctgttttgttttctgtaattcgattggggattgtgttgagttatgatgattttttatgaaaggcttgatcttgattctcttctttttgtgttgtttagatatctggctgagcttcttgcggagcgtcttaagctcactccttttgtggctgtgcttccacattgct

SEQ ID NO: 8915 - DNA, 571 bp, Cannabis sativa
gtagtgagtctgagcattgttgaagacaattgttaaactcagcaagtacattaccagtaggagaaggcttccagttatctttgattattgccgctgcttcttcttccttcaaccaaagtttttcaaatcgaaaatgatgtggtttttgttgtttaggcagtgctgtgagggtcgtgacttgaacagaaatagcccggtgatcagagttgaagaagtctaaatgttgtgtgacaatcgtttgaaaaaaaccagcccaatgaggattgacaaaacaccaatcaagtctttctttaatggtgtcaactgtgtgcctaccttttatacaagtgaatggatcacgaagaaaaggttgttcaaaaagttggcaggtatcaagagtagatcgaaacctatccatttgtgtctcattttgcaaagaaccaccagacttattgttgttagatagaatttcattaaagtccccgataactaaccaaggtgttagaggtgctacatccttaagtctttcaagcaatgtccaggttaagtgatgattatgagcagctggagccccataaaatgcaaagaattg

SEQ ID NO: 8916 - DNA, 814 bp, Cannabis sativa
tcatggaaagtttattactctccatccttcgttagtaggtagtatgcaacatttctctccataatatagttctagtgccaagctggttattttctctcctgagttgacctcgaaacttttggagtttcaaactcagcttgctcttgttcttcatgctccagagctgctttagaagaatttggatcttcttgatcttcaacttgtattgtggtagtctctacattatttttatagtgctatcatcttctattgcttgtactttattttctaagtgggatcccataggcggttccccttcactccatcaacataccctaagaacacaaaatttatgaatttcaaatcaattttagatgtttcttgggtgttgtacatgacatacacatgacttccaaatgtatgcaagagagaatatcagctagttctcccgtccaaatctccattagcatctttagatcaattgtaattgatggtgaccaattgatcacataagacagtcttgactgcttcaacccaaaatgatttggccatctttaaagttctcaacatcgctcttgtcctttctaacaaggttctgttcatccaccctgctacagtgtaactccattctgttgtgaagtgtatgccatcgtgaactgtcttttgatgccttcctattggtaaaagctatcaaattcatcactggtatgttctccttcattatcaggtcccaagcacttgatcttcttttctgattcaaactcaatttttactttaaaggttttgaaaacttgtaaaacaaataaatttctcttgattgatacacccaacatct

SEQ ID NO: 8917 - DNA, 984 bp, Cannabis sativa
ctctaaatgatactatctattaaatcattaatcctcccactttcttaatttttgacacaacaaactgggcaaagaagagagttcacatgaaatacttttgccaataaatctgagtaaataagttttcattaagagcttggcaatagatgaagcaatatttagaaactttaactttatgccaaacatcattgtagtaatggactctaaggacatgaagaatgttgtaaaatcttttagtcttgagaacatccttccttcgtgcttctaacaaatcggttttattaatcttatctctaagattaacaagtttccaaaaataccacaagaccaaaattcttcattcttacaatgtacattgacaagaaagtttcgtctcaactaatatactagaaaaagtaattttaaaatataaaaaacctaaaacaattctttattattcttaacttattatacttgaatttaattaattaaagaattaaattgggatcaacacaagacaaggttgtctcctatacctgctcagatttgcaactattacctccttaactgatgtgggatgataaataaaaatcatatagaataataattaataggatttttttttcttaaatattgatagagatttacacttgatcttcctaaatgtacctctttcaggtgtattttgtttatttttctaattaatttgcaaatgtggtcaaagaacataactataattgaattgcaatggttattgttaaaaagaaacataactataattgcagtatttaactcacttaaactagttgaaattaatttaattgttactacatatatagatattagctctaaaaatacaaatacataaacataatctcataatttgtcatttgaccactatgcatgtattaaccaggatgcaatatatatgtatatattttaatttatccctaataaatttttgctaatattaatccttaataaattgaaggatcaaatatactt

SEQ ID NO: 8918 - DNA, 1449 bp, Cannabis sativa
  modified_base (1087)..(1098): a, c, t, g, unknown or other
aaagtatcatactattatccaatatcatatatttagtttaataaatattacaaaaaaaaaatatattaataatttactagtatatatttttatttttagtgacaattttttaattataatatatatattttgtgattaaatgtgacttacgataacaataaaaaattacatgtaacttaaatataatatttagatagactaatttaattttagtcacaacaagtattgtaactaaaaatatatttactcacaataaattatattttgtgtgattaatatctttaaatacggatattttggtcacaatatatttactcacagtaatatttttattaattgttgagtaatatataatttagttttacacatgtaattttctataactacaatattaattttacttctagtcataacaaaatttattacaatatatgtatcatgagtaaaatatcctaactaatctaaaatatatatatatatctaactaaaatattcgtcaaaaaatatgtgttgtttttggttgttgtatggataaaatagttatgtttactattaaattaatatagattatatgactaatattacatcagtcatgttactaaatattagtttttttaatttataatttgatcagcttatgtatgcggtgaaaaggagggaataatcagagaaagcattcgagtttggtgaaacgctaacaaaaactttcaccaaacttgattttaaaatagaaatagaattggtcacacattaattgtctcaactttgagaaactaaagcttccgaagcagccattaatgccacaatgagagagtttggaactcaaaggtaatataatttcttattatttaaaattataaatattaattaatattatatatattgacattaatagagatgaagaaaattcgaaattaaaacttccttattttttagtggtccacctaatagtagttttaaaaaataattataaatattttaaaaaattaaaaaatcaaaaattttcttttttactttttttaatttaaaaaattaaaaatgtaatttttttttaacttttttcttctttttcttcttctttcttctnnnnnnnnnnnnttcttctttcttcttctttttctgcagaaaccctcccagccctctttctctctctcgtctcaccactggagccgaagcaccgtctcaccaccggagacccaaaacccccgaaacccaaaaccccgaaaaccaaagcccccaagccctctttcgcttacttgaaagttgcttgttacaattttccttctcaggtctcatagaagatggtatatcaccattttgtttactaagcatttgacccaatgaaacctttggtttttcaaaaccttttccacacaatcccatttcgagctcttcgggtaatagtagcttcctgcttagaatttttccaattgacaatgttggcttcaa

SEQ ID NO: 8919 - DNA, 730 bp, Cannabis sativa
taaataaatatttatattatttatctaatattgtattatttttcattaaaggattgatctaatattgtatttatttttggtcggaattgtttggtttcaattttttttttaatttttttaaaaatatttttgcttcagttcataaccgaagcaaaaaacaattagcgttagtgcattggttttttgcttcggttatgaaccgaagcagaaaccttttttttagcttcggttcataagtgaagcaaaaaaccagttagcgtcggttcataattgaagcaaaaaaatcagtatttgtgtctacggctataacatcggttacaccaactaaagcaaatactttatatgtcacttaaaaactgaagtaaaaagccatttttgtagtagtagtgacacaatattattggcccgcgtaaataaatatttaaaagaaaataaaatataaatcataaaaaaaaacaatttttttaattttttttcttattcctaaaacaaattagaaattaaaattaaaaaaaaataaaaaaaaaacctaaatcccatctcctttacctgcctccacctgagattactttgatatttatcatagcctatactatactgaatccctttctctacccctctcgcactctatttctctcttgttctttctctctctcatgagctctccgcccaattccagcatagcatttcccagccataaatcccgaactcaaaattttagtccctattc

SEQ ID NO: 8920 - DNA, 1226 bp, Cannabis sativa
aatatctaagtttaactctcaattgaaaattaatacttaagtttaatttttagcgctaataatgcctaagttataattttagaacttacgtaggtacatgactgttaagtgttaagtaaattgttacgtgttaatccttgattggtccatattattaaactttttttttaaaaaaaaaaattaatttaaatataccaataagaaaataacacgtggataatgacttaacatttaatagccaagtacctacggagttttagaaatataacttcggtattattaccgcaaaaaattaaacttgagtatttatttacaattagtaattaaatttaggtatttatgccgtaaattactctaataataaattattattttttttattaaaaactctaataatttttttaaaatatttacttatttcttatatgttactaaaatacaaatatataaaataaattaatatgttaataagagataattacataaaatacttttttttttttgaaatttttatattcttacgttcgaatatttttttatatatttttatggcgtacaatgcacaagaccatctcctgcaccgggacttgtaggattagaacgtcatcttatcctttgtggaccactaatgtatttcaagccattagagcttggttaaaagttctttgtaacataagctaataagttgataatacaagacacattttttaccattgttgctctataagttcttaagttacacactaatgtcatgtattttctgacattcatacattgagttttcgaccactaacatcgttaacgagttcacactgtcaacattgtttataagaatattgttaatgttcttatttcattattatgattttaactcctttgtttttatttttattattgttgatctttacatgagttcatactctattaatatattgttagaattataatatttctccaaaatttataacaaaaaatattccatttaaattctttaacaaaaaaataaataaaaaattgagcgtaaaaagaaagataagttatagctttagatttttttttttttttttatataaatatatatgtttgatatattaaactttgaaaaagattaataatatacttataatttaaaataaatacaaataagtacagattagattagatcggtaacttttacatatcaaacaatattcaatctgcataagttcaaattttatattttttat

SEQ ID NO: 8921 - DNA, 737 bp, Cannabis sativa
cttcccccaatactgcagccctagtccatttaatctgatccaaacagggaccgacctcaccattttcacaacatccatatcactagtccacggtcgaagaacaagtttcttgtcgaagtgggtgactcctctttcaagtattaaaatctctagtaccttcatctataaagctaactaatgtgaaaccagagtgcatcctaacaattctttctactcctaggttgccccatattctcttcacgaaacctttaaatacgggaaatggaggattagcccccaagacaatacacactattgaatttttccagcaggaagcttcgatctcaatttctttcatatcaagccgaacaactacttgatcacttactttcaaaggttctttgaattccaattgagtagagggagtacttaccagatttgctttaaatttactccagtgtccttagctgaagattgaaaattcatctcctcgacctcctccgcccaactcaatgaattcagaacaatattggaagtactatttccatcgagatctaagtcagattgttcttccagatcaagttctttacagagatcgtgaaaggtagggctgcacatctagacccgcaaatccgaacacccgaccacccgccccgatccgctgccgaaaaaagccaaaaaatttaaaacccgtgtagtcgggtcgggtctaacccaaaaatagtcaatacggctgtcgggttcgggttttaaaatac

SEQ ID NO: 8922 - DNA, 650 bp, Cannabis sativa
catttattttttgttgttttaggattaataactatttatcggtttctttttctgttgcatattctatataatggaaaaatttgaagcctataacaaaagctactgaatctattatcacacagttgaataatgctttcataatgatgaggatatagtttcagttgatgatgttactattttcttctatctgtcatagattacagtttagcgtcctctgaaccattctagttagaccattgttcattgctgacttagtctcttgagcttataagtttttagacattaggacagggcaaagatataaatgtgtagtgcgttcatttctgaagctccattttgttaacaattactcttgtccctttcgtccacgaactgccatttttgtaaaatcttctgaagattgttacacttttgttaaggtaaacagtaaatactgcagaaaagtcacaccgtgtaacttgcgttgttcattggctatgcgatcattgagcttgggatcaatatccttgttcttgctgccaagttctgatataattgtttggggctcatgtctaagattacttatacaatgatacttcattttcagataattgagattgaaggtgactggggggacagttggggtcgaaataagaaatgctgctgataga

SEQ ID NO: 8923 - DNA, 578 bp, Cannabis sativa
aaaatatgatgatgataatatgggggatggggcaggttcattttcccggactgcagtgaatttcagtgcaggttgtgaaacgctggtatcaaacatagtgatgggcattacagttctgatatctcttcaatttttgacaaagctgctgtattacacacccacagcaatactggcttccataattctgtcagctctgcctggacttatcaacctcaatgcagcctaccatatttggaagcttgataagcttgactttttagcttgtattggtgccttttttggggttctctttgcttctgttgagatcggtcttacagttgcggtaagcctttaaagtaaattataaatatatatacataaagattcacggaactgttatttgatttgagggctgaggttgatttagaggtaattaagattaaaaaatggtaacgtactttaccttgagattcggaatacattccgtaaaagtatatcataagacaaaattatcttaagattttataaaatacacctagtgtagtggcttcagggacccattggcaaatttcttactaggtatgatgggcaaatcatgt

SEQ ID NO: 8924 - DNA, 730 bp, Cannabis sativa
tgtcgaagaatagcttcccttaaggaaataacgaactttaaagactcgagaaacaagtgactcaggtcttgtaagaaagcgccaaccctgttttcccaatggagccaaatcaaaatcacgaggattacgaaaacccaggcccccattgtttttattgtgacacatatgctcccaagacatccatgagattcttttattgtcccccgaagaacttttccactaaaatcttgccattgtgctttcactatctctactaatctccataggtagtaagaacacattcatagtgtaactaagaagagcttgtgctactgacttgatcaacacttctttactagctcgtgataatactttcgaatcctaaccttgaagctttttttgaacccaatccttaaaaaatcccagaacaaccgacttgttccgacccatagtactagggagccccagatacatactcatgtcattttcttggggaaattgtagtagtgcattaatatcatccctaatgtgacccacagtattggtgttatagaaaatagatgatttccccaaattaactttctgacctgaagcactctcaaattgatggaggaggtctctaacatgtgtagtttcttgaagagtagctttacaatataagtacttgtcatctgcgaataacatgtgagacacttttggagcgccattcaccactttacaaccatggatcaatcccttctcttcatatctt

SEQ ID NO: 8925 - DNA, 533 bp, Cannabis sativa
actctagaattttctaagtcgctggtgattttcaacactctccctcaacactgacttttcatgctcagttgttctcttttttgaaatttattgtgttaagtccttctatgaacaggtcagctacttggtcttcactttttatttggtgcatctttagctcttctcagagtactttttctcttaaacaatgatattgcacccccacatgttttgttcgaacatgaaacactggattttttgctaagcgaataacaaactggttatcacaatagagtgacactgaatagtctataatttggtgtagatctttcatcaactgcatcaaccacatactctcttgagctgtcattgctactgctttgtattttgcttttgtagttgataattacattattggttgcctcttgctacaccaagatactactccggatccaagcttcaatacatacctagtagttgatcgttggttatcatgatcttcagcataatttgtgttgcagtatccaacattcttaacctcgtcacctttctta

SEQ ID NO: 8926 - DNA, 658 bp, Cannabis sativa
atcagtactatgacttagaaattaaaaaagagaattgttaagggcatcttaggtgcccagcagtataattgttggtatatatttattggtgcaaattaatattaagtctcatactacttaatttaacaattaatataagaaattgttattaaaatcgcaacgcgtcgtgttatgaaccatatgatgtcttataacaatgttcattaaatatatatatttatttttatataattaaaagaaaattgctccatgcattttatttttcttttatcttgaattttaaatatatccaagtttttaaagttacttgttcatgtcttattttactctgtcttgtcatacaatatatacatatttgtttttttaaagagtcgaattccataaggccataattcaccaaaaacacaaaacagcaatctaatccaagagtttctaatacacttcatcatacctaaagacaaagcgaagcatcttctggagtctgtgttgatgaatgagtagtaatgtagtattgaactcaattaggttgtgaagcaacaaatagaaaaagtgggtgtgttttgttgggttgggttgggttggggccactgcttttcccaaggccccatctctctaatcctgcttttgagatggcaaaaggaatacaaattaatttaaa

SEQ ID NO: 8927 - DNA, 506 bp, Cannabis sativa
tgatttcagataccttataggcagactctgatcctatcaaaactcgaaagatctcaaacatggatgcatatttttaaaggtgtatcaaatatattagatgtttaaactgtttcaaaatcttatattccttcctcaagaaagtgctaaaacatttgatctaccagctacaaattctagcagacagaacaaaacagattaatattattatagagctcataaaacaataatctcttttcagattatatacaagtccaagaaaacaagagagagataactaattttaagatcactttggagatataatgttcataaatgagaaaagttatttgatccaaatactacataactaaaccaaactacccaaaatcagaattcagacaacagaataccaaaaacaatcacaagttgcctttgataaatagaaaatgaaaacctaaattgttgagtatctacatatgacaatcactaatccaaaataaatacataaaatgcaccccttttatttt

SEQ ID NO: 8928 - DNA, 1287 bp, Cannabis sativa
gggaggtcgctgggtctggtggtccttcctccatgaccgatgaaaacccaagaccttacggtccctactgctatggtgcgtgctcatcatgcaaaggacgtttgacgtcctacgtcggtcccatgcatgaagaagacccaatcgagtctagggtcttcgtgatccatctattttgagcaaccctttcatggctattcatggccaccatggccatggtggctctcggagccccagccatggtgttacatgagtggtcagatccttttataatatatactatatataatatattatataatgtatataatatatagtatatatatggtgtacatacactatatgtacactataaattatcgagaattatttgattaataattatattattttgtgagatatttattatttaaatttaatttgaatattaaataaatatttatttaattttggatttgaaattcaaattcaaatctataaccactttaattgtttaagataattgttgtcttaaagtttaattaaatgataaaagaattttattacttaattaaaaaaaattaaagacaaactaatgataataattatattgtcttaaataaaaatgtttatttaaaaatgagttaattaatgtttttaattaatttatggactttaaaattgtcttaaataaaagagtttatttaagaataattaattaaaaatattttaactaatttagagacttacgacgatcctaaaaaattataaaatttctctaggaagtgtatcaagatgatggagcttaaatttgtaaattaatttctaatttttccaagagttataaattagaaatacttaatattttaccccagtttatcgtcattatttatttattatttttaaataaatattcagtaatatttgattaataacatgatcacgcattagtaaataacttgtcatactcccacacagttttatcatgcatctcatagtaaaaatatgatacattaagattgtcctattgtttatgtatttatcgtttttgaagccgaagcatgtaaactgactaagattaatttagaattaacttggtaattgaaaattaatctaataatttaaaatagttttaaattataaattaaaaaaaataatttttatttaataaattgtgatgggaaatttatttataatttgagacttttattataaataaattaatcatattaatcctaaaatagtgagtgagagaagaagtacatgtcaatgtaaactacagtctctattattggtcaacatcgaacacta

SEQ ID NO: 8929 - DNA, 520 bp, Cannabis sativa
tatccgaagcaagatagaggaggtgttgacaatgttattgcatttttttttttttaaaataagaatgaaattaaaagtggtaagtattagttttagagagtgaaaaatgatttcattgatttgaagagttattcaaatgaattacaattacaaatatagatgtttatatagggaggaaagtcgattaagctcataaccaactaaccgaacataactaacaataacaacctataactaacgtaactaatttagcctcttaactctaataggccccctcaagatgaaatgtaaaggtttttgatgttcatcttggagacaatgtcgtggaaatgagtgggaagagaggcttcgttaggatgtcgactatgttggacttggatgcaatgtgattcattttgatggtgccattgttgatcttttcttggataaagtgatactcaatttctacgtgtttagtatgctcgcggtagacgggattctctaagatgtgaatggctgcattcttgtcacaaaataatgt

SEQ ID NO: 8930 - DNA, 543 bp, Cannabis sativa
aggggatatcaaagtccaaagtatcaaggactaaggtgaaatccatcttgctacccctcccgaggctgagggagaaggagaggaagaataggggtagtccaagtcctgccttttggtggctttaatgaaaaaggagaacctatctctgaaataggagaagtcttggaagctagctaggattacgtagaggaggagtacaccgaggctcttcccattaataggaggcatccaaggggagctcagtgggtttttccaccgtccatcctatcattcaagagattgagcaatttcttcggggaaggcctcctcgggcaggttgagtgtttccttccttctcccaggtagctcgcaacagatcctagagatggatactgtatgtgatcaggtcctcacgctaaacagggtgcaatgttgtcactacatctacactttaaggaaattacaaattactaccagctcatttgaaccaactcactcctaagggaattaagtacgtatctgccatgttcatgttgtacgcttctcaaggttgggttcagccgt

SEQ ID NO: 8931 - DNA, 1074 bp, Cannabis sativa
tgcttggcaggcctggaaaccagaacccgccccaaacaagttttttttggcgatcatccccatggctatccatgaccacatcaacatcccttatttcactatgaatattcacatttctataaatatcccaccacattttgctgatgacaacattctgtttacacctgtttctaatcactccagtaacaccatcaataacatcctttgcctttatcacaaaactacaggtcaaacgattaaccttgaaaaatcccccatcatgttctcccccaataccatccctgtagcaaaaaataacttcaagaactcccttctcttatgtaatggggggtttgttaccaactaccttggggtccctaattgcgttggcaaaatgaccagtgataaattccattacttagtccaaaaggttgcctctataaaatgaatgtttagaacgtaatttttttttctaaagcttgcaaggaaaccctcataaaagcagttgttcaagctattccatcttttgctatgtcttattttaagctccccaaagcggcttgccactccttacagagtcttatatctaaattttggtggggatcttgtaacaacgacagaaaaatccactggaagaactagtcgagtatttgcacttcaaagttctatgggggtcttggtttcagatccctcatccaccataaccaagcccttatagccaagcaagctttgagaatttggactaatccttcatcccttcttcaatcccttgtcaaagtaagatatttcaaaaataataattttcttaatgctcctaaaggccacaatccttctcacacttggaaaagtctcctttggggtagagagcttctcaaaaagggtctcctctagaaggtgggtgatggtaaaataatttctttaactcaccataactcgatcctaaaccttcactctttgtctttcctaaatgatttcgatcccactaatcagattatttccaggtttctagatcattatggaaattgtgatgttttaaccttgcaacactgcttaccctcttatcaaattcacgaaatactcaaaattcctattgac

SEQ ID NO: 8932 - DNA, 1590 bp, Cannabis sativa
atcttgttgtacttagtaaggtgggtccttggatatgttcgtccatcataaagcttgatttaaggcatcttgaaattctctgggagcggcgcttttttgatccttctgacacacggctcctggttcttatcttcagaatcggtgaggaccccactctaattctagacaagctttgtcagagtataaatttgttcttctagcctctttgtgtcactgtctaggagatcgcatctgcgagctttatcattcaagtggtttttgaggtcattcccacatggcctcgccttctctcccttggctttttcgtacttagtgtcaagacacctccgaagatctatagtggaccaactgtcatcagaatattgtcccctggtcccaccatcctggataacgaaatcactgaggcagtttttccttcccctaagcttaggtacatttgcaccagtccctttttgcacagcaggacctttcagagcaaaagagcatacaagcccagaggcatcagtggccttctgcgactgtgtaggtctgagagtcacccacctttgccttccccttatcctgtactggaacagaggttccaacatcgataggattttccctattgtttctgttggcacactccactaaaggatcatctttagagtcttcttctagatctccaaatttgtcttggagacgagccattattctcttctttttttgagaaagcttctcctgacgggctagcttctcctgggtctcatgcaactccttagacactcgagccacctctagatcttgttcataatgatacccatctttgtagtaccagtctttgacgtattctctatcatcatctatttcctcctctttatcattatggtttttgttaacattcttacaatgcttgcttaggtcaccctctcaattgtcaacttttgatgtacctctctcacattgctcgactgagcgtgctctggggagagagggtttacatcctacatgacagtgtcgaggccaccttgaggagccttcttagtaactgttttttgtgtatacaccatggttgcagtagcaccatgggcttagatctttcttcagctctcaataaaagcacccaaaatgcttaccaagattttttgaaaatgataacataagagtttaagaaataataaaatacagtagtaaagaggatatgggtttttacatggttctgtcgtcaatgagtcttagtccacgagttagtctattagccttaagaggcttgtataatgtttttacaatagtgtttgcaagaaattctaactctaccatcttggtttcttttgaagaagaagaaaggtcatagtaattttactagagattcagctatttatttttcgatccccccttcatatgaagataaaagggtatttataggctaagggaagggtatggacatgcccatgactcgcctagggtttttgcaataaaccactaatggggtaaaatacatgtaaacgaactgactattaggcctaaaagaaggttttgtgctcgtgcatagaagcagctagacaataggggactacaatttgtaaagaacacatgtcaccaaaagatttcacc

SEQ ID NO: 8933 - DNA, 754 bp, Cannabis sativa
agtatgccctcctcggacagaattgtaactgttcactcaaaacgctctctcaagtatgccctcctcggacagaatttttaaaccctgcatctcaccacaggacagctgcgatcttacctccattcccttggttgaagaaataactgctgccctgaatgagatgggtagtgacaaagccccaggcccggatggactccctcctagcttctactcgcatcattgggatactgtgaaagaagacgtgattgagatggtgtcctatttctttaaccatggttctttaccgcatttcatcaatgacacctccttcgtcctcatccccaagaaggaaggtcctatgtacaccaaagattaccgacccatagcattatgcaatgtttcctacaaactgatctcaaagattcttgctaatcgaatgagatcactgcttccaaggatagtctctccaaaccaaacggcttttgtcaagggccgaagtattacagaaaacacaatgattgcaagagaaattgtccactcaatgaagaaaaaacgaggctcgagaggattcatgatgataaaaattgatatggagaaggcctatgacaagttagattggaattttttaattcaagtcctatcctccctcggatttcctactcaattccaaaattggataaaggcttgcatcacagtaaaggagattaagctacttctcaatggttcaataatggggaaattcaaacctacttgcgggctacggcaaggggatccg

SEQ ID NO: 8934 - DNA, 841 bp, Cannabis sativa
gatttcgaaaccaaattcattggcataggatggagctgagctatggtgcattggatttcaaaagaatcaaggtcaagatacaactatacttggaggtaatctaatttgaactctaacaaaactcttctttgtcttaattatgtttctcttcttggattaataacttaattaagacttaatcatattttgacagaccttgttctaaaagatagaattgtggtctatgatttgggtggtcaaagaattggatgggctaattatgactgtaagttaattatatatatgcacgtaattaataattatatataatttttttgggatagtttttttaaaaaaaaaacatacaaaaacaataaaaatattacaaaagtacagttgtacgaaattttaaatatttttatgatttaatttacagaaaatatgatcttttgatgtatttttatattatactcttattaatttgttgttaatttttgttattttttgttattattttgatattatttttctataacttttatgtagttttcttgttgtttttataaaacatcgtaaaaatattaaaaaaaaaactttcaacgtaaaaatgtaaaatttttacaaagaataatattttatgtaattatattatttttttgggtaaatactattttggatcatgtattttgtaaaaattatcgattatactatctattttgcaaaacgacaaatcaaactctatattttttaaaattgtacaaaaaaataatatcctaagcttaatttttatcaaaataaaatttaataataacttaaacagaaagtattataaccaaaatggttacttttttatatctgtttg

SEQ ID NO: 8935 - DNA, 1069 bp, Cannabis sativa
aagggcctcaaagcattaccgaaatctatggaatgctggtgtagttgaattagcaactgacttacaaaaccactttgtggttattgacaatagtaccaaagaaacacccatatgtatgataaaatagcttattgagaatgatggtttggtatcgaaggaacggtgcttcaaaaaggaggatgcaaagaaagaggacgactaggtttttctctttggggctatgaggaatttctcgaaaaagtctccaaaatcccatgaaaattctggcttggaactatcgcgggctaagaaatgtcgcaacagtttgacaattgacgattcttatacgtagtcaaatcctggtatggttcttctatctgtaatgagattatacgtagtcaaatcctggtatggttcttctatctgaaatgagattagctatggaaaaattcaaaatgttatgcatcaagctccatttctttgagttcatctatgtgccacctattgggaagtttagaggatttggagtttgctggagaaatgatgtaaaatacaaggttcttaactatgataaaaatctgaagactagttcaattgaatcggatcctcttgggaatgtttggaattttttggagtctatggtccacttgctcttgtaggaaaggaaggtttttggaagaaagtataagactactttgctggtggtatggccccttcgctattcatggggacttgaatgactccgttggattacgaaagtctgaactatactcaccatggtaattctgccaggtactcctttaatctcaaacgtatggtgacaagaactagggtgcttgacctagagtgacatagttctaaaaaatagattagaaacaggggatatttgttataaagagcacatcttgatagagccctggctttgattgactggcacttttttgttctcaaatgcggtggtaaggaatttaaatgtaggaatatcgaatcatagaccaaattcacttgacacggaggaagaagttaactggaaaatgactcagttcaagtataaattaatgtgggaaaaggactcatgatgtttctgggt

SEQ ID NO: 8936 - DNA, 777 bp, Cannabis sativa
gatgattttgggaatggggatgtcgattttgggggttgaggttgatgattttgggaatggggatgtcaattttacgattcgagacctcgatttcggggtctggggtcgattctcacggttggaggcggaggaattggtttcgtggtgtgagcaatgaacaaaaactagggtttctattatacagaactattggggacgactatatattaggtacgactatttgtcgttcccaaaatattcgtttctaaatcgtacaaacgaagaagaggttgttttattgaaatacctcttttcatatcgtcatattttatgcagatgtaattaatattgatcagtatcgaaatttggtgacaacttttatagtgtatcgagtacgaatgtggatatatgcctaaaagtaataataattgatgattacttttatatgtgatgtaaaaagaagagtattgatcttggacactactgtctaatatcttttacacgtttgtaattgattaggccaataaccctcataattttcttgttggatacattctcagaagttgcacactccaattagttagcaataacccttatgattttattgttgggcatttttctaaaagttgcacactcaagggaaggctagaagtaataagcaagaagtgtaacaagatttgttattgccaaaggagaggagaaaaacctcatctaatagtacatggccaacaaaagtaactttagacttgtttctataatgatttttctatttcgggtcatataagaaattacaaaatt

SEQ ID NO: 8937 - DNA, 643 bp, Cannabis sativa
acggatatcagtgcagtaggtgtttcgaaactgcatgtgctagctctcaccacttttcttgagtagactgaggcctcaagcctccttctggcaacaccttggatctataccttttcggccttcagctggacctcgacaagtcattaggaggtctaccttctcttcttgcatggaccttcgtctaggcaatctcgcgccgatagccgccatgaatacttctttcttcagctcacaataagagcgccaaaatgtttattgagtttttcggcaaccaaataattataaagcttaagaaagtagtgaaggcgtaaaataacaagactatagacgatagatttttaggtgatttaggcattaattatccttactcaacgagtctattttattaggctctttgaccggagattgtacatacatatacaacagggatggactttactccaccgtactgtgttcctctttaagaagaagaagcttagtgggaatattctggagttgataatggagttacagtaatgtgtttgtaaagaatacccctttggcccttaggcaaaaagtcaaaagagaagaagtcaaggatcagaaatagaatcccccgcccagtgtacctttaggtgtatttatagggcaatctctttgcata

SEQ ID NO: 8938 - DNA, 701 bp, Cannabis sativa
aagtggaagtttcagagcagaacccgagctagtgccagaactagagaggatgaaaagggtcctggacagagtgaaagttccaaaaaggataagaaagagtatgaaccaaggtatactgagtactccaacctggtggatactcgagaaaatgtgtacaaagtaacttgtaacatgatccattataaaaagcccccacatagacctcaagggggcgatttaaagagagatccgagtaagaggtgtgagtatcatggggaagtgggacactccattaatgattgcaagcccctaaagaatgaaatcgagatgctgattatagcgagccattttggacaatggatttggagtcccatcatatatcccagacagggggtcgttcactaacagatgattattcctggatagcaaggtaccataatgcttggtagggggtaggtcacccttaggtcctaggaatacaacttttggaactccatgccctaacaggttcgtctacagtagctgttgtggctttggcaaccgagagatatgggtaactgttgtaacttttgaaaatttttatttctacagagctcgattctaataaaaaattagagagatatggtgttttgaagttttaggtgcatatggtgtcattgctcgacaccacacgcacacaggctcacggacaagtgatgtccgcccgtgtctgaagctggttt

SEQ ID NO: 8939 - DNA, 867 bp, Cannabis sativa
tacggttttgtttgaaaaaataattacagcacgcaccacttgcactacgaacacccattattctcttgtattatcacaccccccgaccaatattattctggtcttagctccctgagcaactagcttagggccggcccgacaaaagtattttacgtgccttttaaaagtattgcatctctcttaaaagtattatcgaattgaagtgctaatatcatgtgaaaattattataagaattgtttttttttaaaacaagtatcatttagtttttgatattaagaatattaagttttaaaataaaagaaaaatataatgcatctaaactctttacgtgttcatatatatgagttaatggaagtggtagtaacggtataagagaattgtaacattagatatttttatctttaaaaataaaaataaagtatttaaatgtataaaatctgaaatattaaatatttatatcgaaatttactttataatttatattgtctatctttggattatgctacattcaaattattcaatttaaagaccattattgttgacattgttacatgtaattataagagggccccaaattaacaagaatttatactttaaacccatgtaaggaagggaactgttcaactactagtctattttttaatacaaaaatttcaacatctcgtctaaaataaaaacaaagcatttggttgctcaaagtatgttgagcaccaattaaaagaaagaaagaaaatataaccaaagcagatattaaagacaatgaaaactcttttgtgttcactctttaagtttaagtttgaggtaatcaagtattatgttatcatttatctcataagagattttggagtactctctttctaggaata

SEQ ID NO: 8940 - DNA, 667 bp, Cannabis sativa
aaaaaattatttttaaattattaagatggttggatttagaatttttgtggaattctgtttgtttttactaatttgacaattatctatatactaaattgttctatatcataattaaccaaatatttatatttatatatatattttaataaaatcatatcaagtataatatttttaattaccaaaactctatatgagttaaaatttgataactactaagtataaatatcataaattactcccacatcaacactgtaaggcaaatacatattttattttattttttctaacacaatatctaatattagaaaattgtataatgcatccccttaaaaggatgtattaatgcatctctatctgttttaatattcgaaataattttttagttaattttttttttcatcgtcatataaattataattatttaatacattttgtaaaaattttaaaattcaaaaaacttaacaggtcgaaaacaaacagttgcacgcgtgattattttattttatagtaaaatagactatttaaatattattttttatattgtaaattattttaaatttctcaaaattgtgtagaatatctctttaccaaaatagatgaaagatgcatcaatatatcaattcaaaaaaacaaaaatacatgttagaatcaccataaccataaccaa

SEQ ID NO: 8941 - DNA, 757 bp, Cannabis sativa
ttgcccattaggataatagccaagccctcggaaagcacaatgaccaacatactttggatcagagaaccccatccatttggctattggagatctaatcccatcacaaccaattacaatctgttaataaccacacaagtaaatgttaatatttatagctaaccaattggttttacatatgctcacatataaaagaacttaagtcaaatagttagtagatgtaacttaagtctaacctttgaagaaaatcgacttccatcaaccagttccaacatagtttctccatttccatttttactaatcttagacaatttggaagaaaatcgaagagtgtccggcggtagctgatcggcaagagtctccaatagtactcttctctcaacagctcgaacttcttggctatcccatttatgtttacacaaaagaataataagtgaaagtacagtgtttactgtttctacaaactcttgagtgagaaaacataggtgcaatgttgtgcatgttttaaagaaagatcatgatcgtgtatacattatatgatatttgcggcataagtatttaaagttttgaatttgtaaccgttataagtttgatagatttttttagcgatacaaatatcaatgttagtaaaactataatttccgtttaatttcgttagtatatattccattagtgtcttaaatttataatcaaatatagtttttgaattttttgaaagaagatttacaataactaacaccacatattttcatctacatat

SEQ ID NO: 8942 - DNA, 774 bp, Cannabis sativa
tcattatattatataaacaaaatgcattggaatgcaatatatatacacacacaaaattcaattaaatgcagctcaaaatcatagtaagcaattagcgtttagaatgagaagaagaaattattgtaggaatcaaagtaaaacgagaagtaagagataaaattacaatatgggttaccgttggaatgtggttcaagatcataataaatagaaaaagtggcaaaaacacaaatgtagttcaaaatcaaagaatgagaagagattactgttagaatgaaagtgactaaaaagaatagcgttgagagagaaaaaaaaaagaatcgcatgtgaatatgtgatgaagaattatatggagttagattattgtggggagtttatcgtttgaatctttttttttttttttgagtttgaatcagaataaatggaacttcgtgtttaaattaaataattaactctctcatagtatggttttatttttttatatatttttattattattttttagagtttattaaaaagatattaaatatatataataatattataaaattaataaataatattctaattgggatattgttaacgtagaaaccaaaaaattctgttaaaccaagaattagttatatagctacattttatatagaatagatattatattattgtgttaattattttatttttaacaagaatatttcttttttatatgtataattaatgtattaatattattaagatgatataactgtaataacatgtaataacataataatactatgt

SEQ ID NO: 8943 - DNA, 792 bp, Cannabis sativa
acactaataatacataatataaaaataaaaacctaatttaagttaagtagaactatgtatttggagtcatacataatatatttatatttatatacatatatattaattgttggatttggggcactgagctgtgaaggaaagtaaggatttttatagattaaagaataatcatgtactcgtgcccccatgtgaaatgttcgcacgctctaagtaactttgctttgtccccaaaccacacccacatgtagggtattctctctctctctctctagttcttggtaacttccatctcagtaggacttaaatctggaatttatgttgtttatatatatatatatgaaataataaacacagagtatattaattaataaaaagtgattgggaagcactaatcatgattagctaaagataatgttgtatgtttaaaattaataatatttatgtagatgagtactactatactatacatagttgccgtcttctctttctgatgtatatgtattttcaaagaagtgcctgccaattaatgaatcttcacggacgtacttcattttcagaaaatggcacatgtggtgggcatatttgtagtattaattattgtacatataatatataaacatatatatattcttatataaattattaatatttttcttttcctatcattattactcttttgacaggaaacaatatgctgtcttccaaactaatttttataaatacgtcccatgcttcaagggttaatgtcttatttaaatggagatagcacgtatatattgttactaggtatta

SEQ ID NO: 8944 - DNA, 906 bp, Cannabis sativa
aaacctaataaaaaattaagaaaaaagtgagaattaaggagagaacaaataatactatttagagtgattttagactgtcacgtcaccgtctcattcttctcctttatatatatattgattttacgaaataaatttatcatttataattttgcaaatttaattttttaaaagtatgattttaacgttctaatatttaaaaaaatggactttttctttagaaaaaaaattgttgaaaaataacagaaacataatataattaagagcactgcaatataatatgcaatcgaaataaattttaaataaaccacaaaacaatcaaaaaataaaattgagaagcagtagaaaaacaagacttatcaattccactacaatatgaaaattaacttaagctctattgacgctaaaaaatggccaactcttacttgctagattgacgagatggataatgagtttaagtaaataatttaaagagaaacaaaattatagtagttcacttcttatgtcgcaatggaaatggagctaagtaaataatatagagagcaaaaatttatagtagttgactcccaatgttgcgatggtaatggagctatgtttacttcgagtttttatttcttacgagaattacaagaaaattaacgaagtttgaaaactctaatttctagagacagatggtctgaccttatgggtacctttctgaatgtgaaaaatgaaccagaggagctctttttttttatagggaaggaggttctattaaaataataataaaatataaaaaaaaatacatttctgctatttttgaccgttgatgatgatgtaacagtggaattgactccgaaggttggttgtcaattttcggagcttgattcacgactgcaggacccattttgggtaagttgtagcttaaat

SEQ ID NO: 8945 - DNA, 1035 bp, Cannabis sativa
taataatttagttacttttatttgttgaaaaatgttatagttcaattaaaaaaatcatattaacaaatttatagctcaaacaaatacaaataataaaaagtactttttcctataattttattaattcgtactagtttaactgttaagtgctaactcaaaaatacattgcgatatattatttaaccacatattaaataattattatttaccctgttttttaattaaaaatatacaaatttaaatagaaaaactaattgaacaaatatgacccctggaaatactatactacttttataagatatttgaaccattttctagttttcttattgtaaatatagtaaatgttggctactactcttttttgtcacttttaaaaataataacattaaaaaaaaatatataatctttagtaatatatcccaattttaaaaaaccaatacctgtaataatttttttttaaaaaaaaaaataactgaattaatcctaattttgtctaattaataaatgtaaccatcaacagtttaaaaacaaaaaacaaaacaaagtagaaaatattgttttttatttatttttttgaaaagagaaaatattgtttaattaataattactactagagtggccggatttatctagttgattttactagatatatattttaaaattttaatcaattaattaatttgttttaagtagtttctaatgaatattattaaataatactacctagctaacaataaaatttgatgtaataatactaaaatgtgacaattttttcaaagcattaattatgttaaatgtaacatttcataattaattatttatatatacaattataaacaataaaaaatttcttaaaaaaaaagataataaaagtttctcacacaatttttcttcttttttttttaagaaaaaaaaaacaaaattattagtactacatacaaacaagttgtgaccttatatattttttagtcataatttaattaagatattttttgttgtataagtacatatagttcttatatttttatcatattt

SEQ ID NO: 8946 - DNA, 1795 bp, Cannabis sativa
  modified_base (429)..(443): a, c, t, g, unknown or other
tttttttaaataaatttaaattgggtcggatcacaaccgatccagaaaaaaattagacagggcagagcggatctgatccaagatccagtaagagtatccaaatggtttcggatcagaggtgatccgttgggtcggagctccaaccaactccaactaaatggatctttttgacatgcctattcgagtggtcatgtgactggtggtggagctcatttgtccatttggaggtcagatataacccattcttcttctagcagacacctgcacagaaagattcatagagagttgttggtggtagaaaaaatttaagtggcgtttggttggaggtaatgaaatagaatggaatggaaaggaaaacaatttcattccattcttctgtttggttgtattttaatgtataggaatgacattccaatggaatgctctttnnnnnnnnnnnnnnnaatgactattctattttaaaaaggaatgaaaaaccattccaatgtaacaagacaaaatttaatgattttttcatcaatttttttatgcatttaaattttatttcattccatttttatttctattcttattcctattcatattcttatatttgcacttctctcaactaaatgccaccttagttttacaaatttaattaatgttttcaaatctaatatatattttttaaaaatataattccaatttaatttaattatgaagaggaaatgaggaagaagagcggaagcttcctaaaaaaatgatgtgtgtgcgctattgagagtcattaatttgtttttattgatatagtacttataataatatgatgtaaaagtcacaaaaataattttcattcctaagataatgaaagcaagatactgaaccaatatcattatatatgataattactaaaaaagtattatgagtgcttaatatttcttcgatgttatatcgttattagtgtaattaagtagcgggtctcatataacttaagaaaataacttttagaaaaatatcggtaaccaacgggcgccacctataaaatgtattaggcactattgatacccaataacaatgctcgttatatattttattttttgccatgataattttaaatatttagaaaaaataagtcaataaaacttattgtttatttgaaagttatatggaaaatttttacaatgcatgcttatttattttggtaactaaaataattttttagttaaacattttcttatagccatgtatgttatagttatttaagatattttgtaaaattttaagaaatttagataaatttaacataccgaaaaataaaattcaaatagtatgttgcatgtttcaaaaaaaaaaaaaaaataatatgttgcacgaatgactagtttattagatacgtgtgtgaaatagactatttaaatgttttctatattataaattattttgaatttttaaaattataacgttaaaattggacttaaattttttttacatgatgaaagagataaaagatgtatgagtgcatcatttttaggaaatgcattataaaatcatctaaaaactttattgtcttaatataaattacgacgaatgaaaaagaaagcctagagaattaaattttaaaaaagttaaaaaaccagcaatttgagtaaaaaaaaaaaaaagaacgagacaatataaaactttttactaatacaattaatttatatgttattttaattagtgatttagtatgaaaataaaaataagaatttagaatacaaaattcacatttaaaccgatatacagcctgcataattccatttccaaaaaaaaaaaa

SEQ ID NO: 8947 - DNA, 746 bp, Cannabis sativa
gaatggcgctgggcgaacccaattacagtgcggctcgagaggctgcagtggtggtagagatttccaaggcgttgagcgccacgcgagcatcaccgtcgcaattagccgaaacaaagtgaattacgtcgtcttctacctgaacaggcctcatcccgatgctaggagtgagcccaacccgagaatcgtctgccgcccgcctaaggagttgggctgaatgattgggctctaaggcatggagtacgagggtggtgcagcgtgagagaagaggcgtgatgatatggaaagaagggttctccgtggtagcgccaatgaagacaatgcttccgtcttcgattatgggcaagaaagagtcctgctgggccttgttgaagcggtgaacctcgtcgacgaagaggacaattctcttattcttcgtctttgatcttctggcttcatcgatggcgtcacgaacgtccttgacaccacacatgacagcagagagggagacgaatcggtaggtggtggaggaggaggaagggttggcgaatgagttaagaatggctttggcgatggaggacttgccggttccgggtgggccccaaaagagaatggaagggatacggtggcggtggagggcggagcgaaggagggagttgggggcgagtaggtggtcttggtcgacgacgtcgtcgagggtgcgagggcgcattcggtcgtagaggggctggtgaggaggggcggtgggggggggttcgtggtcgcggtgg

SEQ ID NO: 8948 - DNA, 520 bp, Cannabis sativa
ttttcaaactaaaaagatgatattagatttttacatgatgaagagcaagaaaccatatgagcatataaataaccccatgactaatagctaatcatgtgtcaaatagctgagccataaacatcatagataaccaatgcccataccaaaaatctccttatacatctaaaaccccattatgtgtaacaattaatacaataaatatattaatccaaataataattagaatttcttaatattgctgcagtattatcttatccggaataaaacgaattaatgaagagatattatatataatatatattataagttgatctcataaatattatgcattatttatctattattaaatattaactaatgtttaaatattatatatatcatcaattttttgaaggtctttgttcttgttagtctctttaacggggtcgacaataattcatcaaaataattatatatttttcatttctaaagagtgtgacagctatatgttaaacaccaaatatataaatttatatatata

SEQ ID NO: 8949 - DNA, 631 bp, Cannabis sativa
aaaactgacccggtacccaggccaaatatcctttctgggggtagtgtcactccagctagttcacgcaataaagcatcagcaaagcggcccttgaacaggcaaaacaataggaggagtcaagtgcttagaaagtaacaggctcaaaatgttagaaaaagatgcatttttattcttaaaccttttgaattgctaagttgagctcttaagactgctttagttaccttcatcaaattttctgtgttctacactatgtaagaaaaactgaattaatggatgagtaaaaaatacaggggccacacctgttttgttgtgacaataaaaattcttgagctagcaaattttagggcatcaggaacacctggatagaacctgtaattgacacatcatgcaatcagtagcacattcaacccttttgaaaatttagcaaatttaaagcaatatgaatccacccatatcaagaaaatttaagaacacttagcaatatgacccatatcaagagattaaaataatgagcggtgaccagcagataaagaaactgtctactgtgaatcacttttacgcagggatggttgttagcagaacaatctaaaatgaaactcttctggttctcaatagtttgagtaggtatgca

SEQ ID NO: 8950 - DNA, 1407 bp, Cannabis sativa
atgtggtggatgctatgaggacccaagccaacaatataagttgattttagttaagttatccaataaaaagctatgcttatttcatttgtatgatttgtttatgattcttttcataggtgatcttgatggcagaaaggacattctccttagttaacaaattggcctacgaacttgagttgctaatgtctgaatgttccaacaccgaacaaagaagagaggaggtcaccaaagctttagcagatgccaatgccaagatggagtgcatcattaagcaaatggtaaatgattctttggagaaggctacttctcgtgaaaagaaggccaccatggagcaaagagatcatgaggacaggtgcaaagagcaatatactcagctctctcttagattagtgacttggaggaaaacctaaagcaagcaatgttggacttcaaagagttaaattgaaagctcactcttttgtctagagaataagataagcaagcctaactcttggacaataagattgttgttaaagaaactttggagaaaaagctgaagcttcattcagagatgtaggaaaatgtggaaaaggtttagaggaaagttatcaaagaggttgaggaaatcgcagatgaattgagttttataaaacaatcccgactcaggcttatgaagagtcctagaaaaaggatttagagctggataacaaaatttagaaaacttcaaagctggaggatcaacttcagaaagtgaccttagagaagcaagaccaagaggctaggacatcagaagcattaaaataagtttttgtatactctctatacaccagatagaagcttaacaaatttgtgatggatttttttttggatgacgtagacagagaacagctgatgccccagattcttgaactagctgtagcagagaaagccaagaaaggagcgagggcagcaaaagtggtcgatcttggaacttccccctagaggatgagaacttggaagacccaactcttcttgctattgatgctccttccatgactttccaattccaaaggtctccattaatgtccaagttgatgatgctcagcctcccaaaggaaccagctttgccttgaccaaatttatccaactttaacttacttttaatcgttttatcatttggggataaggatcccccttttgcatatgcgaagataattttatgcccttgccactaggcctttaagtatgtagtcatatgttagatattcgcatactttattaactctgtaggtattggagttttaatctgtcaagcttgctaagttttaatcttattttcagcctccacgggttccggttccaaaggcttgaacctttgggctgctaattaaatgctcagacttggatttttttttttaataagtcgcttgtatctcttggaacatgggt

SEQ ID NO: 8951 - DNA, 1488 bp, Cannabis sativa
  modified_base (725)..(733): a, c, t, g, unknown or other
tcagatttacacttaatgaagaagtccatgattcataaaagttcaaaaacatattgaacattaaacttcatttcattcgagatgttattggcagcaaagaagtgaatactaaagacaattcatcaaatatgtttgttgaatattggtgattgttgttaattttctttggggcttagcacgaataatgtattcaaaaggtggatttgtaaaagttaattacttcaaatattagtgttattattttcaaagaatcgttgttgttataatatttaaagagcctctactccaataattaataattgcagtaattttatgatctttaaaaaaataacaggtaagttatgaattccgaaaaaagtcaagtgatgattttgagattctgtaagtatgagactacataattaattaaatactacttatatcaacaagatgtattttgtatttggaaactcatcactactccataactctaaagtgtggaaacttatatatatataatgtactacattagagtgtaaatggatcgggtcggatatgatctgactatgatatgacttgattcaaattatgtaaagatctgtcctactccgccccgctagattagatactcgaattggatctgatccgatcaatttttttttatatatataagcttataattttatatccattttaattttgtattattattatttaatacaatatgtttggtattgacttgtatnnnnnnnnngtgtaaagttataatatatttttgagttcgggttcgagttcaagtccaggtctgggtcttgttcgagtctcgagtctggctcctgggttcgagtcccaaattcgggtctcgggtccaagtccgggtttgggtttgagtcccgagtctgggtctggatctgagttcgagtctcgtccgggtttggagtctaggccctaggtcccgaatctcgatctggatctcgagtcatgatctaggtcttgagtccgggttcgggtcccaggtctaggtctgggtcccgagtcgagtccgggtccatatttgggtcttggtccgggtctgggcctgggtccaagtttagatcccaagcgagttcgggtcccaagtcctaagggatctaggttcgggtcccaggtcccaagagattcgggtctgggttcggagcaaagcgaatctgatctaaaatccaataagtatccgaatgttttggatcagaaatgatccatcaaattaaaacttcaacccactccaactaaatagatctttttaacccataaccaacatttgttattgtagcaaatgactaacatagagccaaagtctagagtgatttggtatgaaatttaggtgagataatggtcataaatactacgtgtctagcccataaccaacttactatacatattatatatacacacaaatcacaacatttaaattatatataggacaactcacatttattaattaacttagtacccctcaactcaactcaactc

SEQ ID NO: 8952 - DNA, 640 bp, Cannabis sativa
aataattaatacactatatatatacactgttgatttttggttttctattgataaaaatttgtttgctttgacgctgtgctgcatatacaggcagggtatactaatttattattattcatattattagcccaccaaacatttaatctaatcatactatatatacattgttttcagattatatggtgaaatataaatatattttatatattatatataccacatgcattgtctcagtctctcagactcagttcttggtctaaaatgttgtcatatatatagaaaatgagatatgttaataaatgtaaaaattatatgtactattatttctttttaagaagggatataatcgtgcatactcaaatatgtatgtacgcaggaaatcaaaatataaaactaatgaattgatttcctatagagaattattgtgaatatcttattacaatctttttgtcaatttatgtgttgtaatattgttttaatttttttttttatggtagtgtttattatagttataacattatttttataaattttcaaatagtttacagtgtcgaaaataaatttgaaatttgttgaacaagcgtagtagactgaaatatcaataattttgttttcaatactgtaaattattcggaatttt

SEQ ID NO: 8953 - DNA, 894 bp, Cannabis sativa
gggaaaaattactaattagcctagccttattattatttgaaaatagaaaacatagttctagaatattcattttcccgtagtggcttgtactatatagtgtacaactacgaaatcctttaaaaaaaaatattcttaacttttttaaaaggtaaataaaaatttggggctttttcatttttacacttcgaaatagtttttttctgtatttttatgaaattctacatagaaactcctattgcaactagcgctacatcctaaattgcaacaaaaaactgtatagaaacccttattgcaactagcgctacaaccactttagaaactcaaactgtaaatttgaaaaaagaaagttaagaaaatagtatatggggtaattctcctaaaaattttacataatccattacatgcacataatatttccagaatcaattaaaatatactaactgagttgatatcttcaattaaatgactcataaattgcgaacaataaaacatcaaaataaaataaaggagaaaaatatggcaaaccatattcaaaatttttgatattaaatatcgaagaaccataaaataaagtgtcaaacaacactggaaaaaagtctggaataacgtgtgcaaccaaatccaaaaaagactagagattaaacaggagtaaaaactcacaattattataacgaaacaaaaactattgacccgtaaaacaagacacacatgacaataaaatgcaatggacctaatcattgaagaatcctcctctacaacccatgtctcactgaaaataacaacataatcttcggatagaatccgagaaacccccgagatcaaaccatggcccaaagggtccttactagagacataaaatccaaaatccaccaccaccttctgttaggttttatg

SEQ ID NO: 8954 - DNA, 721 bp, Cannabis sativa
ctacaactactactacttccaaaattaaaataagccataaacaactaaagtcaagctttaaaacagtttctaacacaattcaacctcaaaaaaaaaaattaaacccccaaattcccaaaaatcaccaaagagaaccaagtttaaaacttcaaaaacaacaaggaataaagtatctagagcttatctaccaaataccgaacaaagagctcgatgtgcgatatgttctcatgcactcaagatcaagttgcatatagctttaccaagtgtcttcccaaaggacagttcaattatcttcgcagcaaactcaaagtgatattcacccctttaacacagttagtttagacaagttagttaaagttagtttacactatgttagtagtattcttttctaactaattctgttacacctactgctattgtaattaaattgaattgtctataaataaagtgggaaagcctccattagaggcaatattttttgccatatttgtgttttcatgttcatctattctcccctgttctcatgctctttcaataattattgtgaaacatcaccctttgcacagattaattccctaattaataatatatcaaatactcaaatgtcaaatatttattaacacttaaatagtatataagtgtggtaataaaacatatactatacatataattagctatgcagtcataaatatcacctaatgatattatgtacatctcttca

SEQ ID NO: 8955 - DNA, 509 bp, Cannabis sativa
cttcttctctggaagatttggtcagacttactgcctactaaaggccgtcttggtttggaagataagtcttgtgttttttgtggtttggaggatgagtcggccttgcatttattctgctcttgcagcgtcaccagagctctttggtttcaatgtaaatggggatttcgcacggattccttcagttggtcatctatagcagactttgggatgtggtgggccaagttattggatgatgaggctcaatcgtatattgcctgcttgtgtgatatcgtttggcgcaaaagaaataacataatctttaaaggggactgttgcaatatgcaggctatgatcaaggaaatcagagagagagcagcggagatgcacttctctatggcctcgacagaggtgatcgaacatcaagaggatgtggtaaatgaaccacttcctcatcaggattttattaagtatagtgttgatgcttctggtttgaattcgaaggctggtttaggagtggtggagctgtcggg

SEQ ID NO: 8956 - DNA, 918 bp, Cannabis sativa
tgtaaacattatttttgacacgtagtaaaaagaaaaataatctcggagcttcgcagcccatgacagggcaattgacctggtatcaagggccttgcccaatactcaaattgacataaaaggcttttgggtaggtatttggatcccgtgaaatcgtttccaagccactatccttcaaatagtctaagctaacaagccaaaaagacgccaagtcacagaccttgaggttaaggatgtcccctaggcatcccagaaatcaatctggtttcatgtgccttgtctagtcttaggtttatttttatgcatttttagagtcaatttttgtgtgtgcttttagtatttttatgctttattttcaggtttaagcttggttttaatggtaaaataaatcacaagggttgaaataggagaaaatatgctaaataagatgaattttatagatttagcatatgaattttagagttgtaagatacaatagggaagaattctaaattttggatgcttaacacgctttgtttgtgatcaaacacaattcacactaagaaatcaaaatctacgattgatgaacaagcattgagcttaaagctcctactattaattggaaatagttttatcaggatatttaatttactagtcactatgttttgattatatatataatctgacaccctaaacatgtaatttctaaaaacaataaataaacattaaagagttatgaaaatctttacattagttgcagcggaatatgtgactcattcaattcaaatctctaatttttgattcctttctgtcgcagaatataattaagatctgatgaacccgaattctcctttagtttgataaacatactatacaatctttctcactagtctgagtatatccttaaaaagtgtgggctatctcaacactaagccacgaatt

SEQ ID NO: 8957 - DNA, 890 bp, Cannabis sativa
tctgtactgcaaaatatattttaagcctagagtaaatattatacaagtcttgattgagttcttgatgaaagatagttcacaataaaatttgttaaatgacattatccttcctttttgttgttaaaataaaatgaatgaaccacatcctatgttatttttaggatgcctaaattaggcaattggcaatgaaaagtgcataatcgttgggtgaaaagtgcataatcattgggtgaattccactacccattttatttgtctaaagcctatataaacctctgacttgtcattttgtaacatatcccaaaaaaacaataaggaaaaacataaagaaagaagctttgtaagaaaaattattgaggtgggttgtgagttataagtgttgtaagcactatgtatatttttatctttctaataaaagatttgcattagatttagaaacataaccacctaccgaactcttttatcaaatttgcgcatgttgttttctctattatttttttattctcactaatctaattcattaagaaagttgcttaattttcctaacaattggtattagaacatttgatgaactatgtaaaaactgaatcgatctaaagaagtcagatttgagaggcaacaatggctgcagatgaaagataagtgaaagttgagaagttcgatggtgcagatttcaaattctggaagatgcaaattttagattacctatatcagaaaaagctttatcaacttctcttaaaaaagaagtcggaaggtgtaaaagactataagtataatcttcttcatagataagttcttagagttattcaattgacgatatcgcttaatgttacttttaaaacataacaaaagaaaagatcgtgacgggtcttgtggcagctctctccaac

SEQ ID NO: 8958 - DNA, 989 bp, Cannabis sativa
cattgatctctgtgatggtgcatctattacttggtttgtgatgtttctcaattataacaaagtggttgtctagatttacttttaaatcaaaatctcttccttcccactgagtgctagtcgagcattgcactccctgacgagatttctttggtttgctacccttaaatgacttaggagtggtcgccagtgaggattggtttttaggaggtcttcctcttcttttcggagtgctgagttcgccatttaaactgcttgtattccttctcccttttcctcgcttgctcgaagatgccggtgttgtaactgatccaggtgagaagttgatagtctcctgggttatttgatcaggcttttcgataggtatttcacctgttagagacgtcttcttggtgctgttctcatctacggtagagtctttcaccaggtgggctgcatcagaaggattattggagtttttctggtttaattctagaggattgggccgagagttaggaccaacaacaaatccatctgaggcctttcttttcctaggcccagtgagatgttcatgtaccctaaaatcctcaatgtcaagaatagggttaatgagactgggctctctaaagtatttgtcaatggttaatgcccccattattagttcacgggcctttggtttggcccaacactcattaaatggccatttgaggtattgggcttgagaccctagaatggaattgttgtattgagagctgcattcccctgtttggtcttgttcatttacattattcctttgacctgcattagtggtcccattcgacttctcattcagcttgggagtttggagactttcttccacaactgcttgtgcctccccagaattggaaaggttcgcaccagtccccatcccacctgctgcctctaattcatcggtgccagcttcaatttgtttggtagaggcgtggagatcagctttttgggcagcataggttgcagccgcctcttgcaggtcc

SEQ ID NO: 8959 - DNA, 836 bp, Cannabis sativa
gctaacatagcgtgttgagaaattgacatttaagtctttcgtgttttcgtccatgactcattattatgcaaaataactcgaaggacaaaataggtaatgtccaatagttcaggggacaaaaatgatttttgccctatgaattttttcggtttcatttatccaaaaacttaacaaaagagctaacatagcgtgctgagaaatttacatttaagatctttttccatgaatcattattgcattgtagagatgtgaaaataactcgaaggaaaaaaataggtaatgtcaatagttcaggagacaaaaattaaacctgtaagaaaaaatcgatgttcatgtatgttgttgagaaagtttgtataatgtttgcgaaatgtgtgtttttgtaaacaggttcatgcctacgaaagatcgaaccgagtttataactacagtttggatccttgtggacctgttcatataacaattggtgatggtgggaatagagagaaaatggcgatcgcgcacactgatgaacctggaaactgtccaaaaccatcagaaacaattgatccatttatgggtggttcttgtgcttttaacttcacttcgggtcctgcagcaggaaaattctgttgggatgaacaacccgaatatagtgcataccgagaaagcagttttgggcatggaattttagaggtacatatacttgatgatgacaatttgatatgaacatttcaatactaatcttactttgttatgtttgttttgattttgtgaggtttggcttcagtaattaattaataaaatgattaatttaatcgcgtttaataaaaatttgaagggtgtattacgagcaa

SEQ ID NO: 8960 - DNA, 1115 bp, Cannabis sativa
ttttgatgaaaatgacgctattacagaagatcattcatactcatatatatatatatatatatttatatagggatcgtcgaaatctctggctactgtagtacgcaatctgtacaatatcactattggacaaataagtgaccttggattataaggtgggctgctttgatttcatctatctactatatttggctttatattttatcccacatatcattaatcattcaaatcacttcacttatttgggcctaatttaatcttttactacgacatgtgtgatttcttgaggcctgagcttgttcaatgatatgagaaaccaaaagaaagattctaaaagaacgactcattttgtgacaagccctctagtctctagagagtagtgttatcacagtttagacaagatggaacttcacgagtctcttcatgcaatactatactctatttctctctctctctctctctgtccatttgaaattgtcaaaagctattttcagattactttatctgatcattttccccgtatttggatttttgtattaaatgttgatatgagtttattatcttagatagaaatccaattggtaagaagaaaactaaatatctacagataaggacaagtgatactcaacttgttatatgtggcctagtttaggcccatatagatatgctgacgaatatacactaattggtggcacaggaaagaaagacagaatagaaaaggcctttattggtcctaatttggcccaacttctgtgacaaacttactgtatataattcagctggtggaatactggaatatgtttgtggctcaaaattagctggatcaaatgaaaaagtaaaggtttaaatttaaagccatctataaaggacctgagccctgatttttctctttttagaaaatgaattaagcaagcaaatatggactattaatattggtcacatgtgagtccaacaaaaaatagatgcagaggacaaactagtcctagagactagagtggtactattttaactttctgtaattacatagcatgaaatatctttttctagacacacatgtttttggacatgatttatagaaagattaatttgtaatattcgagttattaactgagcttcag

SEQ ID NO: 8961 - DNA, 588 bp, Cannabis sativa
cttgtgagtagatctaagatcctggtaaaataatttccaagaacatctaactccagcaacttttctgactatgatagaactttgttcacttttccgatgatttttcagtaacagtgactttttcgatgacttttttagtgacttttcctgtaagaataccttttcctgaacttgtggcttttccgatgacttttttggtgccagtatcttctctagtaatattgtcattagaagttttatcaaatttatttatggtctttttttttgtttctcatattttaactttatttactttttcccatatccttttgcattatttagttatgccatgtaaaagtaaactccattaatatttcccatatttataaaaaatacctcaattaatttcctctcgtagggcttggtgtataattggatgctccaacaaacatagaggcgccaaattattcatcaaataaatttttcaaaagcatttttcttacattttttaccttgaattggtcaaaatatgcagaatttcttacctttcatggaggattagatccagtaattgggggtctctaactgaccgatattgcacaccatcat

SEQ ID NO: 8962 - DNA, 740 bp, Cannabis sativa
gttcccaagcttagagaggtctagcaagggtttcatgacccagcgaaaggccgcccatggagccgaagcctaggtatgggctggccaaaatttagggtgaacccctatggctagctagctcccatgagaagaccccatggtcagccaagtcttgaataagacccctagggcaggccaaggtatgttacggatcaaagtgtgtttgttccaagaacacatacatgttcttcgagttcttcatgactcaaagcgtcaagaatcacaatgaaggtcaaaattaaatcttttttgtcaggaaatcacacataatacatcttaaaactatcatggagatcaaaataccaaaaagattatctaatgtagcactcaaaaaatattcataacaaagaaaagcttcaaaacaaccatggaaaaatcaaataaacaagtgaaggaagggattcaaaaacttacccacttccagaaactgtacatgaagaagatcggaagcttgaattataaaaaatggggcaaaaatctcaagagatggagtactatggggcgacgccctttagagaggaggaggggctttcaaaaatttattttttaaaagagagattgaaattttggaaatgagaagtgagttccccctatgagcttacatagcttttgtgagaccctttctcacatgccatacaacatgtaacttagaaacatgcaaaagagtattgttgttaacttacttagaaggaatgtgatca

SEQ ID NO: 8963 - DNA, 627 bp, Cannabis sativa
  modified_base (402)..(420): a, c, t, g, unknown or other
aaaattaaagcagaagaaaatgattcttttagttcttgataacaatcttcgggtatgttgtaatttaaattatattaatttttacagtatatcctgatcttgatattatatgtaatatatttaaactaaagtatatatttaaaataatactacaaaaaaactattccttttagtatcaattttttagtcacaatataatttttttgtaattaaatgtgatttttagtcacaacaaaaacttacttgtgactaaaacatattatttagatacaagttgtcactaatttagttttagttacaacaagtattgtgactacagtaaattgtaatttttgtgattaatactattagtcacggacctttttattacaacatgcgaataatgatttataattagtcacnnnnnnnnnnnnnnnnnnnacaagttttgttgtgactaaaaagtaaaaatttttgtaatgtaacgtattatataacctaattggagattggagtattattttataccgacttttaaattacaaaaaacacagtgatcgttattaacatagtatattagaattatacattgttgaaaacacagacaccaaaatatattaatataatacctaaaaagacatgtaattt

SEQ ID NO: 8964 - DNA, 1078 bp, Cannabis sativa
ctagaccctttctaaatattataaaacaagctagtaatacagatcatttattatgaatttaataatacaatttatattgtattgaactttatagtagtaataattaatgtaatacaaagttttatccaaatgtagcatttcttattattatataaaacacaatctttatatatggcaaacgagccctaaatgtaatattttagtgtgtatatatatacgcgtacaaattatttataattagtataattacatatatttaaactacttcaatgttttggttttcatttttcaaattaattatgaaggcatatatgttgatcatgagtggaagatagaagaatatgatgataaaacagatgaatcagcacccagtgaaaagaccaacgatagtaatgtcaattatcctcaaaacaatcaagtgtgtgtcaatttctttgagctatttaagaaagccatccacattggtatgttcaatccttaaatcttctaatatacattaatattaattatatattaggtttcgttaatcgttctaattatatattaaattttcttataactatctatactatacatttcatgtttttttttttgttttgtttatttattattatttgcagtgacatatttgggtagttgtaagaagggagaatgcttaaagtgtgatctagagaaggataccttacaatatcaccataaatcagcaggtgatctcatcatcatcaacttaattattttatgtcttaaacttaaagtactattaatagtaaaagccgaagtgaaatatcctaaaaaaaaaactcgtgtttaattagctctgcggttttttcacttcggttttcagggtgacatgtttaacacgtttataacatgtttaaacatgccattcatcttttttttttttaaataatttattttaatttaggttttgtcatttatattcttaaataatttttttaatattattataattatgtatatatattaattcagtggataggttttgtcctctcaacaacatcatctgctttgagtttggcaagttagcatacaagacattcttagttgttgtgggact

SEQ ID NO: 8965 - DNA, 798 bp, Cannabis sativa
ctctgctttttctgtcgttcagatctagggtttcatcacaaaacaatgatagagcttctgtacatggtgatcctcaccgaaatggtgctgattctgaccttagttttcaaaacccctttgaggaagctggttctcatggctttggataagattaagcgaggcagaggtcccgtaatggtcaagaccgtcgccatgactgtcttcgttctgctcagcttcagcgtctacagtattgtcaacatccaaaacagcacgatcgaggccggtgccgttaatccgactgaccaggttcttatggccaggcacatgttggaagcttctctcatgggtaatgattttcccttccttttcaaataatgagcggatttagccttgtatttggttacttttgatatgtttatggttttgggggagtataaatagaaataacaagcttaacctttagtctctgcaacttaatatggctctacacaaagcttagttgcataaggattagaagctcgggagtcatatatgtcttttgggtatcttttcttagttaattttgattttactgcgacaaaagaagtgtagttacgattttaaaaatgcgtttcatcttcgttaacgaggtgatgaaagtacgtgtttgtgtcaacttgtggctttgcaatatagttgtttcattcatggaagagtagatgcctgattgctactcttagccaaatcaacactttctagaggtcgaaaatatggatctcttcgccatgagccatcaactcctactaaatataatagagtgcattgaaattttagaga

SEQ ID NO: 8966 - DNA, 680 bp, Cannabis sativa
tccagtaaagagtaatatatctttcttactttagatatttcaaagagaatgaacttaccctactttattgaaccaaaacaatgactttgactgttatgtacaatgagaaatctactcttgaagcctcagccgattaaagaacaccaagaaatgatactcgggggcccaatacacgaaccctacaacaggcccaccttttatgtactgcaaagtttgaaaaggcgaaaaaatataaatttaagtagaatttcagaaataaaataaaataagattaaaatagtgccttaataaataaaaaatgggacatggtggaagtgtagtgcaaacctttccatcaagaataacaagttcaccatcaacccatcgaggattacgaaatcctggtgcagcaagtcttccttgtcctttgtatcgagcaatctaatttggcaaaaaaaattatataaggatatataaaatataattacatataaagaagaagaagaagaagctattttcataccactccgaactcttctggaataatccctttatgaggaagttggtatcttgtaccaatttttgcacggaaggcaacctaccacaccaatcagtaataaacagtcaagttttgttatatttataaaaactgatcaacacataaaacaacagcaaacccaacagcagtatatatatatata

SEQ ID NO: 8967 - DNA, 779 bp, Cannabis sativa
taaataaattaatatataaccttaatttttcatattttaatagtatcatataattacaatattacctattatatttaaattttattattattttaaataattgataaattcatatattattattataaggttttttaatatgttgtgtctttgtttatggatttgttttatgtcctgcttttcgagttagtctattcgtgcttacgtgtcgtgccttttgtgattctcgtgccatgtcgtgtcaatttgttagaaaaattatatttaatatataataaatagccaatttatgttaatgtgtgaatgagaaattgataccttaaatgtagtccattgttagcggctaataaatgcagatttggtcaagaatgtaatcaccataataatagtaaatattttgattgatatcagaaattatggtaaaaattttgattgatcattaattttttaggattttttggcattaatttccttgtgttcacacttagtataccaccccatataaagcctataaaaggaggctttacctttcattctaatgacaccatcaaaaagctagagtcactcactcaaaagctctcttgtctttttcttctttttctttttcacaagtcttaagaaaatagaaagaaggtattaattcgagttcattgaagtagtgaaagtggtgtattcatctacttgttagttgttgtatcttggtaaatggttgctcgttgatcttctaccactgctcaagtaaaggggcaaatttgctttaaagaaagcgcgtttctcac

SEQ ID NO: 8968 - DNA, 973 bp, Cannabis sativa
ttttttttttttttttgtggtgtcatcataaataacttttaaacataatgttatatatgaaactctcaaaaaactatttgagcccctcaatgaaggctcgtgagaagtaactatttgaatccatattttgagtgtacatacatgttagtactcttaattaaatatcaaaaattgacattttttttaatttttttcttaaccaacgtcaaaacgatcgatatcgttcaaataggttgtcattatattttaacaactaacgaacgaataactcttatttgttaaatgaagtagaaacaatgggataatttatatgacaagcattggatattatatattagtaccaaaattttataatttaattggtagtactcattgttgcaagatgttgatattttattattccaataataaatatataagattaatttttagttgtagataaatatttaaatttaatttttagtaattataatatcttattatatttttgggagataccttaccattaagtgtcaaatcaatagccatgtgccaatctttaagaaatgatatgtgggtaatgaattgacacttaaaaatacttacgtacctatgaaagttccataaatataagttaaatattattactgtcaaaaattaaacttaaatataatttgcaaccaaaaattaattaaacttaaatattatgccacaaattattctttatcattattgttataattaattttaataatatattacattgaaatatataaaatagtatattcgacgtacaatttacaaaaatcaaatatatatatatatatatatataaaatcaaagttacaccaatatacataataagtcacataatattccaattcctttgggggaaaaacagatattttgaataaacatgtggttcccattgaagctaaaactataccaagcaatcatataagcttggagaaataaagttccatttttgagtaaa

SEQ ID NO: 8969 - DNA, 946 bp, Cannabis sativa
tagataaatttgattggttaaaaatctgtatttttagtgcatatttgagtgcacatatcattactttatagattgtgttgttaattcacttgttatgggcttttattttgtagctcttattaggtacaattatacaagttctgagagaatgtgattatagaatcacatatacatatttttttttaaagcacacacaaatatttatatatatatatgtatttgtacattgctgtaatcattttcatatattctaatggacagggttttggtactggggctatacaaaaactgtcagttgcttctattagacgaggattcaataattctgtctcttgatacactgtgggggtcctaattctgagctttatcctatgtattttaatggagtttttactttgcgtgtgatattgtcatctcttaaactgtttttggttttatttatttgtttgaatgtaattcattccagttgacaatctttggtgttgctattattgttttggtttatgacttcagattgtgtttcaattaatgttttagacaaagatttttgttttaattaatttatttggcttgtgagtgagtgactaattaaagtgttaaaatttacactggtgaacttaattcactttccattccactggatcctagtttttaccactcttacatatattctaatgcacagtgttttagacaaacacatatactgttagttcttttacaactttcttgtgtttggtttgcattttggcccatgagatgttgagattgagctatgtttttttttttaactatttacctttgttcttgccattaatttacttacctttgttgaatgtcattgatatatacatcagatttcataactttcttacagattagttaatttagaaaaaaaattacatatataagctatttaagatttttatcctgaattatacatatgtat

SEQ ID NO: 8970 - DNA, 519 bp, Cannabis sativa
ctaatataaaaaggtttagctttcattctttgaaccaaatgcagacccagttttatagccaagatctcagccaataaaattgaaaactgaccggtctgaaacccagcttccgccaccagcaagcaacctctattatccctgatcacagcagcaatgccgcacccgtgtgtatttggacaaattgaagcatcacaattcagcatataagaaccttacggaggaccagtccaccttctattctccttgactgggctgatttgattgggagctttatctttctgcagcaagtatgaaacatagtcaagagcccaaggaatcaagttacccatatcaacagtcttattttggaaaatgcgttgatttctttgactccaaactagccaactaagcccgagaaaaacttcaaagtcctctgaagaacattctgtcttcatatacattaaaaaggcaagcatatcagacattgattcaagttctttggggaaaagatgccaaaaccccgcagaacgccaaacattc

SEQ ID NO: 8971 - DNA, 844 bp, Cannabis sativa
  modified_base (496)..(497): a, c, t, g, unknown or other
ttgatgctaccctcagtcaccttcataatttagcagccagcaaatgactgtttcaagttgttttctgcaagggaagtagcaccctttgttgccactgttaactttggtctttagcagccagcagatttgtcttgtctcgaagagtgtatttagatatttgtccattcaatggaagcaccaatgttaggtaaacatgttctcttcgagactgaacaaatctttgaatacactctttaagacagtatcaatctctaattaaactaaagttatattttctcaatccataattaatctatttgtacaatgactttacctatttataagagtatttgcggcataaatatattagtttaactcccaattgtaaataaatacttaagtttaatttttagctgtattaatacctaacttatatttttgaaaggtacctatccattaaacattaagtcattatccacgtgttattttctaattggtatatttaaatttatttttnnaaaaaataaaaatttaataacttgtaccaattaaaaattaccacgttacaatttacataacacttaacactcaggtactaacaaaagttcaagaattataatttaagtattattactacaaaaaattaaatttagtatttatttgcaacaattaaacttaaatatttataccgcaaattactttatttataatagttaggtaatattaacaatttactaactagtccttgtaccatttcatataacagttgcctttcttatattttcttctacccctatgtatgtgtactttactcacaagtatgtaatacattttcaatccttagatcaaatagtgcacaatagaa

SEQ ID NO: 8972 - DNA, 711 bp, Cannabis sativa
taatcaaaacgacgtcatttcaatgaattaaattacttatttcaaaatttgaatttggtatcgttggtatactttttttttaaaaacaaaaattaattttgatatggctatttgttacacctagctatttatttgattaatttgtcttatcccaataagctaaactctgtgttttgtgtttaaaagttcattgtttggaacagattttagaaaagtgattcttttgttgtttaattaaaatatgaacagatttgattaatttgtcttatatcaataagctaaactttgtgttttgagatttttgacaatttatgccattgttttatgagtttttcttcaagtgattttttttttttctagagcaaggtcacagtaattgtaatgtcccaaatctaaagcctatcttttttcttagttgggtattaataaaaatcttgaaaaatgtgttgttttgctttagtaaagactaattactctttcctcaaaaaaaaaaaaaaagactaattactctgttagatcatttcttttactccttttaatttaactttcaattttgtacatatttgtaattgtaaattagaagacctcaataattagattgttatcacaatttgattttttgaattagtgggtgtttcatcctatgtgttatcacaaggcttcattcaatttacctaagtataaaatacaaatatcaaatgtgtatttact

SEQ ID NO: 8973 - DNA, 638 bp, Cannabis sativa
aaagctgaaatatgaactgtcttttgttttgataaacgaaatatgaacagtcttaaggaagaagaaaggaaaagagaaacttatgatgatgatgatgtatttgatgagctactcacaatatttaatgctcttctctctttttcttgtttttttctcttaatatttttttatttattgttttcactgcagccgcaaattctaccagtttcattctttacttgcccaccaagcctttcccacttggaatttatatcattttaaattccaaacttgccacagttcaaataaattatattccaaacttaccctcggtttcctttatcaaatcatttaaaatatcccattttgattatatcaagaaaaaaaaattagtagaaaataaatacttcattattaagaaatatatatattaatttcaaagaaaaaaaagaaatatatatatatatatatttctttttcacgaatttcattgttataattaaattgcaaaattttgccccaaataagtactttggtttggcttttaattctgtggacttttgatttttgggaccctcaaagatatgatgaacgagttttttcaggctgagaacaaaatatgggcacgcaagtctattttttttgaccatttcacttca

SEQ ID NO: 8974 - DNA, 1147 bp, Cannabis sativa
aagaatgaaatgcaacaattctgtaatgcttgtcagtatggcaaagctcatgcacttccctataaactgtctactagccatgctaattttcccttagatttaattcacactgacctatggggggctgctccagtgacttccaatggcaactatagatattatatacatttcttagatgactttagtagattcacgtggttgtaccctctcaaattcaagtctgaagcattagatgcattcatgcaatttaaaagtctagttgaaaacaaattcgataggaagattacatttctcagaactgattggggaggtgagtaccatcccttcacagccttggttcaagatcaaggcatagagttccaacactcatgtcctcatacctcaaatcaaaatggccgagttgagcgcaagcatagacacattgtcgaaataggtctcacattgctggctcaagctcaaatgccattaaaatactggacaaatgccttccacacagctgtctatttaataaatagattacctacccctatgttgggcaataaatctccatatgaacttttgtacaacacaaaccagactataattttctcaaaacttttggcactgcatgcttcccttgtattcggccatatcagacacacaaatttcaacatcactcattgaaatgtgtcaatattggttatagcacctctcacaagggatataaatgtctcactcccacaggtcgcatttacatttcgagggatgtagtatttaatgaacttaaatttccatttaagcaaggtttccttaacaattatcaaactccccaacctgtcattatccatagctcatcttagtccacactcccctttcccacctttgatgatcaagattgatccctttccaggtctgttacaactcagtctgtagcaacctcagaagcatcaccaagatctcccaatattccttcttccttatccaatacaagttctgactcaagtcctgcaggggaggatacagatcaaagtctccttcctgatgatgataataaaaccacttttggtccctattttgacaattttgatcaattaactgttgcgtaggaacttgagccagtcactgaaacacacacacaaatatccctaaaccaacagttgaatcacct

SEQ ID NO: 8975 - DNA, 1063 bp, Cannabis sativa
atttttatttttaatttttatttgagtaaaagagaaggctagaaatgctaattttaatttaataaagattataaaaaattattaactaattataaaacgttatgttataaaagtgttagatactttgttgtcttgtaataattctctacatattgctaaaatacattagtagtatctagcgttctatttagtgtcatatcgttattaatgtaattaagtagcaggtccattatgacttaagaaattaacttttaaataatattgctaactgattatagggtgccacttatagaatgtgttggatactactagtgcccaataacaatgctcataagtttttttagagtattgttattgggtactaatataccttctatagctggtactctacgattagtcaacaatattctctaaaaactattttcttaagttatataagacttgatacttaattatactaatagttgtgtaatattgaagaaggtactaagtaccaattgtatctttttgcatttcttaattttttgtttgtgcatattgagagagaggaagtttgatttagaaagatttcatttttatttttggaaaaaattatagtaattactcttttaaaagatgtttaagtgttgacatttaagaaagttttttcctcaatttcttttgttgttattaataccaatgttgtagttttttagtattacttgtaattttttaaaatattttaaataattcacagtgttaaaaataaagttgaaacaattatttattacgcgtataaaaatataggcatgcgtagcataacatatttaaacgatatttttgagactttaactattcaaaaaatttgaaaatttatagatcattttaatcaactacaatatatatgatcatgaaaaatatttgagtaaaaattattttaaatcttgaaataaataaataatgtaccgaaataacattttcactaggtgtataataaaattgccctttcttctttgtgctatagagaaagagaggtggttttattttgaaagatttgattttttatttttatttgattttattt

SEQ ID NO: 8976 - DNA, 1387 bp, Cannabis sativa
acttgcatcattttgttatactttaccaaatgggttttaggatctgagcagccatcgtaaactccatttgaggcaatttaaagttctttgggagaggagcctttgtgatcctcttaacataaggatttgagtcctcattgtctgaatcagtgagggtcccactctgattttagaccaattttgttaaagtagctatctgctcttctaatcgttttatgtcatggttcaggagcctcttcccactggccttgtcgttcaagtgatttctgaggtcatcaccacgtgaccacacattttttctcatagcatttttgtattttgtgtctagatgcattttgaggtccccagtggccaactatcattagagtactcctcctatgccccctcatcttgggttaccgaatcactagggcggtcattccctccctcaggttttggtactttcataccagtcccctttggtgctacaggacctttatgggccaaaggacacccaagcccaaaagcgtttgtcatcttcttcacctgagacgccctgtttctctaatttgcattcttttgaggaagcctagaggcataaggattttttggatcatgcacttttacatttcccttgtcctgcaccttaggagaggttccaacgtcagcggggttttccatggtgtttcttctgatgcactctactgaagaatcatcatcagagtctctttcgtctagatctccaaacatacttcgaaggcggtctaacatttttaccatcatttgagaattttcttcgtgatgagccaacttttgctaagttttgaacaatttcttggaagctcctattacctcaggatcattttcataacggtggtcgtctttgtaaaacttgtctctggcataactctcgccatctacatcttgctcttcatgatctttagtatctttgccattaccaacatattcatactggttgtttaggtcccccccttgaacgtttatgatggatgtatccccacctctcgtgtcgctcgatcagtcgtgctctggcgagagggggttcacttccttcataaccgcctcgaggtcaccctgtgaagtccttttgtgaactctttttcgtgtggataccatagtaatggaaataatttttgtctttcctcaactctcaatgaaagcaccaaaatgtctactgagatttttggaaattaaaaatgttgacctcgcttttagccaacgacagtgagtctaaattgtaagcgttaagtagtataatgtgtatgtaatataataaagacacgacaattttatagaggttcagccccgagcagtttggtaatagcctaatcctcttggtttgtattaacttgagaataaggagaataatcccttttcttagagcttt

SEQ ID NO: 8977 - DNA, 1562 bp, Cannabis sativa
atatttgtagttacatttgttgtacagtaattaattatgtagggcaacatatgtatattgctttataatattctattaataaaaaacaataatgtataaactcttacatatatgtttatcagctgtctaaataattcgatatcatgataaaaatgaaattatttttagtttatatcatttaaactgaattttgaaaatttgtattttgctaaagttattgatgatttttttttttgttttattgaataaaaaattagaccctatattattttatactactttggaacgtaaaaggtccgaattattatttattatatataaaatttcatctctaaattttgtaaaatacaaaatttaaaaggatattttccgtacaaaatatatagattaattgaaataattatataaaaataataattagatactaagtaaaattaactttgataattaactaacttttatcaagccttgctaaaattcttttgcggatgatgtagctaagtgtgctagagttcctagccaactagattaccccttgtgatcccatctatttttcttagttaatcaacaagatgttctttaaaaaaaaaaataacgaatatatataacaaaaaataaaaagtttatatataaaaaataatgttagatatatattcaaaatgtacacacttattacatatgatgtgtaatgaatattagttatttatatttttaagtgagactatatcactttttaattatacagttatgattaattacacattattatgtgtataaagtgtgtataatcatttttcatatataaattatactacattgatacaaaagttccatgaaagccatagggaactctgtaaggcaaagtaattttggctactggctcactagaaaaattctttgagtcaatcagaagtacctgaaaataaaaaattaaaaaaaaataaaaatataaaaaattattatttatgaacttagaataatacatagatttaaaattaaacaacttttaaataaataaataaaggaattaattaattgatgaatatacctgagaaatgttggtatcttcattgtgaacaaatgtgataatccaaccatcatcttcatcaacacattcctttttatcattagaaacaaaagtagctccactacaaaatgtgttcttctcaaacatatggtattctatttttaccatttctttagattcaccacttgtctagttcaaaaaaaaaaaattaaaatataataattagaaaattaagtttaatacaaattaataattcagaataaataaattaattgttgtaccgaacaaattctagtttctagctcttcaaaatgtaattttgcaataccacaatatttgagcaagttatctgcaataacataaattttgtttattgattaattagacaagaattaaattatcaaaattaggttagaatacgagtttgataaacatacttgaggtagtagcggatattggatcgaccacttgggcatatccgaatttatttttgagaccaatgtaattttcattgatggcgggataatccatggaa

SEQ ID NO: 8978 - DNA, 785 bp, Cannabis sativa
ttgtaagtctaacgaccaacacgagatcttagctaagtaatgaaatgacgcccaattggagatctctcggctaaaggaaaatgtcgagaccctagagaaatccaagaagatattaaaagctgagaatgaagccttgaagaccaagaatgaggagctttgcaaagctactcgactggcctaggagagccttacagaagccaacaagaagcttgaagaggttaagttggatgccaaagaaagggttaacttaatggccaagcactctatctacaaggcccggatagtaactcccaagaaggatctaagcttcttaggtgctgcagctgatgagatgcgagcttactttgagcagaccatgaaggatgaaattgacgaagttgtacaaggtgaggtcaaagaagcagaagaataaggtccctcacagtctccaaccatgtagacttagttattacttttttaacttttgaaaatggccatttggccgagataatgttttgctgcttgtggcatttattatgtaatttaatttttatttactttgttggatggccaatatttgtataattacatttctttatgccattttaacctattttgtttgagttatgaatgttttgaatattgtatttttgctcacaagtaatcaaaaaacttttctcaatttagggtgtattgcgaacttaaatgtccttacataattaaatatttttgaacactttttgattgctcacatatgagcagttattactctcctactttagttatacacgagcagttagtatttt

SEQ ID NO: 8979 - DNA, 1333 bp, Cannabis sativa
aacacagaaactgcattcaaaattaccaattgcacaaatgaaatgcaagaaacggttacagtggaatcaagaaaaccaaactcactcacttcttatgccgccgaccacgtttgggtccccatccctcgagcttagcgacggggcagccgcaccgggtacgaaacagcaagatagcgcggccattgggaggggccatcttcctaagctcggacctgaggcactcataatcagggttagcttcgctcccgcccttccagggcaacctatcgatctccttagaaccattcttgatagcgtcttccttctgtaatttcaaatcaaactccatagcattcttcaaaccctggcatccaggcttatcgcacttacgcgatcgggagccgcagcagaactcgacgaataagacagcaaggaggaagaagacgacgaagccgataatgtaagggagttgttggtggtggagatggatatggaaggtggaggtggagagaaggagagagagcgaattgaagatgtaggagaagtacgaggtaacgagaaatgtgccggagaagaggacgaggatgaggatgaggaggtcgagggtggccgaaggtgagtgcttgcagaggagagagttagggttagggtttgaagatttgggggccttggaactcggtgacgatgatgatgacgtggcggaggacgacgctggcatggtggtggcggttgtggttgtgaataccatatggcgcatgttagagaaacgaaacggtctttcttacctctctctctctcacacactttttagtttttatttttggaaagcttttttatttattttttattttattgttggaaagtcaaaattctaggttacgttcatatacgtttgggataaaaggaccaaactgcaattatttatttattttgagaaagcttgggaaggagggagagggaggcaaggtgcgcaagttagcccggtgtcattgtagcggtcacatgcacgcgcctccggctgagtgttctttttatctatatatttatttattttaaatggaaaaaatcttttaaagaaatcttgtaattttttttttaacaagaaagaaatcttgtaagttgtaacttgtgttaagtattttaatttaagatttcctttccacaaagtacctctacttattctttaatacaactacaacctatgttattattgttatctttagaaataataataataaaactcaaagcgatactaagtcagaattgggagcaaatttggggcttccgaatgaatttgatttgaatcgatatagaattttatcttgggcaaaggaagttgaggtgaaggactttc

SEQ ID NO: 8980 - DNA, 908 bp, Cannabis sativa
taaaacggaatattttcaaattagattttcagtttatttgatatgaattaaattaaaaaatatatatgataatataattaagtttgataatatggcgagatatatattttttttaaaattttttattattattatagatcaaaaattattttcaacaataaagaaaatagaatgaagaatctcctattcgaaagatatattcatccaactatatataaatcttatttccctaaaatgtgaggagcttgattagtatacaagaaaacatgagtaacaataactatataaaaaaatatataaaacactcagattttctcattgtcccaatccctttatttgtgtactgaattttaatgtccctgatgacaactcttccacactacccaaaaatcacaaataatattatatgatatacatacaagaaatgaaattaacaaatattaataaaaaaaaaattcaatatatatatttgatatatacaatattaaccagagttgtcatatagggagagtactttctagctagtccttatataatatcattaattattttctataaaatttaattaactaattaaatatgcttgcaaactgtatttattaatgtggatatatatgtgtagctcatgcggccatacgaatcttggattccatttattatctaagaatatattagctaacataagatatgtgtatgatattgtctcagccaaatggtccacacaaatatacaaatatatataattaatgtcaaatatatatatatatatatatataaattattcaaaaacatataataggaaaattatattggcctctctcttatagttagcagtggccggtataaatttataaacaataataaattttactaataagtaaagcctacttataattatcaacgagtgg

SEQ ID NO: 8981 - DNA, 712 bp, Cannabis sativa
tcgaaaagctaaagtagagtcgatgagcatagaagcctaattacttcatcacttaaaatcacaaatgaatgagagacatcatccatcacagacctgcatgttctcccattcatagttgggatcgctctagtcaccgtctttgtctttgtcgttgtcgttgcggttgtcgaatgatgttgcgctcattccaaattggacatctacaagttggtttcttgttcttccattcagctccacaggtatagcaaaattcgtatccacatctgcccaaaaaatccaagtgtgagactataattaccaaggaaatattctgatgcaatttttttcactctcttggacatgtaaatatgattcaactaaattatattttaaaataccacacataatttgtgaaataattcattgatttacgaattaagataatacaaaattgtgtatctttgtgtgtacatagaactttatatattatttctctcatcattctaaagtaacaatataaaacatgagcttagttataaaacacttttactatttaacgccaccacaatgtagcattataccattggttaataatttttcataataaatactaaactaaagtatgtgacatccttcccataaaataaaatgtaagagggatccgattttatattacaccaattatgagtaatgatataaaatttgacaaacatttatgtgattttatttaaga

SEQ ID NO: 8982 - DNA, 811 bp, Cannabis sativa
aataattttgtaaattcacacctaaaaaataggtggtcatgtcacatgtgtctcaggctccattccacacaaataacaagtgctttcttctataattccttgcttgtataatctgtccacagtcctattttacattaacattatcaatttttaaatttatgattatcaattttagtgtactaattctttatttgcattgatagtttttagtgtgtttcattatttatattttttgtcttataagagagatcttaaagttagattaaacctactaatttcgatagatgatgacactattttattcaataagtttttaaaaatatgtttttcttgttattaaatattatttcttgtaaaaaaaatggaaaagagttagacaattttttcttgtataattttttttttaacattttgtttgtttagtgctaatcaagtaccttatattttataattttattattttgtaggttttcaaaattttggtgtaattttgtcttatatatataagtcattcttttctgtaaatttaatctgtatacatttatctttttgtgattcatatcacttttgcttgtactttttacttcttcttctctatattaaatatattgtaataaaacaaataggtattaggtatataaggatcataatcattaaattaaaataggaagatatataagatcagtaggaggaaattacatcatctctttacaatttcattcaaatcatgatgaagttttttcaatgaagaaacttatgatgaagtatttatattgaaattgaatacatctaatttggtaaaagacaatat

SEQ ID NO: 8983 - DNA, 721 bp, Cannabis sativa
ttcaagtacttgtatatgaacggtgcccttaaaaaaactgcaacttacttgtttatgaacggtccaccaccactatttctatgtgtacatcactaagaatatcgtttggcttctaaaaatcgaaataaactccagttaatttcaaaatcaagttaggcataatttcaatatcccctgaaattaacagcttctattctttctctacgacccactctcttcttccttaaaccaaaccaaaagaaactccctttgttcttctcagtatcccctgaaaatttcaatatcccctgaaattaacagcttctattctttctctaatttctatgtgtaaatgctttaactcaatctcagatgccatccaactcctcactcctcaccctcaatcgtaagcttgctcaccgcacccgtgcaaaccgttactcagacgccctccaattttttactcaatctcaatctcaatctccaaaatggtctgttttgggtaggaactttgcaagctaccataaaactcaaccaattgaaaaaaaaaatgacacttttaagaaataggacttgtattaataaagaagaaatggaaccttaagagtgaatgaataatctatccaagaagagaaatcgcataacaaggctcactgatagcatctatgagctataaaaattactccagtcccttgtaacaagtgactgagacagagaaagagagagttgcgtaccggcagtg

SEQ ID NO: 8984 - DNA, 769 bp, Cannabis sativa
taagccatgaatctatttttctcagcattacctatccaccaaaatttcctaacaatggcatcgagctctctacatgtggatataggaactttgttggtagccatattatacacaggcatagaggcagccactgaacttatcaaagttagtctgcctgcataggataacaacttcattctccatccttcaagacgtttctgcatacttactttcaaagcttgataatcttccttcttcctacgcttgaagacaaatgggttccccaaatgtctctcatttccccagacttgagcaatttccaaagccgctaacagttcggattttttattctgagggaggttattcgagaataaaacacttgatttttctttgctacagacttgcccagaccaggcctcataaagggagaggcacttcaaaagctcccttgcatttcccacattagctcttgtaaagagaatagtgtcatccgcaaacattaaatgagaaatgggcggagcgtttctcgaaatcttaataccatggatcttcctctgagcttcggccttacaaagtagtttcgataacacttcctggcaaagtaggaaaaggaagggggatagagggtccccctgccttaaccctcgatttggcaagaattttctgagaggacttccattaaacagaacagagtatgaaacactctttacacaattcataatgatcttgcaagccttttcatcgaatccattatgctccagaacattagcaataaaaccccactccatct

SEQ ID NO: 8985 - DNA, 1191 bp, Cannabis sativa
  modified_base (682)..(688): a, c, t, g, unknown or other
tggttttggctctcccaaaacgttagccttggttttggttttggctctcccaaaacgtttttccctttgtaatgaactaggttccttattgaatgatattgctagtttgctttccagttttcctggggtatccctaatttatgttcgacgtacagccaacaaggctgctcatgaattagttgtgcatgcacttagggtggatggtgaattggcttggattgaagattttacttcttttctattaaactctgattgttgttaattagagtttaatttaaaaaaaaatagaatttttatatattttttaataaatctaaaatttttggtgccttttatttaagttaattttacacctaatacaatactattattacatttgagccaaatataacacattttttaagctaaattggcacaaattttacatcttcattagatatggtggtatacttctatctatttcaacatttaagagaattttttaatttatttttattttttcatgtatgttgtacttgtaccacctacagattttcaaaaagattctaaatagtttatagttaatgaaaataagtttcaaatagttgctcatcccacgtaaaaaaaaaatagtcattcgtacaactagatatttgaagtttgttttcgacattgtcgtaagctatttatttatttatttatnnnnnnnttttttttttgaaaatttacaaatggtcctaaactctactacaaaaaatactattatcaacagtctccaaatcgagtgtttttaaggatcgtcgctaataaaagtaagtgactgtttaaaattttcggttatagtggagtattcttgacagttttaaacaatcatttactattctcgacaattaaaatcaattacgagatcaaaattgaaaaacatgtttaaggacattcctgacgattcaaagcatcggagatccccatttaaatatgacccattaaacttttttttaaaattattgtgttcccgttctgtttcccatttaaataggaaatttctgccctattagggacgggtatcatggccccatctccatgaaaaaaatatgctttgctaccaaaatacctccctacataacaaaaaataaaaagatttaaatattatattcttatcttatataaataaagaactatgaactctaatagcctctccaaatttaaaaaaaa

SEQ ID NO: 8986 - DNA, 514 bp, Cannabis sativa
ttgctattaggcaccagtggtgtgtagcacctttcataggtgacgcttcacgattagttagcgatattgcctaaaaattatttttattttgagttatatggagccagatacctaattacactgtccgaccataaaacgactagatttacactgtgcgaccataaaaccactagatttacactgtgtgaccatgaaagtagcccagagtaaattgaatgtgattatattacattattttttttttttgaaatgaaatatcaacttcactaaattaaactagcacaaaagatgttggaattcagcagtaattgaaaacttagaaacactacaaccagggtaaaattgagaatgtctagcaacatgatccggtactcgaaagggcagataaaagtatttggcagtccttgattatattacattattagtttgccaataatactcaaaaggatacatacaatttcatctataaaatgagaataattcaaaatttatgttattacttctcaatttcact

SEQ ID NO: 8987 - DNA, 707 bp, Cannabis sativa
cagccactgagctccgatgagcttcgtacgtcgacggagtggtgctctcatccactcaccatatggttttgtaatttcatgtgctggtgtatcgaatagtttggcacagaatctctctgagtgccccaacatcccacagataaagcaaaaggtggggacattttcatatttaaaagtgatccagaaccattcttccccaagcttacgaagtctcattcttctcttcagaggcttagataaatcaatggtgaccctaattctcatgtaatccctccatatgcccataaaattattaggacatgtatcaacaaatgtccctatataattgccaaccgcttgcaggatagtagatgtcatacatccagtttgaagatcatgaatctgtacccataaatccaatgtatcaagggtgatacatcttggattggaattgtccttcatacgtgaaataatcagagccttcctattgaaataccatggactgccttcaataacccgtttaatgtctatctcatggaaaaattgaaacaagaaacggttagcatccaactcttttatatagactcccttaccaggtttccatagagcagcaagagtttgttgcatagacgggaaatccattgcccctgccgtgataaaacctcccaccaagcatagtcgccaatcaaacacgaactcttcttcccctctcgtgtccagatcttgca

SEQ ID NO: 8988 - DNA, 1349 bp, Cannabis sativa
gttagcttccctaaaggttagcttttctggaggatagcttccccaaaagttgatttcccggaaggttagcttccctaaaggttcgcttccctgaaggttcgcttccccaatgttagcttccatgaaggtaaacgtttttgaaggttaacttccgcatagtaagcttccccgaaggttagcttccatgtagtaagcttccctgaaggtgagcttccacatttgtggggcttgcatgcagggtttaccaagaaggtcaaatttagtattttagccataactttttactcgggtgtccgttttagatgttctacatacagttttgaagctcttgagaagctttatagcatgagttttattttagcgaaaagataagtaggtatattggtgaaaaatttttatttctatttgggttttaaagaagtgtgctaaagttaaaacttatcagttttacattgtagcatagggcctccgttcagtgcatgaatatctatttatgtagactggcacacttgaataagaaagcaaggtatgattagcacataatatatatatgtatttgtgtatctacattatatgcatgttgtttatgtgattcatatgctaccaacacgagtatggtagcggtactgagtgcattggtatagtgtatcatgtttaaagggtattatccggtgttaccaacactagtatgattatatacatagtgcatgtggtacaacactcagttgtaattagggtatggttcaaccctacaaacactagtacactagcggtacttagtgcatgtggtatagaggttgtacttctattaagaatgttgttgatgcatctaaagccttgcaaataggtgtacggacgcctagacacattttggtattatgttatatgttttgtgcttttcttacgaagtctatcgactcacaaacattatttacatgtgtaggtaaaggaaaggcaaaggctgagcaccaatgagctcagggcttgaggataattgtacatattaggatggttcgacctagagagtttggtcttaggacgatttagacattcatttcatagtcgcagagcgatatggttataaattgtattttgaatattgtagtcaacttttgtagaagggtcccgacatttatgtatggttatatatttataaaagtttaaagtgtaattaaagtttaaatttgatacaattttcaagaaaccctttgattagaaaaggtatacatagtaagtagacaagcatcgtcaagatatgtacaatcatcgtcggattcaagctcgactaatagttcagtaagcttttacttgcttagtaattaatttgattagaaaagtatgataggaag

SEQ ID NO: 8989 - DNA, 720 bp, Cannabis sativa
agaaggacaaaaaacaccatcaacaccatcaccatcgataccaaatccatttcctctcccgaagaagattggaaatattataagaagaacactggagccaatgatgtcgcctcaacacttatcactacttttaaatggtctatccataaaaaatgaagatgataaccaattcatcgaagaagagattggtagtactattgttgataggccaatgcctctatcgccaccaccaccaaaaccaaaaccatttccgactcttccaaaggaggttggaaatatcataagaagaacaccgaaagccaatgatgccgccgccacacccattaagtctaaaaatgaattaagatgcaatgcctccatcgccaccatcaccaaaaccaaatccaaatttaatattattggcattttagtcaagggcaagtgaattatgaaattcatgaagatgacgtggaccaatcacatcaaactattatatatattataatttatgtgagtgagtgaaaaaaataaaacaattcattaataatttgtgtttgtcgtgtcatgtgtgtttacatatttttatgctttaaaacttattatcctttccaagaataattgattttaataatatacataaacttgagaaaaataatgtatgtggtgtttatatcatgggtttttattttatatatttaagtgtaatgattcttaattagtacattttaaattaagacacaa

SEQ ID NO: 8990 - DNA, 610 bp, Cannabis sativa
gtgctagtaaaagtcaattgtccagtagttaaaattaatttttgtcaatgcactttagtgcctgcaaagatatattctttttactgatgaaatattacgttggaaaaagttactaaggctacaacacacccgaccttgttttagtggcacactcgcttttactggcgagtcaatgtgtcagtaaaaccttttaatactgatattgttgattttgcatcagtaaaaaactttctatctgactacttttgccggcataaaaaagcactgacaaaagtacattttcttttgccgttgcaaacaactatttttgcgagcacaaaaatgcaccatgaaagtgttgtttcttgttgtgcatatgctaaaagtcaaactaaaaaaagtgtacataaagaagaggcataaatgcttttagttggaataaagtttctgaaatggtgtagctagctgaaatttaaagaggtagtttagaaaattataatatacaaaatagggttgagagtaagaaaagagttgagccaactatatctgacattgcatttattttcgacatcatgtacatggccacatgtgaatgttattagttactaatgataaaaacacaattattaat

SEQ ID NO: 8991 - DNA, 585 bp, Cannabis sativa
tttttgttttgctatagttgaaggcaatattaatgagtttctcaatagatcaagaatgtgtttggtttcacatttgtgaacctcttcaaaattattttccacttcggtagagaaccaccaatcactgaagaaatcagtgactagtgtaattaaagggagctctactatttcttctggactcataattttttgaaacaaacaatcaagcaccaaccaaggtatttgattttccaacaaaatcaagtcattgttgagaaatgacatcatgtaattcgcctcgaagatgggatcatttgatttttgaagctccatattcatgtgtttgcgaaaaaactcaatgagaaagcaaccatcaagtaccaaaagttttacaaattcatccatacttattatcatatcgaaagatccttcgtagcattgccaagcctcatctttaacctcgctaattgcagctatgagatccttcaatttgctcttacgatctgtatctggaaagcatgaggagatgagttcatccatatatctcattttgattttctgggtggtttggagatgaggttcgttgtagtggaaaggaccaattga

SEQ ID NO: 8992 - DNA, 1072 bp, Cannabis sativa
cctcttgcccacccactggccagcccgggcgggcaaggtttgggaggacaggaattttccaagaaaacgcaagtgaatgttgatcctctagtgcaagaaaaatttgaccagctcaagaatatgatacaacgcatatttgaccctaagttattcgacttagagttggataggatgtgagggtcacttttctctgcacatatcaatgtgttgcacttgcctaccaagttcaagagtacttggatgatgtacatagggaaagaagaccccttggctcacatcaaatattttgaaatccaaatagatttgcaaaatgttaaggttgatacctgttgcaggatcttcccaacaacaatgatgtctcacgcatgactactgagaagacgaccactaaaaaataccctttgcattagcctttggctatgtagcaatgatgcccattgaattggaaccatcatcccatagaaggataacctatgaccaaggaacaagccataccttgttggtagaatcccttgatgaaatggaataaagaagagaccatgtcaacttaaagctacatgcctaccagtaaaaagtttcctaatacttcaatgaacaagtcaatgagaggaaattatttgtaggaggcttagtgctacaaaaagtattcctgaatgccaaagatcctacagtaggagtgcttggacctaactaggaaagactgtactaagtgacaaaaattacaagtaaaggtgcttacaaactcggccggtacaatgagaaaatggaattggttctcctaccaaaatattggaatggagaacatctcagaaagtactaccagtagcccgtttgtaaaacacactactctttagcaatggatcctgcacgctcaccgtactggaattcagaaaggagctatatgaccatcactcttcactgatagcccttgcatggtatgccgcgtaagggtaggaaaaaattaggttttaaaagcatactttatatttgtaagcttttattaccaaaaaaaaatgtacgttgcaaagaaacaacgcatatgtaaggtatattaatgaataaaaaatgtttt

SEQ ID NO: 8993 - DNA, 525 bp, Cannabis sativa
tgaagaggcttcatctatctattcttccaatttggtcaaggctccattacagagagaaatgatttcagagaagccaaaagttagtactgttgggaacccttattttgaacttgatagaatcacttctagagttccaattgagataaggcaattgagggttgctcgtcatctctttgaaaggtttaaaggactcattgttggcttctttgtcaacttcgaggatcgaaaatccagccgggaatattttctaaaagctgattataaatccgcttttagagtattagagtacgagctcagcttcatgttccaggtaaagtgttttataagattttgtggtctcaatgatgttattttgctaatttaatattttcgtcgtggttagtttgacagatttccctttcaggttcttcacaccaagacggtggtggtgaatcaaagaataggctacatctttcggtttgttagcttcattacaatgttgggtgccgccatttattttctcttagttgaaaaacacgactatat

SEQ ID NO: 8994 - DNA, 608 bp, Cannabis sativa
tgcctaaccatttgagctaccccttcttgtgtcattggctaagtagttgtataaacatttactacaagtcagcaataattacaattttcatgtatatttcaagtgtgtaaatcttccattgaatggctgccatgaatgatatatattaaataatgttgtgcatgctacatatatatgagttcatgagtacaacatccagtaattttaacccatcaatatatattaaatgaaggatgtcatgaatgcaaattaggcaatacataacgagtgatgcaaacactatattacacacaaattatatgtatgtggtgtcatatttttaaatcaaccatgctttcaaatataggacacaaaagtatgacacgccagtgtatgtatattgtgttgtaaaaaatgtgttagtggtagaaaaataacacaagcttaaacattttgagcaacataccaagaaaatctctcccattcagtgcattcacccatgtttcagcagcatcataaagggctgcacgttcatcggtaatgttatatttcttcttcagtttcttcgatacgaagtacatagctgcagcaccagcatattttactgtaattctttctgtgaagctgaa

SEQ ID NO: 8995 - DNA, 658 bp, Cannabis sativa
gcttagaaattcagttttctattataaataatgataggcgaggctagagttcctgtctgtgaaaggtgaaattctttcaagttcaagccatccttgcatgttacaattcaaaagcgagcctattcgcattctatggaccttccttaaagctgtccctcttgttgctggctatctatcagaatctcaaactttaaatgttaagtttaaaggtttcagggaaggagatgtccctactggatgcttaaaggtgacaatcgaacaaagagcggaataccgacctggtgctggtattcctgaaatgtacgatgcttccctaatccttgagtctgaacttccattgttgaaaagggtattgtggcattggaagatatccatattcatatggatcactatgacattgttttttatagagttgttgtgtgctctggtgtgttgtaatcgtatcattatccctagaccaagacagagacaaaggaatagttctattagcagtggtgctactactcaaaacaaccctactgcacgaagtggcaatggcgggttacacagagctgcaccattggacgctgctgctgatgctgcagcccatcaatataggcatgccatcacaactctttcttttctttgatttacgtttccaacactcgtataattattt

SEQ ID NO: 8996 - DNA, 643 bp, Cannabis sativa
  modified_base (412)..(415): a, c, t, g, unknown or other
ctggcaaagtgtcttaactttgctggaaaaagttaacttttgccgacagatttcattaaatgcgctggcaaaacagcttattcttgtagtgagctaaaagcattaaagaacagggagatcctagtagttaaggtcttatggtaaaaccacagaaaatataaggtcacttgggagttagagtctgagatgtatatgaagtatcctcacttgtttaatttttaacttgaggttgtactttgaaacatcatgacaaaattttttaaggaggaagaatgtgaggactcggtcaaaatcgagaaaaagaagataaaaaaaaataaggatgtgggaccaacaatttatttaattatttattaaatttcctttcctcccttacccaccagacaccatctctctctctcactctctctcnnnntctctctctctctctttctctttgtttatctctttcctacttctctttctctttctctctcttcaaacacttaaaaaaacaccaccaccaccaccgttgacgaccatactccggccacctcctgaccctacacaccagagcattggactccccacccgctggtgatcccaaccctcaagcagtgcctccacattcgccactgttagcaagagctctcgagtgaaagtt

SEQ ID NO: 8997 - DNA, 597 bp, Cannabis sativa
aagagtatatattgatattaggtattagtggtacttgacaccttctacagcgatactttctaaaagttatactattaaactatataaaactcattacttaattacaacaataacgatcttaacacgtaagagggtgctaagcaccttttaacatttctcataaagaaccgcctctattttgccctctctattgcactctaataacatgtgtcttcttttaagcaatgttgtttttaataaaaccattgatcataatattttttcattattacagttttgccattaattaaaaaagtataatatcttattaaaagataactaatttcattttctaattaagaaatattaataaagtaaagtaacaatattagcatgaaaaaaaatctattatgctaacgtaattaatttattttctacaattatattagtagaaatatgaataataagaataatatattaattttaaaataaatatttgtagatatttttttttattatttttatgaaaaaattaataaagatgtcttattcattcattttttgttacagaaataaagatacatattgtttaccgaatttttcaaaaatcgattataa

SEQ ID NO: 8998 - DNA, 1784 bp, Cannabis sativa
aaccggtggtctgaaatcaagtgtctccgggttcgggtcagaccaattcgatgagaccgataaggaagagagatcccaaatgacagccttcttcaactggttcttcttcttcataagcatgggctcactcgtcgccgttaccgttcttgtatacatccaagacaacgtcggaagacaatggggttacggtatatgcgctttagccattgttttcggcctctttgtcttcttggccggaactagacgttaccgtttcaagaagctagttggaagtcccttgactcagatagccgccgtcgttgtcgccgcctggaagaatcggagactggagtcgccatctgacccgtcgttgttctataatgtcgatgacattgctgatggaaagaagaagaagaagaagatgatgatgaagctccctcattcaaagcaattcaggttagtcgatccagttataacttataattattattacttaatcattatattattattattattatatattattgtttactttttagtacatgtacaaactaacgttaattcagaaaaagaagaaatttcatactaatagacacacatgagaacatgtgactagatatgtgagggtctaatcataaaaatataattatataataaaccaatcctataatgccacatcataatggtggtgttgacttaatatgcagtaaaaagaaaaatagtggaccatacacgttattattttaaatttataataagtgtgattgaaccaacaataattattgtaatttcgatcatttttttcatatagagtagctaattaagctacgtatatatatatatatcatgtggtcggggccggggcttatatttaggttgagttatattgttggtgaataaattattgatgaagtccttttactcatgatcaatatatatcatagatagtccataattgaataattgatcatcgatcaaacttgcttagctggctctagctagctaggctaatttggattggtatatatatagttgcgtgtgaagatattagcacagtatatataaacatgtgactttattaatgaaaagaaatcatttgaagagtaattaattagtattttatatatctatgattagagattaattttaattactaaagcacgttggctaattaggacttgccactaacaagtagttgaagagagaggtgctgacaaccagagtcggcttatcttaaaattaattaatcatacatataatataaaaatgaaataatgtagtggggcattcttgatcgaataaaatcaccatcaccaattgtagatcgattcaatagatccatgtcgactaattataatgtagccaaacaagaaataaaattaataattattgacgtattattacatatataatagtattattacatatatatttgtctattaattggttacatccccttcatatatatattcatatatctttgtagaaaactatttatatgtattatatcccaaatgttacatgtacagctatctatatgcatatataacgccaatttgttgtcttgagatagacaataatgccacgtggctagcttccacgtatatgtcttcaattatggccctaataactaattcaattacatattaaatagagtaatttgtctaatattttaatttttatacatttaatcttatatatttttttggttgcaaaatctgtaagtttaattccttttcttgtaaattggaagcccaagttaaataattttattaaatattaattgaatgactattgtatgc

SEQ ID NO: 8999 - DNA, 516 bp, Cannabis sativa
tacttagaacagttttatcatatgcattttattctttgatgggcttatttagtagaccgtacactattataaaaaaaaaatattccggttggtgaaaatgttgattttttttcgagaacttgttgtgtgtggtttgagccgatcactcccattagtgatgttgtagagttattccatttttaagtcaaatataagctagcttagcctattagtaagttaattagttttttttttttagtttctaaaatggacaggtataaatacctcattcattctctcctttatcgagatttataattcagttttggagggttatatattgagctggagtatctgatcttcagactcacagtgtgagatttactttgtaatttgagagtggttttttgagttgttctgtactcggatccatcttcatcatcaataaagatttaaccattataggatttatttgttcatcttcttatttgattctaaaactagtaattatgttttgcttttcattttaattcattt

SEQ ID NO: 9000 - DNA, 907 bp, Cannabis sativa
tgtgaaaacaacgttattttgaaagcaataaaaatatattatttgtaaagaaaaaagttagatccgtaaaaaaatatataaaaaaaaaactttagatccgtaaaatatattattttgttatttttaagtatttatgaaataattcgtataaatagtccaacgggttgttaaaaaaaatatagtccaacagatattgggctttcggcctgatttttttatgaaaatcaatcaattgcataaatatcactacaaggataaaaataattaaaaatacaccaaaatatgaaatataatgagacggtttatttataaaacaagtttttaaaatttaaaactttctagtcttattgttgttttaaaaagaaaaaatcacaaaaagtaaataaaagaaattgtgaatcttaacgttgttaatttttcattggatcttattataatatgaaatgtgaatattcttttatcaaaaatatgtttttattacaaaataatattgaaagaaaaaatgatttcaaatcgtgatttcagctagtgatgttctctatagataaattgctataacttgttaagtatttaacctaatataactaatattaattacaagttattttctcattaacaatttttttaaaagaaaatctctaacttgttgcatcaaactaataaacaatactttttaaacatgctcactaggccagtcttagattaaggtgggttagactcatacctaaggtccacttattttagagcctctaataaaaaatgatacatatttttaatcatttttagaaatatcattcatttttattatgaaagctcaaatttattttttcttaaagcctatttcaaattaaggctgaccctacttaacacaatttactgtagaaaagaataactatcacaatgggta

SEQ ID NO: 9001 - DNA, 875 bp, Cannabis sativa
tggttaagtgttaaataatcatcaaatacaataaggcagtgacttactttcggttccttgaggttctagtttcaagcaatactttctactcttatatttgagtatttaactactcttatatttgagcatttaacttagccatttttttgtggaggaaagggaagatgaatatttgtacaataacatgtatgtgctaccccacaagtgattagtagttgagacttctaatcacttgttacatggtaaaactttcaaagaccaattatgagatgaaaattcttattttcattcaaataattctttccctgaggcgtacatggaaattaataaaaaggcaaagcagaaatgtaaaaggaacttgaccatccctattctacttatagtatcagcgcaggtggttagtgttccaagcacttggaattcttgttcaatctagtctcttcatatgataagttccatcactaattttatcaattactttgtacggtccttcctagtttggacataagattaaaactccaagttcttgagaagcacggaaaactcttctcaaaacatggtcaccaatctaaaattttttgctcttaacctttgagttgaaattcctggctatttgttttgatacatttggaattgcacctgtgactgttcctagagctcctcaatttaaatctaaagattcttggagtaaagcatggttctaagtcgtgtcataggtatccctcctatgcgtagatatagtggattcaactggtattacgacctcacacccataagtcatggaatatggagtgtggcctgtagaagttctcttagttattctgtaggcccaaagaaccctggataattcttcaggccggtacgctttacaggcc

SEQ ID NO: 9002 - DNA, 1199 bp, Cannabis sativa
catattatcacacctagtaactactacctatatcaaaattaaattaacgagtgtttaatctcttttggtattattttccactaagtttcttatttaattgcattttagagttggaattcctatactaacacttatatcttaaaagtggtgttgctttgagagtatcacatgtaattgtgctcgctattggataggctatagtattcctaacgtaataagatctcagctgacaactattttaagaacagtgtataagttccaatcaatttctcggtggtcttccctattaagctaaagaaatagagataaaatgtgcaccacttaatttttctttagtgttaacaaaaaagcaaaaactatatgcaaatttttatcatattcaattttgtttttataaaattcacaaaaatttccactttctggtctgcggaattttatttggtctaaattcagttgctggaaatttttgtatttgcattgaaagagaaagacaatagaattaaagaagtaggacaaaggagagaaagagtccaaagttaagagttagagagctaaaaatccacatcatcaggggccagtgtagcacgtgatgcccgtacagtatagctactagtaaagtgccacgtgtgttgggccatttcccacgcacgagtcctatcatgggagtcataatagaatgacaaaactatcctcggaacataaaaacaaaaactcccaatacatagacagactagacaagtaccaataagtaatgggcctagtgggcccacctagtcgttcggtcaatagggatgagtcatcaaatggttatctggcctttcgataagcccgacagctgcctcattcgttttatcttgtgcctcatgatttcaggactctttctttctttttatctttttcttttttaatcattattatcattttcatcaatctttcatttttttgcaaagtaatttaaaaatgaaaaataaataaatagtacctaaaatactttgtgtttataaatgatataaacttaatagtttttttataggataagtatttaatatttagaaaattataatttttttcaaactcattttaaatttattaaaaaaaattaaaaataattaatgttacatgtttttatttaaattcaatttaaaatttaaaatttatatgcatcgtatttaagtcaataacaaaatttatattcacaa

SEQ ID NO: 9003 - DNA, 517 bp, Cannabis sativa
tcaaccttagaatgctattattactaaggtcttacttggtaaaatcacaaggaaatgaaggaaccaagagttctaatctggcagcttatactcaccataaaaattcaatgggcatttaattaaaaaagaaaaactatttgtttaaaagattgtcaagagtaaattatactgcaagaacaacaaaaaaattaccatttcgtcctgaaatcataacttctagttttgccaaactcaaaattgcaataaaatggtaaacaaaacattatctaatatctcaaatacataaaagcaagttccacgacactaaaggcctatttaaccggtgatattctgagacttgttaaggatcacaccctcatatttgacctggaaccatttcatggcatcatccttggtgacacggtgctggattccaacacgtgacttgcatcggcgacgacggcccacacggtaaccaggacgctccaagacaacaaagaaatccattccataaataccagtggaaggatcataccta

SEQ ID NO: 9004 - DNA, 1339 bp, Cannabis sativa
aaatgttatttgataaatttctcactcgagaaggggcattatttttcattctctgagagtatggcgtcgagaagacataagacctctatcggtgaaatgagtattcccaatttctcttcgaacacaattcctccctccacctaaaaaagataatatgttgttatatggcattagacatctcaatctaatcaaattcacattgtaaatacgaaaaaaatggggaagaaatttccacttcgaagttaacttcaaattttgataaagaacaaatatttacctactaaaaagctagggtaatagttctcttaaccacacctctacagacttgttgttaatctgtcttcatagcctcgagtattaatgttctacaatcatcataactccaaattattgatgaaaaaagaaaactaaattactttcaacaaaatctattgtataaaaatcaagcttttaatcattagttcaatcttacatttgttttcctatcacacctgcttttgttctcatgaaattatggataaaaagagaaaataaaaatatgagattgacgaaacttttttttttaattttccaataaccaatccaagctttttacttctcttcatttaggtgtcagtattattattattttcatttttaaaaaagaaaattttattcttatacacgtaactacatattaaataagtgcaaattgtggcaaaactcctaaaattttaatttcatcagcaattaactcccaaaacttaaattttagcggtaaagcctccaaaactcatgttctgttagcatttagctattttcatccatcttttgtagttaagtaccacgatgactatccatgtatacacagggtattatccacatggacgcagtatacacatgacacaatttaattggcacacgttaataaaataaataatttaaaataaaataaaaaaaaaatataatatatataatttgtgttgaaaatttaaattttaattaataaataaaagaatttaattagaaacttaaaaaggaaaaccctaactgcactctccttcttctttccaatctcagccgcactctcgttcttcatcttctcctagctgctctctctcaattgcacgatcggagaacctatacctcaaaaatccctagagccaacccaaatttgacgccctttagctctcactctcgaacctctctcagcgtggacacaacaagcctcctctgccctgtcgagggctcaagacgaggccaagattggactcgccgtgttcagaagaccccaactctatgattcccaagacgaatgttattgtcccgtcgctattaggaactcgtcggacccgagatt

SEQ ID NO: 9005 - DNA, 590 bp, Cannabis sativa
accctaaaatcaacaatttggggggaaaactagggttcctagaaaaaccccgactggaaaaccggttttccaactggttaactgggtttccagagggaaaatcggtttacaggtttctcaagtcccacaaaaaaccggttttgtgcagaaaaacccaaaaatcaaccccttaacacaaatcaaccccaaactcaaccatactctccagaatacctgtatatactataataaacctatctccaacaaaagaaatcaataaacggctcaagaattaaaaacaccattaaagctcaaagcttaagctctcaaactccaacttcacccacaaatcaccaaacaaagtcaaattagtgtagaataacctaaacaatcacaacctaaccttagaattcgaaatcaaaccaccccaaatcatacaacaacttaaattcccaaatcaacctcaaactccaatttaaactattaggcatttataagggttaaagacaagaatgcaataccttgaaccaaagctctcaattccttcaagaatccacaaaaataagcaaaggaacaatcaaaccctagtttccttctagcacaatcgagag

SEQ ID NO: 9006 - DNA, 588 bp, Cannabis sativa
caaatataattcaactactatgtatgcttaattcaagcaaatactttttttgtattataataatatgtatacatgattatcaccgtcaatcatgcacgtaccgaattggaaaaccatgccaagtaaaacccaccgtcaccgagggtgtaccccaagctaattgggggcttcggccaacattataaattgggctctttattttaaagattattttattatattttttattaagtatatagtggtaaaaattagaaatatggtgtttttcaaaagaaagtaatcaaagcttcattttctagataaaatataataatttttagtaactagtaataaaacttaaaatatggaattccaaaataatatttacattatagagtttttagcaacaaaaaccagtttatatttatcttttatacaattaaccctattttctttatttttatggtaaaaccctttaagtttagttatgtttgcaaatttaatgttctcttcatctctacgttataggcatatgtggcattctccaagtcttttagttgtcaacaaaacccctttatatttatcttttactctattttttttagttaa

SEQ ID NO: 9007 - DNA, 784 bp, Cannabis sativa
ttgcaagaaccttaatgatcaatcattctaacaaaaaaataccgctctgatacctattgcgaatctcaagtttttgtctaacctatctttgtcatatttggattgatttcatcttaatttatgcttgaatattaaaaataaaataaaagattccacaccaaaaatttacaagcttcctttgcactaaaaaaccatgacaaccgagtaattgttgggttcttcgaaccaggataagtaactatataatttaaaaaatattcaaaatctagttcttgtacaattcacaaattcccttatagtaataaaattacccaacttccaaatcccttgataagatcagtaagatccccttgcttcttgttcgttgaatcccttcaacgaagttctagatctgaacaccttcaaatctactcgccaagatgcagttgaactcccttaagctcacactacttgactttaagtcttgcaacaaaactttatatcaccattcatgaagcttcaagcaccgacatgcaagattcaaagaacaatagagagaaaaaggcaaaacgtgatctcaatctccgatctaagaaggttagtcaaaacaataactagaaatggtatttatatccaactaaataataaaacccaaaataactaataagtaggctgagaaaagactcgttgtaattgggttccagatgactgtaactagttggacaattaaacaactaaaaactcattgctaacatggattatcactaacagtacaaaatgtagattcacattagccattccagac

SEQ ID NO: 9008 - DNA, 658 bp, Cannabis sativa
catgcccatgccacaaaaatcaccttccacatctaaagatgcatgcatgttgaccttataaaagcccgccaaaggaggtgcccaacgtgacacaataggatgagaggaattagccacgacttgcccagaagatctctgacagctaatctctttggtctccaaaagaggcttttggtaatcactcaaaaaatcacgagcccaactgaccaccaactcaggggacattaaaatattattatgtaccatttcatttctcttataccaaactctccacatgataacaagggctaactccacttgagaaattgacaaaggatccaaaaacagatagataaaactaataaaataagtacaagtaaccaaagggtctcagaggttaaactcacaaagtttttggaactgagaaagagaagaatgtccccacatagcataatgagaagtctcttcctgagcgtcgcataaaggacaaaggccatcagtaagcatataccatgtatattcaaattaaacttgttggaatctaattatttgatatctgcttagtaaacattttaactttgtgaggaatatgaagactccaaaatttcttccactatctcaaaaacccctgagaagtaggaggtctgtcacactccaaaattctagtagcaaaccagta

SEQ ID NO: 9009 - DNA, 1730 bp, Cannabis sativa
cgccatttgcaacctgaacatgcgtcatctttttcactttttttgtttattgtattaattatagtataagtacgtacgtacgtagaagaaaaatgagaagaagagaattaaggatagatcaggtgattctattatatgtattgaaagtataactgcagtacttaatttatataatacaaacgtatgagtgtttatatatactatagtgttatatataatccacatataaatagtactcctattgaaaaaaagatatatacataatcctatattgttaaggacaatatcagattttaaaaacattcgtttatctcttttttttttaaaaaaaaaaaacaaaaaaataagaatttgttataatataactactcatttaatgattttaattaactagtaaaaaaaatagtgggtaataatataatataatatattatagtaattaaatggtgtaattgtgttagaattatgttgggaggttctgatacagtagagcgcgtccatggcgtgttggtaggccaccggtggtaagttgaaaacgtaattaattatgaggtaattaatgtcccttacccaatatatatatctgctatttattttctttgttcatcttctcctgaattgctttcaaaattactaattaaatcaatatacaatataaaacatacatttgttcctctgcaaaagtttttttaattgaaaattaaaattaaataataagtaattaaaaatcaaaaaataaaaacaaggaaggatatttatttagactctaattgagtctcatctactcttcaaattcaatattcttctactacttttgttactagtactttttttttaaacaagtatacaccaaaataattaagcattttatgtgaggtatgaattttataattgttttaaattttctcttgaatagtgtgggtagggtattggggtgtatggtagttacagaagatatcccctttaatagtgttcttttgatagaatgttagtaaaatctatgaatattatacttttgtttgtgatagggacattcagttttagggataaatgttaatgcccttctttctccccatgattttcaccttttgagtacatatataagagtgtcttttattgtgtatgttttgtccaatcttattctcaccttgtagatattgtaattcttgttctctttaggtaggtactcttaattcttatggtgttacggttaacatttgtagttttttttagctaaatgttgtagggttttttttggcacagcttttgaaaaagttaaaagtttttttaaaaaaaattatgataaaaatgtgtttggtaaacagtcaaaaaatagctttttcaaaaaattttggagaagctacagctaaaagctaaacctgttccaacttaacttttttaaaagactataataaatttttttatactaaaaccatatttacatatttattacatattaaaaaaattaaaaaaaataaaataaactaattataataaagtaaataattattaaatctctttttttttaaaaaaaaaataaatatatattttattttattattaacaaataatatcaacctagaattttttttatatacttgagtttctaattattttttttatatttgataaaacataataaaaagtactataaattatttttatcaaatgcatataaatttatatttaaaaaagattaaatatatatcaaaaataaaatattatataaa

SEQ ID NO: 9010 - DNA, 556 bp, Cannabis sativa
aacaaaggaccatctcctaaggtggaatcgcaagcacttcaagatgatccataaacaagttgaagatgcccaacaatccctggagctaatcgaaagggagaactctcctgatgtgaatgtgttggatgaggcaagagcaagactgaacgaagctttagcacgggaagagatcttttggagacaaaaatcgaaagtggcatggcttaaggagggggatcgatgtactaaattctttatggcctccactgtagttcgaaggcgcaagaattttatccaagccataaagaatgaaaacaatgaatggataagggacccaacttccattgctggcctttttgttgataagttcaataacattttcgcttgtaaccggccgtcctcttctccggatcttcattggatacggggaattagtgtgactcaatctgaaaatgaattcttaaattccatcccctctgatgaagaaatcgaagcgagcttgagatcaatgggaaacgacaaggcacccgggcctgatgggatgctagtggggttctacactcaacattgggataca

SEQ ID NO: 9011 - DNA, 533 bp, Cannabis sativa
ccaagtttttatttatggaattgatacattaaaacctccaaatttctctattttatattatagaataataatggtggttttaggcagaagctcttttaaaaatttgttggcatcaaatttaatgacagttaaccatagtcacttttttttgctcgatttataactgcacacttaaattaccaaatttatactcttttactattattattaatttaatgatatttataagtacacctgcaaacagttgcaacaaactaccattcaaacataaaagcacacagattttttttttttggtaatggtttttcctattgtactatggactagtttatgtgataaatttcattaaaatcttaattgactgaccctgatttttcagaggatatataataaatgagcaaccaagacctaactgtatgagtgaagagtactactctaaaccttctaaatacatgttgaaatttctttccaaaaaaaaaaaaaatacatggtgaaataatttaacgatgatgttagttatagttacaatatta

SEQ ID NO: 9012 - DNA, 918 bp, Cannabis sativa
gttgatgagcgggattaagaacattacctgcaagaagagtcggtggtggtggatttaggccaaggatgaatcgatctaagtcataagctcgaacagcagcaagagcaagggatctccaaatggtgtaatttgaccgatctaatatgatatttaggggtaaaagattgttgttgggaagagcaggttgtatttcgactagtggattttgctgagccattctttcattagctggtggggctcttcttgctggttgatcgccattatcagacatggctctgataccaggaaggaactctgaaaaccagagttcttgagctgagagaaaggtgagatggaaatagaaagaagtgcaaaacagatggaatgaaaagtgaagctcaatcaatcgattggccttgttgatctctttatttatatagatggattaatacaagaggttagttacaatgatatccaaaccagctgtacaaaagcaacagtaaaaagataactaactaactaatagaaaaatagttagttatgaacagtataaactaactaaccgactaatcacctacgtctccaataaaaaatgtcacaaatacttttcagtaatagtgtgaaataataaatattgaagtagaatgaacaatttcattccttttatttttggcatacaaagtaaataaaagttgattttctatttttactctagcatacaaacaattttcaattaatatttatttcatttcacttgtatttgtagcaaatataaagagaatatcaaacttaactcatgtttagtaaattaaattttaatagcaaaaaagttcgtattttaaaattaatcttatttttcaaattaaaatgatagtaatattaatttaactctttcaactctactcacaacaactcaaactcacacaataaccattaacc

SEQ ID NO: 9013 - DNA, 600 bp, Cannabis sativa
gacatcttggtggattgagaacgaacatctgctttcaaattagtacacaagggcaattcattagttaggcatccttccaattcatttctttccattacacacacaagatctaatgacaataaatattccccattaacatccttctcccctacaaatattatcagtgcatcccataaagcttggatagaaaactacaaggtaattttaatctaactcttagccatattttctcagttttcaaactcaattgtcaaaataggcaaaacccctccatcatacctctagtttccaaaaggtgtaaatcacctaccccaagttaccattatctcctgcaaaaattaatttactttcaacaatctatagaggtcccaaaataggcaaaaccccattaccatttcacattaggcaaaatccgagcaattatactcgtgaaaaaacagacaaaaaaatagagtatactcgggaataagttaccattacccctgcaagtgtaccccactgaatttgagaagtgagcaagattctctaaacaccattgacttgtttattttctttagcaaatgattcaaattctaatatgttacctaccaatttgacaat

SEQ ID NO: 9014 - DNA, 912 bp, Cannabis sativa
tgtagagaataaaagggtaagatattaaattaaaattaaagtggtggacatatataatttctaaaaaatatatatatcatcaaaatattcaagggtgaccaatgaccatactttgctcaatatagttaattaattagttcaatattcttttccaaaataattttttagacatctttaacagccttgttaaaaattccatacacactggttatatcaaaagaatgatattaatgtaagaaataataataataaaaaagattatttcacaaaaacaacaaaaaaaaaaaattacaaaatatggatgtccgaaattttaaatattttttacgattttatttacataaaatacagtctttcgatgtattttatattgtgctcttattaatttgttgttaatattttattatttgtatgttattttttattactgttttgatgttgtttgaatgttatttttctgttatttttatgtaattttcttattattttcgtgttatttttattgaacatcataaatatatatataaaaaaaattaaacgtaaaaatataaaaattttacaaaaaataatactttatataaatattctttaaaaaaattaatcattagtaatatattctacattattatcttttttttatacaatttaactacattattaattgaacactttaaccataaatagatagtagtagtagtagtagtagtagtagggggtgtaatatctaatgatcaatattttatggttacaaatgagtcaatttatatagactataagtagtggtacatatatatttggaagcattattatgaaaagtctaggaatgatctaaacaattaatgcatgtgcattcacacttgcttagccaccacttctctataaatttttctctataaaaggagcttctcataa

SEQ ID NO: 9015 - DNA, 520 bp, Cannabis sativa
ttttttttttttttttaagaatttagcgtctccaagatataaaatatattaaactcgatattaaaatatatcaaaaatatatgctacgtactcttatgatacttgacaacatttagtatttttctattttcttttcaaggaaaaaggtttagaaagattctaccatgcatgcatcccttaaaattaaaataatattttagatatagaattgtgtatgttgtagttattgataatattttgtaaaattttaagaaatttaaaataatttaatataccaaaaataaaatttaaggagttattttgtatgtgtgacttataaacattgaatattgttgtttatattgtaaattattttgagtttttaaaaatgttataaaatgccttaaattggactaaagattaagaaaaagaattaaatataggtacacctctctcttttgaagagtatattattgaagtacccaaaattttatatcatcacgataatcaattatttaacaatactattacttttcttttt

SEQ ID NO: 9016 - DNA, 826 bp, Cannabis sativa
cctctctttctcatcaataagtcagagtatagtggaattcgcctaccacaagttaaaaaggaccatggcataagacatctccaaggagcgaaggtcttctctgccttagctgcatctcgaagagtctaggggttgtttctctcattctttgcatagcagccaaagcaatatatgccttcgtaccattcgctgggctttgattgacttgcctttgtaacttgttaatggtcaccagacgaaggtcgctattatggtaagttgcatgaagaagtatgttcagattattgtgtttcgtcatctaggactatttctgatttttctctgtgtcacaatcattacgaaggctttgtatgagtgagtcctttcgttggatgtccccttggagatggctaacttcctaaatttgggtagatattgtttcaaactagagaacaaccttggccttagctttgtctttctcctcccaagaaagacagagttcctccttagctttgtctttctcctcccgagaaagatggagctcctccttgacctcatcttagttctcttgaagggaacacacagtctcctcgacttctttctcaacttgggccttgtgttctaaatatagcttccatgtttggtgtctatcttcttctcctcaactgctagcttggcattgcagtcctcctagaccttttagatgtttgagacagcatgggtcttgacttgctcaacttctacgcataaggcaccattttcggttatcaaggattagaccttagtgcgaaattggctcagttcagtggtcatgttgcccacttctttggtggtcctctctgtaaac

SEQ ID NO: 9017 - DNA, 1175 bp, Cannabis sativa
acaagcagtacataacaggttgttaaaactaacaaactgaaataactaacacaggtgtaaaactctaactaatactcctaacacggcccctcaaggttacaattagaagcatcaagagacttgatgtcttcaatggtaagcttggatcgaaactgagagaaccggttggtggagattgcctttgtgagaccatctgcaagttggtcttgagctggtacatgcttgacttgaaccaggttttgaaggaattttctcacgcacaaagtatagatctaagtttcaatgttggttcttgcatgaagaactggattggctgtgagaagaattgtgctgaggttgtcacaccatatcacagggggttgatgaatcttgattcgcagttcagtaaacaaagaatgtatccagataagttcagctactgtactggcaagacttctaaactcagcttccgtactagatcgtgatatggtgtgttgctttttgcattgccaagcaacaagattgtcaccataaaagatggcaaaaccggatgtagatcgtcgatcatctatatctgtagcccagtccgcatcgcagaaagcaacaatttcttgcagagatgaccgtttaagatgcaacccatgagtgatagtaccactgagataacgcagaatgcgttttacagctaaccaatgactaagttgaggatctttcatgaactggcaggctttattgacactgaatgaaatttcaggtctagtgattaagaggtattgcagtgcgccaactatagaacgatacaactgaggatctggtgtaggttcacttccataagcaaacagtcgaagactactgatcataggagtaggagaggatttggcatcatgcatctgagctttgagcagtaggtctcgaatgtacttagcttgtgagagatgtaaacctgaggaggtttggtgcacttcaacacctaaaaaataatgtaaatctccaagatctttaagagagaattggttgtgaagagaaacaatgagatcttgaatagattggttgttgctgccagtaaccaatatgtcatctacatatactagaactaaggtagtatgtgtagatgtatgttggataaagagagaatgatccgacttagatggaataaacccaagttgcaagaaacaatggtgaagtttgtcaaacca

SEQ ID NO: 9018 - DNA, 761 bp, Cannabis sativa
agaaaactatttttattatttttgttccaattatatattttattttatttaacatttgattattataataatgttttataattgaaatttattaaatataaattaatttgacaaaataatgaaaaaataataatattttttattaaaataatattaaaaaaattagtgaaaaaaagtagggaacttccaaagcattcccaccacactccctattttttagctaaattttaactaaaatagttaaaaaattaaaatagtaatgatttcgattaaaatattattaataaaattaagcaaaaatgtagagatctattgattctccaattattatttttgtatgattggagttcatttattttttaagattactttctattttagttaaagaatgtatttagtaaacatagttggagatactcgtagagctgactatccattttgttattataaagagccattgaagcttattttttttgtaagaattactcgtattttagctaaggaatatagttagagatctcaactaattaccttatacacagttcccaaaagtccgcttccaatcttggtttcctcgctgaattttttggttgccttgattaatactttgagaggaacctttatttcgtccttatcctcagtagcttgatcagtagtacgggttgtacttccacttttgccctcgtctatattttcccctatttgtatttcttctgttgaaacagagccatacagagttagaaaattaattaacaaataat

SEQ ID NO: 9019 - DNA, 586 bp, Cannabis sativa
tattacgataagaataacagagagaactgaaattgagacaaaggtgaattgaagaaagagaattcattgattgaattaagagggaattacagcagtatatatacagaggagaaaaaccaaaaacagaacaaactaactaaatattcggtcgttaacaaacataactaacaaccgtatataacggaaataactaacacaacagacttcttatagtaaggactacagtacatataaaaaatgggaaagagtagaaatgagtaatctgatatgtgtgtatttgtgtatatttttaagtttaaattttataatatattataaagatgagagatcgtgtggagagattaattgtatttccattcgctaaggttgcaattctgagtcaagtgttgttatgagaaaaaattatactattgtcaaccattaacgaaattcaagagccaaagcagcaggaccatgatcaacaaaagtgctccaattctgataagaaatgttagcccaaacaacaccaaaaccaaaaactccatccttccaagaagcatcaatgaagaaaatatgattatcaaaacatggttctggagctggttgg

SEQ ID NO: 9020 - DNA, 578 bp, Cannabis sativa
atatgatgtaatggcttttgatacgaagtaggttccttataagaggacattcttggtgttggaatttatgggttaatgggtttttatgacttatatgagtcatgaccattctttatttttcttcaaaaaaaaattatctgacagccaatcatatacacatataatatggacgtacagaaagtcccataatttgggtatgtaaataatattacttaacttgctcttacattttcggcataccacaaataaacacactttttccacttcatcagtcttcacatacaatacatattttttgagaaatatgtttaggtccatcattatatcttactgtgattagatttgcgtaaataaaccaattacattaattacgcaaatgaaaagataaaatataataataaaaagaaaaatccaattccctctttttaagaacaaactctcccaggtttccttgatcctatgatattgcgctgcccacctagtatgggtaccatttttttatttcctcactacaggagcctcccgacctatttttgggcattcaccattgggtggctctggccaggaggagttttttt

SEQ ID NO: 9021 - DNA, 759 bp, Cannabis sativa
tgaaagaaaataccaagaaacttgcctctttaatggtatgtttgatctccactccccagtctttctcatcgatgccccaaacccgtcctaaaatcgttctcaatagagaacgattgatcggacgatttgcgcagaacctccccatcgcacagaatgaggcagcttcttttcctccggccgtgttgatttcccacccatcctcgtctagaaccgttaggttattagtcttggccagtaggtcttccattatagcatcaggtgtttccatagtgtcaggcttgttaagcatttcagtggaaggctcttcttcgacagagagcatagaattcttggagctagcatttcagtggaaggcatttactgattagctagtaaacaataaagtattgaatgtcattctaataaaattactcttttattattttggtgagtgactattattttattttaaaatagaaagaaatgccattttaatacaagatgaaaaaaaaaatattttttcttattaatttttttgcattataaattttatttcattcttattttattcttattcctattaacctaacacaacctataaagttttacattaactgaaagtataaagtttttattatagtttatagcttttttataagttatatacaatttggaattttcgatatatttttatagtagttagccttcaaattcttgtggctataattatccatataatttttgagtattgttgggtctaaagactctaaactaaatcct

SEQ ID NO: 9022 - DNA, 683 bp, Cannabis sativa
ttagtttttttttttttttttggtaaaaataaaacatctcatatttgtaatgttttagacggagtagcaaaaacgaagcaaaaaagcaaaacaaaatgtatagttcatttgttttggttggtggtgagagaatcaaaacaaatatatagttttttttttcttaattatagagtggataatatatataataatatttttttttttcaaaactacatgcaaaatgtagaactgatcgaaacctaggtgggcatggccatctgtgcccccgttaattggtacatataactcgtgcaactttgtttgttatacataaaagaggggaaaaaagatagattaaactaccatactcatctattcattaattaatacctctcttcaaatcttccttttctttctctatcaatccacactctcctcctaccaacataactcaaggaaaccacatgagctagctggacacacaattaaaaagatcttaattttgaaagagtgacactgcccaaggctgaatctatttcgtggccgaaaatggtgatataaccacctttcagtcccacatgatgcttattgacaatttaagatcacatcaatgctatgtcgtattgaagataaaacactcatcatgggcgtcagtactttttggtggttaatttggattttgtttcatcaatgatatatatata

SEQ ID NO: 9023 - DNA, 574 bp, Cannabis sativa
taataataataatatttcatcatcttcttcctcattccctcctcctccccggccacatgatcataatcaagatcaatactactcatcatcatcaaacaacaacaacaatctcaactccatcctctacactctttcgattctcaaacaaaaagtccaccaactccaatccctagcggccatcctcctatctccaccgccacttggcaatgataatgagcagagtgcaacaacatcagtagcaggtggatcgtcatcatcatcagctatagctagcatgaatatgtacaatacaattcaagatatcatagcggcttcctcttctatgctactcaatttccacaacatgggacttttgtctccagatattatccacaacaacaacaacaaggtcatgaacaatattaatactaatactttctattcaagtaatgatcatcatcatcatagtactctcaataattggttgggtaatactaatcatgagatttacaataataataacactactactaatcatgatgatcaaatcatgatgagtactaataataccttattatttcctactactactact

SEQ ID NO: 9024 - DNA, 989 bp, Cannabis sativa
tcataggatgagttgaaggagtagcagcacttggccttggttgagtttctggtaagggtatggtgtgggtttcaggcacagtttctggtgtatggtgaggtaagagtgctgtttgctgggcaaggacagttgttgtttgttggtgagattcatgtaagggtgctgtttgttggtcagggatggtggctgtttgttggttaggttcatgtaggggtgctgtttgttggtcaagtatggttgctgtgtgttggtcatgttcagggaagggtgttggggagggtgtagtggagtgagtctcagggatgtggtgatggtgaatgattggtgcagcagcagttgtcataccagaaaaagaaagatcagtattgacaggtatagtagaaaaacttgcagatggaaaggaatttgtatgagaagaagtatttacctgatctggatgtctgtgaaatgtgtccccaggataatgaagttcattgaagatgacatttcttgcaatgaacattcggccattcttgttttcacagaagtagcccttatgagcaggagagtaaccaagaaacaaacattgctcagacctgaaatctaacttgtgagaattgtatggtcttaagtggggaaagcaggcacaaccaaaagatttcaggatagtgtaatcgggcttggttttgaataggcattcatagggactaagatttccaataacaggagtaggcaaccgattgattgtaaaagtggcacattggaaggcatgccaccaatatttaagagatagatttgcctgtgcaagcaaagtaagacctgtctctgtgatgtgtctatgttttcgttctgctctaccattttggggatgagtgtgaggacatggatgagagaaggagatgccctggtcagcaagaaaacgagcaaatggtttgtactcaccaccaccatctgctttgacactttttataggcaattgaaattgtttttctaccatactcttgaattga

SEQ ID NO: 9025 - DNA, 1463 bp, Cannabis sativa
ttacttccactgatgcaaatgatatttcagtggttgatgctccttcaaacattactccactgccatcgcagacatcaactcacaccattccttgagctcctacttcagctcctcagaattactccgctctgattgatcgaccagtgtacgaggatgttagaagtccctactaccttagcactatagatcatccaagtttagcattggccacaccagttcttactaatcacaatttccaaccatggaagcgtgatttaaaactttcaataggtgcgcacaacaaaacccttttccttgacaacggtcttcccaaacctcctcccttagatcctctgttgagctcttcgatccgttgcaatcaaatggttcaaccttggatccttcattctgtctctcccaaaataaagagcagtatcatgtatcttgatactgcacccaaaatgtggtttgaactttacaatagattcaaccaaggaaacaatccttgcatctttgaacttaatgaaaccttgaccttcttgcatcaaggagatgactcggtgagtgcttacttcaccaaattaagtactatttgggatgaaatcaatcaattgcgtccaaaggttccttgtacttgtgtggctgctgcaaaaacgaaagaacatttgaatcatgatcgggtattacaatttctcaagggtctcaatgaatcctatcatgttgtccgtgctcaggtacttcttattgacccttgcccccctctcaacaaagttttttctatgattgttcatcgagaacaacaatgaacccttggcaatcgtaacattactcctcttactaccactactgccaccactgtcccaaatcccatagttgattctcctgcagccatggcttcaagaaccaaacgtatgcgtcctacttgctcccattgcctaaaacctggtcaccttaaaaataaatgttactttcttataggatttcctccagcttatggcaacaaaaagactgttgatacccttacatatagctggaatcaagacaatggcaatacctccaaagacacactttacaaagttttgtcaccacaattggaaaaaaatcccctcagctcataccaatacaatgtcaacaaattagttcaatgttgactcaacagttgcagccaactacttctacatcccaagatacttttgcgcttgtgaccaatttctctggtaatatcaatcattttccttaaaatttttggataatagatagtagggcaactcatcatgtttgttttgacattagatgtttttccttttttgttgcaaagaaacattcgaaatctgtgacattactttatggtacctctgtcaatattgaaagaattggaactgttatcatcaattctagacttatccttacaaatgtcttgtttgtccctcaatttcatttcaatttactatatgtgagttctttattagacaacaacagtcaca

SEQ ID NO: 9026 - DNA, 672 bp, Cannabis sativa
attgactaacaacgattttagtgagggtggtgatggtggggcaccatcccagtgtgatgagagatttcattctaacactgagagagtggttgctctctcaactggttggtacaacgatggttcgaggtgtggaaagattattaagattacggctacgaatgggagaagtacaaccgctaaggtggttgaccagtgtgattcccaaaacggttgtgatgctgaacatgcaggtcaaccaccttgtaaaaataatattgttgatggttccaatgctgtgtggagtgctcttgggctcgacaccgatttgggtgttgtcgatgttacttggtctatggcgagcaataatgatgtgtatgcactaaaacattacacataataacgtgaaaaacacataataatatttggtgtgcataattatacatgttgtaataagcgcttaataagagtgatcaagagtattgatctatggtttatgtcctttataaaaaaaacacaaaatttatatacgtgatgagcttggcttatctatacatggatttatgttagtctctataatatgtttcataaattgataaagaaaaataagtaaattacccaccgggctaaataaactaaccattatcaacctttattttttaggaggcttttttattacactttaaaacagttttt

SEQ ID NO: 9027 - DNA, 1055 bp, Cannabis sativa
caagtaataaaaatgttgatcttttacattgttgtcctactgcttatctttcttgcaagcaatataatgtaaatacctggcatcagaaacttggacacccttctaaacatgttttaagcaaaattttacaacaagtctcttcatctggttccctcaatcaattagaattctttaaggcctgtcgattgggtaaaagccataaactacccttcctatctccacattaagagcttcccaacctttggaacttattcagaccgatttatggggcccctcccacatcaagtccaaagatggctattgctattatgttcacttcctagatgatcatagcagacttacttggatctatatcctatcaccctcaaatcccaagcctttgaaatctttattaaattcaaaatcatggcaaagaagcaatttaatcttcctattaaaagagtgcaggcaggttggggaggggaatatcgaccctttgccaagtttctcacagaccaaggaattgaatttacacattcttgtcccaaaacaagtgaacaaaatgggagggcagagcgtactcatcaacatagaatagagatgggacacactcttcttgcacaatcagggttagattttacatattggtggcatgcattccatacagtagcttttttaatcaataggctcccaactctagtgctacagcaacagtctcatctagaatgtcgacttggccaaatccctgattacacaattcttaaaccatttgggtgtgcatgttacccacacttgaggctatacaacaagcacaaaatggagttttgatcccagcaatgcatttttcttggttattcctctgttcagaagggatacctatgtgaaaattcccaaggaaggttgttcattgcaagaactgtagtctttgatgaaactacatttcctgcaaattcattggctttagctcctcaagtacaatctaaaccagtctctaatttgcctactgctattttttcaacttctaggccacataatattggttctaaatcttctattccacctgtggacaactctgg

SEQ ID NO: 9028 - DNA, 1083 bp, Cannabis sativa
gataatgaatcgatactttatcgatggtttctactttgttgtatttttttggttcaattggtatttactgataaattatcagcaatttctcaatgttttgtcgatatttttttatttatagtaatctatttaattatcgatgatttgtcgatagttttttgatagttcatgctaaccgtatttttttgtcatttgcatatgcctccaaaccttatatagttccattccctaagtattttacagatagtgtgacatatagaaaaccctttcaatcaattttggagggttggtactttatccttttcttcggtgtcatttcattgattgatgcttcataaataaagcttgatgttgagaaggcagaagaaatgaagttttacattgggaggaataaaatcaaatttagggtggtcaagtttgcacaaatcacaggcctcaacttcacacagggactaacaaatgaggagaagagtgcccactcagtgcagataggttgataaacctctatttcaaccgatctaatagttcaaaaacggaactagttcagagtaagttattaaactttgatattctgaaagacgtgtacaagttagggttgtgtttgtttgtggaggcaatgttattggatcgtgagggaaacactcatattttgtcttatatacttagatatgttaaagatcttgactttcttttcaagattcattcggggaagtactcatttgcaaccatacaaaaaacatgattaaatagaaggcaaactttgagaacaagttactgctagatattcagcacaaatacaagtatacaatataagcttcgcacctatattatagtattggacctatgaggccattctaaaaggttgggaagatgtatgatttgcctcacggaattcatttttccaggatgcttagctggactaacaaggctgagattggaaagaaggaccttagaccattattttcaaaacgggtatgagccttttcttatgttgtaaatagttagttatatcatttcaatagtatcccgatatttttttgatagtttttttacacattttttttttgttgttattaacacttc

SEQ ID NO: 9029 - DNA, 730 bp, Cannabis sativa
tgactcatgaatattgatcaaaatcccaacaaaaaaaatccccataaaatcgaaaattcaaaatagtgaagatatcatagagtacaacgtaaatagcttgaatgtcaataacagtaacatgagcactcttaacatattctcatcaagcgtatataaacatatatacacactataattcacacccaatccttgtacaaacaaacacacctaagttcataacctattaagttccaaacaaacataataactattctctcgcgatcaaaaccacgagcaattacattgatcagtcaacaacaacggaaggcacataataccccaattccgaaaattctgagtcaaaatacctgttgacgagtaatgtagtcggccttgatggaagcgatggattgcagaagctcgggaagaggtaaaagcttggcgacctctcgtacggctgcttccttggcttcgacaccaagatcctcgaccatcatcttgttgttgctgttttacacatccatggaagagagaagagggagatgaatttgtgtgaattcttcgaagaatatgaaatcagaaaatcaaattcagaaaatgggaatgtttagagagagagaaagagatctatcaaattctcatcttccagatttttttttggttcaaagtgttgaatgttctaaggcccaaatttagatccaaagtttgaaaaagaaagttgggcttgtcaaataattatgtaatttcctaa

SEQ ID NO: 9030 - DNA, 660 bp, Cannabis sativa
tttttttttttatctttttgagaaagttccttatttcttggaagagaaagaaacaatccattgtttctcaatcctcttcagaagctgagtattatgccatcacatttactattaaagagattgtttggttgagatggttacttgtagatataggtatcattcactcttccagattggtcacaacttagtttttcacaaacgtaccaagcatattgagattgattttactcgtcactatctgaagttgagcactattactttatcttttgtttcttatttgttgtagcttgctgatttttttactaagtcgcatacgatttctcattttatattattttaggcactctcggtgcttcttgcaacaatattatgagtttgagggagagtgtcaaataattaattaggattattttagttgtattatttacttgactttacaattaaataaaaccctaatctctctacttttttcttttttttgcatctcgttattttttatttattattcttctcaaataatcatcccaaactagactaggaaactataacaatgtaggtacccaagagtgatttgattttcatttgttttaaccatatgtttcgccattttagccaccccttttaagtctttttgcaagtatgtaagttactattctcaaa

SEQ ID NO: 9031 - DNA, 722 bp, Cannabis sativa
ttttgctcttttatcattttgtttttatatatacataattttattattttcttttatgtttttgtagtgaattgaaaaacaaattactttttttttaagaaaatatatataataggactaattaaattgtgtaccctttaaatagttaagcaatcaaaatttgaggagtaatttttaattatattattagtccacactctttataaatattatttgttttatccattagtttttggctatttatttttagtttatgattactctgaatgtattttgtaaaaaaaagtatttatacagtatgtcaaatatatctatatttttaggactaattagattacatatcctaaatggtgtaaaatcaaccataatttgacatgtacatgtaatgtctaattatgtaattaccttcttgtctatcaagtttatagtttatataaaaaaaattgaatctattttcacacaattaattttatttcttatggtgtaattaaaattttcaattatgaaataaaaatacattctttaaaaatgggtgaaagtgacaatactagtaagtatatatgaacttgtttgcttatgcattttctgttggcattactatgaatgcagattgatagaatctcatatcaacatttggaggatgtgtttgccattgccaatcaccattcaccagtgtctgttagttcaattattaataattggaatgtaatgtgtaatattcg

SEQ ID NO: 9032 - DNA, 641 bp, Cannabis sativa
tataacaatttaaacccattcttagctatatactcgccaaaatagtgaaaatcctaatactaataatctttaaaaaaacttaatcaaaaagaaaaatatcaaaaataccaccactccgccactttctcattaaacaaatcttttacaacatgattaattacttccaaatactaatttgatctttttagccttctacgaattacttcttatttctaatcaaatctatatttatttttaactctaattaatatatatgattgatttaggaataaatcaacgcacgcgctaaaattcgcgtgacaccgtaatcatcggttagtccacgtcattctggtttcggtttcacaatatgaaaacacggcgcacagtagcccattccctctaatttacgcacctgacctgacctgaccgaccttcctcacgctacccaaaaaaaaaaaaacaattttaaaatttaaatttatttttttaaatttaaaaaaaaaaataataaaaaataaaaaagaccaaataaagagaaaaagtcgttaacctacgcacacatatgactaatcctttatttaatcgtacgcacaccacatttttcacgatcttaagactttgtcattttttcatactcaaaacccaaaaaaaaaaaaaaa

SEQ ID NO: 9033 - DNA, 532 bp, Cannabis sativa
tattttagtactttaacaagtcatgattaaatcataaacttgttgaatatatcataaatgtgttattagttgatatatttaaacaaaatatatacttataaatgggttacactagttgtattcgaattgagtatatacctgtcatatatgtgtctcagacacgacacgactacgacccacgaacacgaatttccacccttatttgacacggcataaatctagtacgaactcaaaaggcacgagcatgcacgatcaggtatagaaaaatatgagtttagatacaacgcgatacgatgctacatattagtatgatacgatacaaaaataaatacttgagcatgacacggcacaagaaacacgaaaagtacaatacaatatttattaattaagaaaaaaagacaatgcattttctaaataaagttgcatttgtatattttttaaaaaaatctacaatatgcaagctcatgtaaaatgaaaaaattaaattaaaaagctccattaacacccaaaacacccctttttagaaaatgta

SEQ ID NO: 9034 - DNA, 1366 bp, Cannabis sativa
attactttgttgggaaagttaagtgattttggtgaattggaaactatggaagaaatttgggatgaaatggaagctgatggttttgttcctgatgtagtttttttcaccattcttgtaaatgcttattgtaaagcaggtaatatcgagaaagcatttgatactcttgatttgatgaaaaagaaagggatttccccgaatcttcgtacttacaacaccttgattcggggactgttaagggaaagtagttgtgttcctgatgtttttacatacaacttgttagttggtgagaatgggaaaatcattggtgataatgagaagtttgggaaaattagtaaattgttattgggactgtatgaagaaatgtgtagtaagggatgtaagcccgatgcaatcacatataatatactcatttcgagtttagtgaaatatagtagtgttgataaggctatcgatttgtactatgatcatgttggttgtgatttcgctccttctcctcatacatatggttcactcattgatggactttttaagttggagcatgaagaagcaatgcttttctttcacgagatggctgaatatggatgcaaggctaatcgtgcgattttcaatattcttattaatgggtttgggaaaacaggcgatgtggaaaccgcccgtcacttgtttagaagaatggttaaagaaggaataagaccggaccttaagacttacaccgttcttgtggattctctttgtctttcgggaaaagttgatgaagctttgtgttactttgaggaattgaagcagagtggccttagtcttaatatagtttgttataaacttttgattaatgcacttggaagatcacatagggtggaagaagctttattactctacgaagaaatgcagtgcagagggatttgtcccgatcgttacacatacaactcgctaatactcagtcttgggatcgcgggaatggtggagcaagcagtgagtatgtatgaagaactacaatttaaaggtttcgaagctgatgttttcacctacaatgctctcattcgagcttacatcacatcaggaaatacagaccatgcctttacagtttacaagaaaatgttagttgttgggtgtgacccgaatgtggaaacgtttgtacaactttctaatcaaacttccaatgtgctttttggtggataaacatttcaatttttgcagagatcaatggaaaaggtaagcctatttattttctagtgttcattcttatatgagattttcggtttattgctgtatggttactgaaatcatcacctatttgttaatttctaggaagctggtgtggttccccgaggagggcatctactggtgaaaacatctaagcaaatggtgg

SEQ ID NO: 9035 - DNA, 737 bp, Cannabis sativa
ttcatgtgacccttctaacacgatatcaaaatgatctttcaaatgtttgaaatagtgtaagagttagtgttcgtgtcttcatgattagtggctgcgtgcataaacaatagatgaatgctccattaaacctaaagctggtaaacagattgagttctttctatttttcttgaagctattgtacaaggccacataaataatcagagtccaaagatacatgaagttcgtgaagctcgtttattcttaatagccttttttataagctacgaattgtatatagaaatgttttaattttcattttatacattttttatttttatgtgtcaaaacaatattaagcttatgttgatgtatttttacattttttgtgttgtttagattgttcatcatcatgttgtattttgcttagcattgaatattttcttttacttttaaagtttttgtttgtttagcattgaatattttcttttaaagtttttgtttgtttagcattgaatattttcaccaaatgttatactgtttttgctttatcatgtttttagtatttcaagtttgaattagttgtacatattattagattagaaacttgtttgaataggtttggtccatctttattgtacactacattttttttttttttcaataatactgtaatggccacaatgtaatggcaataatgaattcactacaattcccattacattaaactaaacatcacagcaatactataataatgccac

SEQ ID NO: 9036 - DNA, 667 bp, Cannabis sativa
catgttcattaataaaaatcaggattatatctcatggtcattacaaataatgtttgttgggatggctaacacttccaccatactattaaggtttttggtaaaagtccatcgagcaacattatgaacagcaaaattacaaagtctagaaataaaaacaaaaatacaacccaaaaaattacacgagagtctattataattcaaaatatagttgtcaatacgctaaaaggaggaagtttcgatcaaagctttgacaacaatctcagtgtcactctcgatcaacacaaactggtgcttccacaccttagtcgtttgaagggagagaagacaagcctccacttcaccaatcggggaatcaacataggtaaaactcttggaagcaatccacaaaacagatcgtgcatggtctcgagccaacgcacattgacccattccccacttaaacgtcactgttgatcttgatccaatcatcaggaggaggagaccaatgtagagtagtcttagcaagagcatgcgagagtaacgaggccccataatcttcataacaatgagtaatagagtcaatataatgtttgatgttattcaaattattattgtgtaccctgtcattacgagcaagacaaatggtgtccaccataatagaaggaaagagaaacacttcttcaacaac

SEQ ID NO: 9037 - DNA, 577 bp, Cannabis sativa
ggtgtacatctcaatctgtttctcggcctaatgacgcaaaagtaaactttatttcattagtgaaacatgtaaactttgccatgaacattatctaaaatcacatttttttgttcttaataagatattgtttcattcttaaattgaactttcgttcagtctgaaatcatgtttgttggggttctcacatccattattagttaacctttgaacagaaattcttggattaaaaaagttaacatggtatgaaaatgctgcagaagctttacctgttctgagtattgaacaccactggcaccatatgatcttgctatagcctcaatcttctctttgatactaatatccaaaggatataaaaacttcaatggttgagtaacattctcacaagccttttgaacagcaattcctaggtctacctgaacatcataaatacatttattagttatagacaccattcatagcctttcctgcggtttattcttttggacgaacaaaaagaataacaaagcgcccacagagatacacacacacacatcattatgtcaagaagcagaacatgtatacaagattaaacatttca

SEQ ID NO: 9038 - DNA, 820 bp, Cannabis sativa
ctggacggaagatacgaggcaagggtatgcccgacactcctcttccaaaattggaaagagacagaagtcagacgtaaagcaaatgaccgagaatttaaacccccaaattctaagctcatttagggggtatgatataaccaattacccacagctacaatgtcctacttccatctgcccaaatcactcggcctaacgtgcaaaaagaatggggaacgcactcaagcaaagtcctctcgagaggaatacgcttgagttcttccccaaaaagttatgctcaagggtgaacctagagataagatgcactttcggctaaaaattcttgaaataattgaaaagacgagcctgaatcccttcatacacatctctggaagcttagcgtagagtttagcccaacgagttgcataaaaggctaaaatgaaaagctggcgagggctgaagtaaggaagatgcgtaagtctaaagcagtcgcagataatgctccactcaattgaccttatgaaaataccagaaccgaaagagaacaattgaagaccctacttcacggagaagagccacctcctggccaactctaaatagataaccttctgagaaacggaccaaaaaagcattgtggccctgagaaaggaaggtcgaataaaaaaattgtttctggattgatcaagaggcaaacaagactaaagggaaaaagtttgaaacactggttgttggaactagatgtgtcaaaaactgcatccagtcctcaaacagtctatcacagtaagtctctaaaaaagaaatagtaaaaaatatcctattcaactactaaatagccccccgcggc

SEQ ID NO: 9039 - DNA, 1012 bp, Cannabis sativa
tgtttagtggttgagactttcttctcttttgtatattttcttttgaaagattttaacaatcagttttccttttattggggtgcacttattaaaaataaatttataaatgaaataaatttttctaaaagtacctattttagtatttttgtaaagggctaaatgtgtaattatatctttgtggtgtaattataattgtatgaggtataaatataacttccgaatgcattattaaaagtgcaattttcaaaagttggaatgttcgaccaattagaacatctctaagagcatctccaatgggggttgcctgtgtagtggtcttttccacatttattttttggtcaacatatcaacttaatcttaggaacatcgttgtccaaaatgagcaatagctacgtgacattctattttttttttcaacaaagttactttatcaccaactaattttagggaaggcaattatactcaccgctcctaatgaggcagaggtagggatcgaattttgaaggtgaggggggtatgggtttaaatatttatacccgagtcgagttcagggcaggggcggaggtgggggaatagatacccgccccgatatgatatatgtatatatttaagttttaaaatcttttctctaaaaaaaagttttaaaatcttaactaatacaattaaaataacttcatgctttaagttttttattgattacattaatgagacatttcagtttttatgaaaatgctttaaaaaatgacacctaaccactttattttcgatcgccaattttatacttactaaatccatttattatacacactattccacttatgtttgttgttttaatgagtttttgtgatagttcttttcatagttctatttgagacatcattttttttttcaaaaatatatacccgatgggaattcttctcccgccgtctctgctttaatttaaattagtattggggcaggtattggagtgaatttaggaagcgggtacaggggtgggagagcgattcccgct

SEQ ID NO: 9040 - DNA, 701 bp, Cannabis sativa
ctagatatatacatttgagaaaaatggtagggttgggaaagttggttggatggccattaagttcaataaggataaagtttttgatagagttgaatgacactttattttatgtttaatatcctaatattgatattcttaattctagggaagttgatatccatagagttttgatagttatatttatcttttgtattttgctttgctaatatgtttaaattttgtaattttgatgctcataaagtatttaagtggacgtttatttacaattgaaacttcttctatatcagtaaatattatatgttgtttttcttaagaaaataattctagtactttcgaagttttcaaattctatttgcacataattaagtgttttttttttggtttggtgaccattttaagagccataacacatggtgaacatttatcctcctattttgttcttgctatttgataatttttgtgaaggaaaataagcattgtttgaaggacatcaaaattttctaagaaagtcctttctatatccccaatttacttttttcatcatgactggcttctttgtctataatcttgcttaaggttaatttggtcaagctccacaaatcttccttctctagaacaattgcactctaattaggacaactttggataattgtttagagtccccacaatattttggtgatataataatgatagttttaaat

SEQ ID NO: 9041 - DNA, 1540 bp, Cannabis sativa
gctgattgaaatcaatttacgattgattaccaaatctttactaacaccatagctactgtatttctatctagtgtttatccatgcatcaacattgatcttgagacatcccacagtgggagtcttccattgaacctcttgccgagccatacttttgttccccctattaggacagttagttataactgtcattctgttgtgtctgttaagttgcttagtagttaatttcggttaactggttttcttaacttttcgtggttttggttagtgcattgattaagtgccttagttcttgttgtatataaagcattgtaactagtgtgcttaatcaatgaagagttctttctctctttcttcctctttctctctgtcaatctttctttctctttttgttactttctttatgatacaatgtctagaaggttgaaccaatccaacacccccggaatagaatcttggaactccatcatatatcgtgcacaccatttgacaacatcagttacacgtggtttatgtcctccatgaactatatcattttttatattctaaatgtgccatgaaacaatagcaaaatactcaaataagtctcaaaaccaaattttttagagttctagtatcatcttaagagggtcatcagttagtaagcactttcttcaactgctcctaaaggccgcattgtttccaaatatctctagtggatttacaactccaaagagtatgcatgacagtctccttcttccctagtatgggtacattgtggattaacaaggctacctcacaaagataaagcttgattagtgggtattcatgagtgattaattatccacagaaaatgcttcatctttgggggaattttcattttccaaacggccttccactaactgtctaggcctgtagcagaggttggtatatcttgttctttcaaggcagcagctattcggtagccactcttaacagagtactctccaggtttgttgtagtgccacaagattttatcctctaaatcccaatcaccataaggtaaactttggatcaaatcagcatcctccttatcaaatattgcttggatgaactcaatatcccacttaccattatttttcttctgatcatatcaggtggaatatgtgggatgtcatatactttaaaatagatcggtcttagaaatcatggatcaataagaactttcacattttctccattaccaattccccatctataaccccaaagtataatttctttcccccaaatcaagctacgctacacaaaagatacattgccttcacatttgctttcaaaactcttcccctctagaagtagctagctttgaggaccctataacataaagaattaggtaaacgtatgcatctccaaatttgttttgcgagcatagcctggttgaaaatgtccaaatctcaaaaacccaaacccccttaatcctttagcttacacaactgaggccatttgcactaatgaatctttgtactcttttcgcatgatccccactaaaatctaactaccattcgatgaagtccattactcatat

SEQ ID NO: 9042 - DNA, 924 bp, Cannabis sativa
aatattagaaagattttgtgctctgttctcttaactgtctgtcatattaaatgcttcttctatttctctaaaccagaagattccaattaatacgtgtaagctcggttgattttcatttctctatgctttctttttagtacagttaaaagacagttgtttacttgtttatcttaaattagtccaagaacttggcttaatctatatttcaaaataggctaatgagaatgtttatcccttcaattttgcatgtatcaaatcatattccttgaatttttcaagctgttaaaaattcttgccaaactattgagattgttagatttaaggacttgtgtctaattttattcaattttattaatgtggcgattgtctatgttctaaactatgttcccgaattttaatatatactaaattattcttcttaaactttcacatgttcaaagttgtgtctttatatttttatttgcgttagatattttttagtaaaattaaataaaagttttcaaatccaacaatctcaatagtttagacagaatttttaacaacataaaaagttcagagagtatgatttagtatatgttaaaattgaagagataaaaatcgaaataaactttcaaaatataatcatgtttaaccgtagtatgaagatatatttttaagtgtaataatttttttattgcttgatgatttcaataatatataaatattttgtacacggttttttttttcttcattttttctaactgtttgtgtagttttttatttttatatattttttttgtgataaatttaattacatcaaaataagcgttaagcacaaaaaccgtttgtgtagttaaacagtcaaagtggacgtttgtactgttacacagggtgttttatttgtttctagaggtcccattgaagaggcaataactaattggctct

SEQ ID NO: 9043 - DNA, 593 bp, Cannabis sativa
ttatggttcacattagataaaattcatttttaccgaattgtgcttctacttttataacttcgatatggaccataaaagctaacaatgggttgggctagactaccgacatcgatgactgtgatagagagaaggggactaggtcgttcatgctcgcaaagtcgccgatggttgttggttttgtagttgccaagatttgggtagggaaagggggcttcaatcgaaattttctaggaaataaaaattgaggggccgaatgttttaaattttagggttttttgattttgttcttaaaataaaagtggaaaagcctaatatttttttattttatttcgagtatcgggtggatctgggctatacttgtacccataaagaggtgttttcacatcttcgaaccttccctaaaaaaatgggtttcactccacctgcataatagtttcttcaaaacctttttttttttcggtttttgaggagaagtcctaggtgtaaatgttctggcctactaatatgacaattcttaaggaaaaaacagaaggtattaaataaaagaataattaacatttttatcctctgaacttttgacactatgttaattc

SEQ ID NO: 9044 - DNA, 1617 bp, Cannabis sativa
gtagagattttttttttttaatttggcttcatcagaacctcctcacgaagggaactcaaaagagaaaaaagtaaaaaaaaaatgaataaatttatcttgcacaatagtttcaattgtaaatggaacattgtttataccagtaaggcctaacacatttagacatattattttacaattggctagcaataccttttaaaaattattgaatctttatctttatctttatttttatatattaaatgtgattatttaaccgtatttgttagtttaatgttttttattttttttcttccattaaattttaagttttaacagaatatttcataagatctgtgccttcgggtctgttgcggttaagtatttttaactacctatttttctttttaactaacttcttttttcaaactcatcttttccctcttcttttcggttttttttctggtttgcctttcaccttcttcatctgccttcgattaactttgtggattactaatctgaattgatgttgttttacctttctgcactgctagttttcgatcatggatcccattatgaatgctctcaacaatactctatcccttacggaagaagagggttctatttttgccttgccagaggaggttgccacttcatcttttccgacttctgcccatatggtcattgcccaagtcctcactgacaactatgtccataaactgaattttatcgaataaatgtcaggacactagaagggccgttatcctgctgttgtttttgcttatggggaggatttattcaaagtttcattcggttgtgctggtgataagtttagagtgatgaacaaagagccatgacattttcaaaaccatcttattgtgatgtactctctaagtgctctgcagaatgtctcaatcaatgatttgctattcacacctttttgagtgcaaatttatagattgccttaatttcttaagcaagttgaagaccctagcaagagcattaggtaatcccattggtgagtttttagatgtttatgaggattcacttgatgaggggtggggttgttttcctcggattcgtgttaaactgccagttaataagcctcttcctcgtggccaaatgatcagcctacctaaagttcgagatgagttttggattgattttcgttatgagcgtcttccggaattttgtttcgagtgtgggttactcggacatccctttgaaaaatgcatcaagttcatggaacgaatggataatggtaatgatgatgatatcccatatggtccttggatgaaaggtgccaagcttccttctacgggctatgataagtatcaaaccgatttttctaaaggaaatgcctagcctttattaactcgcctggctcgtaccacacttacttcaaccattccccgcctaaactctacagcatcccctcacccgagtttgtttttgggtttagaatccccctcaactttgccttcttcttgtccaaattccactctgcctgctgttgtcttctctaatcccagaacacacacaacaccacaaacttcctccttgcatccatcctcattaataactacagccaatgtttctaatcctcatgtcgacaagtctctcactgccattaatttgtca

SEQ ID NO: 9045 - DNA, 1339 bp, Cannabis sativa
tcagtgtaccatgcacgcacaaaatacatagagctagatgtttaatttgttcgagacaaaatccttagcaagtccttggaagtcagatatgtaccatccagtgttcaagtgtgattaagttgcagattgtttaacaaagagcctcaccaatcacatgtttcatttcttggtggacaaactaggtgtagtcaaaatacaactaaatttgagatgggttgtcaagaaatgaaattcacccactaccattactattgctgagatggcataacaaattttgtgtaaattcttaggctaataacttttaccattttgctagcatattcttttcttataaaacatgtatatgattggtacatttttttatatgattcttataatacttatttaataaatataaaaataaaggggccagctccattggaagtgagctgagcttttcatttttctgctattttttttttttttttgctgtttattctattttcaaacttgttttccttcttttctaaaaaaaaattggttatttctatttgcagacaaaaatggtagtctgtaccaaaattcttcacatcactttttctttgtctttaaaggacttttgtgaaaaatttgcctgcatttgataaattgtttacaaagtaaatttttgcctccacgttaattttccatcaaaggattgagtcttttaatatctatatccatttatcaatatataaattatgttatttattaccacttgtgatgctatcacaaactgtacaatattttactaattttgtaatgtgtaagtattaccaaatgaaatcttttgtaatataaactaatatcacttataacatttaagtttgactagtaatagtataatctataatggtgccatatagcctagtaagcatgattttttcttttctttttcctactagtgatttcttaaatatttgacaaagatttatggtccaaccataaacactcacactagtgtagttaatatagtccaacttaaaaattttagctaaaatatgataaagttgtactccaccagttgaactaaatccttctgtttttttttttttttacctcaaacactattcatactttatatttagaaatagttttctagactcttgagcttcttcaaatacttttctcaatattttatttaattttttattttaatcttaatactaaatatttatttactttcactttcttacttttttttagaagttatatattttttttttatttagaagttatatatagtgtaatttaaaagtatgagcttaaataaataaagaggttaatgtgagtttttatatgaaagtggtctctagagaga

SEQ ID NO: 9046 - DNA, 713 bp, Cannabis sativa
gatttttgttacgaatgcggtataattggccatgtttttgataattgcaagatgtatatggagaagattgatgaaggtatagaacctggacttgaatatgggccttggatggcaggttctcctttaccacgatcaagttatgatcgctatcgtcaagatttctctaaatcaggtccatggccttttatcactagactagcaaggaatactattaatcctattatttctcatccgtctcagccaccagtgctccctcctactgtcactagtcgtgagaagggttctaatcatgtggtttctacaccagacaatccaggaaattcctaccaacagttggccgttcacccaagtaacaaggattccataaaccactctcagattaaaacttgttctgcatcatcttcaagtggtgcgaaagaaattgcctctgtccctcctgtaccagtttcctcaagtatgcagcagaatgtaacaaatgcttccaacaaagttgttaaggagccatgtctacaacgtgaccatatgggattggctgatatcaaaggcaagagaatagttgatgatgttccagtacctatgccttgtatttttcagccaactcctttcagaggacaagtctcttcttcttcaacaatctctattaaggaagttaatgaataccctcctggatatcttcccaagaaggcaatagcattacctgtggcaactcctcc

SEQ ID NO: 9047 - DNA, 912 bp, Cannabis sativa
gtcatttgagcttggatttgcttcaaatgagaaatggatttggaattttcaagaagagcaaggagtggattggcttgaacaagggcatgagttacattccaattggtggcggctttttgtttgtgagatggaattgaagagcgggtgtgaatgagagaatgaaatgggtaggagaacgacgttggcaatcggcgatgagatctgaggccgctgccgcctaaccccgaaaaggccaccgacgttggcaacatgcaaaattggatgtaaagattttatggaggcatggttaagtcaaacacaacaactacaaaacaagaaaaaaaaaatcctcaaattcttgtgcccctcattttccagtcaaataatccatagaagacatgttaatgtaactgaaatctccaggctaaaattgaccccaaatcaaaagtaatatatgaaatactacttcctcaatatcatcacgatgaaaattagctccaatacaaacactactactatagtgaaacatcatccatgccaacagtggaagttaaaacttttgttcaatcacatcataaaaaataataaagattaaataagtaatctatatcaagtgttaagggacatataaatggtatctcaaatacaagttcattactcttcttagtagctagtacattgttcttcagaatttcaataattgcgacaatagttattatcgatggccatgcaatgaagttaaaatcaaaatctttgtaatatgcatggcaatgataacatatagcatgtatcaaaaatggtcaaatgaactgtacccattccgagagaagaaagctcggtctcattgtgtttcaatgttgctatatgcccctctgcatcaaaaaaataagaaattcaatcacaaagccttatctgaatttctgcaatatgaag

SEQ ID NO: 9048 - DNA, 768 bp, Cannabis sativa
  modified_base (250)..(256): a, c, t, g, unknown or other
ttagggcataaaacccaatagggaggaacactgtatcgaaccaaattaaaggagagaagattcaagttcagttgttgataacgctctgctacatataagaatcaagggttagagatctaaatggaaggaatcattatattctgctaccgtcaatgcaaggattttttcatctcttatgtatttatttcatttatttaggaaatgtatatttaggttgttaaattatagttctataatcaacatacatgtnnnnnnntctagatcctagtaaaataagttcaaacaactagtatcaaagccatggtaatgatttattttcatgaaatatggatttagaacgatatttggaccatttgaatatgttcatgttggtttatgtgttaattgatgattgaatgtgaattacaaaaatttttatgaaaaatatttttattttcgttctaaaaatattttatttggaaagttggtaaaaaaattaagcaatttagaattttacgaatcacaatgtggattaaaattgagaaagatatcatgttttgaaatttggaggatggctgccgcacacgaatcagggggttttggccttgaaaccccttcatccacacccagatcgacaaaatttgtttgatttcctcgactgtgattcatttagaccaggcttgcacgcttgggacgttgccattgactgaggtttctaagtcaggatgtatgtcgcatccgattttctcgatcacgtctgagaattgcgcggggcgggggggggggggg

SEQ ID NO: 9049 - DNA, 535 bp, Cannabis sativa
ttttttttttcttttaatataattgtttgagtattgatattagataccaataatatccaatacttaatataaggtgatattttatgagtacttaatattaatgaatatttattaaataaaaataaatgtttagtatgatattaaattatatcaatatataaaagacacactaaggtggtgttgtatcgttttgcaattctctaattgttttgactcgtaaacttaggccaactctaaaagagttgcctataatagtgtttgtgagtcaagtgagacccaaataggttctcataaattaatattgaatcctactattcatctcgaatatcctgactacctcgatctacgtgacagatgcgagttagtcagtaggtatgcagttagatctactgaccaactagcatctgccacgtagactcaatcatccgatactcaagatggacgactttattgaataatattttattgggaggagataagaaagagtgctcactattagcaccgtgtgaaactaatttttctttttttaattgat

SEQ ID NO: 9050 - DNA, 744 bp, Cannabis sativa
tatttctctccttatttttttaatctatggctcacatatttgtataaataagagatcattccattaaaataaagtactaaaaaattctcattaagttgactaattggagcatgtatgcccttaaaaagctctgtggcagttttttttctttttttgaattttcatgttttccaactgctctttaactaccttatcccagaatcttcttcagtttcttacaattgattgacggttctgtgttcttctggttttttccttcttttttctgcattttcatttggctgagatctcgttttcaatcttatgttatggcatttcgaaatcctctaccaagtaataatatctctcttactgatatagagagggaagtgaatgatttacctacttcggtccaattgagaaatcaaattcaagatgtccatacttcatctcatcctgctatgaatccccctcatgaatctcgtttgcctacctatagtgcttcatctcatacttcttcccatgatccttcaattattccttttccttcttacttaccaatctctctcccttcctctgtaacaaattctcctccttcttttgctacataccctcccctgactaatcctcattactctcctcatcttactaaaaattccccttctatgaaacaaaaagccattatgacagattccattgctaattccattcctttttccgatattattaataccatgtctcttaatagtggccttttcactaaca

SEQ ID NO: 9051 - DNA, 677 bp, Cannabis sativa
aaataaattgaagataaatctgtacatccactctaaaaaggtacatgctatattattttatgctaatgactgtatattcttcaatttttgttaatttattatattattattattacaaattaatataaaatctcacacatccattaaatactctataccacatgggtataattatgtatagagcataagcaaggctttggaagtgccacaccacttgccacgcgttggagcaaggctatatataacttgtcacacacacacataaatactcaaattcaaacatatcctaattaatatatacaacatctttcaccactacacatccaacctatgtatctagagttaattagaaagagaggaaaagtaaattgagagcaaaggaaaaatcattatcaaacgaattagccaactactattactagtactactccaaaagttatgatacaaaggagaatagggttttatttggtgtagctagctggatgattctatcaaaaatcacgaaatattagagagaattaaaattagtttatttattatttttattattaccccacaaaaacatatagaaaattataatgagagagagatgatgacacatttggtggcggaggagggtaaagtaattagccaaatcgattcacgggctccaaccatgcacacccaaaatcccacat

SEQ ID NO: 9052 - DNA, 557 bp, Cannabis sativa
aatcatcctaatgatttgcggtgggtttttgatttgatgttaaatgatagagattgggacattggcaagctaaactcccttttcgattctgaaacggttcgtaatattttgaagggggaaagccgagtggttaggggaaagattggtggatttggaccaaagagcctttggaaaccttctcaagcaagtctgcttacctagtccaagcccttgattgagctcttccttttgttgtggctccttccctttagaataggttgtggaatagtaaggtgctagaatgccataagattttgtggtggtgtatcctctctgatgcgctaccaattcgtgctcttctagctaagagaatgcatatcgaagacacctcctatcttattgtggaacaggtgaggagtctatggagcacctctttcttcattgtaaattagctttctatttgtggagatcctccctttgggggtttgttcggttcctggatttggtggttctatgtgggattggattaattttctgtggggccttaagtcaaagggtgttaatgttggtaagtgttc

SEQ ID NO: 9053 - DNA, 652 bp, Cannabis sativa
ctcaaatggcgattcaagttttctgtttatgaagcaacattgcctttctctactcaaccgttgttcttccctaaaacaactctctcagattcaagctcgactccatttcttcggccttcaccgcgactcatacatcctttcagagcttgtccgattctgcgcaatctcttcttccaaatacttcgcctatgctcgaacccttctctttcgcacccaaatatcacgcccttcttcatggaatttcctcatcagagcctacgcttccagccattcacccagagaagccatctgggtgttccgtgaaatgagagtaaggggaatcacacccaacaatcatacctttcctttcattttcaaagcttgcacttccattactgcgctaaaagaagggaagcaggcccatgtggatacctttaagtttggtttggatggggatgtgtatgttaacaacactttgattcacttttatggctcttgtaggaagattgaggatgcccggtacgtgttcgatgaaatgcttgaacgaagtgttgtttcttggaattctgttataactgcttgtgttgagaattcgtggtttagtgatggaattgagtattttgtgaaaatgagaggtaatgggtttgagcctgatgagactactatggtggtc

SEQ ID NO: 9054 - DNA, 636 bp, Cannabis sativa
ttatcatgtccggttctttcggggataaatcgaaagaaaaatctatatctatttattatttctttatttagtggtatttttacaaataaaaataatagaataaataataaaaaagaaaaaaaaaaaagagataattattttatctaataattctttaaaacaaaaaaaaaatatggatgacatggcataatgtggtggtgaggtggcgtgagaagaagtagtagtagaaggaaaagccgtctgttcttgttgtagtgtgggtcccacatgcgaataattccacattgagagatctaacaaaaatgtgagcatgcttttgtctccttattctttcacgatgatgccacctgtcattatcttctctaacggtaactatctcttcctctttctcctctatttcaagtagttgagttaactaataaatatgttgcattaacataattatttaaatctaaaatatttataatatgtaagtaaatatttcaaattaaaacaaagtgtaattgtgctaaaaatgcaaaaattaacacgaaatatgagaatttattattagatcattgtctataaacacaaagtatctaaaataatatatttttaaaacatttttacaaattatgattaagttttttttttttt

SEQ ID NO: 9055 - DNA, 611 bp, Cannabis sativa
tctctctctctctctctctaagcgtcggcctaccaacatggagatcaaacaggctctaccatggtgtctctcaaccgcataaatgaacgtccttcccttgctcttctattttcgtgcaacatgccaggctagcgatctttttccgacgaaggacgagtcaacggagtttatatctgagctccacgccccctgaaacttccaggtaccatttgtcttttttttttgttttgttcttgagagatcagagttccacgtccactaatctcgttgtttttttttttctaaaacgctgatcaactctctctctctctctctctctctctcgctctctctcctcaagtgcaaaggtttgtgatcgacagtgcttcgagttcgtggtttttcatagtggacgagctgttgtggtcactgtttgtggtcattgacagtgactcacagttgtcaaaggtggttcgccgctattcgtagttgtcaaaggtggtttgtggcttttgttgtaatgattatatagggtttaaaatttgtctctgtaatgattgtatattttatgaaaaaatattataaaggaaaaaatttgtctgctcgttgttttgttagtttttttttttttt

SEQ ID NO: 9056 - DNA, 591 bp, Cannabis sativa
agtctcaaattctacagtgatatgcgttccttaccgatcgaaccgcacttttatgaatggagcttaacaaagtcatgtagtactaccactctgttcaaattatcaaaattagctatataagttgcaatctaattttcaatctataatatataattaagtcaatatatgaatatgcatgtaacttgacttatggaaaataaaaaagaagaagaagaaaattggaccgactacaaaagtggtccaaaaagttatgagtttgattggaccacaactcgtacgtacagctaataattaattcattattttgttaatgtatatttatatataaggggacctcattacaattaaggagtggagttgagtagtgtatatgtatattatgtaggtgtttgggaagattaggatgactattttattaatggggatagaagtacgatcatacgccaaaattgatattacaatatccaatatatattttttgtatataccaaaccaaagtacaacaaataacggtgatgatgatgatgatatcgtctcttctcttctctgaaatggacatctcatataccttcttaattaattacttatata

SEQ ID NO: 9057 - DNA, 1959 bp, Cannabis sativa
aaaaaaaatattagaagggtaagaaagtaatttgaccaacactaattacgaaccgacataaggaagactaatcagtagaattgattatatcaatagatagtaggggtgttcatcaaaccgcccacaccgtaaaaaaaatgcggtttgaaattctttacagtgcggccgtagtttgattttttttaaaccgcgcggtgcggtttggtttgcggttttgaattgttaatatgaggttcaactcgcacctcaccggcaccgcaccgcataatataaaaataccaatttttatatttatttaggtccaatatgtaaaggcccaacctaagcccactaattattgtattatgtaaacttaaaacttttttttttcatatttattttcaagccttattgtatttttgacaagtgttgctcaagctttgttgtatttgtgatattttaattatttggtgatagtccaaaccgcataaaccgtaccacactgcactattttttgcggtgcggtttttgcggttttatagtttcgcggtgcgggtgcaggtgcggtttgggaaatataaaaaatcgcatgtgcgggttagtttgaaaaaatagtccaaaattgcaccacccgcatcgcgaacacccctaatgccaacatgggctcccatagtttgagatgggatcctttgggatgtcattgatgaaaactcatgtcttggcgttgttccttgttggatttgaggaaatggggtccaaagaagctcctaaaaacctaaactcgttgttgcgtcgctcaggtcgactggatgtcaacctgtgcgcccaatgtgcacatgttgtctttaggtgtagtttcttccaaacttgtctccaatgtatgaaacttggtcgaggcatgtctctcatgtattctagtgcaatagctaagcatattgcacatgagaagttgttatgaaccaaaactaatgcaagccagcgcacaggctatcaacctgggcgcccaatacttaactgggcccaggctaagctccgggatttccaagtgacatatttagcttcatggttcatcgttttttcgtcattatgatctatttgttgaaggatagcacttagaaacgactttgctggatcttggtgcttacctaggtgtccccagtgtgcaggtaacattgctttatctttggatgtgggaccctaagattgtttccttcgtgtcacgtgtcgaaaacactgtccatgtcatcaagtcaactttttggctaaatatttacaatatagattacagtctaaaatctaaatagtctttagaaatttaaaataactacgttatacactgttatatagaaaaattaagattaaaattatttaaatattgaaaacacgaaaggatacccaaggtaaatttccctaaatttttatatgttaaatatgtttcttatttcattattattatttttttcaattttgacgaataattttagctattttttcaattaataaataatggcatccatctagttattataacttttgatttcggttttataaatcaaatgttattaaaaaaataattatttttttatctgaaataataatatatattttaaataatcgtttttagacttacaatatttagaggtcaaaaattggtcacaaattaaagattcatgagcattattatgttctatttggtaaaatataaagttgaaattgtcatttaacaagataaaatatctattaataatttttgtaaaatataaagtctaaaataatatttaatctatcttttaatattcttcattctttgataaataattaacaaaaattataatttttaatatgaaaatatccccaatagatattttataatagctaagagctaaaaaatagctaaaaggttaacattcatcttcaacaaattctctaaattcttagctaaaatacaccattccaaatttcaaaaaatatttagctaaa

SEQ ID NO: 9058 - DNA, 672 bp, Cannabis sativa
aatgtcgactgctgaagctgtaaagagctgagaaaaatattcagtaaccaccgtgggaagaccatcctgccagtcgacccaattcccagcgtcatcacacaatttttggatagaattatttcttcttcttgctgtagcaacaacatgaaagtacttcgagttgttgtccccctcacgcagccagagttgtttacttctctacttccaaaacatctctatctgcagtagcgcatcagctagtttacccgaagcaattttataattttcaacacagattgcatccctacctttcttccatctcttcacctccaacttacaaacttttattcttttagcaaaattttctgaataatcctttccccactccatcagcacctccccacaaccaattattttttcaataattgacttcatgggatcaacactccatcaatcttgaataatcttaatacacaaaggctctttcaaccaagaattttcaaaacgaaaaaccccggttattagcaatcaccatactgttgacagtaaccaaatgaataggacaatggtcggatgtagaaacttcaagattgtaaagtttagcaaagggaaagaaatctaaccaagcttgattaaccaaggcacggtcaatacgaacctccacccattccacttaaccacgacttctttccc

SEQ ID NO: 9059 - DNA, 978 bp, Cannabis sativa
tatatataaaataagtgctcatatttgaatcttgtttttttagaataatttaaatatttcacataaaaaaaggattataattataagatgtaccaaaaaactatttttaattaaagtctttcctagaattttcccaaagttacaatacatattacatatgtagtttcgtgcatgatttgaagagtatacagtgtttattacaatattgatttttcaatgcttgcaaataaactgtacgtgtacaaatttgctaataatattaattcaataataatccaaaaagttgtatatataaatgcatcaacttatagcttatttatagctaataatacaataattgaaactaagaacacagccatatggccttacaaaaaaatcccatcaaggtactattattatttgggttattacaattaattgtagtaacaaaatctgaaaataccacaattcaagggtgcccacaatactgtggctcagtcaaaatcccatacccatttggctacaccaaaggttgttactacaacacttcctttcaactcacatgcaaccaaacattcaatcctcccaaaccatttttccaaggtagtaacgtcaccatcctcgagataatactcgaggatggtgaattactagtcgagagtcccatagcacgggattgctacgacaagagagggaatttgatggaaaacgagagcaatcaattggcttccactatctcgttttctcagtttcctctcagcacgcgcaacaagttcatcacggtgggttgtgacacaatgggagctgtgggaggagagagagggagattcttcgccactggatgtatcgccttatgtaacagcacaaacgacgtcgttgatgggtcgtgtgaggggattggatgttgccaaatggatattccaaaagatgtttgggattttgggacgatttcggggcctgtattgaataatcattcaattgttcatgatttcaatccgt

SEQ ID NO: 9060 - DNA, 591 bp, Cannabis sativa
tgtcttttttccagaattcaagactgccacgacttataatttcagtctcagagtattacacaggccgtgtcacttagcgtggcgaaagttattactatccaaagattaaggcaaaatttgatgaattccaattatgtgataaggtgaatgaatcaccttttaaaaaattatttgagagggaaccgctaaatttttccggaacgttaatctatcagttattcatgcacaaaatcaaatctgaaaagccagacgaggtacacttttattttgcaaagaagagatgcagattcagccgggtcgagattgtgttggtgacgaggttgaacttgttacccgggcctacggaacaagaaatcgaaaagaaaggaaattcgaaccggttgattgtcgaatacttcaacagcgaagcaagaaacaaaatgttgttgctaggagtagtgctaaggatgaattcagagtagtaacaaatggattatgtgagctaatttggatacaacgaattatagaggaattaaagctatctttgaagcttcgaatgagactatattatgataataagactaccatcaatatcactaataatatagtcca

SEQ ID NO: 9061 - DNA, 800 bp, Cannabis sativa
aagctaaagggtgtaaaaatattagcctgttgaaaattaacatttagaggcggttattttataaaaaccatagctataacatttattaaaactctttaccttcagttttaaatcaaaaataataaactgtaaaaacacgccctatatggcatcagttatttgaaaataatcgacaacataggtgttatttatttttgacacgtgtaacctatgtcgtcggttatttttaaagaaccaaggggataggataatgtaataaacccttcagcactcgtcttctctcattcttcatcttcttcttctccacaaaaccaaagcagcaccaacgagagacaacacaaataaaaccctcgctaactaccacaaaaaaccatcattaatcttctactttccatacataaaccttgtcgacctcaaaaagcggccaaccgacagcgggatcgtattagtctaatgtttgccatatgttacacaacacgaataataaagtaaataagacaaggattttttatagtggtttggccccgttagttagcaggtgatgacatactccacttttatttgtattgatacctagagataactattcagatcactataggtgggctctatatagctctctttaaagtaacaaaactgaattagtgggtagatctctaatgagagagagagagagagagagagagagagatatatggccttagaggcatgtgacaaagaggaagggagaagccacttcggtgtgtacaagagagacaggaagagagaaatagggtttcagacttagaggcttttataag

SEQ ID NO: 9062 - DNA, 711 bp, Cannabis sativa
aaaaaataaatcggatcttgccaagggattcttttgacaaggcccctgtatcttcattatcacttctgcctcccgctaaaactagcatttcatgccacataatctatggtctcacacacctcaccaccttttgctacctcggccacgtcctgaaaatctatcatttcttcgatctgagaaaccaccattcctaccacctcttccaaaagagaatctaccaccaccgccaccgccaccaaaccctctttgcaccttttcttgcaaaggtggcaatgctgtcaccacttctaacttcacattagcagcattttcttgacctgcaaatttaatgccagcaagaaagaccagaaaattatataccgtactgacccaaacacaaattattaatgtaataggaaataattaaaatgttcaagtccacagacatgagcactggcactaggtaagattcaacaaagagtaattatcagatcaagaatcaaaagacaaaaaaacttaagttctagagaatagtaccagcaagaaataaatctaaatcttcagctgctacatcaaacaccgcacccaaaccatcagcggtcagcgtcaaacccttgatggcttctaccttctcctcaggcaaaaatctcctcaagaccccataagcaaaactggttcaaaatttgtaaaaagcatttagcgtccacaaatgagtacagtaaatggacaaaa

SEQ ID NO: 9063 - DNA, 628 bp, Cannabis sativa
gagagagagagagagacgattttcacttaggtctggttctatgggaggctctgaaagacaaaggccagctcttgaagggtatttcttatgattatttatttccttagtttactctgctattttttttatttcaggcaaaaggaatgtattaatattaagctaataacataaagccatttataagttgctctatgttttagtgtataagtaaatttgtggcggcgtgcaaatataatgcaagcacggtgccaactatatatgtaaagatttgccacgacttatatataaacataatttactatatcaacaaactttgaaatttgaagtcgttgactatgactactagattaatgtacctttctcatgttgaatattcactagtatataatatattaacaacacataacttgtctttagattatgtaatgtacatacatcatgtagcaagtgattatattccttatgttattcttctacttggtttatttgtttaactttcatcttccatggatttttgattagccaaaaccttggttatatcatacatggattttgaaagtaaaaaataaacgcataattgacattgacgggtcacgggttgaatatggaagccaaatgtgaacggaac

SEQ ID NO: 9064 - DNA, 583 bp, Cannabis sativa
tattttattttttaaatattttatggactattcattatatattttttaattggttgtgttagttgttgttcttataattgtattgtctaaatttttggggaatagatttgtcaaatgatggttcacaaccttttgtttgtatggtttttaatttggctaagcatattatatatttcctgaactaattagtgattctaatcactgtatatatataaaaaaaaaaaaataatacttagtattcatctaattattaaaactctatcgttaagttaaaataaaacttagtaaatatgagtataatattacttttttttttttttgtctttcctttacaaccttctcttttttgatttttggtttgtgctttcgatttacttatttcataatctcaaaataataatattgattgatcgaaagttggttatcattattattatttatagattagcaacaaatgatctaaatcattttacaaaaccattcatcctaatgctcaaggtgttttactgtttaatttcatcttaaaattttatataattaactttatgggcccaccaacgtttcactttcaaccaatcatgtt

SEQ ID NO: 9065 - DNA, 894 bp, Cannabis sativa
tcttggagaagagattcaagccatatgatttcagcagaaatctgagtaagagctctatactctgacttagtacttgatcgagacacaactatttgtttcttggactgccaagacacaagagatcaccaaagtaaacacaataatctcctatggatttttgatcatttagacaataagcccagtcatcatctgattatcccataagactcagattgtcactctctttgatgtgaaaaccatgatgaagagtgccttattatggggcatttgaggaactgacttagcttgttaacggaaaaagctatgtcaggccttgtatgagcgaggtactgcattgcccctataagaattctgtaggttgttggtttgtccaggatttgaccatcttttagatacaatggctttccagcagtcattggtgtgggacaaaagcccatagagagatttctccaacttacaaacataatctggtctgtctttgtccacaaacccctgtggtttaaccatgtacacaacctcttctaattttccatttggaaaagcattgttaatgtcaagttgttttattttccacccctttgagactgctacaaatagaacaactctgattgttgaaggtttaataacagggctaaaagtttcaccaaagtttagaccaggtatttcgtgaaaacccttagcaactaaccttgttttaagcctctggactgacccatctgcattgtatttctctttaaagacccagttgtttccaaccacattgtattctggtgaaggtttgacaaggacccaagtcttgttttttatgaaagcataaaactattcactcatttctttattccagccactatgttgaagtgcttcaaggacagaagtgggttctctattactgaa

SEQ ID NO: 9066 - DNA, 914 bp, Cannabis sativa
actatttccccttcagctgctaaaaaagctaacgacctccaacgtaacttggacaatattttgctcaaagaagaaatttttcggaaacagcgatccagagcaaattggcttaaggctggcgataagaatactcgttactttcacaatcgagccacttccaggaaacgaaccaacttcattaaaaccctcaccttggatgacaactctcaaatcactacccttaatgacatcaccacctctttcgttaatttttattctaatcttttcacttcccaaggctctaattctgaggcgatggctttcgctacgagggttcttcctaaacacctctctccccaacagcatgcttttctttcctccccctacactttagccgaagtcaaagctgcccttttccaacttgatggagataaaaccccgggccagatggtttgaatcccacttttttccaaaaaaaattgggattcagctggaaatgacctttgccaggctgtcttatcggccctctctaccaacactgacttggctcctgtcaatgaaaccattctggttctcatacctaaaatcaaaaatgcgactcgagttaaggactttcgccccatcagtctttgtaccactttctataaggtcttatccaaaacccttgctaatcgccttaaatctattcttcctgatcttatctcccataatcaaggcgcttttcttagtgatcgcataatctttgacaatatcatcatcgccaacgaggttgttcatgcgatcaatcatcgaaagactgggaaagtgggctgggctgccctcaagcttgatatggagaaggctttcgataaagtcgaatgggtctacatccagcatattcttcaccatttcagtttccctttttctttcatttctctcattctcaattgtctttc

SEQ ID NO: 9067 - DNA, 799 bp, Cannabis sativa
cggactcgcacccgaacaccgaacgtaaactcaaacccaaatctcgatcccgatcacgaaacttggaccccaatccccgttccagactcagacctaaccttgatgagagagaaagtgatgaaagaaaaagtggtgagatagaaaataaggagagagagagtaatgagagagaaaataatttgagaaatgatgagagagagagatgatagagaaaataatgtgaagtaatgatgagaaaaatattatgagataaagggaagaaaaaatattaaaaaagtgaattgttttttaaaatagaaaacaacattttattgttgttaaaattcttatttgttgtaactttgttttttgaatctattttaaaaaacatgataaaatgcacttaatcaattaaaccatccatttattcaataaaacatacattaacagtatttaccttattccaattactccatttatttataactcatttttttttcttcactacaaatatttgactcaatttcaataaagagatattttttttttaaaaaaaaaaaaaaacccttttaactctagtttatatctggataacattgataaacctgtgatggtccctctcataaaacccttgaacttgaaggagtcccctaaataaacggtaataatggatggtagaactatctatctatatcctctcccatttttacttctttacttatattatataaataaactaaataaaataaggatattttagattttagtctctacaaaaccgttggtctctaactacctcgtatcctaacgtcctttagat

SEQ ID NO: 9068 - DNA, 1680 bp, Cannabis sativa
taggtttgaaaagggaatttattttgaattaatttcactacaatgagaagatcttagagaaatataattactataactttcgaaatgcttgtacaccatatgatccaagtgtaaaattttttaagaacactagtgatggtgtaagataatctaaatatgcgagcatcgttgatagtctttgctatgccactgattgtgctagacccgacatcgactatatcgtgggattattatccaggtttactagtagacctagtgtagagtattggcatgctattgaaaaggtcatgagatacctcaaaagaaacctaaaccttggattacattatcagaagtttccagctgtcctgaagggtacaatgatgctaatttgaacactttatcagataactctaaggcaaccagtggctatatttttagcatatttggtggagttattttatggaagtctaagaaactgactattttggcttaatctacaatggaatatgaaatgatcacacttgaatgaattttacaaattgggatctgatcttagcagtttggaggttaaaattaaagaggaagacaaagtgatttatttgtactactacaaaaatgagtatttacgacggttctgaaaacgcttttttagagaaccatgacttaaaaaattaagcaagtgttcaaaaccgtcgggaaaaatagggtattcctgacagttttaaattgtccagaggtataggggacagtttttgaatgttcctttaaaaaattcgtgtaattttaaattgggattgctaacgattttaaactgtcggtaatttccatgcttaaacttaatgcgtttcaaatctaaaattttatttcccgcctcttaagatatgaccccccaaaaaatcagatcaaatttttttaaagtcatttgtaaatgttatttcatttcctagctttctctcctccgtgaccacgagtcgtgccatccctctcttccactttcttttgctctgtccttctcctttgctctctcgtggcaggctagcagcacaaaggtaagcataataatctcttatttattgtttaaatttctattagccatgatttgatttgttaatcttgatctatgtgtgtgcaaaataaattcaaagcttgcaatttgaaaaaagtttcaagaatgtcaagtgaaaagcaatctaaagattgtaagagaaactttcaaggaggatgaagatgagcacaaagacggtagatgaggatgaagcttgtaaatgttttggagtggttgcgacatatgcgagaaatgggctgagggggctgaagattagatttagaaacgaagtaatctgaaataattatcttgaaagtttgttcatcttgtcaaatctataagcccactcttatcatgattgttgaggctgatctgaaagatccttcactgaagcataattcaggagtttgcaagcatcacagttaagatcacatggataaagtctttgcttagtgaacttcaagtgtctcttcctggtgaacctattgtggtgtgacaatgttagcgctgtaatgttaactgctaatccaatgttgcacgctcgaatcaaacacattaaattggacctctactttgtgcgagaaaattcttgaacaaggaacttaaagcagcctttgatcaaataatcacaaactacttgaacaaatccattt

SEQ ID NO: 9069 - DNA, 669 bp, Cannabis sativa
gcgtcaattaacaatgccattttcgaacctaatctgcacaaatcaaggccaggggcagttccaaatttttgcttgacccagaacctaagagaataaccatctcctcaaaacaattatgcacctttttcaccaaaattgtcacattaatcttatccccaaatatattcattctattcctcgctgatcatatttcagagaaaatacgtcccatggaaataatggttttattctaaaattactaggaacagaggaaagtaagttttctgcaaattgaattaaagaggttgatggtatggattcacttaaaatcggtaattccccagaaaacctcaactcctttgccacactgcagtctttgaacaaatggatacaagtcttcccacttgagctacacaaacaacaatctttttccaatacaaaagacaatttgctctgatgggtatggcttcgttaagaattaattctccataaaattgatattcttgtgtgaacatccacatgccaaattcatttccacaaatctctttgagttctaaaccttagagcttgatccaagcaataagcactcttcatagagaacttcccattgctattatccttccatatgatctgatcatgatgaggagatggaattctatgaatatgtagaattttattccccattccctc

SEQ ID NO: 9070 - DNA, 1028 bp, Cannabis sativa
tttttgtatatatatatatattatgctggcaggtagtgctcgtactgattttatggcgtgtcaaaaaatctaatatttatttacagtactaactgggaacagaaatatatatctgttatggtagagtagctttgtttatttttattaatttaattaagatggaaaatatatggttgtagatgaggatcatatatgtatatatggctgtaaaaggaggagtatatattctctttcaaaaccatattgatcacctatattcgaagatgcaaagtgagtaagttgagaagagatatttttattcttgtgtgaaatctactttgagaagtactaaaaagtattaccttcttacgtgttatatttctattggtataattaaatattgagtctcatataatttatcgtaataatttttagaataattggtttcgaaactctcttatgttataatttttagagtaattgacggcgaaactctcttatgttataatttttatacacttaaatagtaaaacttataatatgaattaaaaatgagaataaatatgttaaatgagatgaatatgatgaattatcatggaatttggagtcctaggatataattagaaaaaatttctaaattttgaatgctctttgtttgtgatcgaaaatcaagtctgaagtttcaagctaatttttgactatgattcgttcactttgaggagatattatgaataaaagttctagatctctctttcaactttcccaaacatcttgaatcgtccgattccgaacagtattggaagagtataaccaaaacattatcagccatcccactagaaagcttgctgccaaaactcaagcttcaagcgccgcgacactaattttaaactacaaaaaaaatagtttttttttatatctttttttagttatataaaggttttttttcaacactttaagagaacgactttgggagtataaaatttagaagcgagaagcggctctaaaaactttcaacatatatttttatgaagagtttttctttttcctct

SEQ ID NO: 9071 - DNA, 576 bp, Cannabis sativa
atcatcatattacagatagtacaatcaatgtgatatatatatatcacagatgaagtagacaaagtgagtaattaactgaatagtaaaaataacaaactttgtaactaatataacagacttttcacaagacaaagtctccctaataactggtaacgttgatcacattatattatattgagatggtagtaacaccgatcagccagtgtcaaagatcaacattcttaacctgcttccatttctgctcaaacaattcgtctatttatttcttaaaaaatcatcaattcgttaaagaaaaggccataaagccaaagccagagaatacaaaagccttagaaaaaggcatcgaattagctgaaacacaccaagaaaaaaaaaataaaaggcatatcaacactacagacaatgagccagagccacatccttccccatggagcctcgtttatttgctcatctacatactttgtatgtatattttctttatttatctcttaattatatagtgtcaatactatttagtactttacttatcattattttgtttttagggatatttttcttatatatacacatataatt

SEQ ID NO: 9072 - DNA, 1040 bp, Cannabis sativa
tctctctctctctctcaaaatcacctctcgaaactcgtaatgccaaaaataataagtgttggtgatatttaaaaatttaggataatgatcctaagttggtggttgtaactgttaagttgttaagttagttatgacttaacaaacttaacaaactcctcgtaacagaatctccacatcagcacaaggcaaagtgcttctgtacgagacatacgcttctgggacaaaagattgaagcgtatgttgaaggggcttcctagacaggaatagcaacaactagagttaaccatccaagactcccttctaggaagaacaactagccatccgaaacttctttccggaggaggactaactttcctgaagacttcttctgagtaggcaagatagacatccgagaacgctcttccgaatgatttttatcattccacgagactttgtcttcctaatggataagttagcatatccgaaaacacacttccagagaacaactaactttctattattagaacaatcttatggaaatcttttcatttaacagaactataccacaaatgcataattagacaaaaaaacgatcatagtagtagcatgcaccactaataccctttagggtttttctttaattttttggaaccattttggccatatcataatgagttaaatatggtagccattttgaagttcttcctctctagaaaagttactttcacctcttaaatttgtattggaagtactaaattatgagagagatttctatactcccatcttatttaaaacatcttagaagtccttatattgaccttcttgaccttatgccctataattactttgaaagaggtggtggactattgggtgttttttgttcttagggaattagtaactttctcaatatctcacactttttgaggttgattgactaacacttttgccaacctttttaacttgttcattttttcaactctctcaattccaatctctcaatttaatatgagaaataatataggtgagaccgatcgaatattaaagtttataatatccaatat

SEQ ID NO: 9073 - DNA, 834 bp, Cannabis sativa
tttattttaattttttatttttttggaaattttcccataaaatgttttttttttttcaaaaataaactatattcttgtaaagtttgccaaaaacaagttttaaaatggaaatttcccaagaaaaaaatgacattgaaataaagaaattattatcattattagcaagtaaactcacttcttgaatttttctttgagcaaagctattttctccacaggggtattgaagtcaatagaaaattctatagaatcacccatatctgaacttctatagtagttgctgatgggttttgtgtacaaaactgagtttggataatatactttttcattgttgagtttcaagaacacagttgtaagatgttcatctcttcaactagcaactatcaaagttaaaaatgttggttaataagaaaacataagcaccaaatataagattggaagaaaatttaatacgagttatagtaattttcaccgaaatagtacaaaaatcattccattgaaatgacgttttggatggtaggaaagtcttttattttggttagaatctaaggcactgtagcaacattgcgatataaggattagctcgacattgttttccgtttttcggttttagaaatgaaaacataatacaattttttcaagttttcaaaatatgaggagcatttggttaatgttgtccaaaacaatagtttttttagtttttttttttaaacattctatatataaaaaaaatacttcaatattttaagaccatgatatgaatgtgaacccgaacccaagccaaccccaacacaacctcaactctggaccgtaacaagacccagatccaacccgacc

SEQ ID NO: 9074 - DNA, 821 bp, Cannabis sativa
tgtggttgttggatgccatgcctaaatactagttcaatttaatgaagaaggatgtgttgagacaaaattttatgtgcttgagattattagacagaagtattgaactcattggaattaattgggtatatccatacaatatattaacatttactcgacatagatttagtcgtgcccataacaaattaggaggcaattcaaaatctaattttgtcccgtgacaaaaaaaaaaaaaatatattatgcctgcgtcatcactaaagagtttctaattaattaaactaattagctacaaaagttacaagttattgtaaccaaatgtatctaatatcttttcaaaaaaaaaaaaatatattttaatatttttagtctcaataaattttatcctatatactatgagttattaataaagttatagagtaaaatgttgaaattttcaatactttcatgacttctattggctcaggaccaacatgtcgatgaaccatattattcttcgacatattttagtaaaaatctcattgatagttttggagtcttgattttcttgtttgttaggagtttgtcatgttagttgagtcctaatatgtaaagttagttagtctatttataaaagcatctagctctgttgaaataagcaaagttgttgtaaattcagcaacaataataccaagaattcaatctaacacctgcatcaaatcaacaacttaaacagcaataacacacgaaatcagttaacaacacaatgtaacaaaaccaaattgaactagagggagacaacaagatttattttggttctagtcctagagatcaattcgatccct

SEQ ID NO: 9075 - DNA, 1005 bp, Cannabis sativa
atattgcaattgacagtaaaattcgtaacagtaaaattgatttgacaatgcatttcataggaatcacccataacattcctacgcttattcgaagaaaaaaaaaaacaaggtcatgcccagagtccgaaacagtcgattcgataaaataaaaaatacaatcaaaatgaaatcatttaaaccttcccaaaatggaagaaaatacctcaaagataggacatcaatgaaccttaaaatctactcttttagtggctgtaaagatcaagacctatgaaatgcagaaagctttacacgaattacacttacaggaacaatgatctgatccaaattccagctgaccccatcatcaagtgaatattcatctagctcagaagagtgcacatactcttcctgaccatttgggctagaagaagtagaaggcaccaaactattggcttgttcctgcccacaatcaatgtctgcaaaatgaaatagatattatcaagtttacaaccatagacaagctgataacaacaattgcattacagaatgcattgaaacatttgtaatactaatacctgaagaataattccttggtggactttgccaagtctgcacgggggctagctgctgatcttctcctacatgtgagtatacagaagattcttccatatctagccgtgaaaattcttcttgaagtgtatgtgcaatgatttcgtcattttctatattgttagactctgtatcaaaataatgtctgttgtagatgtgatcagaatgattttgtaccatgccgtcatggtagtaggcataattttttgctagatcttcatcataactaaatagccgataacaagactgtaaaaaatccgattgctcgtggatggccatcttttgttcgatattattttcaaaaacaccagctgtttcaaaaagttctcaaatgtcataaatcaaaagaaacttgaagacttatgtcatagtaagcagtaaaagaacagactgtaaatgtttgttattgagctaaca

SEQ ID NO: 9076 - DNA, 712 bp, Cannabis sativa
aggggaacttttatttttatggggtttaagtaaccatgttgccaaaatatggtcctttttttttctcaaagaagttaattttattggaaaatttataaaaaagaaaaaaaaaaatttgcaaagtgtaaaaacccaagtacctgcatttttaggtttttagaaaaatttaagaaatttttgaaaaataagggaaattaacgaaggtaaccaaatagtaattagtaagagggtaactagttattttatactttttatttttttttttatttttttttatatatatatgtttttttacttttttctaaaaatatttcataaattattttttttttccgaataacattcatatttttataaatttatactttaaaaactacaaaaatgataaagggtaacaatagtgcttagtactttcactaatcgtcatattgttggtgatgcaattaagtattgagttttatcttgataaaaaatatatatagagtgaaagttcattgttcaaaaaaatatatatatagagagagttttgtatatttgaatttaataattattataattttataaaaaaattattaggagattatattgtatactcattttattttatttgttttaatttttatctttatttttatattctttaagatatattatactcgttaatataaaatttaccccaaaaaaaaacaatattttttattaatggataaaa

SEQ ID NO: 9077 - DNA, 920 bp, Cannabis sativa
aatgttaaataaaaaaaaaaattaacttgtgtgtggtttttatatcattgtgggaatttagatttaactgatttttttttggtaatatatggtaaatactatttaccggattctatttttaaaattaaaaaagtgaaaattttttaaaaacatgttctataaaactgtttttattttttaattttttaattaagaattaaaattttgaaataaagaaaaagtcacttttaatttttttttaaacagtttttttttcttaattaatgttttggacttcgactagacccgaacttgaatcctcccacgaccttggcgctgagccctacctttgactcgaatccgactccaaatttaaatctgagttaaataaaataaaaaaaaataaaaataaattttacagagcacacttttgtgtaaacgacatcatatattgttttgatgttagtggttcaacttatttgttattttaaaaaattattaaatgattttaaaataaataacaattgaagttgaaaaattagaaagaaaaattgaaatatatttttatttatttatttagtattctaattaaataattattatttagtttttttgttatatatttagttttgaaagtggaccactaattaattgacatttgttaatttagtgagatttaacataatagaattaaaattaacaattgtaacaaaaacataacgttaaaaaattgatatataagtatataaaatatttatgttgcaagtattatttattattattatgatagtggttctgcaaatatttgaaataattttaatttcaattattttatatgatataatttagttatttaagattttttttaatattttaatttaaaattttgaaataatttaccatttacaatatatgattcaaactttgattaattttttata

SEQ ID NO: 9078 - DNA, 543 bp, Cannabis sativa
ctggctttgtatctatccggaacatcctcccagaacacatttcatttgtttgggacacccctctaggaagcgtgcttctcatccaaagagctctcgccagagctgacgtagagatcttattgcaaagagtttgttaagtctgttaagccgtaactgacttaacaacttagttattgcagccactgactttgagattcatttcttagatctataaatactgtcatcctcatcattagaagaataacacataagatgattttaagagaagaggtcgagggtgagattgagaggaagagagagagaggtacaaagaaaagagagagattaggttttgagatttgcatgaagaagtttcattggtaaaaatatgaaagataaacattttgagataatcaaactcgattataatgtattatattattttcgctcaatcaataaagacattacaatagtgttctaaaactgaattatagtcataaatcacatcagtctctaaaatttgagctagtatatatcggcgtgttaattttactattttcttgc

SEQ ID NO: 9079 - DNA, 605 bp, Cannabis sativa
cttgcccactctatcgccgtccgagcagagttgagctagctagtgtggcaccttatttttaggagtcacataactgctcatcactacaagcgcacgttccgctgctatccggccaatccgagccgagctggctagtgtgatgtgcacctttttttagaaaaaaatatttattaaaatattattaatttttatttgtttaattaaaaatatttttaaacgtatttaattagttggtaagcagatgttttctcctctgaatttttagtcacgatccaacttccttaccattcagaacaatttttttttttaatttatttttctgtgggttttttataatgcatcagaactagcaggagaaatacatccttttttactatcagttttcccattcgatataattctttagtagtgatatgattagaaaaagtacgaatgggttgttttattctggagacaaccgacatttatccgactacttgcacattcttaaacagtgtcgcgaaaatcttaaaaaccaatcctcaactcaacttaaaaattttattcagtaatattgttcctcttttattttagtgtttgcaacaagatttgattagttgtcttat

SEQ ID NO: 9080 - DNA, 519 bp, Cannabis sativa
ctcttctggtagtatccatgaaatcaaatcttttctgcatatgatgaatctcttccactgacagaagctcatgagccattgcctgtaaatacaaaattacaaaaagaattaaataaatatcatcaccgagggaatcgttaaaattaaaagaagaacatgctatgctgagcaaacaatccattgaaaaattaccctgagagctattttcttgaagttgttcattgtagagaaatgcttcagccttgccctcaaattttcaagagaatatagttttggagctttctttgcattttgtaactcaggatgatctgcatttagagtagagaagaccttaatgttagttactctaatttttagttatgcaaatttttatgagctcactcattacaaaagttcttcaaatacttaaaaataacattacctactactttctcagttgtatgcccgctttttggacaagcatcttttgcattgtccgaaactttatgccaagggggctgctgcaatgggagcccatgt

SEQ ID NO: 9081 - DNA, 562 bp, Cannabis sativa
ataggaacttttacatttgacattctttgaacttgatttaatacattagcagcagggtgtcctaatcgtctatgccaaatgtcttttagggaaaataaagaagttgagttagcatttcgagagtgagtagcaacagctgaaaagggtgagtgaagttgaggtgtttgaggctttgtttgaagctgataaattccatccttaagaatcccttgcagaaccaccttccctaagttttgatccttcacacaacaacaatcagagaagaattcaacagaaacattattatcagctgttagttttgagacattgatcaggtttttagagatattaggaacatgtaataagttatgcagcaacaaaggcttagaggaattagaatcaagaaaaccagatccaatatgagaaataggcagatgcgtaccatcaccaatagtgatgtgttctttacctccatactcagatttgttttgcaccttatctggatttgaggtcaagtgattgctggctccgctgtcagcgtaccaattgtcatcagcaagcatctcaggagtggctatgaggg

SEQ ID NO: 9082 - DNA, 579 bp, Cannabis sativa
aagaatatgtcgttttcgtatcatatatctaaaattacgcttccaaattaactaatcaaacgtgtcatcatagtataataacgtttcctttgtctgtcgtccacggtgattgatgatgatgatatttcttttgtcgttttgtgatgacgtgttagaccaaagtgaggttccggtaaagggccccacacacgaaacgagaaaattattgttacatctccttagtatcacccgtttttggcattttctagtattattttccttctttctcacaccttcttccaccgagtcctctcattttcatttcatttaattatttgtagtagcctttttggtgtttaattatgctttcgttttaactttttgcgtattttgcatactattttgacagcaaatataatgtttttttgacagttattagtgatctaagtagtgttgacactactactgctactgaatttaccagtttaacaatgattatttcccttgagaataataattatttataaatgaacatattattaatcaacacacgttaatattctaacgtatacatataatgactagtctgaaatatatatc

SEQ ID NO: 9083 - DNA, 2519 bp, Cannabis sativa
ccttgtaaccaatagcagcagcctaagcttccttctcttttggtgtatactctcttttcacaccaatgctcggccacaaggctagattcatgtttaaatagaatccatataaaaattgaagccttagttgctttaaaatactcttgggtgaaagaagagtccaaaataaaagacatgaaccaaaaatctcactataaccaaagctaaagttaaaagaaaatgcgagtccaatacaactcccttccaatgataaattcacatttaaaaagactataaaagtatggggaacctgaaattagtgaacaaatgcatatgctatgatggacaacataatagagaatgcctaaaagaaagaaggatgattaaataagaattgaaataatcattttacacagaaaagacatgacacattttctcaatcacctaaaataatggagacagaaagaaattcaactggcgaacaaaaggagagatcaaagcagggaagatgattatatttcaaacccataaggatgaaaggccgcaattaatcaacacaacctgaaaattcaattgaatataagtatgttaaactttaaatgagtcaatgatctctactactttaagcgatgaagataattagtactcctcgtggagattgcctagtttaagtcaaagtttaaaccatttatgtacaaactgattcttcttctgatgatcatgaagatttgatttattaatcttgatctaattctaattttaattaattaataattattagatgtagttgttaatggttttaattattaataataactaagtttgtgaaggattgatactgcaaatatggaagtaccttggttttggatgcacttcccataaatattggtaaggatttctatgttatggttgccatgcgaattgcttcctagaagagaaaaagaaaagaaagccaaaataaatatttctaagaaattttattacaaccatgtgatacaaatatctgacaacatttttgttttgttatttaataattttttttacctcaagatcagtagaagatataggctccttattaagaaatagctctgcaagttatcaacttccaaaaacatacccgttagtaccatgaaagtagtaagtttttaactgcacaaggtctataaggcccttgaaatcttctaccaatctaataggcacttgcactgcagcactgttatgccgaagcttagaccgtgcttgcaagacaaaattaaaatgaaaatatttaagaaaaataaaacaataattaaaactttaaaaacagaatacattcaagataatttcaaaactatgtgtcatttgtctctaatataaaccagtaagaggagcctgcattccggtctgttgagcttgaatattatggaatcatcactccaatctcttaactatcttaaagataattaatccaaaacaaaattaaaagtaaatcaaatggtttgacagatttactcagtggtggcaattgtaattattggttcaattttgccagcaagtatcctcaactttaatcagaagagggagcaacaaacacagtgacaacaaaccacctttagaaaaacttaccgttgctattcaataaattatgtgttatttcaagtccagtttgcaccaaagaaaccagctataaataatcagggatgtcatttcaaggaaatacattcatgaattcattttttgaaagaaaatactccacaaacacaaaataaaacaataatgtaaccacataattgtaaaacacccaatagagactacattaacaaatcaagctatttttccattattgagtagaaagaattatctcaacccaatagtacaaataacaatagaatatgaaatttgctatttttcaattaataacaccatggtatcaacattcattctattgtaagtttaaataaaaagaaacaaccatttcgaaagcactgtaatcattatttaatttattatattaattcggctaaaaggcttaactgaacaataaaaatgataaccttttcaaaaaaaataataactaagaataactaaattcatattaaatgtcacaaccttagaacatgaacaaccccaaaaaaaaatacgaaaaagaaaataaaaacctgcttgagatcttgccgagacaaatttgacaaagcaaagaacttcaaagcatcattgccagtaatgtggccatcaccatctgattaaagaaagcaacaaaaaataaatacgaatatgacagaacccaaaccttgaagacaacaaattgagaatttaatctcatagtaggctgtttcatctcaactcaatattcaaaatgaaaaaaagagccataccgaaacaacaaaaatatataatatcagaatcacatatacctaaatcgaagtaaagtttgtaatcgcggagaagaggtgacgattcacagcgtaaatgttgtgaaacaacgagaagatcaaagaaaataggtgaggcgcgaatacaggtcgatagcaatatgggtttgggtttgaggttgaagaatg

SEQ ID NO: 9084 - DNA, 1263 bp, Cannabis sativa
  modified_base (891)..(891): a, c, t, g, unknown or other
aaaataaacattaggtatttaactttaagtataaaatctgaaacattaagtatttatgccgcaatttaccttttaaaaaaaaatacgcatatccctaaaaaaatgcaactaattaattgttttttgaaacaactaattaattatttttaaacatttgaatactacaaattatttgaaaactttctaaaaaattaatagaataataactataaactccaaaggtaaatatattatttttgatattgtgatttgtaaaaattatttattagatatttatttttgttattaaataaaaatttagacttttaaatagtacaaattagactcttacctcaattttctttaatatttttttaataaccaaactgaagttaaattctagcacgaatatatagaaaaaaatataattaattttgtcatatgttagattattattaagttttaatttgataaaaattaagtctatagtttattttagaccattttgaaaaacatattagaatctaaaccgcaatttaacaaaataaaaaatctaatcaataacttttataaactatatgatccaaaatactattataaaattaacaatatataattccaacttccaagtaccgaaaataggagatcaatgtctctatatgtcccaatgttagagcaaaataatgtaactctaaatttttctctatatatattaattaaaaataagaaataattcgatatactattattttagatttacggtttgggtttctaaaatagtttttctggtggtttctatgtgggttgttatacgatttttggttgtgatttaagttgttccgctagttgcaatagtgatttttatttagaatttcataaaaatatatataaaaaaaaaactattttgaagtntaaaaatgaaaaaaccccttaaaattatgagaattatcttatatgtcattttttaaaaaacatttacagtttgggttgctctaatggttattccagtcgtttctatgtaagttgttatgtaaatttttgttacgatttaagtttctccgttggttactgtgtggattgttatataaatttttcgtaaaaatatatatatataaaaaaaaaattataaacaaaaccttaaaattgtacatacttaggcttaccattctaaacaaattaacctaaattcaatttgtaattactaagaatccatcaatacatgatagaagaaataaatattttttatatttgaataatgacgtctattaatttgtttttctttat

SEQ ID NO: 9085 - DNA, 670 bp, Cannabis sativa
attgcacaatatgacattttttatcaagaaaaaaaacttaaaaataaggtagtgaatatgatttagattttactatagagacccgtagtcttgaattctatttttaatattgtaccacacaacaacttttttaaggatgtaatcaaaagtccattcgttaatggtcatgcacgtctatctttagaaattttgtttgaaatttgataggaagtagttccactctcacattcacttaaggtgagtctatcaagaatactcccgtagttcggtactctactcaacttagagtatagatctcattaagagtttttattaattcagccttaaattattttaggaattcatacttctcttttcttgtaattatagtatgattttagttttatcacttcataaattattattattcattcaacttattttttgggatctccagtctataggtcaggttgccattatgagtgattcattaatttaagggcaatagtcctattcgttttgatgttttaaggactttctctccagctaaatatttcgtaaaaggatcggttagattatcattaatgcatatatgatctactctaacagctcctgttgagagactctaacaatactgtgcttatgacatatttattgtcttttactgttgtaataacgattttgaactttt

SEQ ID NO: 9086 - DNA, 651 bp, Cannabis sativa
ataaaccttcatgattgattcaattagagtaacgactctcgtattctccaacttaaaacctctgttaacaatgttaaataaggtgataactcagtcactacttatttcacccagtaacaagccctctaggatgaactcaacgagtatcaactaaacactccttggacttgtggctgcattgtggtgctatgtaaaaagttcaagttactacactagaggccatattcttcagttcttgattgttctcaatgaatcttacctgggcattcaggcttagatcattctctttgatccttttccaccactgtccaaggttttatttatgttcgttcaacaaaagcgccaacgttatcttcgcaacacgagtatttttattgttgcccctactaaaccaaaccccaatcagccttctcgaagcaagaagtctcggccaacttgttttaactgtcacaaatcaaagtactatttcatccatagttttccactaggatatagtgacaaaaagaagaatacatctactcatgctcaggcaaattaagtttctgctagtctaaaggatcccatcgccggctcttcttagctacaactcaaccaaacaactaatttccctccttaattagtaaatccaaggtgctccttctaccagtgttt

SEQ ID NO: 9087 - DNA, 774 bp, Cannabis sativa
catgggtgtcccaaagtgtgatgacgcgggagccaagactaggctctgattatatctggggtagcggagaattgtatgtcgctcatttgaggagtggtcggaggcatgggtcctgggaatagaactccgggtgcatatcctgacactccagtcgggtagtatccactgtaagccactatttgggcttcttccaaagtgatgtacttttggaccctcttctggaaatcttggagattggctgctccctcctattgtatttcgttccagaaaggattccccttacggatccctggaggaggtcaagctgttgcgtcatccaccttcttggtctttgaagcctcttctttgaatctttttataaagttctttagagtttccgcaggcaattgttttatgttagtcagggcactgacttcaaggttaatctttcttgctgccacaaattgtctccgaaagctgacttgtagtttgttctagcagtctactgatccgggttccaactttttgaaccattcttcagcggaaccgctcagcgttagcagaaagcataaacactttgcatcattgctgaccctcatgacagtcatcacccggtttaaacgggataactggtcactaaggtccgactctccagtgtatgctgccattttgaacatcttaaaattcttagggagctctgcatccagtatgtgttgggcgcacggttcccggccctcgcaattagaatccgagtcatcccctttttgcctacgggagaccctagcaatgtctttg

SEQ ID NO: 9088 - DNA, 988 bp, Cannabis sativa
tcaacaatatccatatataaatcaacacgtgggatataaatcaaattctggtacatttaaccgaaaagtagtaacagaagtaataaaaatgtaacataagatatttatttcgtcgaaaaaaacatgtagtatttaagtgtataaaactcaaaacatatagtatttataccgcaaagttcacaacttggtattagtttctaggttccttttttttctttctttctggaaactgttcttgaagttttcatccatgggatcttcctcatttgctggtttcagacgtgatgcgtcctcttcctctactacattcaatctgcctctcctgctcctgctcaagtgattctgaatcacatagttccactgaatcttcgtctcaatcggagcaactatctgtattggcgttctcaggtgctatccacagttcatgctcatcaattggaaggttttctcactggtgcacgcacaagacctctagctaccattgctgatcctgcagatgaatcacgattcattcaaaatccagaattggccgaccagttacgtcctgatccatttctcatgagctggttattcaattccatctccgaaggaatgctaggacatgttgccaaatgtgcttcgtctgctgaactctggaatgtcctcattcaatttttcacaaacacttctcgaccacgaattctgtagcttcgtggattacttcaatcgacaaagaaaggatcaaccacaattgaggaatatattctcaagatgcgctatcttggagatgcgttaatggctgctggccaacaaatcacagacgataagcttattttgtacattctcggaggtcttggcaacaaatatgaccttgcgatagtcactcttacctccaaagaatcgatcacattacaagatgtttagttcttgcatcttgcgtcaaactcacgaaatgagaattgatcaacaaacatcgattgctgcattggatcttcataatccaactgca

SEQ ID NO: 9089 - DNA, 1481 bp, Cannabis sativa
ctcctaattatagggtatttcagattaatcctatggtctgattaggtaacgaaaacttactactcggtgaatcgctaaaataaaactgtagttctctatgaaactatattgtcgaacttactcgatcattctggatcaagacctaccgtcgtaatgtgcagtaaatcataaatgtctctcctaattaggggatattttagaatgatcctatggtcgattaggtaacagaaactggctacaagttggatcgctctaacaactgtagtgcactatgaaactatgttgtcgaacttactcgatcgttctagattaagtcctatcggtgcaatatgcagtaaatcttggatgactctcctaattagggggtattttaaaacgatcctacgatctgattaggtaacagaaacttgctacaagatggatcgctcaaataattgtagttttctatgacactttactatcgcgcttactcaatcgttcaagacctaccgatgcaatgtgtagtaaatcttaggcacctcccctaactaggggttatttgatcctacgattcgattacgtaatagaaactttctactccgtggatcgctcaaataactgtgttcgatatgaaattatgctgtcaaacttactcgatcgttggagtggatcaagacctaccagcgcaatgtgtagtaaatcttggacgcctctcctaattaggggttattttgcaacgatcctacggttcgattaggtaacagaaacctactactcggtcgctcaaataattgtagttcgctatgaaatatgttgtcgaacttacttgatcattttggatcacagcacaatgtgtagtaaatctttgacgcctctcctaattacaggttatttcaaaatgatcctacacggtcaaacgtactcgatcgttctggatcaagatctataggtacaatgtgtagtaaatcttatgtgcctcccctaatagggagtatttcagaacgatcccacgatccaattaggtaccataaactttctacatggtggatcactcaaataattgtatttaattcgctaagacactatgctatcaatcttactcggtcgttcttgattaagacatatcgacgtaatgtgtagtaaatcttgtaaacctctcctaattatggggtattctggaatgatcatacattctgattatgtaaacgaaaacttgctacatggtggatcgctcaaataactgtagttcgctaagacactatgcggtcaaacttacttgagcattctgaatcgacctattggcgcaatgtattgtaaaaaatcttgtacatctctcctaattatgggatatttcaaaataatcctgcagtctgattaggttccaagaacttgctacatggtggatcgcttaaataactatagttcgttaaaacattatgcgatcaaacttactcaatcatcgttctaaatcatgacctatcaacacaatttgtaataaatct

SEQ ID NO: 9090 - DNA, 598 bp, Cannabis sativa
aaaaaattataattaattgggcaatagttaatgatcaatcaccgatttatttttagacaaatcaaagtgaatgtaaaaatattttatttatagtttagaagtatactgttcatgtattttttaatccatgtatgattttaattacgaagaaaaaaaagttactaaaaagtcatatttcttaatatttataaatttataagatgagctaaatttactaaaattctcataaaataaataaaatagataaaaaatattataaaataccacctcaaattcttttatgcttttctttacataaatgctttgtgtaattttatcatagagtaaatataaattttatttacgtatttttaaaaaattaccgattattctctctattaagttaagttataatttaaatataaatcttacaaaataaaatataatgatacatgagtctaatttaaatatagtactaaattagtattacataataaaattactaatgttttgttaatttttttataatatggtattgtataatggtcttatcaacaatatataattgatgttaaaataccatattcactcttttataaagactagcaaaaagttacgt

SEQ ID NO: 9091 - DNA, 682 bp, Cannabis sativa
taaggatagttgaaagtaattaagaaagagaaggtgttaatgagccttagtatacgagtgacatgtattgatgtggaagactacaataattttgggtctctagagaatttggtagaatttttcttaaatcaaaattcagatcccttttacaatggatatgtcttccaatttataggaaaatacagatgagctttttggggacaaagacccttctactaaaatttaccctaaaggtcgcatggctgatttcctttcgtgaagagatcattctcttagtgggccggtgactcgtgcccaagatagggagtaggcgtgtttggaaaatacttgtccattgtggatgtgattgctagaggtgtgagctgattaagggtgtatgggaaaagtgcatgtcagaaaaggtagtggaggaaatcctgaagttcatatgctttatgggaaactcattttgtcgtcgatacagaagggaaccactacaatactttcccttgttatgtgctgcaaaagttgagaccacggatgatggaagggattcaagactctagaactttatagagcatcttttttagtgatctcttttaagtttgcctttggcattaacgtgggcttcttggacaataaattgctccaggaactagctccctttttactttgtgggataattatcattattttttaagtt

SEQ ID NO: 9092 - DNA, 1733 bp, Cannabis sativa
catcagcaatggtggactcaaaatttttagcaagaagggtgtgtttgggaatgacaagattatgatctagacttttgtgaacaatgtgtgcttgggaaggccacaagggtaaagtttggaactggtaaacatgtctttaaaggcattgtcaactacattcactcagatttatagggatcctcaagaacagtctctagacgtggtgccaaatactttcttactttcatagatgatttctcaagatttgtttgggttcatatcctgaaaaccaaagatctagccctgaaatagttcatataatggaaaactatgattgaaaagtaaactggcaagaaaataaagaagcttaggatagataatagtttagaatattactcatattcttttactgattattgcaaaaaggttgggattagtaggcacaagacaataccatgaacacccaaaaaatggtctagctaaaataatgaatagaaccattttaaaaatggttagatggttacttaatgaaccattgtccttcctttgcaattggtttcaaaacaccaattgaggcatggacaggaagagatgcacaatatgaacatctgaaggtctttggttgtgtggcatttgcccatgtaaggcaggacaaacttgaaccaagagctagaaaatgtatttttctaagataccatgaggcagtgaaagagtacaagatgtggagcattgagagtggagatcatcaaaaatacttcctcagtagggatgtgacatttgatgagaacaaggtctatagagatactctcaaatctcaacaataggtaccagtgtcgtctgagcatgaacaagaaaatgactatcaatttgaggtagagcctaatagttgccaaacacagaatcatgatgagatttaggaccagggaacagctgaagttggaaagggtatgattgaaaatgaagatggctcaagtaatgatgaacaagatgaagaagaggagcaggactaccaactggttagagacagaaagaggagagctgtcaagccaccaaaaaggtttggttttgcagaccttgtgcactatgctttaacagttgctgtagtggatgagcctttgagttataaagaggctatgaaatcatcatataagcatgagtggaatcaaggaatggtatatgaaatgacctcactcaaaaggaaccatacctagatttaagttagaaaacttgctgaatgaaggttgtaggatacaaatgggtactcaaatacaaggaagggattcaaggagttacacaagcaaggttcaaagccaagcttgttgcaaaataatacacttgaagggaaggtatagactgcaatgaaatatttacccctgtagtgaagcatacatccattaggctactattatgcttggtggcatgtgatgacttggaacttgaataactagatgtgaaaattgcattcttgcatagcgatatagaggaggagatattcatgaagcaactagaaggctttaaggagttaggaaaggaggatcatgtctatctgctaaagaagttcttatatggcctaaaatggtcacctagacaatggtataaacaatttgatgaatttttcaccacaattggtttcaaaaggagtgcttatgactgttgtgtttatgtaagaaacttaaaaggaccagtgttcttattgttatatgttgatgatatgttaatggcaagcaagagcaacactaaaattgacaaaatta

SEQ ID NO: 9093 - DNA, 1005 bp, Cannabis sativa
ttcttcttttatcattcttcaaagaggatgttgaggcacccgatcccattttgaaagaagaatcaggtgaaggagaaaatgcagggagttcaggaagatcagtattgaaatctccagagttctcgggtaagtgttgtacataggatattaatgttaggctagcttttctttttctgggttgagggcagtgatgcactaattcggatacatcagttgggtcatggaacaaagtaggaataggttcaaacttatctacttaggccggccccataagttcctcagccaacccaatttcctcagcataaatgggccaagggaagtgagtgggctcagggtgtttgtggggttgtctagattgacacaattcagcatgaggcttttccaccatttggttataagtgggcccaatattggccataatggttgtgagaacaccattatcagcctcattggggggaggtctagatgaaaagctatttaaaatgtcattatctgaggttgtacgagaattaccttgttggtgaatacgcaaggctctaggagaaactgatctggccattcttcctcttccatcctgccttgatacccgtggagctaagttagaacctccaggtcttttgtccaatgggttaggggcacctttattgacaactttcaaatatttgcctaaagaagaacctggttcattgctcttgatcctgactactttccttgaaggtttggtgcaaggaggttgttgcaaactctgctttctggggatttcttggacaggtctctttcccattgatttggaattcgatgtagcagtcggaggtgcctttgtcgaagaagaagatcagccattcccttctctgaaatagtccagttgatttctggtattgaagcagctataaattgccatttcagccttcatccagggcccataggctggaacaatagctcctgtgggaggaaacgcaaaagctgtcgaccgaaaatatattttcttgtcatgaccaagataac

SEQ ID NO: 9094 - DNA, 1011 bp, Cannabis sativa
tggaaggattaattttcaagcttatggcaagtgtactatatggtatttagagtcagaataaattaattaataaaaaaaaaataatcataattaatatttgtaacatgttgtttattaaaattatttggaattattttatttattttatcaagaataatcagaatgcttaaattaattaaattgttctttatagttaaactatactatatgggggttattttgtaagacatattttaaataacaaaattatcattgtatatttaatattaaaaataaataaaaattattaaccttaaagacatttcttacaaaaaaaatagtgaggaaaatatttcttttttatcacatatttaacaaagttctctattttctaattaagtcactaatagtcaagcatcaaataaaaatgaagaatactaggtttttaaactgattgaacatctaacagagtccacttactaatgattatcaaccaatgatcttctagtaaagaataggacatacataaccctcgagaatcaaaaagagagctaagaaaaactttttgaggatcatggactcttggattgatagtagccatgtagtcatcccaagacaaccaaggaatccaagtggagcaccacaaatcaatgccgcccctccccattaccaaccaactcgcaactctcgttacgaagaaaaccttaagtagcaaagatgccttgggtcgaaaaggaggccgaagttggtagcgagcagtttcaaaaagtgtcccccattttacaatatttagtctggaacacattacataaaagggtggaatcaccactggccaacttccacgctaatttggagatgagagccaagttcaaataaaaaaaacttcttaatctctaaaccacgacaatttttcagcaaacaaagggagtcccagtttgccaaagcaagaaacctatttttctcagttgagccaacccactagaatttgtaagctagtttatccaagattgagcaaatagtcttaggcaaaag

SEQ ID NO: 9095 - DNA, 701 bp, Cannabis sativa
aaataatataataagaaaaataatgtatttcaatataaaaaaatttcgtttatttttttttaaaatgatgatatatattatatttatcaaagacatcttatataattttaaaaaattttaaaaaaaattaacaccttaaaaatagtgttcaaataatttattacatgtctgactcttttattttatacgtgtgtgaaataaactatttaaacacacaattctatgttataaactattctaaatttcttaaaatatcttaaataactacaacatatacgattataaaaaaattacaaagtacatccgtcaacaattttctagcgatgataaggggaaccttacaaaatgtgacatatattgctattagtccaatacaatattaagtaccatgttaatttaataataatataaaaaaccgataaccaaatacaatacgttcatgtaaaaaaaaaccctataataataacaataataattaataatactctattatttcttactttaatatttatttattttatttaaatattattattaaatattagtagtgtccagaattttttataagtgtcgctttataattagttaattttatttcttataaattattttcttaaattatataagaattgattttcaattacaccaacaataatatgagacttcaaaaaaatattaacactaataatactttttaatat

SEQ ID NO: 9096 - DNA, 974 bp, Cannabis sativa
gcacctacaaattcatgcagtgccgccactttttgaagatcgattggcacattatggcaccaacccaacacaaaaggattttcttaggcatccatcactagccgcaaatcaaccactttttactggcgcaaaaaatcgtggcaaaactggcgcaaatcaagggtataccactattgtagtgtacgtagtggcatgtgaatcatgatatatataaaaactatccttaattacaaagcagtaattagcatttcgtttatcaaatatatcaaatttacattaggtggctgcgaatagctaatcacaacaataacattgaattatataggctcaataatattcttattaataactcgtacacattaaggaataacacataattcaatagtagaagagactgtttctttgtgtttatttataatctaattcatgcaacatgcaacaacatggtgaacattaattcttttgggatatatatataaacatttatttataataatttcccagctttgatcttctacaacaagaaattgacaaatacagtaggctacctattgttgacctggaacaaccacacgatagtgatagatacagcatatatatatatatatataagtatatataatattatgtacttattagagctttgcttcattaccgtgcaaccccatcgagtggaagtaatattattatcacatgtttccacatgggttttggcgggaatgctaagctttgttgtgactatataaagttaatgataatggttgaattattagttattgtttctaccttaattgaaattacaagaggtgcttctactactaataaagatatgtctacagcaaatctaattcgagtcgatcaatcagggaaaggtgatttcacaaaaattcaagaagccatcgattcagttccctctaataactcccacctgtacttcatttgggttaagcctggaacttacaggtatatatata

SEQ ID NO: 9097 - DNA, 774 bp, Cannabis sativa
gcttgcttcaattttctttcttgtctatgcttactctatttcaaagtcttaagatctattttgtgaagagagaatacttaaagttcatcgttaatgatttggctgtccaagctagagtggagagattcctaaactcttgttatgtaggggagggattgcccctgtcaatcctattttcctttattaatttcataaactgaaatctcttaaaaaaagagttaaaagagaggtttgttgagattttctcattttaaaagaaagaaaacttgcattggtgatattgattggttggagagtttgagcttaagttttcatttgagctctttctcttggtgcatgcacttttctggtgacatttcaagcaaactttcatgaagtttcaagcttcataaattaattcaaagcgagagatgagagaaattagagttttttccttgttgtagcattggcataaatgagatcttagataaaaaaaaaattgatatagttagaatgtaaaagtagagatacttctagatcgttattgtcattattgcaataacaagaacaaaataatcgttaagtcaaagaatcagtgacaaatagaacaaaaacaaaacaaatgtatgatgatacatagagtgagagttatgattacaattaaggaaaaatatgtaaagattgtaaaaataaggttggagaggagaagtacctacccatgtagtatagagcttgagactgattgtgatgatgagaaattgaaaaacgatgaaaatcggagagtgagagagagag

SEQ ID NO: 9098 - DNA, 549 bp, Cannabis sativa
aaaaggataaaattttaatttataaaagagaaaaagtccatttcttacttttttattctttttgtttacacttttgatagagacaaaaaaagaaaaatgattaagagaatttagaaagaaaaaagatttttacaagaaattttgggctatcttacggtacggggaaccccaccaaggagggtttcaatgagacaatatttatcgaattaaatactcaaatctctttgactcgaacaactaagccagaacgattggtgatccaggggtcctatcctgtgctgccgcagcagggaaccgcactcaggctacacctcctgttctggtcctccggctccacgattcgccgccgaaacactaccgaacactccggtagctcaccgagatcggcaaacagagactcatcctccccactcactaccgaagaaaacgccatcgaaaaatcatcgtccatgtaagcaccgtctctctccataaacgggctctccagcacaacggccgtcgaaacgacgtcgtcgtcgtcgaaccactggtggcgatatccaccgccac

SEQ ID NO: 9099 - DNA, 685 bp, Cannabis sativa
aaaatgtattacaataacataaaaaatatatatattctcgacctttacatcaatttgagtatttttgtttgcggaacacaatactaacatcaaattttataatttattattgagtttctcgtattatttattaaataaaaatatataaaatttctttaatactatgttcaatgtaaatctccagaattgacattattattgaggtaacgtaagtgatttataagactaaagaaagttttttttttctttttagaatagaactcattattataaattaaaagtgagtcatttacaataaacagagtaaataggcaaagggatacactctaaccaagagcaagcttcatccactcctgatgcaaatttagccaacccgtgaacagttataaaatcggaataagttgaggaatacctcttttttgtatcatttaatcaaaaatacatttatattatatttcattgaaacatacccacttttgtgagagggttgttcaagacttaagtctagcatataatttaaatttacatcaacctaaggggtataatatggacatcatctataaaagtaagtatattttaaagaatttgaaaataaaggtacaaattaaaacatctaaagtaaaatgggtatatagttataatgtaatttcctccataaaatcacttgaaataatttcccccaaaa

SEQ ID NO: 9100 - DNA, 710 bp, Cannabis sativa
tttgggataatattttaaagagtccatgcatatgtgtgggggctacgtcgtctgccattttcgtgtgattttattgtacagcttaattagcaatattcccctgcctgcctgaccaccggcctcgcgtgccaccaaccagtaattaatttccgaaaaagcactttcttattcttttaatttttatttttaagattgcgcaatattctagcattgagttgtaagattcaaatgtataccaacattttgtaagaataatttttatagtagaataaataccgaaattgatgaaaggtaaggtattagttacatgtcgttttaaatgatgtgtggtatttttctttttaagaaataaattgtgtatggtacttgttgatggtatatgaatcatctttttattttaatttcataaaaaatttaaaaataagaatttcaatactctaatttcataatagatattagtacaaattgggaccaacatatattgtgggacaaatattaacttatctaggcttatattactcatggatttttaaaagagaaataattgttgaatttaggagtctaaatgggtggggtcagatctcattcaactatgatccgacttgatccagatcatgtaaggatctgccccacctcgcccgttacattagatccgacccaacttatttagattggatcttatcccacctgactctctctctctctctctc

SEQ ID NO: 9101 - DNA, 678 bp, Cannabis sativa
taggggtatttttgtcattttaaatctcaaataaattctcgatattcccaatatctatctaagttaccccgctactacaaaaatactaaaatgtgattctaaaggccaaacactgcattctaatattgacagacataaaacatgcaaaaacataaaattttatatatggcataagtcatacatcctgaatttaaataaatctccataagatcataaatcagaaataataatctaacttcataattaagccctaagtatctgctaattcccaattaaaactaagtggtctttacactcgtccccttacacactggactaaggtaaggtctcatcttcttctaggttacccaagcattttacatgttctatgtctatcccttttgttgcacctcattccaccattgtttcccctactgatccctccatgaactttactgagtcgttcccatccaagccttatggccctaagtcctcgacaaaaaggaaatcagtttcatgtagttctccttgcatccctatccctaagaaagccaaaagttttcaactaaatccatcatcaaaccctagtttgtccgagacaaacaaatcaaatacgcctttctattcgaatgacaagctacttaggttttaggataatgtctgttttgtcctttatggcctgaatatcgagttaaactg

SEQ ID NO: 9102 - DNA, 545 bp, Cannabis sativa
cacatgtactcgcattttgtacttgaatgaatttcactttgtttctttatattttgaacagtatatatatcccttcgaggacatttgtttatctgtttacttttcacggtacacggctactaacatattttatagacttaatcttaatctattcttcttattataacatctatttttctataattgccacttcgttgcttggaaattcaagtatgaaatctgtaaggggttgtcccttaatcacggatttaggtttaaatttgatgtcgaactggctcagttccactgaccatttcaacaatcttcctgaggcctctggtttcgctaaaagttgcctcaaagggtagtttgttaaaacttcaatgttatgggcttggaagtaaggtcgcaattttctcgacgctataaccagtgcaaatgccaacttctccatctatggataacgagtctcaccgtctaaaagacgcttgctgacatagtacactaggtactgcttcccttggtctgcgtagattagttctgaactaatcgcatattcggacact

SEQ ID NO: 9103 - DNA, 704 bp, Cannabis sativa
gacaaaattatactttaatctatgaccccacaagtgtgatacacttgctacaacttacaaaggctaactcatgttatttctaaagacttgaaatgggaaaaaaaagaagtaaaaatacaatttatgcttattatatctacagaaggtaccaatagatttctattttttgtgaaagccacgatatattgaccatgaatttttctcagaaagaagttaatgtaaaaccatatgaagtttaaaaacaaaaaccatttgaggtagacaacgtgccttgataaattttagattgaaacacaattatatatcaattaatccagtaactcatatatttactaaaaacaagtatgttgagattagcttaccttttcattagaaggcaccaagtcacgaagtgtagctagatgggcattaattctttctctccttctcctctctgcctcactatggttctttaaagccgcaagagccttagcctcagacaacccttttttcccaactcttgctggggccttcacaagctcacctctcttactatccaacaccaaagagtgaggaaccgacccacctttaaacgtcccattaaacccagcagcagtatgggaaaaagggtcaaacaagctggaataatcagacccgtatgaaatgtttgagaaactataagaagccattaacttgtttgttactaaatataactaattttatta

SEQ ID NO: 9104 - DNA, 526 bp, Cannabis sativa
ctgttgaaaggttagtataattattatatttttaaatattatatttatattaaatattttgaactcgtttggtacgtcgtgttgtatttgtattgtgttggatcgtattgtattaatattatttaatacaaattttaacttgtattaatagcttgtgtataattatattatatttgccataaacttgactccaactcctaaccatgtttggggccagggtctgggattcagggttcaggtcggggttcaagtcttgagtctaagattggggtcgaatccgggtctgggccgtctaagttcgagtttgagtcggggtctgggtccgtggtcaaggtctctgtgcgggtccagggccggtcctggaatagagtcgggttctgcgtccagggttctggtccatatcgactctgggatctgggtttggctctagggtttgaggttagggccaagtccgggtcttgagtctagggtccaagatttgggaccggggccacgtctggggtcgggatccccaaccccggacttt

SEQ ID NO: 9105 - DNA, 1833 bp, Cannabis sativa
  modified_base (1677)..(1678): a, c, t, g, unknown or other
atggtctcttgcagcttgaaaatgttttttgaaatccttcgacaattgttcccaagatgttatggaatggttggtgaatttatcaagctaattgctcacagctcctgttaaggaaagttaaaaataatatgcaacacaagttgttagaaacattgcttgctcgcattatagtgttaaaattattcaaatgggggactggatctgtggtcccatcatattgcaagacgtgcgaattcttaaatccttgaggaaattctgaatttaagatgtcagcgtggaatggcttagtttcgtcatctgagtcatatcctggcaacttgccatattctccatcttgatattttttgaatttatcatccaattaaattactcgtaatttaatgtaattcacaggttgctaatttgcattttggttaagttgattacacaaatcaggtgcatttcgattcaagtgctcgcgaaggtctggctgccttcagtttaatcttttgtggagatcaggttcgtgatgcctttgctcataattacttacagacctggtccctgagtaacttttagactggtaactatgttagttacttatactctcctggttagtaaaataacgttgagatctgctcccatcttgcatttttctatttgttccagtcgacctaatgtgcccgtaggatcgtgattctcctatgcttgagcttgcttcacgcgtttaatctcgcattggtcttcttattcaaaagagattagacacacgtcccctacttaggtaagtgtgcatattctctctatctgtgcgtgaaggccattgtggatgcctccactagacctaggttggtttccacgatttcttccatcgttatgtggaattttctagtttcttaatcgcggttgtcttgcctctgcattcatgcaagatgattctggtatgccagttcattcattcccttggtttgtaaatctatgggaagttcctagaacatcacgttgatgttcttgatttcttgtattactttgattggcttgatttactctatccattgggacatctcttgtattcccaggttgttcttcctacgtatttatgggattcccttggttattttcctgcctcctcgtcttggaggctcaaggtcttcctcgcggtctccttacagttggatcaggtaggttttgagggaatattccctgtgcagccttggtcacaatgacttctcgctccaactcagcgttttatcagtttgattcagccaagcgttgtcgaagttgcctattttgtaattctaccagtggtacgtatctggtaggatcataggcatcctcactccttctttctgggatttgatcaccagcagcattgaaattacaattgttcctcactaaacgtggtgttttagatgtgttggttctctgagaccccataggttctttgccaggacgatcggtagtttcctctgggcaattgccttcacgtggaatgttatcagccattaaattatgttttgaatatgtgtttataaggagggattttttagagtttttatcaccaaggctctcaatgaaaccaccaaactgctaacgcagattttcgttaaccgaatatatagcctttttcgtaataaatttactgtagactttaatcataataatattaatactagatattttacgtggttttgtagnnaaaatctacatactccatgagtccattattagggatatttatttgaatacagagtatgaatttcaataatagtaaataatagaattctctctcttttttttttgccgtcctttttctcatgcatactccacgagtccattattagggatatttat

SEQ ID NO: 9106 - DNA, 1159 bp, Cannabis sativa
cccctgccgcaccaccccagtggcagaatcctcagtaccctggtaacgagtatggtagtgctgtacaaggtcacatccctccgggtcaaggaccatgggatccatctatgcaggctggaagatcaacttatgtctctgctcctggaacttttcctggccaaaattttgcaacatcctcggttccctcttatgcagcagcaggagtgccttccggttcatctcctcatgcctctacaagaccgtctatgcctggagctccaccgaacatgcgacatgatggtgcttcacctcctggggtgagacccggaggtgtttcaccttctggtcaacctacttactatggccaataggttgtatcttcttttctttcaactaaaatgcatagtaccatagcttctatcccatttccttcctttttggtttccttgctatttttgcgaccgagaacgtgtcttggaaagaatccacaccacagattaaattgcagtgtctgatcaaactcaaatgtctttcctgctcagcctggaaactgtgattcttgctattaaaatttcaacatgacatgattatcatcctaaagtattctgtacatactgaaaagagaaaaaaagaaaacctttttttctatttcatttttaagctccaacatgagaatatatagaattgtcttctatgtataagatagataccataatcataatcaaccattttttctaatgggattatcagcctcttgccactttcccacatacgacacaaaatcttcatctaccaacccattcgatctctgcattaataaattaattacatatccttaaaaaaacattattattattatttattattgtatttttagtcctaagatatataggtcacgccgccagtaagtttcaggccagttttagtagttttcacaaacatgatcacagtaagaaaatggcatttttaatgttagagtgagtaaggtgcatttgattgtggcaaaactaaaagaggaaccagtttcaatgaaataaatggtatgagacagttgagaagtgggattggcctacttgtttgagaagagagagtccactcatgtagtggccatgtgcttttcatgtgtgagtggaaactggttactgaaacatgatccgtacaaaagcaaatttaaatcaac

SEQ ID NO: 9107 - DNA, 890 bp, Cannabis sativa
atttattatgtagaaattgaatgaactgacatgttcataagtagcttttccaacttggacttaaacttatcctcataatcttgttcttgaataaggaagtcactagaatgtattaccagatctgtttactaaaattagagtagttcatttcactgactgcttagttcatgcacacatcttaattggtgtatagcttactctgtgcatcagggagcttctcaagggaccactgtactatgtcatagcaattgctcttgtttgtataatctattggcgaacttcccctatttcgattgttgcaatatgcaatctatgtgctggagatggtattgcaatatactagttctattggatttttgttttggcttttctaatcacaacttgatctcttgaactaaactctttttctatattctttaagttttggttcagtgacttaaaaagtatttcttttcttggcccaattcaggtgtagcagacattataggaaggcggtttggtagtattaaaattccatacaacagaaacaaatctattgctggaagcattgcaatggtatctgctagtttcttagcgtctgtggggtaactttggctacttgctcctttttgttttcaccttctcatttgttgttttgaaatatgagaagccaattaagcatcttcccaatcaaaaatccatttgttatttacatgtaacttttgggcaggtttatgtactatttctccttatttggatatatggaaagaagttgggaaatggtcttggggttttggattgttgctcttgcatcagcactggtggaatcactcccaataagcaccgaccttgatgataacctcacagttcccgcaacatccattttggtgggcattcttgtgttctaattt

SEQ ID NO: 9108 - DNA, 773 bp, Cannabis sativa
caactcgaccgagtccacaaagctcaaacaactcagtctctcaccaaactcagtgactcggatcgatacctcgtttacaaccgacaaacaatcctgacccaccaatcccctaatatcgcccattaatctgttaccgttcaaactcatatccaactcgggctgcgcgcagatccgttctaacaaactcgccagcgactcaatctccttaatcaaatcactggtccaacacgccgaaactcgctcctcctccgtggcggaagacgacgacccgagaaagaatccgaggacccgggaagtggaaagtaggttctcgatgtactcggcgtaccagcgcacccacgtggatagctgccaggtcacgtgactagagttatccctgaatcttgagaggttgagatagttccgaccaccgtggagggggaaaacggagagctggtcttggagaatgaaggtaccgaattttacaatgtggtggacggccaccaagcacttgagagccacggatgcgtctcccgtgttctggagccgatccatcaggatctccacggcggctgatgcggtggcgcgtgaggagtgaccgaatgctagtactgccgctaagtgcttggggttcggcggcgcgtggaggttgtgcgtcgtggctcttagtagggagagagtattgggtcgagagaaaatcgcggctttgctttgtgatgctttgtccttgattgctcccacgaggtcccgcagcttcgttccgcgccgccccatgatattgagttggaagaaaa

SEQ ID NO: 9109 - DNA, 1299 bp, Cannabis sativa
ccaaatttccattcctagatctactccatgtcaacgcacaaaatccaccaccaggtagaaaagtgtggacggctagggcctacctagcttagggctggctagccaagtacaagtaccagactcagagctggccggccttgagtataccctctcctaaggtatggccagcaaagctctggccaatctaaggttgtagttcaattaaaaaaggccaatcaaccatgcctctgcagcaacaaattcttctgtgcaagcatagttagattaaatatgagacatgttgaaaggcctagctggtccaaatccttcagagcttaagctagacatgccaatgggatcaccattctgggcatatataaattccaagattctagcttggaagatgtacacgagggaagatgatcccctagtacacctaatatactttgagatccaaacaaatctccaacaggtatctagagatgtgcgatgttgaatcttttcggcagctctagatgaattagcacaacaatggtattttaagctacccccaagaagacttaactcttgggaataattcttacgagaattctacatttagctctctttttcaagacaaatacctattcgattggaggatcttgtcaaaacaaagcagaaacaagatgaactattgaaggaatacattcaacggttcatggctgaggccaccaagatcaaaggcttgacagaagaaggccaatatacgaccatacttctggaaaaatatcaggagcatctgaacgaacaacatggaagagttccttaagcaagttgattgctttataaagttagaagaatttgtccagcaagcccaaacaagaggacagctcaatgacagaccaacgcagggcctcatagcaccccaagcactatctgacatctcgagcaacgctgacggtctttgttgattctataacaatgagaatggtggaagaaaatgcaacaatgattactctaaccgatataatggaaaaaaaaaggaaaattcaacaattcccttatgccatgaagctcaagggaaaaggaggagaagtgtgcatgattcactctcctaacaaaactctcaaagcaaagcatggccagacatcccaatagggaaaatcaataacaggcagtacaaaggctggcctccatctctaagggttggcctccatgtctaaaggcttgcctccatctctgaaggctgacctcaatctccaaaggttgtcctcaatttctgaaggctagcctccatgtctgatggttgacttccatctctgaaggttagtctccatctgt

SEQ ID NO: 9110 - DNA, 649 bp, Cannabis sativa
actgtagtactatataaacaaatgaagctgaacaagatataattgtagcgagtgtgatgcacaagaatgtaatatttgattacattatttgaataataattggcttagctttattaaatttacgatgaaggctgaaaaaacaagagagaataactggccaatagaaaagaataaacttttagaagaagaggcttattatatcgttaagtatacaaatcgagagtagaaacatgggaaaaagtgaaagctaaaagaaacactatatagatagtataatagttaattatatattacctggtccagaaaggattcgatgatttttccaacacgctccacttcagtagtattgctatattgcatcttttatatgatcaatatccagattaaccgatatatatatatatatatgtatatatatggtggcggccgatttagttctctccgtatcggttctttttctacaaagaaaacattggaaaataaaattaattatattaaaccttttctccctttatatgtttttatgtaatatatattgctttccagccgataaaattgacgagtgacaaaaagtccgaagataactgcaagaagaaaaacaatttcttgcatggcaatgtaaggagatgttgacgtataaatattaaaa

SEQ ID NO: 9111 - DNA, 845 bp, Cannabis sativa
agttttttgtttaatcaatgatttaagaatttacatgagtgtacatcctattatgttctattgtattgtattgaattgtaatctgtatttttagatagtatgtttgatattaacttgtaagcaagtaataaaagatatttttcgatataaaagtaaatttaagaaaattataaatatcttaaatatttgtctaaaaatatgaaaatttatgataaaacttataaaatactaataaattcaataattatactagttcattttaataataaatataggttttatttagatattaggatatcatcttgataacactatcatatacaataaacatgataatgttattagttaaatggttttgattctttacacctatcatttcaattaataatttgtttacctcattacaaaggtcaacattttgaacaaagtacattaaagatataatacttcaaggactcgtatgatcatattcataagtagatacgagtagtatgaacttaataagcatttttgagaaattcaagttgatgattgactcccatcccatcttaataagcatggttgtatcagttctgcacacgcaatcacttatgatatctgaattgtgaatgtgaatttgatatctgaattgaccattgatggttggtctgatctgatctgatgataaataaaactcgatttcttatcttatgataaataatagaacaaacacaataataatgtaatgtaaccttaccttaccttcccaaagaaagaaagagagagagatcaatggagatagagcatttatttgatacgtttaaaattcacttccacttctgcaatgtgttgaatcttaggccaat

SEQ ID NO: 9112 - DNA, 794 bp, Cannabis sativa
tcatcctacagattagaaaagtaagataaaagtttaagttccatatactaaaatgaactcgagtacgaatgtagatctggcattgctaaatgaaatccaatcccaatactgtgaaatcttgtgcatttacatatttaagtagacacaggttgcattttttagttggtggcaagggctcttagaagggatgcttacacatattgatttatgctgctacaagttcatgttgtaaatggtaatactgtatctcttgtagatgcattaatggaagtttagtgtcaataaagcccagatatacattgggatagaaattggtatttaaatgaacaggcttactcagatcactgatccgttataattttcagttaccaaggttcattttaattttgagacagtaatttgcatatggaggatgtaggatgccttatggaattccgaattttattaaattgtccatgctctacaattttagggatcaaagtattctcataatggatgctaaactgcagcttttctttgaccagcattggatataatgtagaatttatgactgacagtagtttttcccttgaattttcaatttcaatagattaggggttgtgttttatctgatacatgtctgtatgcagagcatccgtggctccaaaatgctaagaaagctccaaatgtcccactcggagatgttgtcaaatcaaggctaaaacaattttcaatgatgaacagattcaagagaaaggccttgagggttggttgcctatttctatgaagttacttttatttttctgttagattat

SEQ ID NO: 9113 - DNA, 716 bp, Cannabis sativa
cacaaaatctaaaatagtatttacacaattatttattattgttaattttatttttaatatattttattaacaaaaatattatataataattatactcggttcagttgtatttttattcccatatattttttttttgattgattgattcatttcagttataaaatgtgtctagctttcccaaattgggaaaggtatacatatttgataagttttataaataaatcaattctttatttattcaactatgttttctatgtgctgtgattatatttgggttttccaaattaatttaatcagatatgtgtgaacaaaatctaaattagagtttcattttctataaaaggaaaatcgcaccttctacttactattctgtagatacagaagtaaaaaaaatttgtgagttgtgctcatgtctaaaccgtgtatgtgctatctaatatcagtataataattataaatactcatattagcagcaaggtttagtatctcttttattcactttgaatttctttcatattattagaaaagagtgtttttgttgtgtaaaggagagtgtctttgactctacctttgtatttatgtttttagtattgtcttaagtctgtaatcaagtctacaaagaagaagaacaacaatactaacctccaggagaagtttcttcaaactttcgaaaaaaagtttctcaagccttgtctcgggaggaagcatacactctt

SEQ ID NO: 9114 - DNA, 641 bp, Cannabis sativa
cagcaccattagttgaacgaccaataacagttaccacagttccaaaagtgaattgagaagtcatacacatctattattagaggtgagggtcttatattggcctaataatattgatgtaaattaaatagttaacttacattaaacatgtcaaaactatattatataatttataaataatattactattatgtagtaaaaataaaagatagaaattcccactatgagagtgtggcatataaataggggtgaaaaggcgctgcctttagtcgggaaaataggcgcgatttctccacaacaccactctcttctctcctcttctacttttgtcttcgagggttccttcctttcttcaagcccggtggtggtggtggtggtggtgatggcggccatggacggctcttcttctccaccatctgattcgaatccatcatctaatggtgcttcaaagttcctcttaaaccttccctctcgcggcctcttctcctccaccgttctctcttcgaatccggtgatctcttttctcccctcactattttcttaaccacgaaacaaaataagagtttatgaatttcacttaatttaattttattatctttgttgaattttttttttgttgatgtttggataaatatgtggagaat

SEQ ID NO: 9115 - DNA, 933 bp, Cannabis sativa
tcataaattcaattagaatgatatatatgttaattttgattttcattgctattttctgcatgcagtgatccatattatagatcatgtacaagttaagtcaacagctatatataaacatataatattagtcctatcatatatatatatatatatatatatataaaaaacattaattcaacacaatcatcctttacaatttatttgttgtttatatgacattccattaacataattacaaataattaatataacaaaattaagagtttacaaaataataataataataataataataataataggtatataagaaattaatattgcatgtcttaactcttttttttagttttatgtatataaagatataaaaaattattaatttaaacgataataacaaaaaaaatcttattcaattctattcatatttaaatttagacttaaataaaaaattatctagcctattttttaaaaataattatatgagtacttatctttttaataactatatataaatcaaaaaaattaatttatgtattctaattaaacaaatattatctaccattttatggaaaatgaaaaaagaaagttaattaactggattaagtaattatatgagttaaaataaaacatttaatttagatctatttcaagcaaaaatataataaaaaattattctaaaaacagaattagttaactaactaattaatttaaggatattagttctaactttaactgaagaataacaaaattggttaaaacaacaaaaacagttcaatagttccatttactgatttacgtataacgataaagatatatataaaaattaactttgctaaatagcatttgcatggatatgcatgtgatatagtcaatatatgtatatatatacctggtgtatttattacttgctgagcctacatcatagcgccgata

SEQ ID NO: 9116 - DNA, 1169 bp, Cannabis sativa
ctaagtttggttgtaattagaacatgttagaggagatgagaactcaaaagtttgcgagttatattttctaggtagaatcgggcacctggttatagcaaatgggtacccagttgttttggtagggccttttttactgagtacctagatggaattcttattacccggatgggtagtccagggtatcttgagttttgtgtttttgagatatttaggatattgccaccctatttagaaatagggaaacttcaaattttggattttaatccttgaaagtgtttttgtgagacacttaccagttaaccattaacgtgacttagggccttcgatcaccgagctaagttccactcagattgaccggcacacctaaatcaaaaatcaaggtaagaaaagtattcagatgcacatatgcacatgtttagtatacatgtatatatttccatgtacctagcatataagagatagcaatataagtgtacatagagttgcactaaggtattgatatctaatatattatgtaatattgaatagtatagattaatgctaccaataccagtaaaactagagtattgagaagaggttggtaccatggttaatcatactataggtatgaacattcggatctcactacccgcattagacatagtaaatagacttatgataattgggtgtatgggtgctcaattaaaggtcaagtatgtattttgtattatgatttttcttttcttactgagtatgtcgactcataggtatgttgctatgtgtaggtaaatacaaagacaaggctgaacaacagtgagtgatgagcttggtgaagattgtacatatccaatcgtctaagcctataaggttgtgatcttcgagacaccactaacacctttttggttatgtcatcagacaaaaaaatttgatacggtatattatatatgtttcgtaactagattttgagatcatatattttataaaaaaatctttatgcttagtaaaattttaattatcattgaaattttattaaatgtactttttattttaaaaccctttgattatagtaaaggttagcacaataattaaaaaaacactttaacgtgcattaactactagggcattacagtgcgcatgacctaggtgcagggcacaataggcaacctgcagagtgtgatgggtttgggatg

SEQ ID NO: 9117 - DNA, 884 bp, Cannabis sativa
cgataaagaagaaaatgttgacacatgaaaataagatcaaagaatacagatatctgcattgtatttattcatcaagaacaaatggattagaataatgataatattgctaagctaattcaggtcagaaaatcgagcaacaattccataccaaggctagaagtatcttcccaatgtttccatgaaagttcacccaagaatctgaaagaaccaaaaacaatggtgtaaattaatcaacactcactaaagtatgttgtgtatcatattatgtggaaaataagatttagttgaggaaagacacaaactttgatctatggactgtacagtcatctgagcataatttgcaactcctccagaaaaatcaaatagaataaattcaatactgaatccgtcggtgctctttcgcttgaagttcatgaatgcctgtaagttattttaatcacacatcaaaaaccaatttggctaaaagttgtgtaccaccagacaatagaggcctgctcaaacaatttagtaattaaaccaatcatctttcaaattcagcagagaaagcaatttttctatatattatagtaattgagaaaagcataatgattatatatgaatagcaaacttatcccattgaaattcagcaggattgatcctagcttaaagatctctaaaccgaaaagaaattgaattatgagtgatttttctaacctgaggagtatatttgatggctgtcaaaaacactgcaatgaagctgaaatgtgaatggattgaaaccaagtcagaatctaacaattaaaccacatattttgcacatgaaattttaaatgttaatcaggctatcgaaaagagaacccacaaaagcatatcatgaatctaggcagaagaataatttttgacat

SEQ ID NO: 9118 - DNA, 753 bp, Cannabis sativa
attataacgcatgttaggcacatgggtgcccaacataattttgtaattatactccaatccagaaggtaaaaattttgaaattagcatatcttttacaacactagaacttcattttttttaaaaaaaaatgtgctaaaatagagcaacctaaaaatattgttggacttgaaaaaaagtatatagtaatatgacgttaaaatattgccatttcggtgttgaagtgaagtagttggacatgctctaacacaagttgaaaaccaaaaaacaagtttgctctactttttccttacaaatcaccttttgaggaataagaatttgaactccctttgtcttatcccacaattattgtcctagcttctcacttttttattccgaaattagctctttacaataaacactaatactttaattagaaatgctaaaaaatacaagtattgtttaacaccctcctaaatgttgtatcgctattgatgcaattaattatcaactctcatataattataatatattaatttttaaagaatatcactaactaattgcagggtctcacctctaaaaaaatgttagacactactgatgttcaataacaacgcagtactttgtcaagcaaaataagtaataatagagaattgctaaaagacacctctagtacctaacaccttcctcaatgtcatatcaattaagtatcactaccaatcatgcggcgctacttataaaaggtgcggttgtcatgggtgccgtggtaataatagg

SEQ ID NO: 9119 - DNA, 568 bp, Cannabis sativa
accatttttttagtaagcttctctggaacaaaatacaggtccagctcaatatgcttagtacgggcatgaagtacatgattagctgttaaaagaatggtgattaagttatcacatgagataatagaagttcttggaagctgaattgtgagctcagtaaacagagagtgcatccatgtaatttcagagacaacttgagcaagactcttgtattcggcttctgtgcttgatctagaacctgtatgttgtttcttgcactaccatgccacaagatttgatcccataaatattgaaaaattagaagtagaccttagatcatcggggtcactagcacagtctgcatcacagaatgcagtaacatcaagttcagtggggttttgaagtgttaaaccatgagacacatttccacttagatatttgagaattcttttcactggattccagtgatgatgaggaggattggccatgaattgacagactttattcacattatatggtatttcaggtctattaatggtgagatattgaagagtaccaataatagacatgtagtgttgtggattgtcaatag

SEQ ID NO: 9120 - DNA, 529 bp, Cannabis sativa
tactttcatataaatatatagaataatgataagtacacactatacccaatacatgtataagataatagcacatgatgactatctgaaataaatgtcattagtttagaattttatttaggcttgatgaatagttaataggcttaatatatgtgtgtgtaaagtctaagtgaaggtgaaacagaaatgtgaatttttttagttaatagaaacttttaatgagcaagttcagttcaactagggttatgtagctaaatcccctccctgattttataaatacatattgtctcatcacaattgtatacttttgataattagataaaaaataaaaattgcttctgatttaaagacctataaggaagaagatatagttgataatattgcaagtcacatgttatggatcaatcagatagacatatctaattgttatatattattattgtgttttatattatatacaaattaatcttagctttattgttaattaatctaacaattcctactaaaaaaattgtcatattttaataagtac

SEQ ID NO: 9121 - DNA, 1390 bp, Cannabis sativa
tgtgggaagcagagattcaagcaaaggatgcttggtagccatgtatgctttgggtttaaaaatccctctttgtgatcgagtgaccatagggtgagttctgtgtggaacttgtgatgcaggggcatgtgcaggcacagtagcttcaggaactgggctcacaccagtagcttcaggaactgggctcacaccagtagcttcaggaacatgagcatgagagattggaggtgtcgacactactggaggagaagcttcctgaacacctgatgttgtagcaacaggataaggcaaagaggagtcattgaaatctccagagttggtagcactgaggttgtgcaactggtgctcatcacagataggctcagcagcatagtcagaagatgttgcagatgcagtaacagcaggattagcaacattgcaattgtgattagtgtcgacaggagaaaaattagtggaaaattgagcagtaggaaagtgatttgaggaagatgatacctgtgttgcagagatggcacggagagcaggatagacaagctcattgaaaataacattgcgagctataaacattctcccagtgagactttcacacaggtaacctttgtgcttgggagaataccccaaaaatatgcattcctctgatctgaaatcaagcttgtggtgattatatggtcgcaaatggggataacaggcacaaccaaaagatttgagaatgccataatcaggagtttgttggaacaaacattcataaggactgagaaaattcagaactggtgtaggcattcgattgatagcatgtgtggcacattggaaagcatgccaccaataagtcatatctaacccagattgagcaagaagagtaaggcctgtctctgtgatgtgcctgtgttttctttcaactctcccattctgttcatgagtgtgtgggcaagaatgctgaaaccaaataccctgatctttaagaaatctgtcaaagactcgaaactcaccccctccatcagcctgaacccgtttaataggaagattaaactgtttttccaccaaacttttgaactgaatgaagagttcgaaagcttgagatttgactgtcatagggaatatccaagagaatcggctaaaatcatcaacaaaaacaatatagtatttgtaattatcttttgaagcaacatgagaggctccccatacatccgtatgaatgagctcaagaggttgattggctcgagaattggacaaaggaaaaggaaggcgatgactcttccctttttgacatgcactgcagaactgtaagttcttgagagagtgaggaatgcttgattgtgtcaagattttagaaagaatatggggggcagggtgccctagcttacagtgccacaagttaatgtcattagcagtatta

SEQ ID NO: 9122 - DNA, 643 bp, Cannabis sativa
ggagagaggagagaggagagagaagtagagagtgactaaattagtgagctgtgtgtgttacaacttacacttgtctcatcggattaaccttgtgtttggtagagaggaatgaaagtaagatggatggaaaatattgaaggaaagaaaatacgaaggaaatgaaaataaaatatatttataaaagaaaagaaaattatatgtttatgctatctattatttattcatattattttttagtgtgactcactaatatttctctctccatctttcctttccattatcttttctcctgtaccaaacaatctctaaattttctctccttttccttcttccatttttctcctctaccgaagatagggtaaatgacttattaagaaagaaaaaagaaagcaagtcatttcgagaggaaggctggctaggtaatagtttgggcctctcatgccttttttttaagtcaaaaacagtcataaacatctttggtgagaaatagttaaatcacatgatctgtgtcgcttggatgattatattattaactaactacttgattagctatgtgttgctccttctcgattaaggtttattttgtaacctaaatcacagacaaatacaatatttagaaactatatataatgacgtggacaaa

SEQ ID NO: 9123 - DNA, 756 bp, Cannabis sativa
taccctgacccgctgccaaaaaaaccaaaaaaattgaaaacgcatgtggtcgagtctactccaacccaaaaatactccacacgagtttcgggtttgggtgttaaaagtgagtggctttttagtcaggttctaacccataacccgaacaaacaaggggtttaatagcagattttaacccaaaaatattgtgaaccaatttgtgtaatactggttcagtctctccattctatgataagcatgaccactttgagaggaagactttctatgtaaaaaaatttctaggttcaaagatttgataacaatgtggatagtacaatgtgaatggtgatacaaagaagcttgatatgcataaactctactaccagtactaccacaatcaagaacaatatagaatttagacgaaccttgagaccaataagaagagataaaaaatacaaagagataaacaataaaagctaagagaagaagacaaaggaataagaagagaacatgaagacatttcttttgagcagagtaaggggatccaggtggtaaaggctaaggcttttcctttggagactttgttgatgagaagtgtataaagaattatgaaactagtttagcttttggtaagttaagagatcttaaagagaggaagagaggcgtaagttattgttcttgttggggaaaccaagaccgagatcctaatctcgcggaggtaataatgcaaaatcttgagtgatctgatgaggtgataattacataaaaagggcccaa

SEQ ID NO: 9124 - DNA, 508 bp, Cannabis sativa
agggtgatgcagtacaagcttatgggccgtggataagagcggagtcagcggtcatcagctgtttcaatacaagaaaccagctgaattttttcagggaggatactagaacccttcgaccgccgatgaacagagctacaactccggtgaaggggcacaaagggcaagaaaaaggaaaaggacaggccatggatgacatcccaaggcagcttcaaagagccaatgagaatggcaaactcaaaaggaaggttatcagagtacagaagaaaactccaggggctgtttatgggaaaaatttgaaagtggtggacaataaccccaagagatcagcaggtataagattcatgatctggataaaggaaaagctatacctgaggctctcaatagggaaagacgaacaagatcagtctcgcttcgagcaatgaggaagcactccaaaggaaacttagctgcagaagaaacagacatagatatcttgaagaaatactcttcgagaccccccccccccaac

SEQ ID NO: 9125 - DNA, 644 bp, Cannabis sativa
tagaaaataatcggccatcacatccagacatggagcataagtaagacggaatggttttttacctcttctataagtaatagctcccaaaatgccctcatttttggccactgcggtaaatcgatatgccagttcagcctccttgctgatgggatctgggtgaactcattcccaatcaaccaaccactctctatctagcttcatcaccttccatatctcctaggcagccatcgcaaaaatctcttctctgactgttggaggatcgtgatatcgcaattactgaatggttcgatgctttgggtcctagcaataagcccgtattttggaagattatctgtggtgaccaagtatccacctgtagaacatcggtgggaatcttccagtattgagcttccttagtcaccaaggtcaaggttagaggtgctggctcgatgttggctgcaagaatagaacctcttccatcagaaaatggatacaagacatggaagaaaatgaaaagaaagaaaaatgactagaatgcttacttagagtataaaagtcaagggataaggttggaaccctttttagcaaaaatcccgtggtgaagaatcaatagtctcggaagtctaggatatatttggtgaagctgatggagcaagtcgacttgc

SEQ ID NO: 9126 - DNA, 1130 bp, Cannabis sativa
ttcctcattactgcttctagaaaacgccattcaacccgatcaaaaaccttgctcatatttaatttcatcgcaacattcccgttccgatcactaactcttgatttaatcccattgaccaactcaaaagctaccaaaatgtaatcttgaatgagacgatttgaaaggaaagcagtttgcgtctctgaaatgacagcatgccatacatgtttaaaccttgaaactaagactttagaaattagctacgagatcacattacaaaggcttattggacggtaatcactcatttgttttagttccttaatttttggaattagagtgataatagttctattcagctctgtaagattaataccatcattaagaactcccaaaacaactctagtgaccaaatccccagcgatagcccaattctattgataaaactaggctcttatctggtcccatagcttcagatgtagaaaatggcaacaagagaatcatgttcatatctgaagtaatggtagtaggaatggtattgattgtagaattaagagctgcttcatcaattgaagaggctgtgaaaatctgagcaaaataatcatcaataatggcagctaaatcagatttcgaagtcattttttcaccagtatcagtacataagaactttattttgttgtttgaacatcttgcaaggctttggcatggaaaaactttgtgtttcaatcacctaaatgacagccaatccactctcgatcgctgctggcaataaatttcctcgtgttgaagaagatcgtccaaaattacttctgaatgtttaatagcagcagcttggttggctgtgcaaggaactgagttatggagatcttctacctttgattgagcatctgaaattgttgacttcattttaccatatttccctatatggcacttttgtatagattttgcatcattgtccaagctattaagcacaccagaaattaggttaccaataggagatatatcccaatattgtgaaattatttccttgctctctaagtcagaaagccagagcttttcaaagcaaaatctagttcgtcttctttcatgctaagctgaattcagaactggggtaatggtggtggaaataacacggtggtcggagttataatagt

SEQ ID NO: 9127 - DNA, 890 bp, Cannabis sativa
cccctaattctgtgggattaggtgtcagagacgtgccacgtcggacagagatcctaaaaagtcagtttttagtgaggtgggctttcgtgacacactttgaactacccttatgtgatacccatagggtatccatttgtgtcttatcagacacatggtaattcagtcgagtctgctctcctcattcgtcgatccgagtttactctcagtcaagtcttaactgaatttgaacttttcgttattgggtcggatcaccgttcatttcagccgtgagaataggcccggaaattgtcctacagacgttgaatgcacatgtgtctcttgttcaaaaacatggataacaaccttcattacaccgtatttacaaacaggtagaggtctatagtgttgaatcatatcccaatgttttctttcgagtaaagtatgttgcgacatctaatgcaccctgattcaatatttgcatagatatgttagattgaaatattcttggaacatttatttgatgaaacctttcttgaaggtcatcctaaatatgtgatgcgatcttgatgtacatgacactatcaactgtgtcccttattacgacatgaagcaaccatgaaaccaccaagctattgcatcgattccaaacatcttcgtggtctgcatcaggttgcttcaatttcccgtttacaaattgcatcttgctttgagaaagcaaaaccaccatcattgctctcctcgaagaattgaagttgtcgccccctataagggttttgggaacaagatttgcactaggatgatcgccattagaaaagtaataaggatctcgacttggagcatgagattgagaactcaattcgaaaatagagaaaagattagaatcttctagcgtgtttcttggtgcaatctag

SEQ ID NO: 9128 - DNA, 1308 bp, Cannabis sativa
ctataatactttctatctatcttaatatttctagatagctaaatagtatatgagtatcaaatcatgcacattgtaattatttagaactacctacaaattttaaaaacttatgaataatttacaatatcaaaaatatggttggaatattttattacacgtgtgattatttttttcttatatgtgtaataagcaattcgacattataaactattcatttttcttatagaatacttaaacaaccaacttactgccttgacagttgacagttatttcggttagtctttgtcctaactaacctactactataaatagaaagctttgcaactaacaaggggagagagaggtcaagtttgtaagggtgctgcacaaagaaaataagagctctattgagatgaattctcttcgagattggaggtcttacaaggctgttcatgatcaagttttgattgccttttagtgagctcatgttgtaactggtgtgaatcaccattagtctgctttgtgtagttgattctccattgttgtaagttgtaatctttaccattcattaataaaatcatcacagccaacagagctgcttctacttggggattaggtcccaattttatccaaaatttgtgactgaacttcgttaattcttgctatccaattgttcttctggtttattgtttatggtttcatgttctaagcctattgttgttcttgcattgtgttcttgtttgtgcttgagtgcacaacaagtacaatatacacgaattttaaaataaaaaaatagacaatgccgaaacaaattgagaatgtagcatatggtcatctgggaggtgtgctgtaaattttttgagttttatttatatttcctctacatattccttaagtttacccctgaaagtaggcttcttaatatggttaaaggactattgtggtataataaaatgtgacattaataagtagtcaaatctatcaacactacaagatcctcccaaatgttgggatttcgctctatgtgctaggcagagtcaagcatgggactatttatgttcgagatgatgcggttcttccgtggacaatatgaatctgggtctaccctattagataaattcccgctatacatggcccttgtaagtgttcgggcttgaaatgactttaaatggattttaatcgcttatgaaactctctcgagaagatgtgtctttagtgagaaaatacagacaacaaaatcaattttaaatctattcttttgttttctaatcttttaaagcattagaatattattttaaataaaacgaaaataatttttatatatatata

SEQ ID NO: 9129 - DNA, 543 bp, Cannabis sativa
tggagagtggagagagtgtataacagatgatgctgaaatggtctcagccagcattaccaacatccaacactactgtactctttctttaattaattaaatttatggatgagaatcgacttcaattgcaaatgaagtttcatattatatatgcatagctaaacactacgatcgacgactactagtccttttttaaacgtctaatctttgagatcatgtatatatataaacattttacgaaaaattcacttaaaacggtatatatatataagactaattgtcaccttatattaatatactaatttttcaaatcgatgtgtcaattagtgataatttgtaaaatttattacattaatttatataagatttaattattaattacacttatagcgatattcacactttatgcatttcagttgggtatatatttaccataagcataaatatacattaattaatttgtttgacatgtttgacacacaaaattgattggaatgttgaaccaaaattaacgaaagttctttttattaaaatatatcatagaat

SEQ ID NO: 9130 - DNA, 922 bp, Cannabis sativa
gagaacgattgtcgatgctcttctgcttctggtgttggttcgtgcacaggcaagagagagataatatagtgagtggtggggtggggtttttgggagcagggacctccgtcgtggtcctagttcaaaaagacgatgatcggtgatcggaggaacaacgaacgactgtgagagagggtgatggtttgtgagtaggctgtagagagacaaagggtgctggtttgtgcttcttaggaaattagggttttctaaaaaagaaaaggaataaagaagaattttttttttaaaaaaaaaaaattaaaatgatttattttaaattttaaattaatttattttttaaaattttatttaaaaaatatataacaataatattatgccacgtgtacattgtgtccacgtgggtagtccaacatggcagttgacaactaaaatagatggaaatgttaaactgctaacagaatacgagtttagggagttttaccaccaaaattttagaattggggattagttgcaataaactaagtacttatggttatgtcgcaaattactctaaagaaaaatactgtaacaacatcttcaatgaaattattattaagccgccaactatgaagccatcaaaagagtatggagaatgctgagtttccaatctgaatgaaccaatgacaagtcatccctatcaatgactatcagccaaaaatctgtcaaaaaagtttgggcaataacaaccttattattcatacgataataagaaatagcacgactatgtaaaggacgatcctaataaaagatcaaaacacaatacataggaccataacaatcttgatatattccccatatctgactacagagttaacaagtcttgtggaccaagcaaaagcgccaagaaccaacaatccaccacaacacaagactaaaatcctatact

SEQ ID NO: 9131 - DNA, 891 bp, Cannabis sativa
gggttataaagattattagatacgtacactaccagtctaataatttttggaggatcaatacaatatacatataaattatttatttttatttttaattattttacatgcaatttaaccagcaagctcttgactctatatattaattattattttttttccttgtctttctttgattttagttataaactttgattaatcatgcagaaatgcatcaaatgttgtttaagttaaatggaaacttcaatacaaaagaattttttttatatataaaactatattaaaaatattgtcctaaaactggatttcaaaatatatctctctatatatatacattatatatggtaagtctacagtatatcggccaccactctctaacgggatatttcagtagatttttttatttatttcggcatcttaaaaaaaatttagtccatttttttcatgattttatatgtttttaggaccacttgtacattttataaatatttccaataattttatcaaaaataaggtttaaataatttaccacacgtataagaaaaaaaacaaaactaattgacaataaaaaaaatagtcaatacatcttatatatggtaatttatttgtacacattaacaaatgtgagactaactttaataaataaaaaaattatgaagtgtttttattgttgtaaaattatatcaaatgtaggtaaattttgaaaaatcttattttatcgtttgaatcagaaaagaaaaagggtcgtaaatttgctaacaaacaaagatttttccagctcccttcccccaaaaattatacattattagcatattatacattaatatttaagtatctataatttaataaaaaatattaatctacttttactatatgatagcagtcttctctata

SEQ ID NO: 9132 - DNA, 1008 bp, Cannabis sativa
actaagcgggctttacagtaatgtaggacagacatcagctagtctttgtaaaagaatccaagaatcagccttgttcttagcatccagagcaccataaaaagtagtaaagtggaaactagcttcatcctcagcctttacatgacaatcaaaaaaagtacgtccaaaattaagtagagtaacatcgatactttgttgccaaagaagcatcaaaccaccactaagactagatcgtggtgattccaaaccattattaaaatttaatgtctgtcaaaaacgtgaaatagagttcggtggaagttttgtttccataagaaacaaaatatgcgacgattgttgtttgacaagcaattgaagatgcctgaatgcacttgggtttcctaatcctcgcgcattccaactcaatattttcataatgaatcgcgggattgcaaagtaatctccgtggtattgtcaataaagccatccgaatccatatcatcataggaaacattttggcgtgaacattctcccaatgacagaggcgaggggtcaacaattgtgctttcattacggcatcttttaagggattatctcatggtaagtgtatcactatgtctctttggtacagaagcaggtgggatgttctctttgttagatgcaacagcaacaatccaaggctgaaagacactggcagtagcagtaacagatggtgtggatgaataaatgggcttagataaaggaggcgtaaggtggttagatggggtggaaaacatgttagttggtgccaatgttggtgggtaagtagccacgggaaaagatggccttgctgcagaaccaatatctggtgtaaaaatgccatgcaagtttgtgacagtaaggaaattgttgtcatgtgattcagaggttgtttgactagccatgttagagagattggctgtagtgggtggtaaagatgaattataggtggttgttagtggtgtttgttgggtagtatgatgagaaatggtagcagtagggaggctggcaggg

SEQ ID NO: 9133 - DNA, 563 bp, Cannabis sativa
cacacatctaacccctctcctcgttgtcacagaacatgaatttgattatgatccacaggcctatgctacttcattcttgcctgactttggagatgattcaggctggttcgtggacactggtgccaccaactacatcagttgttatactgaaaatttggacactacagtcacctacactggatcaaaaggtgtagcaataggaaacggtaagaaattgtcaatttctcatattggatctagcaatttatcctctattaattcaatacctcttagattgaattttgtgcttcatgttcctaaaatgacaaaaatagttagtgtgttccaattaactcgtgataatgatgtgtttcttgaatttcataaaatatgttgctttgttaaggacaaacaaactgagaaggtactgctcaagggaatgcgtaaagaagggttgtatatgcttgctgatcatgtccaagaactagatgtaaccaaatcaacacagtctatggtttatgcttgtaatcccattgctttgataccatgtagtaaaacaaagtacaaagaaactaaagaacaca

SEQ ID NO: 9134 - DNA, 505 bp, Cannabis sativa
aaggtggattgcagaatcctccatccttacacaagaaattatccacaaaattcgacacaaaactggcagggggttttgatggcgatcaaattaaatatgcacaaggcatatgacaagatggaatggtctttcataaagagagttcttgaggcaaatggttttgatgagaaatgtcgtagattaatcatgagttgcatatgtggagtctcctactctgtcctcctcaatggaaatccgcttaaaaaattctatcctcatcgtggtctatgtcaaggcgatccgttgtccccatttattttcctattatgtcaagaagttctttcaaagattcttattaaggaggaaaacagaggaaaaattcatgggatcaagatctctaggaatgccccccccgataactcatttgatgttcgctgacgacaccattctcttttgtcgagcaaatgaaggacaggctaaggaaatgttaaactgtctggcaaggtacgaatcttggtctggccaa

SEQ ID NO: 9135 - DNA, 841 bp, Cannabis sativa
gtttataaggtctaaagtaataatccccataattcattggtgtaagtgggctgttatgtgtaagccaaaggagaagggtggattggggtttagggatttgagactttttaatcaagctctactagctaaacaaatttggaggtgcattcggtttccgaatgctctttgctctagagttcttaaggcgtgctattttccatataaggatgtgttggctgctaaaagtggagcacatgcttcctttgtgtggaggagtttgatttgggggaaagagattattctaaagggttgtcggtggaggattggagatgggagctcagtgagagttttggaggacccgtggcttcctcgccctcatacttttatggtttatgacaagccatttttaccggaacagttacgagtcattgatatgcggctatctgatggttcttgggatgttgatttcattcgtgctgtgttcaatcaggatgatgctgaactgatattgagtattccaagtggagattggggcttaagtgataaagtactgtggcactatagcaagaatggtgagtattcggtacgaagtgggtataggacagctttagctctgagggaggaatctactcaacccaattcatcaaaagtggaagaatggtggaccctgttgtggaggcggaaaattccgccaaaaattaagcatttcgtatggaaagtatgtcataattggctccctacgaactatgctttgtccaaacgggggctggatgtggaccccacttgttctcagtgttcaaaagggaagaaggaggatacacttcatctcttatggggttgtcgctatagtgttatggtgtgg

SEQ ID NO: 9136 - DNA, 645 bp, Cannabis sativa
cacgtaacatctatctagtaaatacataagtatatatatatcttctttactaatatcacaacataaaaaaatttatatattttttaataaaataaataagggttatttataaaaatatgagtaaaaaatattagtttacatatttgcagtgtaccacaatatatggtaattttagagagaagatgagaagaaaaataagaactttaacaaaatacccttaaaaaatttgggatttctaagaaaattattgttgaaaaaattgttggagcagccatgactatcggaaagtcactggaattggcatcggcaccaagaaaagtcatcaaacttttcatcattgctgaaaaatttgtcggagttgttatcatcactaaaaaagttgttgggttcataactggtgggcccgtctgactttcatattggacttctcaaacatatcatagttgacttcatcttcctcccacttgatttaagcccatgtcttaacgaggacgtcttccataatcttacaaaaatacttgatgagttctttgtataagtttgagtcgtaacgaagtcctttgcgaaaggttgaagttgttgtgtgctgattgcaattagtaatggacattttctctttacttgaaaatgacatgtttgacctca

SEQ ID NO: 9137 - DNA, 1818 bp, Cannabis sativa
  modified_base (382)..(382): a, c, t, g, unknown or other
tgagttttgtgactaatacctttagcacagaccgtttagtcgcaacataagaatgatgatttataattagtcacaacttttttacttcagtcaaaagtatgagtgttcatcaaatcgtccacactgcataaaccgcccgcaccacacctcaccacacaaaaaatatgatttaaaatcctttcactacaaaaaataggtacctttagtgatattttcttagtcataatagaaattttttgcgactaaatgtaacttttagtcacaacaaaatgttgcttgtaactaaaacatagaatttagatacaagttgtcactaattttattttagtcacaaagtattgtgactaaaaacacatttagtcacaataaattgtaatttttntgactaatacttttagccacgaacattttagtcacaacataagaatgatgattcataattagtcacaactattttacttttagtcacaagttttattgtaactaaaaataagattttattttatagtgttttgcagtgcggttgcagtttgtgttttcgttgaaccgtgttgtgtggtgcggtttatagttttgaatttaataattgttattgaattaaactgcaccatacacattatatattacaaaaatattattatttttatattatgatttatttttttattaaagaacatatacttacaaagctcaagccatgcattaaattttaaaaatattcatataaatcattctcattttttatttttttctaacttcttatattgttaacatattattatatataatataatatatattatattatataattttgtagagacaatttaatacaataactaattaatataatatattatgatgttaaaagtttgataagataatttttttcttgtttattaattgttaaaactttattaggctaatcttttactttttattttaatatttaataatgatgatagtataaattgcttaaattgtatcgcatcacactatatttttacagtatggttttcacaattttaaggtcatgtagtgcagttgcagtttataaattataaaaactacatatgtggttttggtttgaaaaaataccctaaatccatatcatttgcactacgaacacccctaattatcaaaagttttgttgtaattaaaagtaagactttttgtaatgtatagtgtttttatttaggtgcctcaaaatgaaagaaggtttacatttttttcctttcaattcactgttttctctctaggcaagctaactttccagtctccctctcaaagttttctaccattaaactgtatatatttatttatatatatatagatagattgttgcaatgatataatcatataccaaaatatttctttaaagtaaaagaaaaaagaaagttgagatcattatatataattatatatatatataatatatcagtactcttagattttcaatggaatttggaggtttggttgattatcttgagaacaagactattttaataactggaggagctggctttgttgccaaaagtatgtatatcactttcattaataactttttttttctttaatcaaaatattacctattttataataaattaattcagttgtatatatatatatatttaaattacgagtttattaatttgtgtgatatgaatatatatgtatatatatgaagtctttgtggagaaaattttaaggagtcaaccaaatgtgaagaagatttatgttcttttaagagcttcagattccaactcagcacgacatcgtttcaaaacacaggttcaaaattcatatatatatatatat

SEQ ID NO: 9138 - DNA, 903 bp, Cannabis sativa
gtattttcggtactgtaaaatattttagatttttttgaaaatttataagttatcctaaatagctacaacatacacgatcatgaaaaaaatttactattttttttttttgaatgctaaaatagataaaaaatttgccaaaacgattctttaaaagagcataccacacaaatttccaatacttttatcacagaacccttcataatattttttattatattaagaaaatcaagtgcaataaaaagagcatgaggagtaggagtgtacattgattatgttggttgtgttatagtgtatttttaccaactcaatataaatattgagttaaaaatatctaattgtaactcgtctaataaaaaaagtttaactcgcctaatagtttcgttggtttggtcgggctaactcatccaaattaatctttattttttatttttttattattattgttagttttttatattcaaataattgatttgaaaaaataaaggtatagtataattattcaaaattaaaagagttataatttaaattaatgttaaaaatataaataaaagacaaatataaattgaataaacgttaaatattaaacaacattcttccaaaaaaatatatattcatgtgtaaattctacattttaatttcaatatacaaatagagtcaaaattatcagtttaaattttaaattaaacgctataaaatataaaatttaaatataaaatagtttaactattaaatgtaatttatatattatactataaataattttagtgaaaatatataaataggtttatttgggtttgagcggggtagaataatgtgcaacccgctcaatatatttattgggtggtttgaatttttcgttagattatttgagatgtgttttttgtcgattaatttattcggttt

SEQ ID NO: 9139 - DNA, 1001 bp, Cannabis sativa
tgcactctattggaaatattggactagctccaagcactgaatccatccatggttgtggacacagattctcctgtggcggacatcctatgccacattaaccctaaaacattgctaagtccaggaccattttcatatgccaccaacatttcaaaagaatagaaatatttcgccttctgatccatcttctagatgaattcattgaaaatttgggcagtgggaggggtcttagtcttccttttccctttagccttcacggagggttcatgctctgagatagattcatcctcctagatagtctaaagaaccatctcttgttgggatacattagtaggaacctcgacttaggttctttccgcgagcacctcttctacgaggttagtaggtgcatcttcaacggtttccacgtcactcaggtgaaaatcttggttcagatccattgctaacaactcaaaaatgaagggaaacaaagctactttaagcgacaaactaagaacctaaaacaaaaattcatcaaagttgcattccaattgacaaaccccaaaaatctatatacatgcataaacctatgaaatctaaatagccaaaaaaaaaaataatccacacggttctaacccccttttcatgacaaagcgtctctcaaacaggtccatcccaaagttgaaaaaaaattcacgtagcctacttatctattcaacatgcaaatagtcccaaccctagatcaaactagaaatctctatcttaaacaagaaataataaaaagtgcaaccagggattaaagtacttacttgctgggtgaagacgagacggggtgctattgtaaaaatttgcctgaagccttcgagcccacttggttagacagttgcaactggtctggaagtcaaaaccttagtctggcaaggggtatattaggtcaatttgaagcgattcaatatctggaaatagactcgcatgaagattagcaaaatttgggttaaacactcataatcttcttgcatccactg

SEQ ID NO: 9140 - DNA, 642 bp, Cannabis sativa
ctaggttggggtctgagtctgagtccggggttgggtttggggttcgaatcgaggtctagggttcggggtttggatcaagggtttgagttcggggcccaaagttcagagttcgggtcgggatccagttggagtcagggtctaaggtctggggctcggtccaggtctgtgtatgtgagaaaaatataaaaagaacatgttagacataaatatattttttttttgaaaatagaaaacaacatttcaatattttatgatttttaattttttaaaactcggatttcacaaaactgtttttaaaataatttgcgtaaacgccccctattagttttgaaaagttgttttttgtttttaaaaaatgaaaaccgtttttaaattatgaagccgaaattgccgaaaataaagttcaaacagtctgttgttcgcgtgactcttttattttataagtgtgtgaaaaagactgtttgaatccctattttcgacgtgttaaatatttctaaatttatcaaaattttaaagaatatcttaaatgacttcaacatagacaactatgaaaaaaaaaggagtaaaagattttcacatatgatatgcggatatagatagaagcttattggtgcaattttttagagggatgtattttagaat

SEQ ID NO: 9141 - DNA, 607 bp, Cannabis sativa
aagaaaaaaccaaaccttgagtacggagctgagtaaggaggaaactgaaggtccttgaaagcttctgagaggaagacgatgagcaaaaccagacaagaatatcatttttcttggaacaaattagggtttgaaatcaacacaaatcattttagccataaattatgttatgaatttctcatagagtttaccatttttttagggtttttgagttttgaagaattgggggtaaaaaggcgccaatttaaccagacctaatcagtttcatgtttgtccgtacaatgtgatttgcaataatgtacctttaatctttattatttcgtttaaggacctctactttttcatgttttccagttttgacctttttattaacttatttttttaatttatttatattgtaatatgtaagtcggtttggtcgatggctaattaggaattttgtttcctgaattttgatatttgtactaaattatgctcctgaacatttcagatcgtgaaaaatttcctttgaactattgagattattgaattcaagaatttttgtccaattccattcagttttactaatgtagtgattgttcatatactgaattgtgctccacaaacttta

SEQ ID NO: 9142 - DNA, 944 bp, Cannabis sativa
atggaagattttgaggcttttagccttggggattttttccctagaaaatatttgagttggattgatgttgttacggggtttacaggtcaatttactcggaggtttagagcattagacactttttgaataagcggatagagattgcgaagggtcacctgcaattgctgtgtcgcaccaagaagacaaagacaatgtcgagcttttcttgttccttggggctcgacagagcttgatttgcaatggggctatggttttttgtttgagatttctgggaaagagcagggaggcggaagggaaaggttgaagagatggaaattagggttaggattaataaaattagggtttattcttgagaaataaaataaaaaaaaaaagaaattagggtttatttaggttttttttttttaatttttttttttaaattattttttaatttttaaagaaaaataaatttttttattttttttaaatatttatttacatggaccaatgaaattgtgccacgtgtatactgtgtacacgtagacattccaccatgcagttaatagccaaaaatagatggaagagactaagtgctaacagaacttgggtttaggaggttttatcaccaaaattttagaattgggggttagttgcaaagacctggccacttataaggaggttatgctgcaaattacccataattaatttataattttatttgacttattattcaatctagaaattacttattttttaaaatttataatatcactttattattataattaaattaatatcatatataattaatttatatttttatttcacttattataaaatttaaatttaacttttttcttactacattatttctaccgaaatttcaacattataacattattatcacgtgagaaaaattctccccattttttaagacttttgttggcacataattgcactga

SEQ ID NO: 9143 - DNA, 671 bp, Cannabis sativa
ggtaaaatatttccaacactctccacaccagatcttcttcatttggtttagtaccctcaacaactaatattccatccacctctcagaacaccaatctccatcctatggtcactaggtccaaactaggcatttataaaccaaaaacatttctttcatatgccaataatgtacaagaaccaacttctctcaaaaaagctcatgccaatccaaaatagaatgctccaataaacactgagatgactacattaaagaaaaagaaaacatggactcttgttcctagaacctcatagatgatcattatgcaaatcaaatgggtatataggataaaactcaatgagatggaactgttgaaaggtttaaagcaaggttggttgctaaaggtttccaacaaacagcaggcattgatttctttgaaaattatagctctgtcatcaaaccatgcacaataagaatcatgttcacattagttgtctccattggctaagaaattcaacacattgacattaacaatgcatttctaaatggacagcttgaagaagatgtttatatggcccgaccacaaggctttgtggatcctacctatcccaaccatgtgtgtaaactccacaaaggcggatttttctggagtctgtccctctagccagtacattttctcctaattttctcggatt

SEQ ID NO: 9144 - DNA, 905 bp, Cannabis sativa
cgtaaagatgatcacactgttagggaatactaaaatataattaaaacacctccaaaggtaataatttttaactttgtacgatttagttttaacttctaatcacatctcagtatgaattttgattggaccaagctgcaaagttaaaaacatttgaaacgtagtgaatatgttgaggagaactgatgatgcattgctccaaaaaaaccaacattggtctctacaaaacaattattcgagcattaataaaaacattaggacaaggaataaaaacattacaatcttttattttattttattatattatatttttctctcttctttttacatgtgcatgtatagcccttttagaaaacaagctagttcataaattcaaccattgattttttcctaaggtgaactattggttattggattgtcattcttggaactttgattgtcaagatagttctgataagcatatgaaacaaagccccaaacagccataaccatagacataaccttgatcgcattcatcttttcatggaagaaaaacacagccataattgggacaataggcaaacccaaaacacctatgacattggagaagagggaagagacttctagtattaaacccaataatccaatagagaaaacttgccatgttatagctgtccatgataatgtcatgacatatgaaactttcccaagttcaaactcattcatttctattctcaaagttgaccactcactacttgcaaaaagtcccacaagaattacaactgttgccacaagtgattgaaacaataagacatccactaccactgaaaagctctccttcttaataactttgttcatgaaaaactgagttaaggagagaaccaatccataccctgcagagccacccacagtgcaaacaaaaccaattg

SEQ ID NO: 9145 - DNA, 1342 bp, Cannabis sativa
cctgccatttcccactttccaaattaggcctttcttgattccttccccaaagtaggctttttcaggtattcgaaggacagtggcctttaggggtagtgaggaatcattgtttttaaaatatctggcttttaaggagagagtgaagaagggttgaagggttagatcaaattctccaagcttgcttggcaattagagcttgattgtgattttgaagagctctgaaactaagaccaccatgaaattttaatgtgcatagggaagaccaattcttccaatgaattttgttcttgttagtgcatgaaccccaccagaatctcgaaatggtttttgaagagtaagacaggtggtactagggagtttgaaataggacgtggcataagaaggtatagcctgaaccacatccttgataagagtttctttcctagctctagaaaagaattttctgttccaaatattcaattttgaagccactttttaaacaagataatggaaatgagagttggtaattttgtcagtacaacgaggaacaccaagatatttgcttacaaaacccgatatttgcttacaaaaccctcactacctaaaccaagggagtttctgaaaaaatcttttgagtcattggtggtgttaggggagaacatgattgaggatttggcaagattaacagtttggccagtagctttatgaaaggaattgagcatatccttgatggtaatgctggagctttgagtgacaggggtgaaaaggatgctgtcatcagcaaggagaaggtgggaaaggatgggggcatctctatagattctaaggctagaaaaatgattaccctgatccttagcccaaatggaggtagagagaccctcgacaacaaataagaagatgtaagatgagagagggtcaccttgtctgatgcctctagtaggggtaatgttgttagaaagggtaccattaatagatgtacgatacacaatagtggacaggcatttcatgaccagggagataaaagataatcgaaaaccaacatggttaaggatagctttaacaaagctccattccactttattaaaagccttttccatgtcaagcttaataacagcccaaccctgcttgccttttatcctataatgaatcgcattgatgagctcattggctataaaaatgttgtcaaagataagtctttcagagagaaaaacacactagttctgagagattatggaatggagaatagttttcattctattagccaaggttttggaaattatcttataaagagtggagtaaaggctactaggcctataatcacgaatggtggaggcatttttttttcttagggaataaggctagg

SEQ ID NO: 9146 - DNA, 778 bp, Cannabis sativa
tcccattactgtgtttggtgagagtgatggaaattaggaaggagggagagtttaagagagtggatgatggaaggaaaggataacaagtctacgttcttgtttggtattggaagtaagaattagaatgatagaaagataattatttattaaaattactatattatattcttcaaatatatattatttaagttgattaagatttttgtctctaaatcaacatgtactaaattatgcttctgaatttttttgaccgttaaaaattctctctaaattattgaaattgtttaatttaagtactacattcaattttactaattctgtaattgtttatgtgctaaatcatgctctccaaattttgatatgtatcaaatcatgctcctcgaactttaacatgtaccaaatcatatcctataaactttcatacatattagactttccttaactttaaaagttcaaggcgcatgatttgttacatgtcaaaattccgaaaaaaaaaattctaattagcccattatttatttgttatgaaaggtatttagcacgtttaatatactttattttgtcattttctcctttccttccacttttggaaggattagattttatacatttggagggaaaatatatccttctatctttcctctctaccaaacacatgatttattctctcctcccacctaaaaatccttcctaccaaacataatataagggtacattatgaatgtaagtaaatgtttgaaaagaatagtcttaaagaaaggaataccaggaaagaagt

SEQ ID NO: 9147 - DNA, 895 bp, Cannabis sativa
tagattcacatttaaattcatactgatattatttcagactagatgtattttttcttccttataaatagtgaggttaattgactatgaaagggacttttttgggatgcactttgaaaagaaaaatattttgcaaatatttgtaaccttttaatgagatattaagaaactcacacggtcggactttgtgattttaatattcttttacaagcaatataacaaaaagaaaagtaggttgttaccgttgaaagggatcgaacctctattattttcgcgtgtcgtttctagatattcataatctttattattattcaattactcatatattatcattttattgatttcacttcgttgactagaaataagattaacggtatattttaagtaattgtatgcataaaattaatttgatgattttaattgtaaaataattttaattaaaaatatttaatttattttaattttatgctttcagatttggagtagaaatgataaattttaagtgaataaaaattagactctatacatttttatattgtcttattttatttttatctttttttttaagtctatcatttttatttcttttttaaatattgtaccaattttgcccctatcacttcaaaatactctacatgtaactctctcatgttagggcattttgagtatagtacatataaaaacaggtatgtttcaattaaatataaattagaggtaaatttggttaattgataaataaaagaagtatttttcaatatgaataatgagtaagaagctcagttggtggaagcccaataaataaaaatgacttgttgtcttatcaagcccaacttcatctacccattcatactttttttccagtcaactcaatcattagtagcccaatataagttaagga

SEQ ID NO: 9148 - DNA, 607 bp, Cannabis sativa
atctagggctcaaaccttgcgccgtcgatgtggttgttgtcgttgtcgccgttaatcgacgtagcagtccgtccttgcttcctcccctcaagtgacggttccacctcctccctcccactaccgttagctgccatcaaacggaatcccacatttaattcatttgtcttctccctcacaggtaaacttctcatccaccattactattgtgttgatgtcccatctgagtttaattctttcccatcccaatttctcaattgttctctgcttgcatacaaaggaaaaccctttgctgaaatggtattaattgaaccccaaccttccgcacccccctggatgatcattagatctatttttgtagaggtcactaccccttttctaagagccactatcatatgtgcaggaataatcatttgttcccctgatatggagaagttactccttgccaaaatgctcttgccagggtcccttcaagattgctcaagccagcatatatcagtccattacttgatttcctttgcaacctgcctttttctgcaatatttccttttatatctctgtctcaatactggtttttccccttttgttggctttcttaatctctgccctg

SEQ ID NO: 9149 - DNA, 722 bp, Cannabis sativa
aaaaaaaaaaatacatacacgttcataattatgttgctgtagttttgtagtggaaataaaaactgaagtacgtgaatattaattaactaattttttaagggagtattaataatcataaaatgattaatttcaatattttcaaatgatggtatacttttccgttataatccgtggacatgtgtacttgtaataatatgcattaaaaaaaagaattcttattatgaatgataaaagtattttagaacttaggttgtatttagtaatgaaatagagaaaaattaatttttatttttattcttctgtttgattgtattttaaagtattgaaatgatttgtttttactatttaagtaaaataatcatttcaatacaagataaaaaaaatttaataatttttttattataaattataaattttattctttttaattttattattttgtctatttatattcatattctcattctcatgtttttatatattagtattaacatgaccaacattataatataaataagaaatcataagcataacctagtatcaaacctcatcccacaaagaaagtctctagttcaaataataaaaactaagtactagacatcaataatgatgtttcatacatatatattaatagaattatgatttaaattataatatatttttttaaatgtcgaattataatataataaaaaagaggcatgttataagagctatcgtttaaa

SEQ ID NO: 9150 - DNA, 608 bp, Cannabis sativa
gtagtttacaacattgaaaataaagtttaaatattctgttgcatgtacgactatttttttatgcatgtagtaagtaattgtttgaaccttcattttaatactgtaaactatttatgtttttttaaaaatttataaatggttttagatagttacaacttatgcgatcatgaaaacaaaagtagattaatattttaatttttatgcctaaacagattgtaaagatactaaaaatttctaatattatattcaacattctaattagatatacacaatcaatttgagaccatctaattgaatttgagtaaaaaagatacccttagttattttaattttatttatcggtttttttttttactattttaggattcaataattatattgttagtatcaaaattgtactagatgtttaatgctttatatgattttggaaagttttacactcctcaaatttgtaaaaattgtgtgtaattactaagaattttttatgttaaaaataaactattaaaaaaatattattttctcatttaattattaattattttattaaataaaatattacaatgcttcatatccaaacacatcatatattataaaatatagtgtaatta

SEQ ID NO: 9151 - DNA, 587 bp, Cannabis sativa
gtgttaacagagctaatatcatcagcccatgaagtcacttcacttgctcaaacctttgacactgaaataaaaaggcgagtcttttttgaattttcaatcttggttgatagatttgttccaattctcaattatttaaaacaccatgttaagatcatggcacatccaccagttcaaaaagcagttgaatcacttggtaaagagtttgttactctttctaaagctataataactaacccgaattcgaaaactatggttaaacaagttgaagacatggttcatggcttaggtagatcattaggccttgttgtctttgctagtcttgaagtttgtactgatttcaaggaacaaattgggacactgcataaggatttggtgagtattaagtttgatatgagctcggttgcgagttcaacaccgagttctagccactattcggagattcttagcgaaattgaagaagaagaagaagatgaaattcaagaggaggagaagattagtgttggtattgatgatgttgtggtgacacttaagtatggtgatggtgaaaagcttagattggctcttatgttgttaagtgatttgattat

SEQ ID NO: 9152 - DNA, 693 bp, Cannabis sativa
gcttggctaataaaaacttggttagaaaggtggagattgcaaaggctcatataccaacataattctttgggtttacaaagttggttccaagtacaccaatatagtttattttttacatctttaccatcccaccaaaacctatcacacatactatgaatgtcgttaaaaaagttcatcggaagcttgaaaaaattcatagtataagttgggatggattggataacaatttcaatcaaaactttcctaccatccatagagaataatttagatttccaattgttaagtcgtttccaaattatatcacgagctgaattaaaaatgtcacttcttttataacccacaaaattaagaattcaaataattttcatgacaattgacctcagccactctaagagtagccatcatatcaccacattctcccatatacatatatattaggactgaaacaaactgctgatttatcaaaatttaccaattgaccaaaagttttaccatactaagtgagcaactttttaaatcggtaacaatgagcaagagaagcacgaaggaagaaaagtttcgttagcaaataggaaatgagagatgttgggacctaatattccacaaggcatatcgctgagaatattattagagcaatcttttttgaccaaagcagagagcccctcaatacaaagaagaaaaagataggaagag

SEQ ID NO: 9153 - DNA, 1269 bp, Cannabis sativa
ttcaattttactaaaaataatttgacgttgatgaaaatttaagagacataatttagtgcatgttaaagtttaagggtcatgattttagagatattaaagttcggtgatacaacttagtatatggacaatcaccatattagtacaatagaatgaaattagacgaaaatttttaaattcaataatcttaatagttcagagagaatttttaataactttaaaaatttgaaaggcataatttggtgtcaaaatttaatgacaaaaatcttaattaacctaaataaaaataatttattttgatagaaaaataaaaaataatattcttgaaaattcttaacatggtttaatttgattaaaagtagggctttgggcaaatttctttaagttttcctttgatttactctaagttctcgatctgccactcggaagccttgttctacaaggataacacccctgagtggcaagtttgaaggagacctctccaagcaattttaggggaggcttttcccggtacccttgttgtcttcatggtttagggtatttaactgcttgagttttttcttttcttctagtgactactcctaacgatgaatttcatcttgaagctacgaatctcgaggaagtcaagatacaaactctaaccgaggagctagagaaggacatggtctcggaagtggtcccaaagaaaagtgttccaattgtatacaactcatccattggggaaatggtccagattcataataagtcgcggttacgacatgcttcaacgactctcagacgcgggctgagtccagaacatccctagtctgtgctggaatagactttctctcccgaatgaatccccgtctaagtgcattgggtttggcacttggagttgggcccacatctcttgcggagctcacttgcccttacgaacataattttccaaaaccagtgcagcgattgattttttataaaaataatacgaaaacaacaagaaaactatataaaagtaacagaaaaataacatcaaaaaagtatcatttagataacaaaaaattaacaaaaatacaacataaaaaaatcatattttatgaaaataaaatcataaaaatcgtaaaaatatttaaaattttgtacaactttatttttgtatttttgtattttttttatgtattcgtaaaataattcataagttgatatcagtacaaatgtatggtccaataagtaggtagcatactagaatgtttgtgtttgatttttctttattctattctacataggatgatagga

SEQ ID NO: 9154 - DNA, 530 bp, Cannabis sativa
gctcctcacggcactttcaaactcaatgtcgaagcttattgttcgggactcgcagggtcatgtggtggctgccatttcgaaatcagttatttcttcatgtttgaattcctattcattttattgaaactaatgtgaacttaattcaagatcagcataacagattcaatgatttgattcctaatattatctttatgtcatgtttctcggtattataatgctgcggctcatgctcttgctagatttgaacactgatttggtttggagggctggtcctatacatgctattaatctacaatatagctgtttttcttaaaaaaaaaaatattatctaaaaatagtaatatattgtaaatttgtaattacatttttcaattcttaagaccctttaattacctccaataattaatgtgcaattaccttgttaaaaatggcctgagtaaatcaaaccattatagttttatttttgttgtattattattagaagtctagggaaagaatttaaataacaatcaacatgagaattgcagcat

SEQ ID NO: 9155 - DNA, 571 bp, Cannabis sativa
ggaagctccaaacaatgcaactccaagttggaacaccgcaagttacaatctgaggagacccttctcttgagaaaagccttgtttcgttaaaaaatgtctaaaatcatgaatgccgagaaaaatgggctcatgcttgagtttcattacatagaccaagatgggagatcgctgctagctcaattcctaacttcattcagcctacattatcaaagcatgaggttgtttcttctagcctaattgcttgactccaagtcaatccctaaagtccacacccatcaaagcattatatggtcgagctccaccacctatattgccttaccgaaagggggatagtagttgtttcgcttattgaggagttgctacaggctgaacccgaacaagtcctcctgtaccactttaaagcagttggtgctctagcagcttccgatgtttcaattaaatgggacttccctacctaactttgaggctacatacttactcagctattgatgcacgatttccagcctttaaccttgaggacaaggtgaaggttttaggaggcgatgttgataagctccttgtttgatgtgtc

SEQ ID NO: 9156 - DNA, 2892 bp, Cannabis sativa
ggggcctcccttgcggtcgttgtgtaggctgcttgtctagcactggaagtgcatcgttttgatagagttttttgatttttttaactcaacattggggatgtattttgtggggccatatgcatctaactcttttttttaggaacttcttcctcgggtcacttctctcagagttcctcttagtaggaccccttccttggttagtttgagtttgtgccccttgggctcttttactggtcgacgtgttgtctgttcttccatgaatggctcgtcatgttgtgtattttccaagatgtaatgaaataatggggagatgtgtttttgagtttttttacaagggctctcaatgaaagcaccaaagtgttaactcaaattttcgttaacaataaatgaagccttataaataaagaattaatacttataattactatgtatatagaatactcaagaatttttgcgtgattttgtagttaaaatctacatactccacgagtcatttttattttcgagtatttattgaaaatatacttagaatatagaggaataactatgaaacgtcactcaatctcataggttctcactttcccaaaatgatcaatccctttcctcttaggttttgtccctatttataggggttctaagaataacatttattctcctttgatcttatctaattaaccgtcaataaaatgtagacaatctccatgtttcaatttataacatgtggataaaatgaaataactactagtaactatgtttttgtccttatccgaaagtagttagcctttactgagatgacacattccagctatggctcgcattattcgacggtgttcagggatagctggttgtattttgcaagatgctagttaaaatgtttgtcctcgccataacctttctagattaacttttagacttagtcttttgaaattatttgtattatatatgcttattttccttaatcattcaacatacccataagtacgtgggtcaatgagttgcaagctcttaaagaaattgctatctacccttttcacttaactcattctttcatgctattcacatgccttgttcatctcggtcaagtttcgaaatcctgttatctctgtaagttattgcattgatagtgccacgcgaggttatcacatctttttaaccgtagcttatcccgaggcgggatatttattcattcgtcgcattttattattttcttcattcttttagacttatatgacacgtgtcatgttcatattcagtgcttgaaatatgggcataacaaaattatacacagtacttttaccacatgtctatccatatatgtgattcgaattaaaattatacacactagagtattgtgcataataaaccgtacttggtaattctatattaaatattccatactttaatatactaccgacttattttattcatattatatgattttaattcccttgtactaccttacaagatcatatcatctctatttgaatataatacttctataattaacatattcatttatcttataattatattttatatattatccattaaatacttgattttagaacataaaccctaaaaaatggcacctgctcggcatgaggtccaggccctcccaagtctattttccaattcgccatcacgctggagggagatcaccacttcattaaacaaacaagtagcacagaggttgttcaacctctttactctcagcctggacgaaggagattaccatttgggttggggcctgttagatttcctagggacgtacatagctttggagagttcctcctcagcatagtccaccctagccttaagttttcatctagaaggcgatagggattccaagtcagtattatagtccccataaatataagggggacagacctcctccatttcctcttcaacttcctcctcggaactttcctgtaactctggttcattttgtgcttgggtctccttcaattaccaaatatgaggatctgaagccaacattgctcaggtggttttcttcgtctgagtgagctttagcttggtaggaggggtaggtttagatgtgtgttgagcaacataaacaaataacttttttggaatggattgtcttctgggtggagtgggatgcccagcgggaagggtatcctggacgttaggccggacaatatatgtccacgcaaccagtaagaactacctttaacctttgttcaactcccaaatatgccaattgtagctatctcctctaacctagtcggtgtagtgatggttatgggaattggaatctaaagagtcactcaaaaatcctccctcaggggattcagaagaaaacaaaggctcattttgtagacgaggatgggctagttgcacagagcatcgagtagtccttaaagagtaatccaagcaggtcgtcgtctacttgatgatcatcttcccataattaagttgggttcatctacaaaacaagaaggatagagaggtgatgcaccaaacagtttagagaatgctttttaagaaaaacttctccaacactccgactagagagaaaattagattcaacccgaaagatttcatatttttttcgatggaatttttcgaggaaagggttttttaagtttttaaaacctaatttcataaggtacctcagattgggggtagaatgataaaaaatgaaatacatggaaagctcgagccaggccgacccttaacaaaagacataatttatattgtggccgatcaaaataaggattcaagatccataaacaaagagcatcaaacccataaatttgcagaacataaacattaaaattaaaagattcatgcaaataatggaagagaggatttactcactgttcgcttgatgtctgaagaagagatctctgagaaaaattggtccgcaca

SEQ ID NO: 9157 - DNA, 984 bp, Cannabis sativa
agggttggaggtcgagcgaaatccgaggtttgaagtagtggtcattggaaccacacatttcaaaaacaaccaaagaaaatagcctttaaaatgacctaacaggctgacacgtaaagacttgaaactgaaaatcaaaagtggaacaaaacatgaatgtctgtaacaatgcatcacgacaaggcaaattaagttgttcctgcacaaaagatgattgtcatacatagccccacagactaggaaaaaataaaaaataactctgcaaaaaaagaaactaaaattgtcttaagaaaagagatagataatgaagaacagaggtggtccctattggtctttagtgggagaatggaccgttgagtcgacttggactgagtcaccaactagcttccatggaagatctgaattaggctcaactacatcttggaaaaacccctttccagtcccccaagaggatgccttaactttcgcaaggccttgaggacttaagacttcatcgtctgactcctcgtcgctctcaatggtaaggggaaattcctgaagatatgtgtcgcgctgtatgacaagcactctcttggtagtctcttctctctcttaataaccaagaagtcggagtatggtaggatcaattttccataagttataaatgaccatggcgtaagccctctctagggaatgaaggcagtatctctctaccttggcttccgccttagattctttagtgagagtgtccagaatggtctgtaggcagtctctctcattctttgcatagcagctagggcaatgtacggtttcacaccgttcaccgatcgtcgttcagcttccttttgcaattttttgatagtcgcttgacgaaggttactggtattacaaactccttgaaagagcaagtctagattgttgtactttgtcatccaagattccttctatttcttctcttagttataatcatcatgcaaaccctggataagtaggtccttttgttggatg

SEQ ID NO: 9158 - DNA, 1185 bp, Cannabis sativa
tacataacagacacgaataagtaaatatcaaattttacactatcaatgtcaattaagtatatctataagtatatatagcttaattaaggaggtaaaaggtaattttaagtattttgttttatttaatttttttaaatatatattttttagaagatatttaattttattttaaaagcctaattgtaatattccaagcctaataacccaaatgacctacttatagtattattattttgtaaggtaacgtcatcttatttttctctcaactattacacatttaaatttaaatttttttgacgtaatttaaatttagattcatcaaagatgattctaaatcccaaaatattttaaattacaccaagcgactaaaaatttagattatttttttgatataacaaccaattttattgttgagaaacaaataatatattggttattaaataaagaggaaaacttttccaaccaattaagaaacctctcgttttccatctgtagtgcataatctcaccatgttctgcagtattaccattttgcattacatattgaagacatacaatcagaaatcagataacaaagacctagctaatagaactaaaaaacaacttcacccaaacacaaccccagaaaaaaaaaaaaaagactaaattgatgataacttcagaatcactctctataaaagaaatagaaagatccagcaatgaacaaacaactttgggcgggaggagaacgttttagttgcatgagagagagaatcttgtgcttgtgaagaagacttccacaaaaaagaaaaaatgttttaactgcaaaataaaaaatatacattaataagaaaaatatagaaattaaaaatacaaaaacagtaatcataataaataattgtataaaaaatttacaattattttcactacatattaatcaactatattaataaattgtaacaatagtagtaattaataaaataagaaaacttatcttgtcaaatacaattaatgccactaatagattttgaaacaatatacttcaaataatttaataactttgaataatttaataactttacaactttactaaccaataaattacaatttttccgataaactaaaatcataaaaaaaaaaaagataattgtaaataataaaacatttgtttctcctataggcaaattgatgtaaatacttatttttg

SEQ ID NO: 9159 - DNA, 1462 bp, Cannabis sativa
atgtttttttaaaaaaataatttagaaataaaaatttaaattttatatgttaaaaattatattttttttggataatgcatatatatatatattttgttattttataggctttctaatattctaagtttttggagtatatatttacatttagtattttcccaataattaggtggtatcaaaaaacatatataatgtatttacaataaacttccaagcaaagtaatgctatttttctttttaaatttatagctttccatgacaatagctagtgttgcttcgtattttttccaaaatacttggtcgcaactgtgtgtgacatgtggattttaaagacacatcacccacaaaattaattaagtcatatatagacgagcaagtgcactttagggagtgagcccccagagaagtacataaagcatgtctctcctctccgggagctagaaatacagtaaagcatctctgtgagagggagaacctgttcgaacgatcacttcgtatttaatgcagcatgggagaaacttcttagaacgcccataagaggacatgacagatggcgtaagcttcgtttacgtcgattacacgataatcaaatggtctagttacggctccattaagaagaatcacacaatcaaggaattataaagattactctcacccaatccctatgacacctacggcataggtcatataccctattttacatctcttaagaacttgtgcacatacattgctggcactaaaagacaagtgatctctttttagtgattcttacaaaactctataaatacccctggacaaataatagaaagggggatcgagatcgaaaaaaaaaacaagagagagagagagagaacgcaccaagaacattctttgtacaagaactctcattaataaaaaaaagactcgtggattacggctcattaatgcccgaatcacgtaaaaacgacttgcattaattatttcaaagctctcatcattatctcatttaattggttgtcgaaaacctcagtcaacagctagttaccaatatcaataaaaaagataaatgctaaaaaaatattattggtgactaatatccttcaagttgtaatattaatattgtataatagggaaatttgattttctatacttaaaaaaccttaatattttattcttaaacatttccatttacatttaaagaaaaataatataaaccaggggcagacccacattatagcgaaaagggtcagtcgttccttaaaaaaaaattgaaaaaaaaaatgtatatgtattttagttagttacaacatatatttgtattaaaagatgatatttatagacataatagtaagcttgatgtaatggttaaggtagattataaatatattagagtattaaccaataatactattgtatttttagttagttaattttcagttattttaactaaatctttgtccctgccttgtatttcttttgcata

SEQ ID NO: 9160 - DNA, 548 bp, Cannabis sativa
tcaattctcaaatgagatgaatagttaaacttggattaatcaaactaactggtattttccatgttggtcatggttttcaaatcgtatgaattaccaagtaactagttactcttatatatcatgtttattttaccatgcaattttttttaatcataataaacaataatatattaaaaccaaatattaatgtaatgatatttttaaattgaagtatatttattctattgtcaattatataaacagcatacaaattactaattaatttggccaagtttttacataatataatatactgaaaccaaattaattatatcgatttcctaagataacaaggtacaagtcttctttcatttgcaatgagaaaatgtttcacaatagtattcatattcaaaaggtatgtagtacaaaatacaaaatcgagtttcatcataagaatttggaactctcattgctttagatacttacttagcctatctcttctttccttttgatttcttcttgtttttcttggacttgttacctctctgctttttgctttccacattttg

SEQ ID NO: 9161 - DNA, 564 bp, Cannabis sativa
gcccagaaaaatgaatctcttaagttggaatgctcgagggctggggaatcctcgagcattcaatcagctttcccttttggttcggactcacaagcctgttgttcttttttttatggaaactaggctccagcctcaatctgttaatcggtttaagacttctcttgggttttattttggcatagaagtccctagattacattttggtggtggtcttatgttgctttggaaggctgatattaatgtaaatattattaactactccctcaatcatatagactgtaatctttgtgttaatagtaatgaattatgacactttacttgcttttatggttctcctattcatgccaacaaaagatttacgtgggaacttttgcataaatttttttataatgctcctaacctcccctgggctatcctgggcaatttcaatagttacctatatactagtgataaatggggaggtagaaccccttcccacttagacacatcctcttttgtagatttccttaataaatttgctctaattcctctaccttttactggtaataaattcacctggtcaaa

SEQ ID NO: 9162 - DNA, 672 bp, Cannabis sativa
gtatccatattaattaattaattactctttataccgccactcaaaacattttttttcgtttttcaataatttgcattagttttataaattatttccactcacatgcccattggttttaattagtagtatagtgggcggtttatatattgaataagctcaggggtttgcaaatctttaacaaagatattaagtaattcactcaagttgcttccaaaaagaattttaatacaatttgaatgttcattggatggatcacaataaaaatattaattagtggttttagcaatttaagcattattatttgatacgagtggtgactattattatataaaataaagtggcctatattgtttaaaagttattattttaaattatatagcaacaaactatccaagaagaagatatcagcatttccctaacaatttgtataaccgtgaaaaccattaaacaccactctttctttccgtgcactagtagatgtcaattgcaaggttggttatgatatgtctcttggacaggtgggaacgataagattgcataataatatataatacatagccgtacattgttgcactaccctattattagtgtgtttgagtttgacttttggcattgctatccccagtttctctattttaaataaaaagagaaaatttatagtagatacatata

SEQ ID NO: 9163 - DNA, 602 bp, Cannabis sativa
tcgaggacatcaactccagaagtttatccaagatgttcctccttaatctcagtttctttcagatgcgaatcatgcaactcaaaaatataatccagaattcttgaactagctaggagattcaagatcaattaccatggcttctgtcgtccatgaatgagagtattctcatttgaatagttgggtgtaacattgttaggcagatctggaaagccttggaaaaacactatactcttcaagtttcatctaagatccttgaattttgaactaagctttagaatgtcaaaaaggcaccctgtctttggacaagtacttactcaaagtgaagcaacatgttgatttactagcctttgttggtgaatctctgtcagctcgagatcacatcacatcaatctttaagagattaccaagcaagtatgacaccttcattatctcctccaacacatgaatattagagtattctgtagcaaaaattgaagctctacttttagctttggagtcaagggttgagaagtttgacaaagaggttgatcagagtgtaaatcttgctattgctgattcaatgccaagatctaaaattctgctgcaacttgaagcaaatcttg

SEQ ID NO: 9164 - DNA, 501 bp, Cannabis sativa
atattaatatatctaaataaaaaaagaaaatatgtcagtctttcagaaaaaaatgtcagtacaaattgtaacacaattcttaggacatctccaacagtacatcagtacttttatctacaaaacactatctattttttttttaacagaggtagtaaaatgggtttcaaacactatctaagcgttgatccaaagcagatcgacacaatttgacgcgaaataataatgtgtcaaacacaacactatcagtctatcatgactgccgactttggaatattgctattttctcagactccaggatttggtggctgttgtttcaaacaaccatcgtattaacgactttggaatattactattttctcagactccaggctttggtggctgttgtttcaaacaaccatcgtattaactactttggaatatttccctttcaattctcaagttggttaatgaatttgacactttgtaacttgttttttattagtcgatggattaatgtaattg

SEQ ID NO: 9165 - DNA, 2227 bp, Cannabis sativa
  modified_base (244)..(244): a, c, t, g, unknown or other
ctactagtaattgttgatcgaaatataattatggagggtaacacccaatataaggttctaacagcacgtgtatagtaacaatttatgaggtgtagagttagacaacactacatataataatatttggtgtaaataattaaatttaattttctaatagtttaatttttaactgtaattactttactattaaattttaaatcattattcatatattattttttattaatatatttaaattaatttntaaataaaaataaaaatttaaccacctatacttacaatccagatactatgttacaaaaatataaattaagtaatattacaataaaaaatcaaaggtaaattactagtaaaaagtatacagaagagtctaaaagaaacggttcaaatggagaggtgaaaagctcaaacaaatgccaagagaatattaaactagtttcttggttctcgaatcagttagtcaaattgaggaactagtatttgactcgaagctttttttttttttttttctaccgttcagctggcaaatttgaagggttactatcagaagcagatggtccgagctgaaccggcggctgaacgcaaaatgttggaaactgtggtgagagggtgagagagaagaagaagaagaagaaacagcggaagaaaaaaatggagaagaagacgaagaagacggcgaagaaacatgttgtgaagctatcgaatgagaaagaaccatttgatcatacaagctcattgtcctattactactctctgaattcaaaacacgaggagagtaactcggcagatttctcgaaactacatcggaagaactcgacatgttactactgcgaagctgagtttgttgggaatggacgattggctcagccgaagtggaaaccgacaaaagggtattcgaggaatcggaaataaccaactgggtcaccgccggatttccagggggtgaccggagccgtacgttttctgggaaatttagtttggctttattgcctctaaaacgcagagcagcttcgtcgtatgctctggcggcggcctcggctgtgtcgaatgtgcccaaccagactctggcggctttgaaagggtcccttatttcagctgcccatttcccccatggcctttgtctcactcctctgtattttcttctgggttgttcttgttgtcctggttgagggatttcttggtggtactcgtatgttggagtgaacgacgtcgtttgtgctggtacggttgtgcttctccacatgtatgatgtttctgtatatgtttagaagaagaagataagtcaattgataaaatcataattttccttatcttttagataagaaactaactacttgggtaaggaacaaaacaacactaaacaaaaagtattttataatttaacacttgcactgttttattaatggtttaatggaaagtattttttttttaaaaaaatattctgttcgagggagagaaataagctcaactttcaagaacagaatagttatttatttatttattatcctttttgtgtaacatttgtactgtttcattaatggtaaaatggacaactttaaagagaagatcagttttaatttgtgacctaaaaatacaacagaaattcatgaagaaaaacaaaagcattttaccttgaaatgctgacttattagagggttgagctggaaagggatgatctccaaatcccctgcaaagtctggaaaaagactcaggtgacaagtcgtttcctccttcatctcttccccttttactaccaaaagagcctgaacctgaacccgaatccgaacccataacagacgaggcagaaccacttatttccagccgttgatcagaatgatgatggtgatgagtaaaattgggtaaatcccctgaaatgactctagttagagcagagaccatggcattcatttccctctccctatccatcaactcaaaacccgatgccattatcggttccccggaagaaaacagcggtggttcgtttaaccaattatactccccattgttattattattattgctaataataagtttattgtctcttgagttcgccacctttagaacacacataaatctttaactttgtttaataattatcttgatcttcacaatcacctctgttcttccttttattctttgttgttgtgtaagtgtaataatctttcgaccgccaaaggaaacctcttctattcttctggatgatattatcgtctacctatatatatat

SEQ ID NO: 9166 - DNA, 520 bp, Cannabis sativa
ggtatagttagcaataatgcatgaatagtatccaaatatttttgtaaaaaatgcatatcatcacattaattattacaccgaatatttgaccatttttggagattggctaaaaatacattaaaatgaagtattgaaaacattacatgtactatcattaacattcaattcacatttatatcttttttgaatatgagctttcatggaagtacaagtatggaaataaataaacttgtacatatattactaagcaagattttcctttttaagaacattattagccataataagtcctataccccacttgtcacatgcatggcctaacacattatccaagcattatcctaattaaattctaattaataattataataagatgaatagatgatgatgatgaaacagtggtggtagcattaaagcaaattatataaataaattcaaacaaaaacttaaactcttcaatcaataataatgataataatcaatcaaataaatgttttttttttggtccaatttttttttt

SEQ ID NO: 9167 - DNA, 681 bp, Cannabis sativa
aaattgttttagaaaattagaggtgtgtggtttgttataaatgggtattagtcttattaatcctcaattctcattgctctagtgtacttattaatattcatatatggactattaataattgatgttatagtaatgataagaaatggaaattcccaatcccatccactaaaataaaataaaaatatggtggctatgctgaagtatgcaaagatgtagttgcctagttggaaatgtaatagaaaaaaaaaaaaaaaaaacaataataagagatgaatgaatgtgtaggtcaccacttttctaaacccaactgctgtaactataaacattgttcttttcactctttaataaatcaattgttgacaaataggtatttgtacattgttctctgtacctacatatttctttatgttttgtgtcaaagtttttatttttattgtattaattaatccccattctaccccaaaacaatgaatcaatgacagtgattttggttatcttatcactagaataattatagttgttcaacaaatgaagctccatattcacttagtccaaaaataaagaaaaatattgttagttatcatttcggtttcataaatgttgtaaccattaattttaactttgtttttcatttatcaactgatataaaacaaagaatatttgattgttactacaaatttc

SEQ ID NO: 9168 - DNA, 820 bp, Cannabis sativa
ctttcagttttatatttcagttctccgtggtagaagtttgacatggcggatgcaagagagagtcaaggtacagacttgaggtctgagcaaacaatggataatccattaccgaaggaaggtgaaccacagatgatggatatggcccaggaagcaagggtggtggacgaaacccttgaactgaatactcaggaaggcacgaataacgatgacgaagaagacaacccagagatggaggaaatacgacagcagtttctggattccatgaccatggaactagaagcggatttccaactgaatgctgaggttgtgaagaaaggcgttctggcgaaagtgtttggaagaagaagcctctccaagaacaaggttaaggaaatattggaagggatatggaggatgaaaaggaactggaagatgaaaactttaaatgctcgagatggtatatgggggatattctttgaccatgaagatgacaagagatttgttctcaaacagagaccatggttagttaatggtgctctgctgaatatcagggactggccagtcaatggtgaatggcaggaagttaacatggcagaagcaagatactgggtagaagctcacggattacccactccgtatcttacttgggaaaacacagatgtagtggctcggaaggttggtgtctatatcgatttcgatcgcgcgtctcgaactacgattgccagaagaggatttctcaagtttttggttgatttgcggattgatcaaaagctagtagccggtttttacctaaatatttctagagatcggaaagagtggattcaatttaaataccataaat

SEQ ID NO: 9169 - DNA, 602 bp, Cannabis sativa
tcacaacagaggccactttcatggtgttctcattcaagaaagagaatgacctaaatcggattatagataaatccccttggcttctgaataacgggattttactcttacagagattctccaagattccaattaattgggaaggagagctgactcgttttcccctttcggggagagtccttaatcttcctacgaagtccatttccaagaacaacatgatgagattagctggtatggcaggggaggttatagacattcagaaagaagatgtaatgaagattgcgtacaatgaatacttctggttcaaggtatggatttcaattgaaaaacccatttgcccaggatatctcttcccctgttctgggaatcgtgtttggcttccgttcaggtatgaaagactaccgtatatgtgttttaactgtgggcgtgtgggtcatgatcaccggtcgtgtgcgaagagtcctgaacaaatagacttaggggatggaaagaaaactgctgcgtatggggcgtggttaaaattcgaagagaacccttccaggggtaaagaaaggaactctaaccggaatgactatggaagcagtttggaacagaacaagaactcg

SEQ ID NO: 9170 - DNA, 771 bp, Cannabis sativa
atcttccaagacaccttgatgccctagcagtgctctcattttgattcttcaaaggccaaaatcattggctctattgaaattgttaatttcaaattttgagtttgacattcttaataggtgagttctttgaagaacacctttgatttttgaaattacgagaacctcctcctcagctctactactacaaatgggccttcactgttttttcaaccctttagaggaagttttggcaaaattcgtaacccattgagttccatgggtcgttaaaaggataaaagagaactacctctaaagggttcatttagaggcgcgcaattattaacaaataagcacctctaaatggaccttatggaggaggttatttgctaataactgcctccataggtattttttttataaatatttttattttaatggtagttcgacgaagaatgatgaataagagaaagtctgattttaaccaagaaattataaatctaaacgtaacagtccaaaataacacttttttctaaaaaaaattcaccacaaatttgagttaactgccagaactacccgtaaacaataaaaataaaatggtaagagaaaacacaaaaagaaaaatacgacggagaaagaaaagagaagagatgggatcttcgatggtggttgggttgtcgaggttgggtgttgtcgtgctagagagagagttttttgccgacgatggtaggttcttcatggtaggcaccgccggcgctagggttggtggtggcccagggaagagacacataaaaa

SEQ ID NO: 9171 - DNA, 648 bp, Cannabis sativa
atagtcatagttgatctccctaaagctcctctgcatgaatttatatatgttatatatatatatatgcaatcacctgagtgtgtatatatgtatacataacatatattaagatatcttagcagcgagtttgaaaaacgacataaacgtaaagtatagtggagaaagagatacgtacgtacgtacggaacaagagatcactggaaaaatatatatatgacgcttagcactagaatatactgtaatatatataatatctataggaggttttttatttttaaataacaattttgtttttttataaaaattcacatattaatctacagaaaaactaacggagaaacttaattaaattataatcaaaatttacatagcaatctacataaaagaataactacggaacaatgcaaaccatataacattaaaaaaaaaaattataaaatgatatattaagtaattcttcaataaaatatgggacatgtatattgtatatctaccactttaggatagtaaaagaaagcactacacatgatcattgaagattgcagcctcttggaaaaaaagaaaggtgaacccaacacctttaacctaataagctattaaatataaattataaaatataacggttaggatataaataacttaggctca

SEQ ID NO: 9172 - DNA, 991 bp, Cannabis sativa
cttatccatactttcgagacatcgctgcttactttagtatgtgcctgatacaaattaccccaacaaaaatcaagtacctttcgacggtgtttgttttatatagggagctaggctgacctcagcctactccttatgagattggatattattttgacctgaagtctactctgaagtaaaataggacagggtacttctacttcagcttgatcggtcaccagtggttgggtgacaccaacagtgcagccatgtcgaatgctggcaggtacgccaagaggtattttatttcttatggcatttggaggattggacactacgaatttcaacgggtgccattcttcaaatgctctatccccacattataaatgagggatatgccaaaccacatcctatttctctcggtggagaagagaaacattattaggtggaccagtgtggccaacttctagaagtatggtttggatcctcttgattctggagttgcgggagcgtagggcccatcggttgagggggcttgtcctagtgatggataagttcctaacttggacgacgacgtgcctttgtccgcatagcacagaatttggagaggaaagagagggccctctattgatgcttggccaacgggggtctagttggtgatgcttctctcctgatggggcctagaatccagccttctgagggagtggctcgccccttgcttacatctagaggtaaaggcaaggcgattgtagaggattctaacagttcctcttctaaggacgatggtatttgatagttgataaatcatctcttacattcttttcttgcatcgaatgtttatgattactttctgactttgctgctttctttttgcggatatgtattccaggctgagatatctcagtggggaccgtcagatgagcccacgagaccactgagggtcaaggtggcccagacttctcatggcagagatgctgatgggtcatctctacctcctcctccactagggcctgca

SEQ ID NO: 9173 - DNA, 788 bp, Cannabis sativa
attagttgtaaaaaaactagggttaaatgtatttagtactttccaatttagtctctttgtatttagtcgtttcccatttagattcctagctttgtatataaatatatactattctatggaataatacatacaattctattcaccattctctacaaaagagttgaacaactgttacagggccatcagttcgtggttgatctttatgttctgcctatatggggattggatgttgtgttgggatgcaatggctgcaaacactagggtcgtgtgttcatgaccataaggctctcacaatcgaatttaattggcaagggcaagctgtcaaagtagcagggttattagaagtttaaggcacaacagctttctgttactcaatttcattagttgcttcatgaggaagaggttcatgacttgtgtcagttgagttctgtgatcgttggtagtaatagagagagtattgaaatctccaactgagaagatttgatgccaagggaagggaatggacttatcacagagtttaaggaagtttttgctgaaccaacacaacttcctcctcggtgtagtgtggaccatagaatttttctatagccagagtcaactccaatcaacgtgcggtcataccgatatccttacttccaattatcgaaaagttggttcgagaaatgaattattttggcttttgtcctccaagcaaaagtctttattcttcaccggttttgcttgtcaaaaagaaggatggcacatggaatttttgtgtggattgttgggcattgaatggaattatgatc

SEQ ID NO: 9174 - DNA, 1510 bp, Cannabis sativa
atttgaattaaagtatcttaattttatggtgtattttattttggtttctagttttttattaaagtttaggttttgaattagttagtgaattgctattgcctttttagtaagctgaaaatgatatcttggagactgtgttttccaatgattgttaatgtaagtaacttatgggaatagccttgaacccttggaaaaagtaaaagggaaaacaagaaaagatggaattttgtgtatttaggaactaaccatgaaggagtagtggcaaaacatgttttggcatgtcttttggagctgggatgattgtctgataatggtaggttgcctttgaatgactgattgagctaatcatcttatagggaatagcaattgagctagaaataatgaagtttgaaattttcagggcatctcacgtattgtgaggtgtagttccttgttagatggagggagttttcttgtatttttgagctgagagttgtcttatgtccaagtccaacaatacatttgtttggcatattccttctaaggatggaaatgaataataatgaatgatgtagcttattcgggttattgcattcagcttgttgcatgcttgtgcaattaaggaagcaacaaccattacaaagcttgtgtgctagtatatttataaatttatagggaaaaaatcttctattgttgctttttaatgctgtttggagcttggagtttaggagggaaataaataacaaacaagattatttttttaggaaaattgaaagttgtatatgagtactaatttttttttttgcgagtagattggaataaagaagttccaaaaaaaaaaaaaatcctttttttcattttcagttattcccccaacccaatagcattttttctcaacaaaatatgaataagtaacagattttggctaataaaattaccagggaacgagaaaaagttggattttgtgtattgagagagatggaatgtgtgatgtatataatgttagaatgacaattaggtgggacttttagcgtattttggagcttaagtttcttaggcttctgatctgatcaatgtgcaattttgttttttttcctttgttgccaacaagtcttaggaaacaagcctgcatgtttagtaactgggtagataatcttgttgaataaaatgtatagcttccaatctttgatcaaattgtgatctattgcggttcctattatctattatggtagtaaggctccagtctacactttacatttgagatgctgaggcttagcatacctcaatcttttttaagggttttgggccatcctataatattttaaaggaacaagaaattatagttattgctatgtaggtactaaggatggattcaaaccgcagacctcgtggaagcaaaccacgaatctgataatttgatctacccttttaggccctatgcacaagaatgaaatagtcgaaacttgtgtactaattttgttatgaacatgtagataaatttctatacgagcttaagatttcaatcacattt

SEQ ID NO: 9175 - DNA, 919 bp, Cannabis sativa
gaaaaacccttttgggcctgaaattaggtagcaggttgcgacatgtgctttcaatggcacagctcgggaggataatttttgggcactgagctttctagtacaatgactaataatattttagccataacttttgagttttttttttttttaaattgaacgattcaagttgttttggaaagttgaaagagagatctaaaacttttattcataatatttttcctgaaagtgaatgcatcatagttaaaaattagcttgaagcttcagacttgatttttgatcacaaacagaacgtattgaacatccaaaacttaaaatttttcaccctattatatcttagaactgcaaattctatgataaatgcatcatattcatctcatttaacatgtttcttcttatttttaattcatatattaattttaccatttaaacctgaaacaagtagaaaacaagagtaaatctacacaaaatcaatataatcaacttgaacacacctctaaaatacttaatagaatacacctagcttatcaaacatgagaacacaatttttttgtgaagttttcaaaacacaagtcgtgtttagttaatgttttctaaaaacatttttttttttttttgaaaaacacttcaatactttgagatcccgatatgaacaagacttggacctagaccccgaacccgaacccaaacacggatcctagacctagcaccggacctcagacctcgcccttggaccttggacccaaaccccagccacggaccctggaccctagaccctagacctcggacctcggtctcggccccagacctggcctcaaccttggccccatacccgacctcagcctcgaccctgaccccatcccggacccggccttgaccttagccccgaccccatccaggactctagacccagacttggccc

SEQ ID NO: 9176 - DNA, 677 bp, Cannabis sativa
tttatgcataatagaaaatgttagaattagatctagataagttgtaatctttctttgtggatggtttggcaagaagtgctagattttctaacaatcttgctagtataatttagaggaaggaatacttcctgtgattcttatttatttgtcttagattattaagattacactaaaattaggcatatctgatttcatgatattggatatgaaatgagatagtgggttctcattaatcttctctctctcgattctcactcaaattgatgaaaataaaagaaaaaagtggttaagattagccttgagaatcaaatcttaatattttttatataacaaagtaattagagcctcataaatcctgattaggtttattatgagaaatttataaaaatactgacctttggcccaaattttacaaaaatactaccacacgcagaaattacttttatactgtcttggctaatttttttttcttatttgatcgtgtctcttatttgatccaagccagctaagccttttatcgtgtctcttatttgatccaactgtgcttgcacagaaggatctaatgttgtaggagcctaattgagtgtcctttcttaattgggttgcagccctagattggccaggacttggtcggccataccttgggaaaatgtatgttcaaggttggccagccccaa

SEQ ID NO: 9177 - DNA, 583 bp, Cannabis sativa
taacaaaaatggttttgttttgaaagttctaaatttagggtttggttagtgaatattagtccacatcatcccctaaaacaaaaaaaaaaataaataaataaataaaaaagataaagtaaaatattagtcgacatcaaggtcgcatcagtgacgcgcttacttgcttaggtgggaccctttctttctaaagagaattcgtttctctacgatatatcctcattttcaattataaatttataatatcgtctctctccctcatctttcaaaatatcgtgagacgattaatagggttattatctttcgtatttttgaaataaatataaataaataaataaataatgatgaatgatgtgagttgtttattatttatttgtgttgaataaatagagatagattagataggtatcgtccatagatagagattatagagtgtgggtccgtccacctttcctttttcatagaatggggtccattgccttttcttttttcttcttctgtgagtttcatatgttttattttttttattaataaagtattaggaaacttctgattttggtgttattcttacttcaatagttttatt

SEQ ID NO: 9178 - DNA, 1353 bp, Cannabis sativa
  modified_base (972)..(974): a, c, t, g, unknown or other
tctctaataatattacctatataattgtagtccatcaaggaggaagttaggtggaactaaaaataatagtatttttttaagaaaaaaaaatgtatacttagtctccctttaatcttttttcttcatattatgacacgattttctatatccatgggattatcataatttgattaacctaatgttgttctatataattagtagaaaaacattactaacatttatttatcaagaacttctacattgacataggtaaatctcaaattgtgacaaaacttacttatcatggtaactttcttttgttttggtatgcacatccaaattgaaagaataaattatgataattataccccaaaagaagaaaaaagaagaagaagaagaaatgagtgaagatggttattagtgtcagaatatgttatccggcatggatcagtgatccttctatatattatcatatatatatatactcaccaaatacaacatatgcatcttctagttgtcttaacaacggtcatcttttaatttatttattttcattctaataataaataacggtcgtctttttgttcaatttatcatctcttttgttttgttttttgtttttctttttccccttttgcccccatctacagaatactatacaattagatgaaatgttataataataataataataataataataataagccacattgttccctgcactacacataaccctcccaatgtaaaccaaaccaaacatttgttataagtttattggacaaaaattggcaagtgaatattgattgaaaaaaggagttctatacactctattatatataaaaaaaaaaaaaacctaaataatcttcttctttttttttttttagaaaatcactgctattataaaacttaaataatttttaaaaattacttttaatattttttcaaaaatttcatgcatattattctatgttaattttaataattattttnnntttatttttatattttttttaaattatatatatattctataaaaattttatataattttttatttatttttttcttgtcataatatttaaaatataatttatttttatttaataagtatattttttaaaaacataaattaaaagaaaaaaatgaaaaaaatagtacaattaaaagtataaattttatataaaataaaaattattaaaatacagtgtctttaaaaaaaataatataaataaaattttcatagaaaaaatatcttcaaattccaatattgacccatagtggccaaaccgaatatgtttccactctccaattcaatcaaagaagattgtgagtaaaatcattgaaatgaaaggttaattgagtctaatttct

SEQ ID NO: 9179 - DNA, 922 bp, Cannabis sativa
ccctttgactgtcttgacagtggacttggtcttcctcatcccctcagctgttagcatagcagaagaggtctccttcatcccctcggctattagcacaactaaggaggtcttcttggaaaatgtcaacgatgtgttgtaatatttacatcctactctttggtttacaaggagacgatcgatactagctgttggcaagaacttgacaaacaggtggtaaatagatgagatggctcaaaggtcgtagagtgttgagcttctaaggagactttgtgtccatcactatgaaggtactcatagtggtgttctgctacaaggttgttttgactcttagtgataatctgatttcaccacaaggagcaatgtcggatcttctgaaaccatacattagttgtttgcagggccctagattcttgtagggacaaacccattctttctagggtctatttcaaaaggatattcgatgatgattcatcattaatcatcacattttccctcatcatgttcgtgattcaaacctcgctaattagcaggtcgttcttttgtcgatcgaagatgcaatcagttcttgtcgctattgggaaccagataggctgcctgttgtagtaaggaactagacaggaaggtggaaagttaaaaggctagctcaaatgttgcttcagtgctgatgttactgcaccacagtgtcagtttcttagtgattagggagatgctttgaagtttgtttgttaaagcaatcttctagtagcgagataacccactatcaaggtattgtgggttatggcttttgcacttactgttcatgcatcagttcagtttatcatcataagtgagataaatcactgttgaagagtaatgtagaaaaactcgctagattttgtataagggtgaaatcacaggttattgaagaacctttgcttgatga

SEQ ID NO: 9180 - DNA, 760 bp, Cannabis sativa
ggtcggccaaatgcttcaggtttctatttcacctatagtgatggctggttgtcgtgcattatttcaagagtttgtgtaggagagtgaagcatgtgtgtttctcctcatctgtccctttgattttatggtgtaaaggaattgttgaatttctcttttttgccattattttggctagagccatcgttgttgcattttcctccattattcttgttgttggtgggctagctgatgttgcctatgttggtcagctagtcaaacagtagttggggcattatggtgccctgtgtctgttcaacattggcctgccttcttgtctgggcttgtcgtacaacttcttccaacattatgaagccacctactcgttcaaggaactctttcatgttatttattgatatccttctgacatctttccagaattcactcaacaacaagatgcctctaagtatggttgtatatcggccttcttctgacaggcctttgaccttggtggcctcggccatgaacctttagatgtagcctttcaaaggctcactttgtctttgctttattttgataagatcctccaattatgaatgtatttgtcttgaggcagagaattgactatacaattctcgggagaattcatcccaatagttaaatcttcccgaggccagcttgaaataccactgttgggctgttttagacaggttgctcgaaaaatctagcattgtacatctctaattactttttggagatgtgcttggatctcgaagtattttat

SEQ ID NO: 9181 - DNA, 586 bp, Cannabis sativa
tttaatttttttattcacttatataatttatctagttttcttatttttcatttctttaaatcttggcaatctcttatatagtgtacataattaatatagagatgtcaatataaccatagcctacaattaataatatgtacaattattattattattattattattattattattatttcgtgaaaagtactattgtcaatctcttacaatattttagtcaattcacgtgcccgaaaatgcatactgaaatatttgtttttcatttttttatgatggtattcgttataattacaacattatttgtgtaaattttaaaaaaatttcgaataatttacaatggcaaaaatagatttaaagttttttgaacacgtgtgttagactggaatatcaaaatttttatttttggtactataaactattctataaaaacaagtattctaccatgtgatttcagacgtgaaaattaactatacatgagattgtaatagaaaattataattaacacttgatataccaatacaccaataatattgcatttaccatgaatatacataattgtcaatttattaagaaaacaaattagttt

SEQ ID NO: 9182 - DNA, 1069 bp, Cannabis sativa
ctttggtaaaaagtgtttttttttttcatctttagttattttgtacaataaatttgttttgataatttattacaaattacagttaatttagatgtatgcatatgatactttgtaagaaatcctcatcacattgttgaattccagaatgaaaattatcttatgaaaaaataatatcaaagacaattattttgtacaatgacattttttatacttattttgaataaataatttattttaataatttttttctcttacaaaataagatagtaaaactatttataaaaaacaaaataattttaggaaattatctattttgatcacatatcactatttataattattaatatatatgttctatacttttgtacagagaatactcatcgattgtaccaaagaaattataagcatgatcatattagagaagcttgaaattactccttcaaaatcattttggattgcagatttaggatgttcaattggacctaatacattctatgcagtgaaaaccctaattgaatctttgaaattaaagtatcaaactaatagttccaaattactccctcaatttcaagtcttcttcaatgatcacacctcaaatgatttcaacatgcttttcaagtcccttcccgaggatcgaggctactacgcggccggtgtcccaggatcattttacggacgaatctttcccgacgcttcacttcatttagttcattcttctttcactcttcattggctatctcaagtgcctaaagaagttaatgacaaaagctctcttgcatggaataaagggagagtttattactcaaattctaaaaatgatgatcaagtgattaaggcctataaaaatcaacatgaaaaggatatggcaatgtttttgaaagctagggcacaagagattgtgtttggagggttgatgatgcttattgttcttggtattcctaatggaattcatcattctgaatctggagggaataagagctttgaacttattggatcttgcctcaatgatatggttcaaaaggtatattttttaaactaataatagttactactataaaaaaaaaaaaaa

SEQ ID NO: 9183 - DNA, 700 bp, Cannabis sativa
ttgcgtttggcgcgtcactataagacaatgtttttttaaaattctataaattacggacgttattctttagcgacccctcatatttttagtgacccgcattataggatactaacattaaatttttagagtcattttgtgcaggtcactaaaactcacccttaaccttttagtgactcgcactattgtgttggtcactaaagagtgtcactaaaacccaattttgtagtagtgcaaccagtcaaaagctaaacccaaaatatgtacaatgtgtacagtcttatacaaaaaatgaaagtacttaatctcaccctcgatgataaaattactcgctgctggaataggcaacaagatagatagtagagccatgtactatggtaacatcaccatctggagcagaagactcagcagcattggatggctcccccataggcaccagctgttgtggaatcattttgatcacgcacactaactttctcccctggatatcagcagtagttgattcagtttgaccatgagcaacatcttgctccccttggacatccgtaacaatattctccccttggatatcagcagaaactgtcttttcttggacaatagcaccacttgaaagatcatgatcatcacccagagatgatggctgaagggtagatttaaggacgaatgaatcattgccagtagtaccagatggatatgtacccat

SEQ ID NO: 9184 - DNA, 522 bp, Cannabis sativa
gcatgttgtttccagcgttctatgcacgccaaacccatactatatagctttcctcttgcataggctttaactgcaagctcatagcatcttgcaagagtgtaacattctccagctcgttgtagctcagactcgtcacaacttttaaaatatatatcacctatgccattagagaaattatataagttaggtaaaatcatatttagtataaagctctgctagaatatgaactgttaacattatcagattagtgaaccagtcattgtctttaattaaatcagttatttttggaaaataaaatgaaaaattagatctcttctttgaataaggactaaggtcgggattgtgtaaagtgtaaacatgagttacgtaaagaagaaaatctgcagtagttttccaaggaaaaatggttagttcacatgaattccctatgctcgctatgagttcaaaaactgaccatgacatgaaggaaagagagatacactgagtgcaagattcattttaaaactggaatggcacctcatt

SEQ ID NO: 9185 - DNA, 951 bp, Cannabis sativa
cttaatttcaccgtatatatgcctgtagatgtctagtaccaaattaatctatcactagatgggaaaaaacttaatggggtagtagttattctgtcaatatccaactgcccaaaaaaattttgaagcagctccaagttctactgcctttcagtagtgatcaaatgagcaatcaggagtgaggcggcccattgaatgctagtggtttatattctgtgtaacccggtatccctttatccttaaacacactgaatactaaaaccattacctattttatatcgaagtccttgagaaagcaactctctacccccaatgtatactttgtcgtgttaaggaacacgagtgtcccaattttgcttccagaaaagagttgtttaaaaaatacctacacttcaatagacgactaaagaatttgacatttcaaggatcctccatgcttgtttggctaagaaagcttgattgtaatacacaaaagatcggaatcccatacctccctccactttagatttacatagtagattctatctttttcgatgaattttggttccatctttattagaaccccactaaaagtttttcatcatgctttcaagttgttgataaaaagttttggttaaacaaaaataactcatagcatgtgttggaatggactgaacaactacttttagtaaaacttcttttcctcccaccgagaacagtttatcattccaagcatgcattaatttccaaacttgctcctttatattactgaatagctcctttttgtcacgtctagagtaagaaggcaaaccaagatattgttcatggtattcattaatcgacatttacaaagcttgattgaaaaacctttgcgctgcaatcggagtgttgggtgaaaaagacataactgatttttgattgttgagtatttatcctgaagcacggtgatagatattcaacattcttttaattgcc

SEQ ID NO: 9186 - DNA, 569 bp, Cannabis sativa
atgaactgggaatgtcattgcttttctatataactgaccgaaaatttatttgctctatcatgattctaaaactgcaagtgtagaaactagttaattgtgatatcattaattgagtagccactgaaaattcatctctcacaaatcagtcaatttaaaaagaacagcctgattataaaactgcagcaaaatctatgtctatcaagttctatgttcactttagtctaaatcaacttatcttgtattcagtaccctcgtgcttggatgtgaaaatatgtgcattatgattgtaacttgtaagtagctagagtctttatcatcaaggaatgcacaacgtataaaaataaataataaaaaaaagaagaaagagagctcaccttataggtagctacatcttgccagctgagtttgttgccttcaaattcaactgaaacatagtcaacatcttcaagttgtctccttaatcttggctggcagtcctcagcttctgggtccattccaaacacttcaaaaagaactcgatacacttctggcataccaaagcacaaatagatagcaccaaaaagagccca

SEQ ID NO: 9187 - DNA, 1161 bp, Cannabis sativa
cggattcgcacccagaccctgaccctggcccaagactcggacctcgaccttgaacccaaaccccgaacccgcccccagaatccgacccgacctgaaccgagaccccaagcccggaacctggctcaagacccagccccagaccccagccttggctcaaactgggaccatgaccccggactagttcccgacctcagcctaaaccccaaacccgaacttgagacccatgcccggactcaggcccaaattcgaacttggccccggacctgaacctagacctaggcccagaacccgacccaagacctagacctagaccccggaccgggacccaacctcagcccgaacccggacctcaaactcgaactctaatcttggacccggtcccaaccttgccctagactacccaaccccatacccgaactcgacttaaataaaatcaaaaaataaaaaaataaaatttgtagaattcacttttattttctattattaaaattaaaaaataaaagtggttgtagaatacatttttatttttcaaaaacaaaaattttacttttatttttgtgattaaaaaatttagaaaataaaactgttaccaaatgccaccataatttgttgaaagatacatttgttttttgattctttgaaattttgaagaatttaaaagatctattgaaagtgctcgtattctaatttttttttgttaaatgacataacttcatttgaaccaatcatttaacatgtatggacttgttttgtgtcataatttaaatttggtttaaaatttactgtagtcttcctcctgagcattttttaaaagtgttgttattaagttagtgagtcgatgatgaaaacgcgtttgaaggagtcgatttcattaaaatcaaagtcttttttgtatcaaagaaaatacaaaaaaactttttctttgaatgaattttctttattcttttttactgtaattactattgtcttaactcgtattgtattatattatattaaattgtaaattaaaatattatatatttaattattcatcaaaattaatactacatataattttacataaaaatcattaaatacaattaatataatactttacaataaaatatcgtgtaatacggtatattaaataatcattactttttgctaattacagacgtgttt

SEQ ID NO: 9188 - DNA, 649 bp, Cannabis sativa
ctatccattaacaggattagaaatcaagaccccatctgtttccttcaaagcttcaaagccattactagtctttacctctcactgatcattgtcaaccaatttggagcccttcctcttgggagtaatccaattatcatttccctccttcgaactctgtatggcctgggactccttagagctttgaataacctgtttctctttagctcccaaactaacagctgagaatttgactgccatttcagctgaagcattgtcaattttatcatttagtggcatctccttaacagccatgtcctctatgtttccattcctctctttctccctctgctgttttttcttccaactaactggtttacccttgttacaattcgacacaatatggcccaacataccacaggctgcacattttgttggcagtcattcatactcaatttgttgttccaccagttgacctttctcgttaacaaaagctatggttcttcgaggatcatccttaatttcaacatccaccaacactcgagcaaacttaatcatcaacctttctaatgtgaccttgtcagccataatgggcttcccaatagtgcttacaagagcactcaaattcttcttcccccaatactgtaaccccaaaccattcaatctaatccaa

SEQ ID NO: 9189 - DNA, 1507 bp, Cannabis sativa
aaacaaaacaaaacactaccctaccccataacatatattatacatacccatatatcatatccactagagcaatgctaaaaattactagtgttacataatctaccaccatttaaatatttcatccatattattataattaagtattatatttgatatgatttaaaataataatttttataaaatatcatttaccatttgtaagacatcacttattttatagattagtcttatcgagtattgttataatatgatgtattgtgaatgattaaccattttttatattatttatttagttaaagtataaagcattgtaatgaagcgcttataatacttagtaccattataaaatattactttataattaattaacaattttttataatatttatataaataaaataaattgaactcgatattaaattacacttacttcacaaaatggtttttctttctaaatttatacataacttttagttctaaaattaatacttaagaactcgattcgttaataaagtcaagatttcattttttttttgttggagagtcaagatttcatattgtaaatcaagttctcatccgtccacattattattttcaaaacaaaagttataagaattattctcttagagaaactttaattagtgaataacatttcaccaaaaaataatttgcgacataaatacttaagttaaactcataattataaataaatacttaaaatttatttttatctataataatacttaagtatcgttgaatgtcaagtcaatagtcatccttgattgctccagctcattaaatttttatttttcatttaaaaattaatttaaatatatcaacaacaaaataacatatgaataataactcacaaataacttcacatctaaccgtcagatatcttcaaaaatttcaaaaatataactcagtattattacaacaaaaaattaaatttaaatatttataacaaaaattaaactttaaatatttactccataaattaatcattctccaaaagataacctaagataattgtagtaatagtacaacacaatgttatcctattttggaagtggtggagtcggattgtctctcggtaatttaagcaattcgtaataatcttctattgttattctattttggaagtgttatatctgattgcaaattgttattagagcaattaagtaatgtttccattaattatattagatggtttgttaatagtgttgctcactactttgcgagacattctattttgttgctgatcgtactcttacatgatgtttctagtgaattgcttcatgtaatcgtgaataattgcaattaataaagttgataattttcttcaaaattagtacaacacaatgtgtcgctattcccaatattcaaattgagtgagaagagaatatatgttttcctaggcccttcaagccagacccatctcatattttccttgggaataatgaagggagagagagaaggcttcaaactccataaccgaaattctggg

SEQ ID NO: 9190 - DNA, 653 bp, Cannabis sativa
gtaatcttacctcactttcactgcattgcgattcaattctctaatgtagtcatttagcacaggaatcttttgcaagtcattgtaatcaagtaccaactgccaaatccaaattaataatcacagggtaagtttggattgtattctaattgcaactggaagctcaagaaagatatgaacaaggcagctgtgtccttttagtcttatgattatgtttttgatttaaaacgagttcacaagctgcagttcagaaagtttcagctaacaaaattaaattaaaccacccaaaaacaattggtaaagaagagatttaactcttctgaaccagagtagtcaatatctttgaattcatatttaaaacaaccccaaaagagaaatgaaaacctgaaattatcagccattctagaaaggactataagcaactatcatgagaatagaattattttattaagagttatctgtgaaaataattgtattaagcttacttctactagatcatcttctcccactgctccaaatggcacaattgttgccccgaaacgagctgccattctcacaaattctggttgagtaggccaaaacagcttatacgcttcaccctatcaatggcaataacaccttataaaagtgaggataattaacaataaaggagaaaa

SEQ ID NO: 9191 - DNA, 950 bp, Cannabis sativa
ttgaatgtagatgccactattgatgaatattgacatatcataggagcgggtgtcgtagtcaggaattcatcagaacatgccattgttgccttctcaatgcctattgttggtcattttccatcgcatgaaatggaggccaaagccatgtttctcagcctaaattgggttcttcaaatgcagctaccaatcacacttgtggaaacggatgctctcatggtctcgaatgctttaaattcaaatatggtggccacttcttctttcaaagatttaatcatagacatctcaagtctccttttctttttaactaacatatttgcaactcacgttaaacagactgccaatgtagtcgctgatagtttggcaagatatgccttaaggttggatgagacttgtttttggttggagaattttcctccttcaatttactctattattgtaaatgactttcctcagtaatttataataacaaagttatatttttttttttaaaaaaaatgtttaaaaaagccatatagtgattttcacttaaaataaatggcaacttaaaaaaatattgaaatttagattaatttttataaaaatttaaaattactgtatttttataaaataatagtagaacataaaatagaacaacttaaaacaatagtggaataactaaaaaataaccgtaaaacaagagtgagaacttaacacagtacacaatataaaacttacacagtattttttaaaaaattttgtcccacagtattaaaaaagttaaaaatttattgtaaataatcctaaaataaacttgtgctaaagcaaaaagagaaaaaaaaaactttttgtgctctttgacatatttgtactctatttttggaataataacacaaaagtggtaaagattttgtaaatataccatatattatccgttgttgaaggcccaagcccaaacgacttccatgggcaac

SEQ ID NO: 9192 - DNA, 1249 bp, Cannabis sativa
tggttgaaaatatgactcaattctcatatcatcaagtcccacgtgattagaagaaaaaaaaagtatttgttaaatactattggtacaaatttttgttgggatagtttaactcaatatgctgagaagtaaagatactatcaaaaaatggtatttttcagaatcttctaaaatcaggtgtaagatctaaactcagtatttttttttttttttttttttttgctgaaaaaaactaaattgaagcagagtttattcaaagggtaaaagaaggaaaaagagacaaaccctgcactgagtccaatttaagaaactgtgaggtggtacaagacatagggaataagaacaaaacataacaaaatataatgttataaaaagaccctcataattccaatcccatgaacatcaattaattaaccaaagaatttagctttgtacaaggagattataaatcacccactatatttaaaactgaaaaaggagactttcttataaatgggccccattgatgccattactaacaactaataacaaatgaaactctcttaaaacaccattacagcaacaacaaaatatgaagacaggtccacacggtttattgcatactcctagtaagaaaaaaaaaattggtattgggttccttcttataagagagaaaagattagattttttacctattctaataatgtggaaaaggacaagagaagacagctcaaagtagagcattggagtataaaaaactactaaaatattgggcattattttgagataatgagacaaaaacgacaacaaaattttgataataatataatatatgaatgtattcagtaaggaaagaaaggaagaaagtaaccatatttctctatcatgcttcaaaaccacggtaacaaataacataaaaaagagcaataaacgaaaacccagaaaccaaatgaactagatggacacgtgtcaattgcccacataatacaaagagttaaactttaaaactttggagacaatacagcaatccccgtaaacaaaatcgtagttattagtaaactttttaaagatcgtaaatttataattttatatgtttactaaaataacaaattaagagaatgagagtaataaacgaaccaagcagcctcgaaatgccgattgaatcctaagagcggcccactcctccttactaacgtgcaccgccgcggtggtaacactgccaccgacaccgccaccgctagtcaggcgaacaacagctgcggcggcttgagcc

SEQ ID NO: 9193 - DNA, 1139 bp, Cannabis sativa
cgtctccaagttgtccacctccttctgaagtaactcccgctctgcctgcccagagctgcgactctcctttaaaaccttcttctccttggttaagttggaaaggagggtccaaaggctttccctctcatctttcagagcattaacatctttggtcaaagcctcattgtctacttcaagctgagtagtggacggcatatccttgatctcctaaagcagttgctcaacatgattgttggcagccaaaagttgcttttaacttcactcagctttagactcttctcctcggcctccttcttggcttcctcggaagttggtggtggtcgtcgtaactttcaaggatggggacttggctcgagagtaagtataagccatcttcgagttgagctacacaatgaagtaaggttcaaatctaaacggataaaagcatgagaaaaagaccaaaggaaaagtactgactcgggtggtctcctttagtattctgcccatgagcagctccataaacatttcctcccccctgaccagttgattgtttagctcgggaaacactcagtcctggtaaaactagagcatctccttactcttcatagtctcagggttcagcatggtaggactggctaaaggtttggacaatctgggccaattcgcactcccccctttggcgcctttgacgaagcagctggttgcatgagacttcaaattcttcgtagctggtgagttcaaatccaacactgtctccttgagaatcgttgttataagtgcggtcgaacgaaacatcatcgacttttgactactttgtcagagacttttggccggaggcatcgcccgacctcttctttaaagcatgcagcatcctctaagacatgactgcgcataaataaaacaagaaggtcagaacaaatatgttctaagtaagtgcaaataagcttaaaaaataaggtaaagtacccagcaagtgggcaagagcacccttccaaataagcacagaaagagcataatcatatgaagaatcctcctcctcctgctcgaccacaatggcctttccctttccagcaaccgaggcaaaagatcgagcaaacctctcagaaccatccaagtaacagaagtgagactaacaaccctgggaagtcaacatatttcct

SEQ ID NO: 9194 - DNA, 732 bp, Cannabis sativa
tataaaaagagtgttaattacaatctcagaatcaaaaaacacacgtgttagaatattttctttttctaattttattttatggcggtattcgttataattacactaatcctataaaattttaaaaaatgctacataatttatggtgccgaaactagttttaaaattttttcaacacaggcggtaaactaaaatattagaaactctatcatcaatattgtcattatatcgagcattgacatgaaaaaataaaataaaaatatatattctggcaagtattttcagatgctaaataggagattaacagtaacactctatattattatacaactagacacaagaattttgggtttctctcctacatttcagtttcataccaaatggaacagtgaaaaagaaacccacctacccttccttcctaatttccaattttctctctttcctcacaccaaccatattctaaaataaagtctatccagaaaaaaaaacccaatccaaaagaaaaagtaaagccaagaaaaagagccactaaaattacaccaaaaattcaaaaactaattaaaaaagtaaaactaaaaaagccacttgtaattcaagaaatatagtaagcaaaaaagaacagcttgttcaaaagttatgacataataacacaatgaaaaacccttttacctgatcaaaagcaggaaatatataatctgcaaactgtatctcaacaacagctcgattaccctaaaa

SEQ ID NO: 9195 - DNA, 500 bp, Cannabis sativa
tttaaaagaagaagaagaagctagttagcatcaattatgcgctaatacatgctagcgtcagtttacaaccacaaaagatcttaacatcaattaaaattaacataaagttgcgtcagtttacaattaacactaaattacttactaattgattgtgttagttttgaattttcaccgtcgttttaaatattcaattcaaaaagctattaggagcggcaagagttcacccctaaaaagagtattagaagcgacaaaagccgtcgccccaaaaagtatcaccaagtaccctaggtatcatgactagtgtaagtaatttctcaatcactaagaataagatagtggctaaaatctttgaggaagagaagatgaaaatttcgaaatcttatagataataggttattcgaaatttttcaatgaaaagaaaagaataaccaattgtgtattgtgtatacattactttcatctcctcttttatatagtcatttcattaggtttaagttaaa

SEQ ID NO: 9196 - DNA, 529 bp, Cannabis sativa
tctattacaggagctcctagaccagaacaagaaagagaaaggaatgggaggcaaagatgctaacctttctaaacaaagaacacacactttactcatatctcaactcaagatgatgctttcaagtcatatcatattataataataataagaagatgaaaagataccttagaagtgaagattttggacaagtaatgattggtcttgcggctttccggctttttctgctatgctctggtttggttcatgtttattatctatatatatatcattatattaaattcttactagagttatctgttttggcctgaaaagccaatgattaagttgttttttttttttttgagatgtcatactaaaaacactttagcatactttgatgaatgcttgtttgtttgtttattctgtaagttgtaaatatggggatatgcacatttgattttgtattctctgcacacacaccagatgagcttctcctctctactactactactcataaaaaagtgatattattacttaaatacctttcaag

SEQ ID NO: 9197 - DNA, 1140 bp, Cannabis sativa
ataaattaaactccgagttcacttatgcactaaggttaggcaatgttccactctatcaagtgcatgtaacagagcagtatagcaaaatgtttgagggtctaaactccatcatttgccacaatttaatttgatccatgataaagaaagaaagaagaaaggacaataaaagacccattaaatgttagtgagaaacatagctgtggatacacataaaagagagacagaaagtgaaaccatataaagaaatgcagaagatatcagactaatatttgtacagacctttgtctaaggggtatgcataacttgatgagcttcaaagagaaacttaggttaatagaatactacacgtttcattcaaaattgataaaagtaaaataaagatatcaaagttaggacatctgaaaatacagcatattggagataaacaataactaactaaatggaaagtggtgttcaagcttagaaatacgtctctaataccagataaagaatgcataaagttgaattaacatttgcgatatgctacaaaattaatgcccatactaaaatttaataagctattttcgaaaattccaaatgaattgcacttaatcctttgagacatatgctattcatcagtttccattagatattcaccagaattaaatgatgataaaattcccaataagacttgacttaagcattcccttccctatcccttcagcaagtacataatacatatattgttcaatcactcactaagcatctaaacagtgaagccaaacattttatggatatcaagaaaattttccaaaacaagagaaaaagaaatgtggggttaaaaatttctcagcaagtaaaaataaatagcaggatgatacccaagcaatcaagcaaaaaattcacaaacaacaaaaagtacaatagaaacagtacaaagtttttaaatcaacaaaatttattctctcaaatttgagaaaatacttaacttcactaattccaaaacaaacaataacgatcaatgaattaatccaatattccaaaactaaaaccgaaaaagaaagataatgcagtacctctcgatcatcagtgaccttgagaaccaattttccatcacaatgtctgtatttcataacataccgtgtctacacaatcaattaa

SEQ ID NO: 9198 - DNA, 536 bp, Cannabis sativa
aaaaaagtaaatacctcaaagccaaaagtcattcggagggaatgaagccaactgctggccacccaaacaatctcaacaaccccatgacaacaaagaaaactattgacaaaagagaacaaaactcataaaatcgaagagaatgttgagtcgtggaaattttagaagtgtggccatcattaatgtctcaccaaagccacgtccatgccaagaacgactgatgagccctagttagaggaagcatacacagaagcgtcactaaggataaaagacaaaaaaaatctaatagagtatgcatgctttaatatttatagtttagtgttattatatggtatttttacttttgagatttgaatgaggtcatttttttttgaaaaaaaagttatagtttagtgcatatggtttaaagtcaacataatatgcacctttaggaacaaaaataaaatataaaatggtggttcatattttctccatcaataataaatgaaaagaaaaaagcaaactaagaaagacttatggtttatatttagaagtggtac

SEQ ID NO: 9199 - DNA, 868 bp, Cannabis sativa
attattattggtgaaacaccacaaatgttaacaaaaatactcaaaaaagttgttgtaaaaaaatgtaaaagaaaatttataaaacaaaaaacatattaaagagttaattccaacaaaactcccaataatttcactttttttattaattgaccctcaaaacctaaattttgctagcaaaatctctaaaactactataccattagcaatttacaatttctatccaaatttggttgttaaataccatgttagattgtccacgtgaacatagtgtacacgtgatacacttttattagtccacataaataattaattttaaaaaaactaaaataaaaaaaaaagtaaaaaaacactattttttcctattctttttctttttctttcttttcctttgttttttctttttcattttctcaattaacatatcatattttttttttcattcttcttcttcttccgtcatagtgtcaccaccaccaccctccatagccacggtaaacattacccaccactactgaaaccaccaccacagcctattttttaaatccaaataaaaaaaaaaacaaaactcagaccaatttaaacaaatctaaatccaacaaataaaaaatacacacatatatatacacgaaatatcagccaaaaaactcatatttaaaaactctaaatttacttccccacaactattattctttctcatatctaaatccaaagaacacaaaattatccaagtaaggatatttatacacattataatcaacaaaaaagattgcaaaaatgtggatgagaaaccctagatcgggaaagagaaagagagaggagatcgagacagatagagagagagagaggacatcgagagagagagagagag

SEQ ID NO: 9200 - DNA, 1095 bp, Cannabis sativa
aaccataaaccaaattggaatgtgatagtattcaatcgattttaaccttaagaaagaataaatcgaagacacaagcgagatcgatagttggctatggctttcaacggagaataaatcatatcggttgctttctatagtaagttatttgtccatgattgttcggaataggcagtgacgggatcattcaaaaattataaattttatattgcttatatacgaaccctgttgatattacataatttgattttagaagtctttcttgtgcctttgttgttgtcaaagaaactcattgatgtgaaactatatgaattatttggtgaaagaattgtagaagatgattaaggtttctaagaagaagaaagaaagaatgaaagaaatcctaaaacataattatttcctttccattcctaaaacaaagagatggaaaggaaattatttcctttccatttttttgtttaattgcatttaaaattattggaatattattctgatggaatgacctttcaatcattttggtggaatgactattccattttaaaataaaaggaaagaccatttcttgcaaaaatttaataattttatttatcaattttttttatgcattttaaattttattccattcttattccaatttctattcttatttctatattttcatttctcccaatcaaacgccaccttaattgactaacattttaaaaatacgttattgatatggtttttctatttcacattaatgttagtttctcctgcccttgttctttgggataatgcttattgtataacatccatgtaaccatctattgactttgatttttctctcaatttcacacatgtctttctagtcatagaacaattgttacctctttttaatgtatttgtaatgatcttatgtgcacttattttttggcgcattagagttatttatgcacttatcatgcataaaaagtaaaaagtaattatatatttgtttgtttagcaatgtctgagattagccttggtgttggatttagattgtagggagaaaatctctgcgtactgaagtactagggagaacaagccaatttgacaaatatttttattttgcaattagtt

SEQ ID NO: 9201 - DNA, 513 bp, Cannabis sativa
atctctaaagttgcggaatcccattcccccattacttttatgattacacatacgatcccaagacatccaagaaatgcctctagaatcccctcctgaccctttccaccaaaacttagctagtaaactctcaatatctctacttatttcccaaggaagtaaaaagacattcatggcatagctaggaagcgcttgagccacagattttattaaaacttccttaccagcccttgagagaatctttgagtcccacccttgaagcttacgtcgcactctatcccgaagataacccagagcagctgttttattcctacccatcgtaataggcaatcctaagtacatacttctatcatccgcttggctcatttgtaggaactgatttatactagctctactcagatcatcagtgttcacactataaaagatggatgacttacttgagttgaccttttgacccgaggacagttcaaactttcggagaagatcacggacatgagaggcctcttgcattgttgc

SEQ ID NO: 9202 - DNA, 1679 bp, Cannabis sativa
tttatttaatgataacaaaaattttagtgattaagaaaataatgaaaaaaaaaggttaattaagatttttactttttagattttaacatgtactaaattatgccccttaaaatttttggacgtttaaaattccctctgaacttttgagattattagatttaagaatttttattaaatttcattcaattttactattttagtgattgtttatggactaaatcatgctctccagatttggatatctaccaaatcataccccttaaactttgacatatactaatcatgccccctgaacttttatctatatgttatattttttttactaaaattagacaaaaattcttaaatccaacaatctcaatagtttatggggcatttttaacaaccttaaaaatttaaagaacataatttgatacatgttaaaattgaagggataaaaatccatcttatattttctattatatattgacaaattaactaattaggaaccttccttatttcattttattataattataatagtattctcactcagaaaaagaaaaagagaaaaaaagataggaagaaaacaaagtcttatcatgatcagcacatgcgtgtatcactacaaactacaaagaatatcaaaatgaaattttatatgtttacataaaacgacaagtgacaatttgacattgtggataattttaggtaaatgtaatctttttttttaaaaaaaaaaaaaaaaacaaacgtttatgtataaaaaagaaaataaggagactccatattatttgttgggatggttgatatttgaactataccaattatattttaggtaaaaatttacttagtcatgttataggtcgcaaaattataaagtttaaaaataaaaacaaaattacaataacccaaaaatagactagagagtattacattgatgcacacagttatcaatacctaattagaaaggttcctttcagcgttttaataactatctcagagtcgctctcaatcaacacaaaaagatgcttccaagaaatcgttgtctccatggctaacaaaaaagtcgcagcctcactaataagtgggtcaaagaaactgagcctgttggtaaccacccacaaaacttatcctaagtgatctctagctaatgacaccacactcatggtcgcattccccacctttaacatcacaattaattttgatctaatctttcgggggtggggtccagaggagagaggtaacaagttgatgagatggaaacaaacagcagctatactatgcataacaatgagtgacaaagtcaatatataatgtttaatgttactcagattattattgtgtaccttatcattacgagcctgctaaatcgtatccaccataatcaaagcatagaggaaaaactcatcaatattgacaccattagacttcagaccccataaaagtttaatccaacccaaacataagcacatgagtccataaccgacatatttccagtgggaggatctccataagtgaaaagcaaagctgcaatttaagaaaagacacttcatagtctcctcaccctcaccacataaaggacaagaagtatcttcaatttccattcttactagcaatcagagcacaaattggagagcattagaaataatgctccaccaatgaacattatggcattctaacactttactattctacag

SEQ ID NO: 9203 - DNA, 758 bp, Cannabis sativa
cattataagtccattccaacctgggttttctttcactttttgaatttttactaaggcatgtttgtagaatacgctaaactgatctgaattacattgtcaataatcaaatgcaagataaggcaatcaatcttcacacccttcgatgtcaaccaaccacgtggcgtgattgtattggtctaaaagctccatcctttatagagataagatagaaagaacacttttttttttctttctttttgaaactcggactcactgaaacttaaacccatttctgggtgtatgtacttaattacctgaagacgtataattccagaggagaaaggaggtgggttgtgtttcaagtctgatatggcagaggtgaggttgtccagagccactgaatgagaaggaactggtggaagagtacgtgttccaatggtgccgatagggaaatgtgggtttcctttgcaaccattcatggagagtacatataattgatacctctgttatcaatcaatacaaacaatgcatgtcatgcatatgtataagttaaaggtagtacttatgaatgaacatggaaatttctcaagtttgtgtgttgaccaagttgggaaaaaagtgttcttactttatgaggaaaaccaatataattggaaggcctgctagaaatccgtaaggtagatatgccataattggctgattctgagtccatgaaacgaccaagggaatgccttgctgcagccacagaacttgccatagaaaagagagagagagagaga

SEQ ID NO: 9204 - DNA, 551 bp, Cannabis sativa
gaagaagacaatgaagaggttctcaatatcactgaggaagatgtatcaaagtttgactttttgatggtgcttagtcggtcgtctactcacaggtaagatcttagactacaatgtcttccaaaatatgatagcagatctctagaagccttgtaaggggttgacagtcaagatcctcgagcaaaacagattcttattccagttctatcacaaaatagacttcaagcgggttatcgacagtagtccatggatgtatgaccgtaaacaacttataatcaagcgactacaaacaggggataaccgaaagactatcgaacttgaggtccttgatatgtgggtccagattcacgatttacaagcagggttcaagacaaagcaagttgttcaaaaagttggtcattacatcgacatatttcttaaatcggatcccaacaactttaatggagtttggcgtgattatctcagagttagggtgtctgttcccctaaatactcctctgaagaaaagaatgaggtttctaaaacgcgatggagttgctttttgggcaaatttca

SEQ ID NO: 9205 - DNA, 673 bp, Cannabis sativa
aaaattaaaatagaaaaaaatgtcactattagtgttgtaatattgtgaggaaatatgcatacttgtagatgactggctacattttctctagtcagtccagggacattcataaaatcaagaatcttcttagggaccgcctctgatagagaaaagaaacatacacacatattagtgactatgcaacattataatgatgatatagagcatatataaaactattaaaggtttactcactatccaaagtaaggtgttttatggcaagaagaaagcgattctgaagtgaattagtccaaactactttagtcttcttaggagctttgcgtttgtcatgataattatcatctcttccgtatccatgacttgctgatgatttattggaaccatgtgtagtattatttattccatcaacgttaatactactactagacctagtagtacttgatgagtctccttttccatggttgttttggactaaagtctcaataatagctacatcatcatcatttgttggtgatgttgatgaagcagaagagattacatttacgttgttgctattattatctgctggctcgaaaagtacaatctctttgcctcgtccaagtacttgagtagcatcaaatgagtctttcactggtatcattgtgtccaccacctgcccttgattattcatcac

SEQ ID NO: 9206 - DNA, 781 bp, Cannabis sativa
tggttagtcccaaaaacaattgttcatatgtattaataaaatatacaattcacgcagacatggacatctgtattcagtgtattgaaatatgttatacactgataggaataatattgtatgcgtaagagtttgacttatcttttgcgtctattcgtaactaaacgagctcattcatgataggcttcgctagattgacagagcttggtgagaataagtggagaaaatgaaaagaaaattctcaaataaaattgagaagttaatatttcgcaaattggtaaaaaggatctcactatcacaaatgaaaaaacactattttttttaactaattcatcttcagtagagaaatcactcaacataacagacaataaatcataaagagtagaatctttcgtaacaacacaatcagctagccattgagagtttcgaactacaaaatatgcacctccattcacagattgattgacaaatttaagaaaactagtgttgtgacataacatcaataatgttaatttcatttttggcatcattaatttaaaaaatttattttataatttattatttaatttcagctgagatatttatattagtttttttatattttgtctatttgactttcatattaattaatttatatttagaaaacaagttgccaagcctttctctttatggaaaataagctataaagggtaagtttgataacttattctttctccatttatctagctgtatgaatctaatcttgtgtgcgttttctataatatttgatcagatttcttgagga

SEQ ID NO: 9207 - DNA, 594 bp, Cannabis sativa
agatttttgtgcaatagtttattacgaagaaggcaaattttgaggttttctcaagtttgattcaataattggaataaccccttttgtgttcataaatcgtttttgcttgaactggtgataatcttagttttgagtctgacctgattgcttgcaagtagactttatcgtgaatggtttgattgctgagtaaacattacttcagtaccgcttgggatcaaactcaactgggaatttattattttttccattgacgcatgtggtttgcttcaaacttgagattaataatttgccttatggtgtagataatggcgatcaaaattcgttacattttggaaatctattgatcattttaatatttatgttgttcttgttcctgaaacttataagtgcttaattaaaatatcttgacacgggatgcattatttaatctggttcatcacagaaataaatttatcgataacctgacatgatgagaaaggaaaggtaagaacggattgtcagttgtgaggattgagtttgttgaggttgaagagattagagttttttagtgtatgagatctcacgctaatctcaaggaagcatgaaaatattaga

SEQ ID NO: 9208 - DNA, 986 bp, Cannabis sativa
aatattttggttattacataagattaaccaaactgggaccattcttaggcccagttaagttaatggaatggctcacgacggagtcgggttacaactctgaatctggacgctagtccaatttacagacatgatatagccgaaccgtattgatccttgaaggacaatcaaccgagaagacgaaaggtccatcaaagtgtatttggataccttcatgggataatccaaaacgagtaactgaaaagacatcaagaagcatcataaatcttatgtggcatcctccagacatagggtcccactaagtcagaagtttgtctcctacgtcacaccaaggggtgcgcgcaccaccaaaaggaatatatttttgtccaacaccatattctctaacaattactgtacataatgaaatgcgcatgatacttgtcaccatcaaatatggtccccacacatacagacgatcgttatctcaaaaactaagccttacctaattggctcaaagtcaatataaattgtattttatcccatcagtgggcctagttgacacatttaaaccctaacgagtctgagtttacttataaacccgactcaaacctataaatagaacattacccattcatacaaatatggttcttaaactttggcaagaacacacttgtgtaaagtacttcatagccaaaaagcttcaataatcttgactcgtgtactaagactcattaacaccccaaccacgtaaaaattcttgttgccttgcctttaagttattcttttttaaggttaatttatttcttaaataatttttaaaaatctcggtaaacaaaaactgaacctaaaaacctcaaatacctagatctgaaagtcaaaataagttatgcatcttcgagctcatgggtttcttcagcgatagggaagatttacagtgtttcgtcataaataaggcagggttttggatctacgattaaagccgagcagatgagagagagagagagaga

SEQ ID NO: 9209 - DNA, 538 bp, Cannabis sativa
gccgccggagagactagcggtaagcgtgcgtcggaacttactcctgccgagaggcaagagattcagatgaagaaagccaagctaattaccatgctcgatgaggtatgttatgtaaaattaagaattggataattgaaaattcgttcggtaataccgaaattcaattgtgttgtctctaattttgatactttgaatggtttttaggtggaacaaagatacagacagtatcaccaccagatgcagatagtgatttcgtcgttcgaacaagccgccgggattgggtctgctagaacatacactgctctggcactccaaacaatctcgaagcaattcaggtgtcttaaagacgccataactggccaaattcgtgctgccaacaaaagcttaggcgaagaagattgcctcaatggagctggaaagattgaaggttcgagactcaagtatgtcgatcaccatctccggcaacagcgagctctgcaacaattgggaatgatccagcaaaatgcttggagaccccaaagaggcctgcctgagagat

SEQ ID NO: 9210 - DNA, 1074 bp, Cannabis sativa
taatactaataagctagaaagttctgatcaagctcatcattaatttcttgtggtggtccaagatagcctgcaagcttttccgtataccacacattcaatgggaaagaaacaaaaataagaatatgaattgggtgatgataagaaaggagattgatgtaacttattttatattcactatataaactttttttaccgaaagttaaacttaaactatacattcattctcatcatggcattatgtattgaaacatacatacaaagctgtttaattattcatgtttatcggttttcactggaattttagagtagtatatatgcgtttttcaatttagcgacatcttttgttgagtttccatttttgcaacactttggagctctccgttaattttataggaaaatttaacatttttatttcctagattattttattctgtcccgtaaaatatatattttattaattttttttttttttaaatataacagttagacaattgtatactttttattaaattttaatttttgtactattaaaaattaatattcttacctactaaattttgaccaatacaaaatttcgcccatttttattaaaaaaaaaattaattttaaaaattgtaatattcgattaattttaaaaaattaatacaaattataaaaaatctaatcaaaatattaaattaattaaaataatcccaatttacttaaaaatcaaaatttttcctaaaaaatatttttcaaatttcattttatttataattacgtgtcttaaaatcaaactaaaattattaaaaatctaataaactatgattttgcaaagaaaaataaagcttatttatatttataatctcatatcataaaaataaagaaaattaattaaaaaattcaataagaatataaaattcttttgaacaaaagttagaaatttttttatgtttacttaaaacaaatctagatttttagagaaaaaaaaaataggctcaaacttattcgcgtaaaatttagattttacaaaaatataatttttaatacacttttttatatctaaatcgattttttcaaaaaaaataaatatat

SEQ ID NO: 9211 - DNA, 734 bp, Cannabis sativa
ctctaaaatagactaacatacaatttacatcaaaaaaataatttattagtgacaaagtctatacaaatactctcattttacatcaaaacctaagtttattaaatttgagcattctcaatactcactttttagattttgtattgagatcataaatcatgcctaaggtgatcaatcttaaacatgtatatattaagcataaatatgaataaattcacaatcgagtaagatgaaataacaattagtattgactcatggaataaaatcagttaacatattcatcatattcctaaattagaaaatcaattcataatctatatgttcaaatccacaattaaactaaaaatagaaattaatataagaaaaataaaaaggtgaagaaagaaattggtggggaaattgatctgggtcgccacactcgctctagtcgtcttcctttttgcttctagggttctatttctgaatgaacgaccttcaaaatttgaaatctccctaaattgaaccaatttacaactcaaaatatcaaaaatacaaaattgtctctcgagtccgtacggacgttgtcgtcgtggccaccaatggcctcgctgcagcgacttaacaaaatagaattggggcattctgttaatgaactagccgcagccataattcaatcctcttcgtggtgatgaagggctcgttggccctaagtcccctcgccgcgacgacttaacaagttggaattcatgccattttac

SEQ ID NO: 9212 - DNA, 538 bp, Cannabis sativa
tgaagatgttatagatttcaggcaagcccttgtttaagaatcatgctgaaactatgataactttcaagcgtgatttcccaccctaaacttcatccagaagagttttttgccactagggctattcataaattaacgggcgagttttacacactatgaattttttacaatgtcttatgaaaaaggaaaggctaaaaatgcacaagagttcaaacgagaccatcccatttcatttcaaaaatttcaacaaacttaaactttaggaaatccactaaaatttttcgagaaggaattcaggcaaatctctccttcttaggagatttggctgaaaactcatttcatttgagaggttaccctaattttcaatgtcaagaaggaattcaagcatatcttttccttggggaatttggttgaaaacacatcctgttttagggtttgaatcaatgcaagttataataaaaatttaacatgcataagcaaagaaaataagcatagcacaatgtacattttttgggtcattcacaactaggcatagtacccc

SEQ ID NO: 9213 - DNA, 918 bp, Cannabis sativa
agagagagatactattaccactgctaccaataaggacaaggcatttaatctatattttagtgtatgagagagagaagcaaaagctaaagaaaaaacggctactttgaatgaaaaccaacaacaacagctgacaacaaacgtatttattcttttcttttactttgcttttatacgatgccgtttcgaaaagtaaccacttctttcttcctctgtccctgtgtcccacattgaaggacgtgaatcgattctttcttaaacattattaacctctcactttgtttaagtgctttgggaattagagtaatttgttatttatttattatggtttcttatatactatttaattaacttcctaatagtaaatatacattaaataataaatttgattattatagtgcttaaaaaacttgatggattaggaagtggcttaaaaagttgataaggtataaatcattttggagaaagaatagatgagtgacaaatgaaatttttttcttctttataaaatgacggaaagttagaagaatttggaataaagggcatacaacaattttgcatttcattttcaattcttgtccaaaatgtaagcaaaattggtataaggatttctggatttgtgctaattaaataattgtttaatgggattctaaaataaagataaaataacgaaccagataatgaagttttaaattcacaattttaactaccttataatacacttaaatttgacagatttaagaaacataagtgtttaacaattagaatttcaaattaaaactttatgacattagatatgtgcataattctctattataacattatttaattatttattagaaaaaactccattaatgtttaatttataatacaattcaaaattcatgttgtagaatgtatataaaataaaatatattaaat

SEQ ID NO: 9214 - DNA, 505 bp, Cannabis sativa
aattataattcaatttaacatatatatatttatatttacttaattactgttcttgcaaaaaaaaaaaccttaattactgaattttttttttttacaaaaggcgaatttcataaataaaattaatgtagtagtataatccactagtctcatcacattgatagaatttcttctaaccaagtaactcatcatctattaggaattctcaaaatgaaaatttataagaattagttcctagcaatgtggaaagagaatactatatatataaaatgaatggggtactctttttattgttaattgattttgagataaataatctcatgcaccttatcatgaattttaatatggtatgagagttatctccacctttaactttcatttgggacctttcgaccatgtgatctcttaaatgttgttcattataaccacacttttcaagttcaaacgtgaggagggcatcacgccctgagtcctaaattgttgtgaatatgtaatatccataagtggt

SEQ ID NO: 9215 - DNA, 1614 bp, Cannabis sativa
tttttttttttttttgcaatttttggattgccaatcaatttaaaatatgaaaaataatattttattttcattagaaaaataataggtattccctcaattaatattctgattgatctctatcacaaattttcctattttgttatgtgaacagctcatataagttggtgcatagccccactggcatattgaagtttttaaccttaaagagaaagagagaaaaaagagatgttgaaagtagttgcttcagaaaataaaagcaacgaatttaaattgggtcgagcggcgaattaatttgtttttttaagatgttcgcgatattgacgagaactgtgtaacaaatttaaatttaggttgagtcgcggattaggtcgctccctttaagatatttgcgacattggccaaaactgtgcaagtagactatcaactttaaaaacactgtattgaagctctattgcatgataaaaaactgtcgaaataccacacccaataattgtactactactcataatacatatgtaatttaaaattataatgaagtattcttatcccatatgggactcaatacactcacatttcacttcttcttatgtaaaattttgctaagttccaaagtgaatgctcatacgccaaaatgcgtaaagaacggcaagcaaaaacattatagcactaagagcaaccctttcctttctcactctggattaaaaattttattgtggatacatatgtataatgtatatattattataaagtgtgatacaaatttaagagacaaattacgttatgggtatcaaaaagatattaaattgtcatgaaaaataatgtgtagataccataagttaatttataatttcgaaaggctaaattataaatactcaaaactcattctaagatgagtctataaataagtagtggtctctaagaaacactagggtttatgattctctcattccctatcagagaaaatagttagtgcttttgctcatcttattatatcatattcttttttttatctagcaaaggttctataaaatatgatttagaactttttatattaaatcacttttgaaatatatttaaatctgtttttcttttttgatctagcaaaggttttataaaatatgatttagagttttttatattgaagcacttttgaaatatgtttagatatgttcttcttttttatctagcaaaggctctataaaatatgatttatagttttttatattaaaatacttttgaaatatgtttagatctattattatttgtatttcttaattatttaaaaaattctaatactaaacataggaaaatcaaaattaagcaattgataaatagctgtaacttgtaaattaaatactttcacccatattttacattaatgaataatagaataaaatacttttttcttttttataataattaatatcttttagttttaggtttttaatcattaaagtaaaaaaagagggtgagatgtatttaatttgtatctatttatcaattatcctttattgtatcgctcatttcatgataaaattgaataaaatataaagaaaggatcatatattactgtaaaatttatatttcgacaggtattattaacaaatcgtatat

SEQ ID NO: 9216 - DNA, 642 bp, Cannabis sativa
tcaagcttaagagccatgaacccttccttgcctttcctcttacgttttaaatagtgcattatttcaaaagcaaccatcacattatccgagatgagatgccccagaatgaatgcactttgagtattggagatgatgtgatcaataagctccctcagacgatttacaagagctttagagacaatcttataaaggacattgcaaagagaaatcggtctaaggtcacccataaccacaaaattcttcttttgggggattaacacaaggtgggtgtcatttaggccatcaggcaaagctctagagtcgaaaaaaatccttaactaatttattaacatcagaaccaacaacttcccaatgatgttaaaagaagccaggaccgatcccatcaggcccaagagccttgtcaggatgcttagagaacacaacggacttaacttcttcatcgaggatcaatttcaatagtgcatcattgtggttagcactaactaaaacttttatgtcgtcaacaataagctgcgaggacgtattggacgcttgaaagagatggagaaaataatcattaataatattgtcaagaccagtcccccatttcttccaatcacaattaacatcatgcaattggtgaatttagttcgatcttttttg

SEQ ID NO: 9217 - DNA, 539 bp, Cannabis sativa
ttataaataaagtaagttaatatatgaatataaaaagaacaacatgattagtaatttccacgtttattctaaaatgccctaattgtaaggttttttgtttttttgtttttttttttttttgaagggaccacaattgtaagtttagactgtgaaaaagtaaaaaaatatatattttttttaaaaaaaaaagtgaagagtggtcaagaatctagagagatttactatttataggacttgatattctttctctttggatatatgaataatattattgtgtgaaaatattaattttgtcaaaagaaagtcaaaagggaagggtgaacaaatcaatctactcacaactaccttactcattatctctatttgtgatggaatttttaccaaacaccacatatgtatccatgcatatgaaagcaactctcttaattgagagaatagtaatttacaatattataatttaatttttaattacagataaatatttaaatttaattttttatagtgataattaatacctaattatatttctagaacttctg

SEQ ID NO: 9218 - DNA, 723 bp, Cannabis sativa
aaaaagaagtgattacaaaaatgattatataagactgttacatcattaaatatacttaaatcaaatgaaaaacctttatacaataaatgaaagaatattattttgaccattcttatttaatattcgaaggggtgcgattatataatcacacattgaccgttcatattcctgtaactatgtactcccaagttcattcgagttactcgtatagtgggtcttcaaactttttgggagcatatgaacctctcgaggttttgggtgcataaatctatcgaggtcataaaatattatgcatgatgatactgattgcgcatcatcagtcatccatgtactgacaatatagaacttgcgagttattgtgtacactagtcattcagaccaactattgtaaagacgcaatatttacataaggtgcgggagaaaaacaccgggtcatctcatataatcaatatatattgtcactgtgctaacctttttttatggttaattagcttttatcctcttttactatgtacgacatagtatgcgattagaccctgtctgtctcaataatactttctcgcatattttttattaggcgatcggataccctgtcaagattcatattcttaacatgtcatccattttctatatgaaactgggtccatatattagttttttgaacaagggtccatatattagttaaatacacaagactacacgctgttaaaaattcatgatatt

SEQ ID NO: 9219 - DNA, 894 bp, Cannabis sativa
gctccatttgacaaaagcaagaacaatccaactactttagcaactcgaaaatatagtgttgaaagcaagaaagagatcttaaaatctgtcttctgcagagagtggttgcttatgaaaagaagctacttcttttacattttcagactcatcaaagtaagtggctactacttatcaaaattcaatcctattttttcatgagtttaatttatgtcctttctttttcttttttaagattttgatcgtggagctcgtagttttagctgttttcttgagaactgaaatacatcatggcacaatagtagatggaatgatctactctggtgctctattcttcattgcggtcttgtttgtgttcaatggaatgtccgagattcttatgacaatccaaaaacttccagtcttttacaagcaaagggacctaaactattaccctacatgggcctatgctcttttcacttggattcttaagatccctattgcatgcttagaagtctcgatctaggtttccattacatactacctaattggacttgatccttgtgttgcaaggtaacatgatttaatttgaaatattatgaagaatcttatttttgaacctcttcaatagttgggttgagttctattttgtaaactttttcatcttctttaagcaaggtcttcttctgattttcgtgaaccaaacgggctctgcattgttccaagctattgtagctaaatctcggaatttaattgtagctaacacttttggctcatttgtattgctcatccttttcgatttgggaggctttctgtaatcaaagagtaaatgaactttcttttctttcttttttgtcttgtatgtatttatgttgttttataatgccttctcagtctgactgttatagtgtttcacta

SEQ ID NO: 9220 - DNA, 575 bp, Cannabis sativa
ggtaggagaacgaatgactttcaatttctaaaacaaaaggtacttaatcgtattgagggctggaaagctaagtgtttgtcgcaagcggctcgaaccaccttggtaagttctgtacttcaaagtattcctacttattttatgtcgactactatggttccgaaattgacttgcaaggaattggataagctagtggcaaggttttggtgggtgggatcgcactcggataaggatcgttattgtgctttaaaatctccccaaccgaagagtagtgggggacttggtttcaggagattccatgacatgaacatggctttagtatccaaactatgctggatggttctccaaaagaaagacaaagtatgggtgaagacgctcttggaaaaatattgttatacagtggatgcttggatggtggaaaagaatgatcaagactcaattgtttggaaaagcattctcgagactagagaagtttgtctgaaaggggctgggatagtcataggaaatggagatacagacttatggactaaaccatgggtcccgtggaagactacacaagagatcaaggatagtttcag

SEQ ID NO: 9221 - DNA, 642 bp, Cannabis sativa
tcctccttgggaaagtgaaccccataaagggtatttttagaatggcagaagggtagtatgaccaaggttggcctagcctgaatggtggatcatgacgctgggggtgggcccctatttcagaagtggctgccttaggcatttgccttttcctgccaagggcactgtcgcatgctgctttagaagaaatggtcctttttatcgcaaacctaatgtacttactagaaattagttcaaagcaaaatgggtcaacatgacatcggaccccaagactttcactccccatgatagagaccgtaggcacagtgacaatattctgagagtatgcaacttgcaccctcaaaactccctaagaactctacaacaagtaaatgatgaagaaaacttactgttgttaagaggaaatgaggtggatgatccgggtgttgcgtcttggccgacggaatgagtgcctgagaatggagttgctagagagtactcgtaagacaaaggaagagctggaaccaaatgctagaactctggtacgacaagcagtaaaaaatgtaaaacgtgaaatggttgttgaaaatatttatttggtactaggaaggggtgccttccacgagaagcgaacagttctaattgttcgcccaaggtacgcctgat

SEQ ID NO: 9222 - DNA, 824 bp, Cannabis sativa
ccccccccaatttaaattcttaacccctattatatatacaatttaacttgaaatatatatcgtaactaattttaatatatatttttctaaattttttaacgcacgattgccccccccccctcctttttgcttctatatgtgggtccacccctgtctacaataacatttaccaatactctcaattctcatcaagaaactaattaggtggtgaaatagaatcaaaataagaatagtaaaatagtaatattagaatatggtgtttaggtttcaagacaattaaaaatgttgtttgtttatttgtttttcaaaaggaaaatctaatagaagaagaacaagtcaatttcagcgagatgacgagaagcataggcaattccccgttccacctagcagatgccttgacaagatatcttagctaatcaatgaacgaaaaggctaacatctctattgaataaaaaaaaagggtattgaggatgaatttttttcttggtctcaaaattggtattggtagtggttggtgttgtttcaatttaatcatgtcagatatataactcacttagacccacaccttctgaaatatagaaggtgaaacattaattgtgaattggaaattttccttgtagcatttattaacacaataaatttacatgttgaccaacttttaaacaaatttgagttatgttattatgtgtatacgttttttgtgtaaaaagttgtgtctataatagtttggtacataatttttttttaaactcaagtttggtacatatttatatacgagccttgttatttagtactagtggtacttagcacatttagacatagat

SEQ ID NO: 9223 - DNA, 657 bp, Cannabis sativa
ttataaaaattaaatttaaatttactattgttttataaatttttcttatttaatagtcatatatattatatacgatatgagggtcacgtcaagaaatttattattttataaaaaattttggcttacattgtccatgtatacaattaaatgtgcaaaataacaaaattaatgggtctttttacacttttaatgtgttttgctgtgcatatgacatagtgatcttacattgacaactttatcccaatgaaaaattattattttaaataaataaattcaaacagtcttattataagtagacatttatctgtctttcttatatatctttatacaactttataaagtaaaaataatttaacgtgcgggaaacattccgaagtcgtaccgagcggtatggaatccgtggcctatatatatatatttgcaatctgtgctccaatataataaacacacaaaaagaaattgagagagtaataatgtctccttaccttcaacatcacactcacgaccatcctttgatacaaattgatgattttggaagcaggtacaccagtgcagttcaaatctactgcagcctatgtgagcttatgatcgatcgcaatcaaacatgctatgattgcagctcctcttgtctctattccctccataaagtatgtgctg

SEQ ID NO: 9224 - DNA, 741 bp, Cannabis sativa
agtatttttgtaagtttcccatcttaagcacaggtctagtccgcttatgcccaaagtcgggcctgtattagagttggctttaaagagctcctctattgtagcgagtcatcttttgtataatagagcttatcttttaaattttatttcttattttagctaaaaaatatgttttataaaaaatataattaaagatatatatatcgttaaaaaaattattaaatttataccgtttacaaactcaaaattcaaaatttattagtagttttgttaaatatccttaataaatatttagtggttctatgataagagtttggcaacacaacctagcaatgacaatataatatgtcgtttgtggtgccctatatgttggacacacatcctctaaacctgtcccacaacatattatataattaatgattaaaaaacaagtggttttattatatacataaacttctattcctaattacataatttatattattaaaatatatattaatcacaattaatgtatattttaatttgagatagtacatatatataattaattacatgtcttgaaaattttttggtgtgtctctagttggtctttgtcttggtcttgcccttaattaatctcttaattaaaaaagtttaattctagagtaacattataatatcatccattaacatgtgttagagtattgttattaagtatcagtgctgcttagcactattattatttaaaggtaggattttgtaaat

SEQ ID NO: 9225 - DNA, 1077 bp, Cannabis sativa
tttctagctctctacaaatattatactaaagaagcaaggatagtcgaaaaataaatggtttgtgctttcagtttctagcccacgcagttgaaaaatttgactctaatatgtatgaaattgagtttattaagtgctccaccttcttattctggaaaccctcttataaataatatctcacaatcctttgccggtagtatattggtaaggaaaagtgcttctttagaaacatatatgtggcctgcaaaataccactacaatagatggtaaattgacttgaaatcgctattacaaaaaaggagagcaccatttgccgcaaagctcaaatgattcaatttcaagtctctacatctttcatgaataatgaattcttctagatagctcgatgagatattggcttcaaagaaattaaccatatatttctccattaaacatgtggagtcttacggctcaagataagcttaataaaggcactttagaattggaaaacatctagcaattctttaaggaactcacatatgcttttcgaatgtcaagcttaatcatacatgttgcacgaaaattctttcttccatggcggactagctagatacaaataattaagaaaatatttttttaaaattattagtttatggttttgaattattattaagaatttttatttatttattaattttttttatattttttataccagcaaccaacggttgcaatccccattcaaaatggggcaaaccaagatcacacttattatcgatatggattgttattaattagctcaacagaattaacaatttttttttcttttaaatttaaaaatgaaacttttgtattttcaaaataactaaagtctgttatatatatatattatattattattatatgtatgtataataatttaattaaatggttaattgagttttaaatatactaaaacaaaatatttactactatatatatttataaataaggtcacaattttctgagtaaataatattatataggaggaaaaaatatgtgggaacaaataagaagaaagacgaccctgaaatattttgcggttgtatgattattcaaaaa

SEQ ID NO: 9226 - DNA, 555 bp, Cannabis sativa
aaacacctaacatatttaactgtcattgcaattgagatgaccaatgtggtttaggactccacctttgatataagttgatgttaaacttggtgtggttgagaggttatgttataaattataatgtaggaaatacttgtaaaatatacatatatgtgtatatataggaaaattcttcctttggggtattttctgtctttggtatatagagatattataaatcaattttgtatactatggtggtgtacatcatagttatactagtttttgggagtgtgtgacaaattatttcgaattttatttccaacaacactgtaaattattccgaattttctgaaaatgagcaaaatgcgatttacaactacaatatacaatatcatataaaaaaaaattgagatataatttagatagtatgagaaatttgggataaaatttgggatatatatatgttgtataaaaactttaggatgtaatcaagttttgagagcttgatgggtagtgtttggttactgagaaaagctatttgtagcctttgtttaatgcttcagctacattcca

SEQ ID NO: 9227 - DNA, 812 bp, Cannabis sativa
cctggaccttagttccgttttctgcattatataacattgttagttgcaagtggatttttaaagtgaaatataatgctgacaggcacttccagcgatacaaagcacgtctagttgctaaaggatttcaccaaagacacggtctagatttcggagacacatttagtccggttgtcaaagcaaccactgtgcgtgttgtactcactcttgttgttgcttatgactgggaggttagacaagttgacatcaataacgccttcctcaatggtactcttgatgaagatgtgtatatggttcaacctccgggatttgaagatccccaaaaaccccatcatgtgtgcaagcttcacaagtcaatctatgggttaaaacaaactccgagggcttggtatgatcaattaaaggctactcttgttcactggggttttgaaaactctaaagctgactcctcattcttcatgatgaagcaaccgaagcacaccatcttggtacttgtttatgtcgacgacatagtggtaacagggaataacaaagctgaacttcatgccttcatagcaagactcaaccagacctttctctaaataatcttggacctctccaatacttcctaggcattgaagtgtttagagataacactggaatttacttgtctcaaggcaagtatattgctgaattactacagaaagtgaagatggaaaatactaagcccagtgttacacccatgacagcaggcaaggctatatcgatatcagatggaaccccactcactcagccaactgtttacagaagtgtgataggagctcttcaatatctca

SEQ ID NO: 9228 - DNA, 1747 bp, Cannabis sativa
  modified_base (381)..(382): a, c, t, g, unknown or other
taaataaacaaaaatttacattttcttttcctttaaaaacaaaaatttgcatttcctaatattctctctatatgtttttaagattagtcttctaataacaaactgtattaatgaaaaaaatggtaaaaaagttgtactattttaaaataaaaattttcctctaaaaaaacctcctaaatacgttacaaaatcaatatatatatataaaggaaagctttagaagagttgaggtggctttctatattttgtttagtctaacttatctattttatgagaattttatattttttttcttagaaaaatatacacatattaaattctcaaatgtgacttttcatttttataacttctacatataatattcattattattattattannaacattaatgataatgtctcttcattttcataacttacactatataaattatatataatgttgctatagaaaatataatataattgtttatagattgcttatatttttttttctctcttttcaattcttttttatctttaaacaatataaaacttaagattgaatatgttgaaggctatgaagaacttgaagatgagaatcatatttgatgatcttgaaatttgtagtcacacggacgataatgataaaggtaaagatgattaaaagcttcattttttggattccttcatgtgtttattttttttatttctatttatatttttttactttttttttttttttttgaatgtatgttagcttggttttgccattcttcctatatcttttatataaattttatttttgtgtcgtataggtttagaatttttagtagttgtttcttaacaaaagtgatgaagtgaggtatgtaaaattttttacatttctataatattaaatatttcttttattttaactttttttattcatttatgttttcaattttatttcaatcttattattaattactattttactttctttaatttttttcattatgtttcacttttagttgtgagttttatatatttattttaatttaatttttttattagtagtaatttaatataaaaatcatatattttgtgatacttagttctaatcctaatattttaataaaaattaaaaaatagtttaatcataattttttttgttcattctttagttttgactaataaaatatatgcttctgtttatattaatatgcatgtaatgataaattttttaagaatatgaaaaatttattaatcattatatcttaatcacaaataaattattaagacaatcttaatattgatgcttgaatgttataataaatcttcatatttttaattattaattaaaaatgtaagttttatattaattaaattgataatattatgtagaaatatgagtaatcattataccttgaaataaataatttacaaacattacccttattctaaatgtttgtatatttcattattgaagaatttattaaattttaataacattatatatatgtcaattgtatgtgtagaagatgtatcatgtagtccataagcgtttttttattgatccttctactcttttttgtcctaatttgattaactttttattttatttttctcatttaatttgtgtatatttttttttaatttattaaagcagatggatgtaaccattattttattttattatcatatatatgacttatatatatgtactaaaatagtagttataagtattagttttattgttattaagcctaaaattcaatatgataaa

SEQ ID NO: 9229 - DNA, 1196 bp, Cannabis sativa
agaagcactccataacataacacacataatatgtgtttagtattagaatttcaaatcctcaatgccctgggatgtactaggacgagcgtacaaataacgctgacaattaattcctgacaaatatttttgaattagctgaattttttcatattaaatttaacaagatttatgtaaacctcttatttattattttaaataatagaaacaataataaatttattatcaaatttattataaacttattataaatttcactagagtagatttatacatcaaaatacgttttttgaaatttactgttgttttactcttaacaatttttaatttattaggttgaccataaaagttaaagaactatcgatttcattgcattatgttgtctttccattacttagaagtcaaaggacaaacgtttctccatccgtatgcttaaggtattttattccttaagtttttttcaatatttttttatctttctactaaattttttttatcaaatatgtaaaatataatgaaaaactccataacataacatagaatatgtgtttagttttagagtttcaaatccttaatgtccttggatgtacgacgacgagcgtacaaacaacgttgatgattgattcctgacaaacatttttgaattagctgaattttttcatattaaatttaacaagatttttgtaaatctcttatttattattttagataatagaaacaataataaaattattataaatttattatcaagtttattataaacttattataaattttactagagtagttttatacatcaaaatactttttttgaaatttactgttattttactcttaacaatttttaatttcttaggttgaccaaaaaagtgaaagaactattgatttcattgcattatgttgtctttctattgcttagaagtcaatggacaaacgtttctccattcgtatcttaaggtattttattgattaattacttaagtttttttcaatattttttatcattctactaaaataattttatcaaataggtaaaatataaagaagcactccataacataacacaaaatatgtgtttagtattggaatttcaaatcctcaatgcccttggatgtactacgacgagcgtacaaacaacgctgccaattgattcttgacaaatatttttgaattaactgaattttttcatattaaattta

SEQ ID NO: 9230 - DNA, 851 bp, Cannabis sativa
atatattatcatttaatataatgtatattatgtactacacactacaacactcgtatatataataattatatatgtgtgtatatgtttcatcatataagggtttaaatattgtggtcactagctaataaggaaactgagtaactaagatattgtttgattatatatatgtatgtatatatatattaattaatcgtgtgtaagccttggtcaaagaagattagttaagtgaaggagtatttatataagtttatatatatatatatataattgtgtgtatatatgaaggtgtggtgtagtgtggccgacaaaagggaaacaaggattgagactaaactcccaaaataatgaaaagaaaagggtcccccattacttactactaccctatatatagtttaaagggaataagagagtaataaaacaaaagccaaagctataatataattaagggaataattaattaatggactattatttttgtccttatttcaatatttgagagattattataacacattttttatataattaatgtttttcagtattatatagttataggtaattaagtattaattccacattaattttaattatttttgaataatttaagatataatagtcaatgcttagtcacctatgcaaattgatgtttgattattataattatttacattaacatatttattatttgttttaatcaattataaggtattatgtattagagtatatatttttgattaatatacttgtttaatttgttagccttttcaggaaatgacatgtgcttgtataaaaaaaagacaaacaagaaaagagatttatgattacataagtacgtacaatcaatcaaaggg

SEQ ID NO: 9231 - DNA, 628 bp, Cannabis sativa
ataaggattcaatattcttctagagatctcgtactatatatattttgcctattgtgaagagtcgatatatttgtcaactaaacttatcaaatatttataaatctttttaattaaagtttttcttcagtttatttaataaagttgatgaattaactaataaatagttaattatataatgctataaattaaaacaagaattcatcagaatatttgttttctctccccatcatcattcatgccatggctacaaaaaaccacatatacatgcgcatgcatgctagctatatatataactctccaatcccatttttttaaaaaaagaaaaaacttctattaattgtttattcttagattaaataaatattttcaattgatatatacttctatcctctaccaataatagcgtagaaaatatcagacaattatatattttcattgcgtagtaactttgttgagtatattcgttttgaacattcagtaatttaactcttcatatgtatttgttctctcgagtcactttcattgcgttagataatttttcctttcttccttttttttcttcttacgaaagatatatgcgttagataattttaaccagagacaatttggtgtgtacttgaaattgact

SEQ ID NO: 9232 - DNA, 606 bp, Cannabis sativa
ctatcaaaatatatattttggtaggaaaaaatgaaatagctaaaaatatatatatacattatttgtttatcttttttatttataaaacaatttttcttcattattagagcaaatttaatgataaaaatattaaaagaaattctaaattacccacatgaattattttgctttctcacataactaaattcagatggaataattttcttatcttgtcctaattactcgatcccttgctagtaaatccttgatatgatagaaataataacactaatatcagcttccaaagagagaatgaatgaatggaacaacaatcccaggtgcttaatttccattttctctctgaaataatactatgtatatatatatgtacatatatagtgttaaagaaagttgtgtatatacatgtgcatgtactaattgtaataattaatagtaattaagttatccaatatatatataggacaccattattcttatcgttacgcatatacgtttatttttattcaattatagaataataaaaaagaaaacaaattaatattaacttaattacaagagcggagcatccaaagataatatgtatttatgcatttcagaatcctatgc

SEQ ID NO: 9233 - DNA, 522 bp, Cannabis sativa
tcattaaagccaaacatacaaggactcaaaagattaaattttcttcaataaaacatgatatggccaggccaacctatagccaatctcagggctgcagtaagaaccagaaacctggtttcaagactcttcttcctgaacacaccagcttcagtctaggttataattggctggagtacttcaaacttctattacagacctaacatggtccaaaatctggtagcttatcatctatgaaaaggcaccagtctagagtctacataccttcacaccttcaacttgtcgtattgtttgtttgacaggatccaagtgcttcgatgggatcgcagcatccactagttccaagacgctaaaaacatattaaacaaaaatatgaaatatgaaaatacaaataaacacattaaaaatactgtaaccttgctatcactagtgtgatggacccagaagaaaatgtttcacaaagcaagagtgtacaaaaggcggatccgtggaaattaagagattggggactaaatatacacctct

SEQ ID NO: 9234 - DNA, 1306 bp, Cannabis sativa
gcatcggcaataatatacaggataactaagctagaacaatacaaaaaactcatgtgaaagcagataatatatcattaagaataaagcataaataaaaatcaagcatagagaaattattgagtttgaggaccacactctgataatttgtctcaaattgcaccctgcttaaagccaaacaacttgcattagacttcatgattcgatcaccaagtttttctttcttctattttttttctttaaccttcgtattgttatcgcaattgtgagattattgtttattattcctatggagtaaatttttatttagaaatctgaataatagattcaatagtagttgtaagtttaatctttgaataccgatagagtagaaaaattgcacaaaaaaatattaaatttaatgcatcaaataattggttaatgaaaaatgtaattaagagatatgcctatgctagatttggcacaaaattataattttaacacatgttaaaaaattaattttaaaaatactaaattatagcactatattactaatttgacactatttcaaaaatgtttttcccttttcatacaatggaacaataacacatttagagcttgtttgatatactatattgtataaaataataataatattatgtttgaataaagcaatgtattgtattaattattacgaaatttttaatgcaattagcttgtatcataatatttataaaggattcgaggtcaactccaatctccgactcgttttgggaccgagacccgaattcaggaccgaagacgcgaacgcgaacctagcctaccaaacaagcccttaaaaatatgagctcgtttgatacgctgtattatattgtattagtatttgtattatttaatacaacactacatttagtattgacttgtattaatagattgtgtaaaattataatatattttcaatacactcgacccaaacaccgactacgtgtcgagtccaggtgtggatccaggtctaggtctagatgcaggtccgggtcctaggccaaagtcagggtcccaggtcagggttcgggtccgagttgggttccaaattcctagttcgaattctttgtaaatattataatacaagctaatacgaactatttgttatgtattaaaaatacaacttacattgtattaaaaattttggtcgtaataattaatacaatacattgttttattcaaacacaatattatttattatttaatacattactatccttatgcggcttagtaaacgaaccttgtgcaaaattatatacaatctaagcttcttcctcgtcgcttaatg

SEQ ID NO: 9235 - DNA, 752 bp, Cannabis sativa
gcgagatctggtgttgttcttactcttgccaagcggagagaacgaagacggagacgaagagaactctaccaacgaaggagacgaaagccatggctagttgtatctgtacggacgaggaagtcaaaacgacaccccgttttgagattcggaaaaattcaaatttagagaaggtgagagagagaagagagagaaaagggttcgtttcgttttcggtccgtgtgtgagtctatttacgggcaagcttaagagagagaaaacagtggagcagacaacggaaacggcgtcgtaaatcgagataaaagaagagcatggtctaacgagtccaaacactcccttagatgtccttctactcgcgtatacacgctcgttttctacaatcgcaaccgtacacgtataaggaaccaatcagatcttttggttacgcaggtcgggagtcatcggtcgatgacgtggccaaataatgaagcgagtagtgtgtatagatgtaggggagagtagagagaattgtgttttgtgggattttgttgatttacgtttgtacccttcttctttgtctttttgcttggtgttgttttgttcttttttgttttcgtagctctagctcacctcccattattgattattatttattttcattattactatgtatttatctcgtcttccaagaagggtttgaactttgaatcacataactttattaattggcatcagctttcttcttctaattatacttttccttctcagatgttctc

SEQ ID NO: 9236 - DNA, 712 bp, Cannabis sativa
gttgttgttgttgttcttgttagtgctgtaaattatcgaattgggttgtgtcttctacttttttctaggaatcgaaatagttgtagagattgattgatttgaatttttgaagaacagaagtagatttgaagaaatggggttggaattggtcttcatcaaaatatgaagggtttttacgataatggttttgttcttgtgatctgtaagagtagaacttgatggttttgagtctttaaaaaatagagagagatctgacgaatttaggatgaagatgatgttatcgatctagtttagggcaatttggggaaatcaggaggtgacctttattttggccaatcgccactggaggtggctcatcggtgtcaagccgagagtgataagagcgagagagacaggtcgaaggagagagtggagatattaaagttttttgttcaattcaaaaaaagaagaagaaaagaaaaagaaaaaggaaaaggaaaagggaaaaagaaaaaagaagatttttttttttataatctatttatttttataatattttaataatcaacgttatgtggaccacgaaattttttccatgtatacacatttatgtacacgtccattgtatgacttaattgagatttttagacggaagtgtaattagcaaaacgacgaaacctgggttcagtaagttttaccgtcaaaaattcaatttttatagttaaatattaaa

SEQ ID NO: 9237 - DNA, 530 bp, Cannabis sativa
cgtgatgtggcatgttcatataggcaagagtgataccactttgagtacaacatgtctataagaggacaaagtcaccatgcacaacgtaccggttgacgaagagtccaaatactcaagcaggacaaagagacaacaaaatggccaactagggggatctggtcggaccacccttggctggccatagtgaagcataggtcggtcagcttccaacaaatggtaggccagccagcttctcttctggcaaccatttttggtgtctctccagctttcaacctggacaaacactctcaactacgaattgacttcaacatctcactaaaataagggttcaacttcatatacctacctattctttaggaattgttaatgtgttattttcttatatatttaatatgtaataaataggtgatgtctcctattttaagggatatcaatctactttggcttagatctttcgtaagctctctcctatataaagagcactaggctaaacctaaagttctaatttctcattcctaagctcttgagtt

SEQ ID NO: 9238 - DNA, 766 bp, Cannabis sativa
gattaatggtgagcccaaaacaagcatgcttgctacgaaacactcgacttcaagaaattctaaattcataatataaaatggtttgtgaagcctaaatttatctacgatgacaatcacataaaaaccttaatcacatcctgtaatagaacatccaaaacttataacagcaaacctagaaaacatagttcagagatgaagaaaccacacagctggaatcaaaagcacatatgtcagtgtaactgtcgctcaatatttgtgcccttccaccaccatacacttgacacatggatgtaccaaactcatagacggaagcccccttccacgatccggtaacacctaaaaattcataattttatccctcaacctccacatgtccatattgaaagagtgaagtaagattccaccatacacaacattctagaaagcttaggagtaaatattatccacgtttccggtagtggacacgtggaatcgaagtgagaatccaaggctcattagtaggtccctcaacaatgataaactgggccaaacccaaatggaaaagtccttctaggaacatatcccagctccgcgaccatagagccttctcccattggaaaatcattcccagaagcaagtttggtaccatgagaccaaaagagtgagacatattgttcctagaagacccttttagtttcccttttattcctacacacaaataaggaaataagaaatgccagagctcgacaaagcatcatatcatattaaatggggaagtttcctgaaa

SEQ ID NO: 9239 - DNA, 947 bp, Cannabis sativa
agatttccactcatttttctatgattttggtgagatttattcaattttttccattcttttttctctcacaccaaacatccattttctttgtttttcctttctcttcacttttctctccaaaactttctttcctctcacgttttcccctttaccaaacaatgatgaattgagcagttcaaacaatggagtctctcacactcaagttcttgaagctttctctttctttgagtgactaaagatattacaacacattctaactatattaacaataaaagtagaacagttaagttagtttattccagtaattaacacttttcaacacataggaactgatcatcatagttttccctttctttctttctgtcttttgggatttctacaggtacttatctctacgactagacggtcgagttcgtgggagtggcgtcggttacccaccttggaatgcttttgtagcacagttacctccagtgaaaggattatggtcaggtctccttgatggaatggatggaagagtcctttgacaaaaaatatgttcttattctttttggtgtttacacaggttagttctctatgcttttcgattaagttaaaccatgtaatcattggttgggggaacaccctttatagcaaattctctcctattatcttcttcaatttctgttttgataatttgtgcagaatattcaagcaaagcagagatttttggctcacatacacacctttatgtatacatggttttcaccaatttggccaataagagggctcttattatccatccttacatttgattctacataccttgacaagttactgttattcagcttcatagtcaatacattttcaatatagataaatacagcttactaatcttgtttggtgtacaatgtatctctagcagcataaacctcaagaaagatatgatcatttttgtatgttttgttaat

SEQ ID NO: 9240 - DNA, 827 bp, Cannabis sativa
aagtttgatatctttctctatctatactacctttcttatagaaaattggtaaattagtgattagtattttttttttatgttatattattattaatgtaattaagtattattataacttaaaaaaataatttttaaagaatattactaactaatcgtgatgtattacttataaaaaatattaaacactagtgatatttaataacaacactccttgttataatattattagtataaatatcgagtcttgtatatttcactttaataattttcacaaaatatatcaataattattcacaacacgacaagatttcgttgctattaacagtatacctaaggcactattacaatatatattgcaaatagtaagtaatttttataataattattaaattaaaataaatatactccaaacttaattattatttagcagaacagaaacagttacctatgtataatatttttttttaataatatcttaatacatattttaacactttttattaaaaaaaaataatatataataggataaataatgtcatagttcataagtatttaaattttgaatttataagtgatataaatttaatatttatttttaatagtataaataataaatatttgtaaaattgtaatttttctctaatttcgtcaataagtactgataaaattagagaaaaatactgttttataaatcggttaaaattaaacattaaatttatacggattataaatttaaaactttagttatttacatattctttacctcataagttatataaatttaatattgagtgaaaataactaagctatccctaaaaaggaaaata

SEQ ID NO: 9241 - DNA, 530 bp, Cannabis sativa
taattaagtatatgatttttttaaggtatatcgttagttaatcgtaagataatatgtctagaagtactatagacacctctggtgtccaataacaatactcaaaacaaaatcttattacatccaatcttgaacaagtatgtatatattgttgggattcgacaaactcaattcttgcaccaactcaacacactccttaaatgttcaaggtccaaactaacttatatattcaatcaaacaattcacaatctcagtttcacacatacatattcaaattcaatctttaaacataaactaaattgaccaaccttgaaagatttaatttgcatacaaaccaattaggattaacaattcaaacattttaggaaccacttgcttaagttagttagggttgttaggattgtttgttatgttaatcagtttgttaaatactggagccaattcagttgtaagttagttatgcaactaacaattcttgatcatttagggctatataagctcagcccttctttgtaaaatgatgcagagaattc

SEQ ID NO: 9242 - DNA, 569 bp, Cannabis sativa
ttggttcaattataacctgtccttgtttgataacttttgtccactaatatcagagttatttatctcttggattggaagacatcatgaatatacaagatgagattccatgcttttactttgaagtttttagatatgtttattttatttatgggccttttttttttttttaatgtaattgaacagaacaaagaaagagacatgttgtctgctacaactttccatagttgccactctgtcattattaaagtttaagcttttaatagtaatgatttcagcatatatgattttgttgtagtaaaggtaaaaggttgctctttcttttttgtttttttattaaattcaacattgaaattattttgaacattacaagagcaatcttcattttagccttaagaagacactaaaatcactcttaattaagttttccactcttgttcaactgccacaagattcttatggacaagtttaagcagttgacaagttggtttgacattgaatgataaaatgtcaaaactaaatactaaaagtcattaggtatcataaacaatagtttctccaaaacaagaaga

SEQ ID NO: 9243 - DNA, 821 bp, Cannabis sativa
ataactttaatttttggaactaggtatttattgggttgacatttaacaactaaacaacctcttgttttcacactatataaataaagaactttgataaatacatacaaaaaaaagtatagaattttctcatttaatttgtaaatgtatttcaataataatttgatagtgtaaattataagatgatgaaaatacattaccctttcaaaaaaaaaaaaaaaaaatacaccctttcgaaaattattattattagcattaatttgataggttggaactagctagtgtagaagaacagcacaacaaattacttgtagaaagtagagattattaattaatggatatacatcactgtttaattaattaactcataataatagaattgaagaaagtaaaaaatgtaaaatagagtctatccatccctttttaatacacatcattttcggtctacaaaacaaaaaaagttaggattttaagtgcagagtgattttttaattaactagagttgtacatatatacggcggcctgatccgatctgatctatataaaaatatgagtcgtgctgttagtctgctctgaatattagtgggtcaaaaataaataatgagctcttatattaataaaaaaatatggtattttcaaaatcactaaaaaaatatacaaatttataaaagaaaactaggtgggccttacgcacgagcatagcctatctatgcccaaagttatcttgaggggatattagagagtctcacattgctaatgtatagaataataatagaatatatcctcacattatcaattagttttaagatgaacctattaacctt

SEQ ID NO: 9244 - DNA, 572 bp, Cannabis sativa
ttttttccgataactatattataatttatgtggcatgtagattcttggtggcatatgggcagataaaattggtgggaagctagtattaggtttcggagttgtctggtggtcaattgcaacgattttgacgcctattgctgcaaaaattggacttccttgtttgcttgtcatgcgtgcctttatggggattggcgaggtaggattttttttacttgtttagtttttttttcttatgcttgactgctttacaacacatagtccaactattgtttcttcaatcagtagctatctatgtctacagggtgttgccatgcctgctatgaataacttactttctaagtggattccagtgtcagagagaagccgatctttagcgcttgtgtacagtggcatgtatcttggctctgtcactggattggctttttccccttatctaatccagaaattcggatggccatctgtgttttactcttttggctcccttggaagtatctggtttgcaatatggttaagtaaagtatgtttttctttccagacaaaaatttgattaacatcttacagaaaaatattac

SEQ ID NO: 9245 - DNA, 1262 bp, Cannabis sativa
gagtagaaggaagttggactaagaagctccacaaaaaagtttgttctcctgtgcataataagcacttagatgtttccgttgaaggaccatatgggccatcctccttttcctttctgaggttattgattttcacattattattatgttacattatttattctttttatgtgagattttgtagaatagaaaattgtacaaattagagagtatgggggtaccatatgatcactttatcgccctgtctatacatagatatgtttatataatgctaacttggctggattgttgatgcagtcacgaggctctgattatggtgagtggtggaagtgggatcactcctttcatatctataatccgagagattatgtatcaaagcacaatacccaactctcatgttcctcgagttgttcttgtttgtgccttcaaaacttcagctgatttggccatgttagacctcttgctttccatcgcaggctcacacgcccaacaaattaccgaaatacaactcaaaatagaagcctatgtgacccaagagagcaggcaaaccacagaaaaccaaaacattatacgaacttcattctttaagcccaacccaacggacaagcccatttctgcaactctaggcccaaacagctggctttggttgggtgcaataatctcctcttcttttgttttgttcctgttattgttgggtttggtaactcgttactatatttaccctatagataactctggagggtattatcactactcttacaaatgtctttgggtcatgtttttggtgtgtgcctgtgtctatttggcttcaagtgtggcttttgttttgtctaagagtttcaatgggaatattagtaagaaaattcagcatgtagatatggaaacatcaactttgtctcctccagcatggtgttatgttggagatgattatagagaggtagaaagtcttcccgttcaatccttggtacaagctataaatgtccattttggtgtcaggcctgatctcaagagtaagctaattaattaatacattaatgtatattaattatataaaagttaatgaattggttattaattattaatattttaatgcatgcagaaattttgttcgagtcaaaagcttctgatgttggagttcttgtttgtggaccaagaaagatgagacatgaggttgctaaaatttgtgcctctggtttggcagataatctacactttgagtctattagtttcaattggtgaagaaaaataaataaataaattaatta

SEQ ID NO: 9246 - DNA, 1131 bp, Cannabis sativa
tttataatcatgttgaaggtccaaatggtagtggaaagagctcactgttccgagttctaggaggtctgtggcccctagtatctggtcacatatcaaaacctggagttggttctgatctcaataaagagatattttatgtgccacaaagaccgtatacagctgtaggaacacttcgcgaccagttaatttatcctcttactgtggatgaggaggttgaaccgctcactcgtgatggaatggtggagctattaagaaatgtaattctctcattttattgtttttcgtctttgtttgtttaaaaagaacatgatttgtatccgcgtttgctggatacaaaatacttctaaatttatttatttaacctcgactttatttactcttgacataattattgactgatgactattgctatctcaaggttgacctagagtatctgttagatcgttatccacctgaagaggagataaattggggtgatgaactttcactcggagagcaacaaagattggggatggccagactattctatcataaacctaaatttgcaattcttgatgaatgcacaagtgctgtcacaactgatatggaggaacgcttctgtgctaaggttagagcaatgggaacatcatgcattaccatctctcatcgtccagctctagttgcatttcatgacgtggtcttgtcattggatggtgaaggaggctggagtgttcactacaaaaggtttgaattgagttgttctgttgttgtatttgctatatgaatagttggttataggtgttacttttaggagtatgtcctttttcatattaagcttttatgacaacttcagggaggattcttcagtccatgaggaggatggaattaatactctgagttcttctgagtcacatcgtcaaaacgatgctatggtagttaaacgagcatttgcctcaagtggaaaggtatatattttttttatagaaaaagtatatacagcctgagtaggttaatttcacctggtgatgtggcttaaggtcttgcgagcccagatattgtttgctgcttataacaatttcatcttacttgagaggtctaatggcctatgggaaaaaggcatatgaaacgaaagaagcccttgtgatgaatagc

SEQ ID NO: 9247 - DNA, 618 bp, Cannabis sativa
aactcttgtgggaaggtaagaaaattccgttgttaatttggctcataccactcttgattagtagaagaaagctcaagaaagaagtatgtttccttcgtttggtacttagtatcttttggatgggttgagctatggtctaaaccaagttatgaaaaattcaaggttaatattgatggtgcgttgtttgacgaggagggaaagcatgattttggtggggttgttctgtatcaccagggtcgggtcgtggctggaatttcgggatggcgaattgggcgagttcttccaaagatttctaaagtcgttgctctcaagatagtactttcgtggttgaagcatgattcctgggtgttggtatattgtttggttttggcacaagctgttagaaatttgaatattttgtcatccatctttggtggtgtcgttgaggaatgtaaataatttttatctttttttagtaatgttttgtacgtttttactgaacgatctgctaatcggatagctcaccttatggttagagtatctagtttatatgctggtcgtattttttcggagattagtctaatctccctttagatgttgctgacattgtgagaccaagttaatctaattgaataaaat

SEQ ID NO: 9248 - DNA, 730 bp, Cannabis sativa
gtgtggttgttggtttcaattttagaaaattctaatagtggtcactagtgctaacactaataccaggtttcataaactaagtgcctaataacaaattttttcagttcttatcacatagtacaattaacaaacaagggtataaatatgtcttattatggtccctcccacatggccaaaataaactaggacactaagctatacggcgcgtggtatatgagtgagtgggcataatttcaagcttcctaattgctctagccaaccattactgcagaggtggggacaaagtaagacaaaagcaatatctctaaaagatagaaccaaatttttgttgtgagagattccttgagagatctaaaatctctgctgtcattggctcaaattcagttaagcagaactgtactatatatatatatatatgtataaatagtgtaagctagctatatggttactcatacacattttcttcacaaccacaattcatttaaaacatgggtgttccaagtcctatatgggtacatatgttgcttatctccatagtaattacagggctgaaatgtgagcatgaaaggggaaatggcattgctgatcaaagtcaagacaagcctccctctttagctcttgctgaggttcctaaaggaaataaacaagtgaaaaacaatgacacagactcttatcaacaagttgatcaggtcaataagagaaacagaaattatagagcagggggcggtgg

SEQ ID NO: 9249 - DNA, 941 bp, Cannabis sativa
aatatagggtatttgacagcagtgtctcaagattattctttgtttcttttttagtcctcactcctcaagctttataattaatattagaagttcgatttaattgttatggaaaaatttaaattttggagggtgtttttttatttattattattattattaaaatttttattgtgtacattaaatttcacaatttaaattcggtcctaagactctccacacacattccgattaatttttgagggtgtgaagatataataagaaaaatataaaaatttgtgaacttaaaattagagtttgttaccaatttgttagaaatttaataattatttcaaatagatcaccatcataaatgtataaattccatgaatctttaaaatcactcataaaattctaattcatttaatatactaatctcaacaacaagtacttaataataatatttgagtgttaactaaaaaagccataacttcaattagttaatcactgaatttaaattacacataaagtatgaaacccatcaaaatacagagcccccaattgctatattgttaattataaaaaagaaaaaacaaagccaaaaagttcaaattatacaaataatacatctaattttttaatattaaagaaacagataataatcatataactttttttttttctttttgcataatttaagccttttgactttttttcgcgcgattttctattctttttaacggtaattaatagtaacggactttccttctccggtaacggacggttgataatgatcttgatcaaattgaccggctcagatcgttccttctccttggataatatatacataattctttttccattgaatcatactgagttcgaaatcagactcgaacgattcgactcactactaccaacactgatcagtctcccaatttcgacgagagtagccagaaaatccagaa

SEQ ID NO: 9250 - DNA, 513 bp, Cannabis sativa
cataatcaagcaataaaactcagttacaaacataaacacttaatccttaaagctccaagtaggagctcataagctctaacttcaccccaacatcttaataattagctaatccaccctaaaattacataaataattacaactcaactccagaatataattaacatcaaacaaacctaatctacacagccacctaaaaccataattcatgcaatattcaagttaaagcttaaagaaaacaagggtagaaacactagagaatctttaccttgagttgagatcctaaaaccttgcttcgattcttggatattgaatcaaaattactcccaacttcttgttgcttctaggtggttagaaaaagaaagggaaatgaagagagagaaatgtgttttccctagcttttcttattttttcttccttcctaagtataaaaagctttcctttatttaattaggcctttagtcagcaccaaaagtccaaataatacaaaaaaaacatttggctaaagaccttttt

SEQ ID NO: 9251 - DNA, 759 bp, Cannabis sativa
taataccaatagatgacaacttctaaattccactgagttagtctcagaggagactttaacatgctctaatgttgagtaagtttagacaatgtctaaacttttctttgattacatttattgtgaaaatattagcagggtcgtcatttgtgttaatcttcttaacactaacttgcttggattgaatcacatctctaataaagtgcaccttaatatttatgtgtttcgatctctcatgaaacataggattcttcataagatgtaatgcactttggttatcacattgaactataatatcatctgagttgagattaagctctttggtcatcctttcagccatattgtttgtttaatggcttttgttgcagccatgtactctgtcctccatactctatggaggacagtgaaacaatcttttttaatttggattttcaactcacacaatccccaatgaatagtgaagacatatcctgttagtgatttccttgtatctagactctcagcaaaatctgaatcgacataacctgtcacctcctctttaaagttgctatcaccattaaatgttaatccattgtctagagtaccctttagatacctcatgagccccttcagagtcgtctagtgttcacttcctggattagcaacaaattttctcaccatactcatggcatgagctaaaattgccttttacataccattgagtacatcaagctacaaaaacaacttgcatagggcattttaagttgttggaaattattttac

SEQ ID NO: 9252 - DNA, 597 bp, Cannabis sativa
tcgtatttaatgatttaattccaatttagttttatatgtttgcagctttggtatgcactttcaaatctagctataaaattaagaagaaacagagtgtgtatggatgttggcataagaaaatgagagtggacttgataaaactccaaaggttggtgactgtggtctcttctcttgtttaaaatcaaaccattagtcaagaatagtttttgtagatttttatgttctctcttcattttcattttcgtgcaggagcttcatgaagtgtaggatgatagttggtggcatggcatcaaaagaagctttgcatgtattttcaatgaattgcacattttcatgctttctagtaaaactacacaaaatatgtaaggcttttctgtctgtccttgttgttcatatatgattttcataatatcttatcttagctacttttctttccttttaaatttctgtttctcactcattggcagtgtcgtgatcataataacaaaagttcttaactaaggcagggtaatgttcaagcttcaagaatttaagagaagatgagtggagtaggggaggcagtgccctcaccatgcttattttatctaaaggttaatc

SEQ ID NO: 9253 - DNA, 809 bp, Cannabis sativa
gatcttcatcattaatggtgacactaatgttttcaagatcaagaattaacttgttaaaattatcaatctgttccacagtagactagtcctccatctaaattggccacaactttactatcaaagcttcaggatgagtactaagctttttttattttaattttttctagagtaacataacttgtaaccataatcaacaatactaaatttttttactaaaaatcaaaaaggtattactagggatagtgtatattatattatattaatatgtttaataatagcatgcgttaaacacagctttttttcattgataaagctaatgatcacatcttttaatgtactactttttagcaaaaatttacaaattatactaatttaatttgtttctgtgtaattgcacagttccattcacttttttgttatatatatattcttattgtttgtctttatatctggctatcctattatataatatataattatatacttatggtcgtccctgcaaaataaaagatacaaaaatcatttgataattgtgtgggttaggaaggaagaacactattaattaggtcccatataagcctcataagattccttcaagctttttaaatagtaatttatataaatattttcagattattctaagatcctaattttggaatatatatgaaggggctacgagctagtgaagaaaatcaaagtaggatcttactaaatatcaaaaaaccacattttttgtttaaaaaaaaaaaaaaaccacatttaatttcttatggggaccaaagtgttagcatcatttattttattttatt

SEQ ID NO: 9254 - DNA, 616 bp, Cannabis sativa
caacaagatcttattattcttcttaattcaatgaaataccacttgatcagaaaactgaattcgaaaatgggtccttgggtccccttgatttcatgatctcactgatgatctttgtttcattctggccttacctataaccatattgggcaagttttatgggtattctagacttcagcataggcccagttggtgatatggtccaaattttaggcctaagttgcttgatgattttggaccttggttcagttgttccccttcaacttcttcggccactaatttacaaaacaaaatccttagtttcattttgtatttgttagtttgtatgaaagttacaatattttttttgcaaactttggatataatagtaatcatataatattgtaatttaaatgtcagaatcttgtggtcaaacagtcccaacctaccaattgctgggtagcttgggtgtccctgagaagcatatatctggctctttaacctaccaaaactatatatgggaatatatctttcaaatatgtcatcctactcaacttttaaataccccattctattccactaaagtggtgtttaatagcaacattggattgttatagcaatagtaatgagagtgtaatgt

SEQ ID NO: 9255 - DNA, 749 bp, Cannabis sativa
atgatattccaatctatgaagctgaagttggatctactgctaaaatatgtctttttttcatttccttttgattaatatttgattgttattaatactctaagattcctatcttcttgtattgatttttacatctgcagtagctttctttgaaagtaattatcaggccatggaaacttaaaaaaggcataaaaaaattgaagagatattaaattaataccaatactaagattgtttttcagagaagaaaaaaaaactatgctaagagatgaaatgatgcagtagtatttcacaatactaagatatatatcaatggcatgcttatcttagtatggtttggttaccaattgaaatatttgtataactgtaatgcaatttgaagctttaggtgtgaattttctacatgtttgcgttcttgtgtatttgaataatgattatataaactgaaagcattttgtgggttcaatttataagctaattggttgactcttaaccttgtgaagagagaagatgctgctcagctgcatcagtttgtagtgtttgaaagtatcaattaatttgaggatgaacctatgatgctttcaatcctttactaaaatactaggatgaacaatgggttcaatcacacacagatgcaagctcacaatgggttcaatcacacataaatgcaagctcaaaatgggttcaatcacacctagaggcaacccaaactcatagctttaccttttagagctcctctgtcacttatggcg

SEQ ID NO: 9256 - DNA, 588 bp, Cannabis sativa
tgattagaggagtggaggaagttgaagaactatttgctgaagaaatagatgctgaaagtgaactagcagagtttatggatggagtgttagattgtgaagatgagtttgaggaagatggtgggaaaataatttgtggtggagatataggtggtgtagtaggggtaggagagaagtttgaaacaacaggagtagagacaacatcagatgtttgaaaaggaaatgtagtttcattgaacaaaacatctctagacatgtaaattctaccatctttggcaaggcttttttagcctttttgtgtaaggctataacctaaaaaggtaaaaaaagttgacctataattcattttatttctgttatatggccttaggttaggaaaacaaagacaaccaaaggttttgagagcagagtagtctggtttagtatgaaacaaggtttcatggggtgtgaagttgtttaagactccagttggcattctgttgatgagatacacagatgttctatatgcatcgttccaatacttaagaggcaatgaggaatgagctaagagagtcaaaccagattctactatgtgcctatgctttctttcca

SEQ ID NO: 9257 - DNA, 776 bp, Cannabis sativa
tcaacacagtttaaggctcaaaaggagtaaactatgaataatcacaaaatcagttctcttgaaaggcacaaacattctaaacaaatttcgtaaatgatttttcaaagcataagtcattaaaaattttgccctaaaggccaaacaatgcagattctatcaaattcaaacagtcataccaccaactcttgtcaagcatatataataaaatccaaaatatatagcaagtgaaaaatattaaaatttctacataacttgtaaattaaactctaaaacaattaaaccaagcacatagttattagaaattttattttcactattaaagcaatgcaattatagacaaaaccaataaattaacaaaaaaatactaacacactcaacaaactaaatattgatgttgtccctaatgtgaaaataaaaataaagagagagaacttacctcaaatactacgattataaatttatcttttagtgacacgttttaattaagtagcactaaaagattacggatgagttgtagtgagccacaccaatggactctgaaattcagggttattgacctacaatttgggttactaaatgcataagggaacactaaatgaactcaaataatttctattatatcttttctttaaaaaaaaatattaactaatagtgacacgccaaatgtcacttgataaatgtatccccatccacttagcacatcactatataataattctaaaaaaaaatagctctaattaatatatattttttatattacaatatatattattttt

SEQ ID NO: 9258 - DNA, 872 bp, Cannabis sativa
  modified_base (692)..(695): a, c, t, g, unknown or other
aagataaaccaacattaccaataactcaattgagtgttgaaactaagtttagacaaatatttcatgatgtgtttaatcataatgtgtttgtttgtttgaagagaaaatgtgggaaagtgtttaggaaaatcaagaaagacttttgagtttgcttatgaagttgtttttttgtttcagttgagctgattatttgaccatataatataagacttggtgtgttggttgccttaactatctgccttttactacttttgtttcacaaaactcaacaatttggtaagaaaaaaaataagaagaagaagaagaagaagaattacttcttctcttactttgaaaaaatcttgagttcctagaaaaacagctgttttaatttccaatactagattttgtgtttattttctagtccttagagtttagcaagttttgcaattgagtccctctactacttttgtttcacaaaacccaacaatttggtaagataacaaaaaaataaggaattacttctcatgctttgaaaatttctatgtttttttgatttccaatactagattttacttctcaacaattgagtttagcaagttttgcaattgagtccctctactacttttgtttcacaaagctcaacaattttttaagaaaagaaagaaaagagttacttctcatactttgaaaatctctctctctctctctcnnnntctccctctctctctctctctcatttccaacactagattttatgttttaattaaattgggcaatttttaatttatttttttcttctagaccccaaagtttagcaatttctacaattgagtccctatatcttttctttttggccattttactatctaaccatttatcttattattttt

SEQ ID NO: 9259 - DNA, 698 bp, Cannabis sativa
gacctagacttagacccgaactcgcaccccgactcgaacctacacccgaaccccgacccgaactcagacccctacccgaacccgggcctaaactcggaccctaaccccaacctaggaccccaacccgaacccagaccctgaccctgacccaaacttgggacctggacccgtagttggtgttggggtcaagtgtattaaagatatattataactttacacgatgaattaatacaagtcaatatcaaacattgtattatattaaataatagtaatacaatacaacacaacacaatccaacacaatacaatacaatacgatacaatacgacgtaccaaacgagcactcaaatcacaatgttgtgagatttttattttgggtttaaattgatgttttaagtattttgttaaaaatagatggatgaatatatttttttttataattttagtcatttagttagtggtatataattaatagacttagcatcaatgtacagttaagctaaagcgaaagtgtagaaatttaaactaattttaaaaatttaaaaacctcaaagaccaattataaaagtattaatatttaattcaatcacatagataagcacaaatatagataaatagcaaatttgaaatataaagagtttaaagatagatattgcaaactctcattttgtataagattcggtagacgtaagccaccta

SEQ ID NO: 9260 - DNA, 1386 bp, Cannabis sativa
  modified_base (117)..(119): a, c, t, g, unknown or other
cttttattttttataggttaattatgatttttgctctttgaacattgacatgaaccaaatcatgcttcgtgaactttttttgccgtaaaaattccccctgaattattgagattgttnnntttaaggacttttatccaatttcatttaattttactaactcggtgattgtccatgtactaaattatgctcccagactttgatatttaccaaattatacccctcgaactttgacatgtgccaaatcatgccctctaacttttatccatgttagaattttcttactaaaattacacaaaagtccttaaatccaataatctcaatagtttaggggggatttttaacaatcttcaaagttcacgagacatgatttggtacatgtcaaaattcaggagcaaaaatcctaattagttttttttttttaattataaggtaaaatagtacatatttattataaaaaaaaaataagaaaagaaagatgcatattgatgcatattatttatttaaaaaatgcaagaagttaataaaataacctaaaaattaaaaaaaaaaaaacaaataaataacgatacattttaattattaacaaatagtaaagagagtataattgtaactatacttaaatatagttagaaagttacacatgttactcaattataaaaaaaaatgcaatataaagttttcttacctccatcatcaattaactttgaaatgtaatctcatgcaccttaatccaaaattatatacaataattgagtagttgatcaaattagtcaaacacaataatacgactcaaaacttgcacgaaataaatggtttgtggatcattttttagttgatacagctaacctgtttataaacaagttattttggattgactagcttaacccgaaattgacaggacaacaacctatatttaatttcattacatgtaaattatattttttttagttaaaaagaacataaacatgttaattgttataaatgtgtcgtaaaaccattgtaaaagtattgaatttgttataaataagttaatgagtggataataagttaacaaaaataactcttatataaacatgtttagtgggtagagtcaagtcaacttgtttatagggttgggctcgagttttaatttttgacacgattaataaatggattgagtttgagtttgagtttgagtttgagtttgatatttgcttgtagtattaagtctcgacacaatatgaacacaacctgtaaacataaattatcaccattacatattaaaaaatgttaagtagcaccttaaggtatcaaatactataaaatgtgacatattattattgatgtaatttaatatcgaatccaacataatttaattcaataaacaaaataaaaatgtcagatcgg

SEQ ID NO: 9261 - DNA, 992 bp, Cannabis sativa
aatataaagtgttgaaatttaataattttgtggcatagaagaactatccattttgccaaatttggtttcttgaatatttggtcttgattattattagtatatatatatttatttattagagcaatgggtgaaaagtgatagtttataaagaagttatcaaaataaggttattgtataaagtgattatgaaaagaattattttattttatgacaatttaaatattcttgaattgagagagctttcttgtggagaatatgattatgcagaaatgttgagtatggaatcttaatttaatttaataatatataataagcaatgctataagacagtagtggtgtttagcaccacttaataataacccgtgtgcttaacagcttaaaaacctatatgagcaattataagaacttgatatatcatatttcttcatgtaaaagtaagtactggatttaacattctatgttggtatccaaacttttttattattatttgggtaaataaagcataaatacaaagttttaagtttgtaaacggcatcaacataatgtttgtatttaatggcataagtacttaatatttgttaagctgtaacttttttctaatttcgttagtacagatttctttttgaatttattaaaagaacatttggaagtaattacatgtttctgtttagactcaatgatttagaatctaagctttatatgtgccatgtttaaaataataatatagtttctatagatgaaattagataaaaattacagttttacaaatattgggtacttatgcaactaaaaataaatattgaatttatgttacttacaaatttaaaactttaagtacttacgtcactatttactctttatacttttacttctttaacatttagagaatttgatatgttttttatcccatggagaataaatggtagaattaagtgcgtatttgaaagtcactatactatgtaattacttgtttgaaagtcactatgtaatta

SEQ ID NO: 9262 - DNA, 586 bp, Cannabis sativa
atgaaaacaactatacgtggaccaagtaaaataataataatatatattaattttttttatatatatatggcaactactatgagttatgtattgttgtatcttaaaattttttatcatcttgtaaatagtttttaaattattcataatatcataaattaattttttttatcaaattttattatatgtggtaaataaaataataatatttttacttagtcttttattacatcagcatcgtgtagataatttaaaattaaaaaacaaaaattatgtatttttaaaaaattattaaactacaaattaattaataattaataaaattacgtaaaattaaagtaaaaaaaataaattatttttttaaattaattatacacgtaacgtaaacatattactgataagacaattaatgaaactgctattattttatttatcatgtataataaaatttgataaaaaaattaatgtataatcttgtcaataatttaaaaactttttttaatagattaaaaattttaaagaacataataatagataagttataattgaaagcaagaatcctaaatatcataaatattttcgttgaaat

SEQ ID NO: 9263 - DNA, 680 bp, Cannabis sativa
gttggagaaatatgctcagtgatcgtgatcacatctctgccatcttcaatgacacctttataatctcctccaatacaagaactgatctcatctcattatgaatctagcaaaaagtcgagtctaatcatcttcttcagcaggatctgaatcttaaaactcatcttgctcaatttaattgcaatatgaggcataatactctatcaaatcaaagtttttgtcatggaaactcttctcagtcatactctaattttcccagaagaggatcgatcttgaggaagtggctatcagtcttatcaacctggctctaacactcgtggaggacccttttctggaagaggaggtcgatttccatctccacccttaagagctcaatgacagctttgtcatcacaatattggacacactataatagactgcttcgatcaatttgacaagagctttataggttttggcccaggctccacactacaagcacaaccttaggccaacttggttcaaggttctacaagtcaggacaggacacagtatcctgattctggagctacgtacaaaccattgcaccccaaatgttgaaaacctggtgactcgagtagaatacaatggccaagacaatctttatattggagatggtataagtttgtccatcaaacacattgatcaatctttcattttatccaatt

SEQ ID NO: 9264 - DNA, 624 bp, Cannabis sativa
cgtgttattttattaagtacccagtttgtttggttgttgttcgatggttatttgttggtaaacttattgtgtttattttcaatttgcttgattattattcgatagggttcgattgttgtttatgagtgagcatttcattggacgtttgtcttacaagggcaccaattatttgaaaaaaaaaatcaaggaacaatttaagaagtacaagttactagaaagggtgaatgaatccccttttaaactattttctctagttgatctaatgaatttctcaggagtgttaatgaaacaattattgtagtggtgattgtggaaagtataagatggaatacgttgagcatgcactgcttaaaattctgttcaataaagtagtagatgtcaacatgtcattgttcaataattgttggtgtgtagacttgttctgcgatgaagtacataattcttatttattagattaaattaaaatgtaccctaacttattttggatgatacaatattttgaaaggtatcctaacttattttggatgatacaatattttaaaatgtatctttcttattttaaatgataaaatattttgaaaggtaccttaacttattttggatgacacaatattttgaaaggtt

SEQ ID NO: 9265 - DNA, 555 bp, Cannabis sativa
tccttggagccaatcctcctctctcggttcttgaaggtttcattagaagagtttgcaatgggaaagtggataaggttggctcattgtcttatggtgtattcttagtacggtttgacacagttgaaaatagggatgaggtgctaaatggatgttatgtgtttaatagaccagtggtgatgaaggcttgggatccggatataaactttaagaaagaagacataagaacggtgctgatatggattcaactccctgatcttgatttgaagtattggggtgagaagtcattatacaagattgtgggacaattgggaacgcctttgcaagttgattctgtaaccaaggagagaaacaaactaaactatcctagagttcttatacaagtgtcgattaaacaagagtttcctgctcaaattcagtttgaagatgagcatggtttcaatgtaacaacatcagtttcttatgagtggaaaccgatacaatgcaatcattgtaaagggctaggacatgaaaccgtggactgtcgcaagaaaaatgggaaaaagcaacaatgggtag

SEQ ID NO: 9266 - DNA, 551 bp, Cannabis sativa
tataaaagaaaggcaattaaatacttggtcaaaatcatatgttcacagcaaaatctaagtcaatacaaacctcaaaaactccatggagttggtgtgttgagtaattgtagaggaaaagaggtaaccctggtgttatagcacgaactgagtccctataacgaggaggcaaacctgtgtgaaacaaaatcaaataattattattagacaacaacaaaaaccaataattgaaatcaagattgaaactttaaaactattaaaacataccaaaaagctgtcttttgagattttcctgcatagtatcattgttgcagacaaagatgtacccaccaacggtttcatttctaggcagagactcagatggtggaagtgtcttaaacctcttatcagtaccagtcttaccttctttattatcattattactatcaccaccaccaccaccattgttgttgttgttattcttcttgttactgttctttttcccacttttaacaccaacatgatgatcatcatttttcttatgatgactcttcaaacccaaattcatattcata

SEQ ID NO: 9267 - DNA, 911 bp, Cannabis sativa
tactcgttgagctcaagcctctaactcgccactatgaagaggaaataaatgacctctgctggaagaaccaaatgctagaaattactatggttgacatgcaaaaaatattgagtagcatgctcaaaggcaaaattcaagcctcacactttcaatacaaaagccactgacaggagaaaagggtctcaaccgcgtatgttggtgaatatgacttcatgtcatccactaatatcacctccaaaaggtcagcatggaaggggcatgtcacgagacaagaaccctacaagtcaattaaaacaactcgagcctacttaccttttattgagggaagcactccataaccttagagagagacttcacttagcagatctcatgttagggccacctcacctatgtttccactccaaaagcaaggcaagcataagaccttatccttcagctttagtgagaagtcacgccatggtgtccaagaaaactaaggcgtctcataccaaatgatgtaggactggtttggatcgaagggagctgctgagagctcgaagaatagagacaaactgatataacctcttctgtataatatccactaaccctttcattgagtaataaatatggtatagataccataagcccaacgacaatacaaaagggaaaggaacgacaagtagttccacaaagtctttaaaacgatacagtttaaataaaaggctcaagaacacaaccatttggaatatattgtacaataaaggcctcgtttggccaagtttttatttttttttttttatagctagaagtataagataagtagaagttttaactcatttttaacgtttggataactattaagtatttttgaaagtgtttgaatatcatttaaaaaagatcttttttttagtaaatcgtgaattatacaaatt

SEQ ID NO: 9268 - DNA, 741 bp, Cannabis sativa
ccacgtgttgggatcctccatcggagtgattgttagaggacaaaggaatactttcatcatcaaaagatggctcatccgagtcacccgatcgatcatgatcatgagacaatctcgattcctccccctttgggtcaacaccacgagggaagtccctaaccacacattttactcttctcatattccatgtaggcacaatcttcagcgaatgagactcaacatcgattctcctcttcttcactagggtggttctttcattggtttcggaggtcgtttgcacgcctatatcaacttggcacgcttttcttttgattggcccttgtgaagcaaaagcggtcagttcatggagatatccttcttgtgcttgaaaaaacttggaaagagctctcctttcatcaagatgatccgagagatcctggccaacaattgataacttagatccaccttcccccttagaagaatggccatcattaaccacagtattaacacaagtgtgttcaagaggaacctgctcctgataagccgtactcggcaccagcccatgcacattcaacttgccataattaccagaaaaaggcccatgtgacttcggcccacacaataaatcactaactcccttctttgtcccacgttcctcctcataaatcccaggtaagtgtttattattcccaatggacagcccactactcggcccaatagcaccaacatgtgccttaggattaggcccacaaaaccttggccccg

SEQ ID NO: 9269 - DNA, 710 bp, Cannabis sativa
catcagtttctataatcgttgcctatacgaccgttgcagaacaggcagaataggcaacggtttgaaacagtcgcaaatttaaaattcctgacggttttaaaccttcgcctataccctattatgggcgacgatcactactacaaaaggtttaatttgcatcggtccacgcctctcaccaaaatagttgaccgagccaaaaaaataagcagagattttatgcttcagagtataactgaagctaataaatatcaattagcttgagttggtactctgacgctaaaagaagaaccggggaaaaaggtagaaattttaaaaaatatcttttactatttatttcggtggaaaaacaacgctaatttacttatcttcggttgaaaacgaaggttaaaaaatttgtgacttttatccaccgacgaaagaggatttaagtttagtaataaccccaattttcacaaatacatttcatcttttcccttttacaaaaccctagcacactgccggacatcttcttcttctttttctttcccatttcaaatccctagcacacagcccatcgtcactctctttttccctctgttacgtagtccttcgcccaaccctccctctccttttctctcgattgctctactctcatttgaacatatcttgcctcccgctctgccctcatcatcgacgtactaatagactaaagaacacaaataatgcaactg

SEQ ID NO: 9270 - DNA, 765 bp, Cannabis sativa
tgacccgcatactcgtgagtatcttaaaaggctaaagacaacacccttagcttggttaacctcgcaattgtcagatggtgataagcgtctcgcttatgccttactcgacattgatgaaagaatgcgagaagtactacttgttatacacttagacgctaatttatgataaattgataaagtgtctaaaggagaattgctacattacgagaaggatgacgcatagtcagcataagcgccaatagataaaattaaaagagcggttatgagaagttattcataattatctcatgtgtgtaaatgtgaatcgtgagaattgtccacgtttcacaaacggttaaaagtgataagatcctaagagaataactgtcatcctaaactcttataaatagggacagaatccagaaaataaggaacgaccaatctgaaaaagaaagagaattatacatgtcattcattctataaataatttattgtattttgtatacaatttatcaatcattgaataagatggactcgtggactatgaagaattaacttcaaaaccacattaaaaatactctcctcatttattactattattattttcatcattgtttatttagattcttgagtacattaattatataaaaaaattattattagttaacgaaaatagtatacaatcataaaaataaaaataaattgactaaaaaaaattttagttgccaaaataaatataaaatatatcggtatatctcttttaaaatagcttaaaatttaccaatg

SEQ ID NO: 9271 - DNA, 695 bp, Cannabis sativa
cttactatgcagtttgtgaattgttttgtgaggcaagaagatacttataaaaggctgaactatagctaccttcttataattttagtaggcaaaaggagcttataattaagtgtaggcaagttcaaactcatgcaacaattcttgcaagcaagttgggtttaggatagcatttctttgggggaagagcaagtttttgaacaggttgcttttgtgtttggacttgtttatggtaagatgaaaaaatcttgcttttacttttgctttcacatccattaattttcttttatttatcaatagtctataaagaacattaaggatctgtttggcataccaagattgaattagattagatgatactaaatgtaatcttgtgtatagttttataatgaactaaactatttttttaaaaagaaaataaataaatttcatgtccttttattacaaattttgcgggcactgcctattaaccaaaatcaaaacaaaaaccaaatctttccgtaacaatcatttcatgctaatcattaatatcatcataaacttacgttatgactattgtagaaaataaatgataaaatattgagttaagtataaaaatataaactacttattaatcttattctgcacttatacacatggtgatcatgtcccaccatcaagaatattataaaaaatatcccacatgaaatatttggtat

SEQ ID NO: 9272 - DNA, 667 bp, Cannabis sativa
  modified_base (152)..(162): a, c, t, g, unknown or other
cagagggggcagactttatttgtgggattttatttgcatctcaataataagagtggtagtcttctatctcttactagaatttcttagtcaatatttatactagaaacatatgttagaatatttttttttttaattttttatagcagtatttnnnnnnnnnnnaatattattcctgtaaatttttaaaaattttaatttcgaatagtttaccgtgctaaaaatacatctgaagttttttggacgcgtatggtaaactagaatatcagaagggatgatactgaaaaaaataaaaattaaaaattaaaaagaaaaattctgacatgtgatttcgacgtaaaaattgactaaaaaattgtaataagagattgtaattagcattccaccctcaaaaaaatatatctcattttattattttatttttgtgtaatatatatatatatatatataaggagcttcttctaccggggctccaaaaaaagaccccatcggtgggagtgtctcggagccaatatcagggcgtgagacgtcttttgagtgaaagtgagtttggaggggtgagaaacactggaacataacccgttcttccccattctaaaacataacatttttttttagaaaaagcacataacctcgtaagttttatatttatgatgttgtttcgtctcta

SEQ ID NO: 9273 - DNA, 831 bp, Cannabis sativa
tggacacaaatatgcttagtgcagagatgcatcctatttggctttatagtatatagggtgttatactctgccttcttctttgtgaggacagcactcacaacatattctgtgactgctaggtacacgcctagctcttctttgtctatgggtttgggcaacacaagtggctaagccaattgtttcttcaactcttggaatgtcgtttcacattcctttgtccactcgaatttttttgttgcctttgagaatgttgaagaagggtacacatttgtctgtagacttggacacaaaatctacttagtgcagcgatatgtcctatttggctttgtacttcctcgatgattgtggacgacttcatgtccaaaagggcttggatcttgtctgggtttgagcttcatgttgtagctgcaggggattttgaagcatccgtctaggtcctctatatgcccctagtcttctcagacttgacaaggatgttgtccacacacacacctccatgttgctgccgataggatcattgaacattttgttcacaagcctcagatatttgacctctgcattcttcaatcttgaagggcatgaatttgcagcaatacaagcctaagtctgtcatgaagcttgtacgctcctgatctagtggatgcatcttattattcattttttttgctttggacaaggccaagttgtaacagtgacgggtaggttataaatctcctctcggcatctacctcatgccttgttgggaattttaggccaaggtagtagatagatgttacgtctttaggttgcatagggctggttagcctatcatggcgttgaaagctaagggaa

SEQ ID NO: 9274 - DNA, 1462 bp, Cannabis sativa
tacttataccacaattatgtctataataaataaatataacacccaaagaataggttacagaggcctttttaatttggttaggaaagtcaacattataattaatttgctaattggtttataattattttaataaatcttgatgttgaccaagaccaaagagatcgagagatatacatttttttttttagaaaaatgaataaataaatataatactacacaaattttcagagtatgatgaccaattaaaagactatacgtacgtacatatacatatacatatatcatattacattatatattaatgtatatatgaaaataaaatatagaattatagatcagggagatatgtttaataatacaactatatatgttgacttcaaagtcaagatgcagtgttttagacttgagtagaaaaatggattaattattacttaattaattaagagttagtaattatatatattcatactaatcagtcggctgcacatgattccaaatttccaattttgctgttggagaaattgtgatcatattaatatatacatacatggatgtattgtgtcttatataaaaaataaatttgttggaactttatatatattatataaaaatagatgatattttaaaacattattaaagaaaaatgagagaattataaattttatgagtttttatatttattcatataaaaatataaatttttttcaaaaaaattattttatgcaaaaaaaaaaaattaaaaaatatgaaaaaaaaaacccaaataaaggtaattaggtacatttaactgtaaggagaataatcagttaccttatattgttttaacttttttctaaaaaaaattccataaaataattttttttaggaaaaaattatacatttttataaatatataacctaaacccataaaaataaaaattccctaagaaaatatatgtattttttaaaataactaattttcttatttggataacatgcattagcaagtgaaattaattaatgagtacgtattttcatactacgtacaacacgaattatttaacttttattattataatcgatcaggtctataattagaaaatattacataatttattttttaaaacaaaattaaatgaacttctcattaaataggcaaaaatctaagaaacaagtgaaagactcacaattaatgtatgattcaagataaaagtaattttagcaagattacgatctatggtattttcagaacaattacagtgttaaaaacgaatgacatgaacatatatatgtagaatatcaataaaaatattacattaattagtctaaaccccctttaaaaaaacaaatatttattgcatgtatagagattctattttttttttaagcgtttatatattacaatgcataacttgaaactcgaatccaggtcttccaatacataccctcttataggcatttgagctagtcttaagtggtatag

SEQ ID NO: 9275 - DNA, 1013 bp, Cannabis sativa
atcgccctggttaaaagaatcactaaggtagtttttctttcccttaggttttggtacttttgtactaggcctttgtgtgcaaccttaccttgtggagcagaaggacatctcagtctagaggcattggtggccttctgcgtctgtaagggctggttggtcgtgttcataattttcttaagagacaacgtgtaatgtccctgtttcaagttttgattgagtttttctctacagatttatagttcttatacacgagtacgttactctggctgctttttagactgacgactagttttatagaccaatacaagtatttttcacgtgtttgttcttactcacacgttttttaagaggtcacctatcctaaaattatctcaagtcaagcatgatttaatctaataattattaaaatttaattttgatcatccaatctagtaattaaattaaattaaatcgcgaatcgatttaactaaattgaattaaattagaagttgtctattcttactcaaaatacaaataaattcaaggttgtaacttgaaatttgctcttgggttgagataagttgggcgtcagtgtagatgatgacacattggacataaagatataaatgagactggaaatttgggtccacaggaatccttaaaatatcttatggagaatgtatatgtggtaattattgggttgggagttagagacaacgtaattaaattttaaaataaatagaatttattcacaaattattattattattattagtcacatgtctctcaaattttcttatttggcagtttgtttgttaatgctattgcttacttacatcaacatagtgtgccaagtcatatcatcatcaacaaaaaatatcaagcattttgtttgtggcataacttgaaagtaataataggacataaattctattattcaataatagagcgtggatgtgatatgtgattatgatagatatattttagtaattttatatttttttcacataacaaagaatcccacgcttaactct

SEQ ID NO: 9276 - DNA, 953 bp, Cannabis sativa
ctagggatagattttggggagacttttagtccggttattaagccttcaacagtgcgtgttgttcttaccatagctgttgcgaataactgggatataaggcagctagacataaacaacgccttcctcaatggcactttggatgaagatgtttatatggtgcaacctgaaggtttcgaggatccaacaaaacctcactatgtttgcaaattagagaagtcaatctacgggctgaagcaggcaccaagggcctggtatgaccggcttaaaacaactcttctgaactggggttttgaaaattctaaggcagattcttcctttttcatgctcaaacatactgatttcattcttatggttctaatttatgtggatgatatagtcattacaggaagcaaaactatgatgctggaacagttcataactcgactcaacaaggccttttctctcaaagatttaggccctctacactacttcctaggaattgaagtggttagagatgaaaccgggttgtatttgtctcaaggaaaatacattaccgagttactacagaggataaacatgagcacaatcaagccaagtcctacacctatgactgctagtaaaccgatgtccattcatgatggctgaaccatcacattacagaagtgttgtgggggcacttcaatatctcagtcatacgagacccgacatttccttcgcagttaataaactcagccagtttctaaaaaatcctacaacagttcactggaatgccactaaaagagtgcttagatatctaaaggggacattgaaccatggcattcacattactcctagtgacagattgtctctcattggtttttctgatgccgattgggcctgctgcccagatgatcgtagatcaatagcaggctactgtgtgtttcttggtgactctctcatctcttgggcatcaaagaagcaaaccgtagtggcta

SEQ ID NO: 9277 - DNA, 1040 bp, Cannabis sativa
caatggttaagaaaatccattgtttcttgcgtggaaacggaaagatcagcttcttctcagctagcttcgatcatcgatgtcagagtccattcttggatcaattgctcaccatgtaacatctttctctgcttggcgtgccttagagcaaagatttgcttctcagtcgaaagctaggttactgcagctcaaatcctagttatccataatccagaaaggtaatctctccattgcagattattttgacaaagtaaaaattcttacagattccctatcgactgctggacacccactcgatgagagtgatttgatcatgcatcttctaaatggcctgggacccgaatatgaccctgtggtggttcatgttaccagtctcgtcgacaatctctcattcgattcgattcaatccctgctcctaactcacgaaagcagattggaacgtcattacacagctggagccccctcctccggtctaactgcaaatttatctactggatcttcaagatttgggtcaggttctggaaatcatcgctcctctagttatggtggccgtggatttggttctggaaatcccaatcgtccctatgctcgaggaaatggatatgggggtcgtggaaatggtactactcgcattgtctgtcaagtttgtcacaacagtggccacactgctgcggtgtgccactacagatttgataagtcattcatccctcccaagattggggaatcttaggcgtttttaacagaaatcgaagatgatgattagccaccttactcttcccactcaatccctgattttgctcatgatcaagattggtacgctgatacaggggccaatactcatgttgctaaaggcatggagcaccttgattatgaagccccttatcatgctgaagaatccttagctgttggcaatgggaaacagctgcccatttctcatattggtaactcctctataccttctcactttcgtccattaaaacttaattcagttctcaaagttcctcatatcaccaaaaatttagttagtgtgtccaagttaacta

SEQ ID NO: 9278 - DNA, 520 bp, Cannabis sativa
atttgaatctgcaggtgatggctgttgtgctgtgtgagtcaatttggtagtggcgaaatgactgtatctttaaagggcaagatgtagatttggagcgcttgttcgatcgtttttctttccgaactcaagagttcatctctaaaacaccctagcttgaccattttgaagatcagaattcggaaactcaaggtaaagagcctagtgtgctaagctctaaccaacgggatgtggactggagttgtaaggttgatgcctccattcgtgatgatgaagcgggttgtgctgtgatcaaggtcaatgagaatgatgttgggaattctctggtttcccttagctggacaaaggtcaagggagtgttggagggcgaattactgagtattgccttggcccttcggttggcaaaggagaatcatgcttcagcagttagaatcgagactgattccttgactgcagccacaacctttaacaatgcacaattaccttatggctgggggacctttcctctgttttctcattgttt

SEQ ID NO: 9279 - DNA, 624 bp, Cannabis sativa
aatattaactatctaatcacaaccaaagttctatacaaagaatattcacccattaatttaataatatttaaatacccccagccaccaagataatttagaagctagtccaacttttagaaacaggtaccatcaaacacattaaagtcaagtgtatcaaaatgaaaggaactttgatggtacccaagaaaccagtgaatacgatgggaattcaggaattattgcaatgatgtaagactagatatcttgtgttagtgccagagccactggtcatagcattacttatgacaactcaaaataacagtggtgaagcaaatatcaaggagattagaactgctagacaagtgacttttgaagtggcctcaacaaaatgaatggtagcaacgatacacttgtgttgtgtaactgtgatagagaaaaccactgtagtgtttgtactgagtccagtaaacaaaataacaatgatatcagataattagacacagacagccaaacttgacaagatgatgtaagccaacagccgctatactgaagtagatgttgcctaaatattttcaagaagaaaaaaactatctcatcatgtattagtttaaaattaattaatagttttactaatccttttaaagt

SEQ ID NO: 9280 - DNA, 1114 bp, Cannabis sativa
tattttttgtgtgcttggtggtgaagcatgatctcactttatgatcataagtgagatgaatcactgttgatgagtagtgcagaaaaacctgccagatcttttatataggggaaagaaaagactccaagggagaaacaagaaaaaagaaatattggattaaacttatgctaagtatatcatccaataattaggataaattagccactgaaagaataccacaactggggcagtgtcccattcctaaaagtttttctttgataaattagaaattctcttctgaatgcagcgtcctgcttccagagagctttcaataattgatgatgattttcttttctttttgattcttgtgatttgtggaggaacacttgtactagcatcttaggtttataaactcgatcgttatattcttgtgagacctcaagcctttacatcataaatgcttaactctagtgtgaaaatagtcgatttgtgcattttttcaaattaattaacttaccaacactcgtactagcatttttaggattaagaaactcagttactagggataacatcaacatttcattaaaccatagaaatactaacgcatgtgtccgaaatgtcattacaatccctagctctcgtataccaagctgtgtgtgacatacatggctctcgtgtaccatgatttttgtgaatgctcatgttatatgcatagctcccgtatactatgtcttattttcccctgagtgattgaaaaaatgccttcattggtcacttgccagatcgaatcttgttgggcctctgggagttgttacatgtgtgagcattggtccacctatctagagatttgtgggttggaagtgtttaactcactaaagaagtaatcatagttacctcaagaccaactctacaagctttgttcagtgcttgtgtgtgagctacaattgattaataacaacgaagtaccaaaaagctttactcaatgctcttattcattagatattaaattcaattacatcactgtgagctaatttgaattaaaaaaaatagaaaaagtaattttagatctccatttttcatcaaagctttactaaagtgatcccaatacacttataccctgtttgaataatagtag

SEQ ID NO: 9281 - DNA, 607 bp, Cannabis sativa
aaactgaatagcagtggtggctatacacattgaacacatgtttaatataataaattttaatttcgtatggaaaagggtaataatcgatacttgtttgagtttctgtattactcttaagattgagtatttataggtttcattatggtacgtaaccttttcttttcttgggtttaaggtatgtattgatgattaatatctatatatatatatatatataaatattataatataagtacgtatgcgcagacatttatagatattactaaaaataactttattgataatagttcacagtatgtgaactaatgataacattaacagactaacgacaactaaaagcatctgacaaacgaaaataaacataaataaataagaaacgaaatataaacttaaaccaattaataattaagccttagttggaggagctgaattagcccttggtggtgtgcccgggaaccctggaattctcggaattggaaactggaatgctggagtgcttggtgatgatcctcctgaaggtggactaggaaatggaaaatgtgggggccattggaaagaaggtgatcctccgggaggacttggtgatgaccctccggaaggtgggctt

SEQ ID NO: 9282 - DNA, 659 bp, Cannabis sativa
attcaaatttttcataaaatttatatatatacttgtatataacacccaattgtgtaagtatgtgtgcgtgtaatttcaattttccctgtaattttatttttttattattataaaatgaacaataagataaataatttaaaaaaaaaaaattaagatacatattatattagacttgtacgataagaaatgggactttttatcccagcttaacaaaaataaaaaataaaataaaagatatatgttgagactttaatcctacttttagatttgactcctcaaatatgcaactaattagttttttttagataagaagcctatttaatagaacattaaaaaaatatcaaaagaaaaaaataagttcaagactcaatttttattcatgagccaaactcacctcgcatgatttaagtaaaacccttttattccaatttgtaactaaaagttgggataaaagggtttcactacccttttatcgattcagacgtaaaaagaagaaacccaaaccagacctcactcaccaccgccttctcctctttgccaaaatctccattctccaccattttcagctgtagccaagagtccaagttagtcagcaatggcagctgcatattttaggtgagcttgaccaacttgaatctcgattcctttttttttttttt

SEQ ID NO: 9283 - DNA, 618 bp, Cannabis sativa
caattttatagtaggatatagtttatttgtgaccaattttcggtcctgaataaaggtggaaaatcaagtcaaatacaataacacgactcaaaatccacacgaaattgttgagttttgcttttaattaaatggggtcgagtcatttttctggtttgtgttaagactgagattatacttataattatatgtatattttttgtgagggtatttttattttaaacaactatgactctgaccaaagacctaagaatatacacatattatagctttagtcaaagacctaacattcaagtccaactagtccaatatttacttaaaaaatattacctaagttgaatctgtttgatcattcataaataatcttagagcaaaatattctatcatctattatttctcacaataaacaacagtaaaattcctcaagaagtaacaaaagttacaataggctctcagtctccaaattttcaatctttctagagagttggtcttaaaaagatgtatgatacttagaattacatcttaggcttgtcaatgatgttgtatatttttgtgacatagtcataaatcatacctactcaatagcaaagtcagtaaaaattagagaagtgctaattacaa

SEQ ID NO: 9284 - DNA, 814 bp, Cannabis sativa
ggagtgtcatacaaaatatttgggcatgccagcatcaattgggaaacgtaagaaagaggtgtttgaagacatccgaaccaaaataagaaccaaactccaagggtggaaagctagtttgttttctcaagccgaaagagaggtgctcttaaaagctatcattcaagccattccaacctacgtaatgagttgcttccgtcttcctatggagctaattaaggacatccatggcatgatggccaaattttggtggggctcttcggattccaagagcaaaattcattggggaaaatggaaaaaactatgcaaaccgaaggaggaagggggaatgggcttcaaagatttggagaagttcaaccaagccttattggctaaacaagggtggaaaataataaataacccccaatcaatgcttgcaagggtgttaaaagcttgctactacaccaacacaagcttcttggaggctaaaattggaggttatggatcctttatgtggagaagcattatatggggcaggaaaatcatagaaaaaggggttcggtggagggtcatttcaggaagagacataagaattaatgaagccaaatggattccccgtccctcaacctttacattacgcaccaaggcaaaagtgcctcaagggaccaccctagactacttaaagaatgatgatggctcgtggaaatcaacaatagtggaagattgctttcactcggatgacataccaataatccttggattagctccttgctaaacaagcaaaaatgatgaccttatatggaacttcaatcctaatggaaactacacagtgagcagc

SEQ ID NO: 9285 - DNA, 1129 bp, Cannabis sativa
aaaaaaaaaaaaaattacaaaactaacgatattgtacataattttaaatattttataatttttaagattttatttataggaaatataatcttttgatgatatcgtgtttttttttatgttgttctcttaatttttctttttgggttttttattatttgaatattaattttatgttgtttggatattgtattaaaatagaattttggtcgtaaatttctctttttattatcgtacgagaaaataaacaaaattaaaaaactaaagtttttcttttcgaaaaatacggtagaggaggcttcttccataaagaacttatccttcttgacaaagcaaaataagtgagttgctcttcattgtcgacaacacttcaccaacacaatcaagtgatggagatccaaaatcaacaaccaccaacggtgtataagctttttgcgatctctatgaacaccgactaggaactttagcctgatctctatgaacgtcggtgagaattttgcatcgatattctgccatggtaacaggatcaccttggggagatttccatgaaaccaacgagaaatgatcaacaatcgagggggagactagtggagtcaacgattataacaattgagggagatctccttaaattttcatacccacgcgttttgggttttctttcaaaaaaaaaacaaatttgattttttctttggaataaaaataaataaatttgatgttgtgtactatgttttcttcaattattttgttaactatatttgttgtagtttggctaagttatatatattttcattattattttttttataattttcaaaaatctagaaggaaaccactgcattaaatttatgggaaatataattgtataagtttatatttgattggaccgatattgaatattgaatagagaagcaaatattttaatcttatcattatatctattttcaatcaatatcacttaattgatcatagatcaatttgatttgaattctgacatgattaaactttaagctaattgtactattcgagttctttgacttgttcgttaccagcttatcttaaggtataactcatacttacatcttgagaactcgatagtataaattataaatgagtgtgagtgttaatcatatat

SEQ ID NO: 9286 - DNA, 529 bp, Cannabis sativa
tgaccatactgatcttccatgtcccccatggccatgctagtcgaagccattacaaccagaaaaataaaccccagaaaccgagaaagatcaaacccactacgtacgtacccctgaaaattctggaaataaattaaactcaacaaaaaatctcaccctctacaccgtgcgccaccaatgagacgccaaacaccccgacgattggccctgaacaaacgcagagagaacgcagcaaaaacggacgtgaaccaatcgcagtcgtgagaacgcagaacgccgtcccagtcggagcagaaaaaatctcgacgcaataccccgccacagacgtgagcaatccgaccttcttcaacctttgagaaccggtgaggaacctgcagacccgacgtgctccaccgatgaagcctgaatactcggaacagaataacaaactagacgctgggaaccttcgaaaattttagagagaaaacattgaccatgccagctggcaagactttattaacgtacgtctatttttttacaaatatgttaaaat

SEQ ID NO: 9287 - DNA, 680 bp, Cannabis sativa
atatttggaagtatttggaagccatcttaagtggcactttccagacacggagtcccatcatgaactagggctcattaacacctcagccacgtaaaaatttttgttcttcttctttaagcttatttattttataactagttttcaaaaatttcagtttatattttggtgctttcattgagagcttgaagaaagttttaccatagttgtcatctacaacaatggttgcaacttgaaaagcagtggtcaaaccacctgctcgagacggtagagataatgccaccaacgacaacgagaactagctcccttcaaaaatgcttaggtgggtgtcatgggggacggggaagcgtcggaggtgggcagctggccgccccgagaggatcagcatcgccaggaacccgtcaatgataatgccattggcgaagatgagtagcaaggtcaggaggatgatcacctgagaatgaccacaacaaaaatcagaacaagaattctgaagaagagtactacgagcaagaccgtaaagtagtacaactacagaaagatcttgtagataccccaaaaaagttagtggatcaagaagatgtttcgagataaatgtcggaagttcttgcacggttacaagcccaggctaattttcctgaagaaaaccctcctgctaataagtttaaccattcttgggtttg

SEQ ID NO: 9288 - DNA, 606 bp, Cannabis sativa
tttttttgaaaaataaaaagagatcagattggagagaatcatatattatatcatagcgactgcactgaaatatttgatatagcttttatcattagaatatattaatatatgtatatgattaaatacgtacgtacttctaaaaaaaataaaaataaaaaatagtgtattgttactatcaagtgatcaggtatctgattctcttgaacatatatcttttatcataccttaacatatacaataactaatatatatatatatttatatatacagtcattagttgatttaattaagagatggtgatgatcgtatatattcataaaaatatatttgtatacgatatttgcattttaatttattgtcatgtttatatatatatagtagttaattgccaaattagtcttttttttatgttaaaagagcattaataaaagttccaaaaagtaaattatacctacattgctaactcaacttgcaatattatttgtaagttgattatttattattagtattgaaaattattattttttatttttaaagaaaaggtctaaaattgttattattacttattaacaaaagttatttttttacaaattacattatatatta

SEQ ID NO: 9289 - DNA, 732 bp, Cannabis sativa
tctctctctctctctcttattatcttaataatctctttctctctttctctctgcactcgattctcttttcttttctattcgttctaggctagggtttcaaaattatatatattattatgcttttcctttaattctcccccaaaaaccttataatataatctctctcactctctctctctctctcaacactctatacaattaaatttttaatatcatcctcttttcatctctttctttttttttaaaaaaaaactatatattaataagaataattattataattgtaattatttttctttgtttttctgtttccctttagctctatctccaattatctcaaaacaattcttagtataatatggctggcttagacttaggctcagcttctcgctttgctcagcagcttcaacgccctgatcttcacctccaattcccaccggattccgacaaccaccaccatgacatcaacagaaacggccacttcaacgcagatcatgatgaagatgatgatgacaacaacaacaactcaggtggaggctttgatctcatctcgggccatcaccaaaactcaggcggcgacatggggtcccgccgccctagaggccggccgcccggatccaagaacaagcccaaacctcccgtgatcatcacgcgggagagcgcaaacacgctcagggcccacatcttggaggtcggaagcggctgcgacgtgtttgactcagtggccacata

SEQ ID NO: 9290 - DNA, 583 bp, Cannabis sativa
tggtccttgagctaagctaatagatttgtattactaattattgagtaatattgtttgacatgaactaaatataaaaataaggatagttgcagtaaattttttttaatatttataattattacatatataattttaattaaaaaaatagtagtaaaaatatttattttataattttgttgtatttgtacttttttttagtcattaaatgtcaaattgaaaatacatacaatatattattagaatatgtattaaataaattaaaaaatatattatcatgtgtttttaaagtgatacttaacaataaaaaaagagtataattgtaaaaaaaattataaaataaaatatttttactgctatcttatgtaactattgtaaatattaaataattttttcgtaaatatctttataaaaatataagttacgattagtaattaattttgagatagaatatataaatattattttagtgggagaaaaataaaaagtaaataataaataataaatgttgtaataagttatatatatataaagaaaaacaaatattattaatttgaatattgtattattttggatgagaataaat

SEQ ID NO: 9291 - DNA, 605 bp, Cannabis sativa
ttttttactctaaacaaaaataaatagattggtacatagtaaactagattaaattcatgtagtcaaatgtatggactaattaatattactaggctacttttgtgtatatagtattgtacctaaaaatatgtatatatatatatatataaatttgataaaattaaattcactccctctggtccaaactttaatcacataatatatataaagccagtttcatatttataaaaactctgtgaaatgtgaaaagcgctatccttaacctcttatcctaattgttgtattaaacataaataattaatgatttgcgattccgtatactaaaccaacaaacacgcaacacaattaagaaacaatatatcgagagatcacaagaattaagtaatgaattaaggaaaacagaaagataaccccaggtttaacaagttcgagccttgtgcaatgttctacgttttggttggaacaacaactgtcatatctttattgatatcagtgttataaaggttacaagaatcctcacaatctctcagagattacgagaaatgtttctctctctagtttagactctctctcaattttatactattacgattttcactcaagca

SEQ ID NO: 9292 - DNA, 757 bp, Cannabis sativa
atcaatgatcgtggatattttgtgagaatcccctattataagaccattggaaaaaaaaaaacaataatactaataattttgaaccgtatttaactaatgagcaactgcattattattattattgttgttgttgctgttgttgttgttaatattataaggaaagtgatataaacttatactaactacattatatgcaatctaataacacactaggtacctttcaaaaaaaaaaattaataattacacactaggtacgtaccaagggaaattaacaaacaaaaaatcagctttaagttattttattttttaataaatttttattttatttgtttgaatgaataaaattgtcaataagttagttcatatatgtataatatacatgtaatatatatatgtcataattatgtctattgattcatgagttaattaattcagatatatttattgtacaagcaattatttgatcaatgattatagagtatcagctgatggctaattaaatagtgaaaaatgtctttaagatcataattaaaggccaaaacaaaaaaggtataaagtatatccaaaatatgatgcataataatgcacgattgttactaagaaactaatatgggaatcttccattgcaataatctttgctcttaagagattataattgtcctgtttaattatataggacaactataattgtactcattatacacgattaaaacttaattaatcatttcgatgttgaccctctatccctaattatctt

SEQ ID NO: 9293 - DNA, 683 bp, Cannabis sativa
gttgcagtcgaaatccactccgggactcttctcttacacactgcatcaaccaccatcttagcatcagagattatcgtcagatcgtccagccggttttggatggcccaacggaggccctggatgatcgccaacatttccgcttccacttattagtggcaaaaatgtttcgcccctacaaaatacatttctacacgaacagatacaaaaaaaaaattggtacacgtagcttgccggtcactacagtcacacaatattttttttctctctcttccacctcagccttcattgactccacattctttcaagcttcttccaagctaccccattaaacatgctcttaagtatgacataccattacgtacgtagtaatttttgccgataaaaaattgcacaaactattttttatttttttaatttttaccatgttttgttaaatgctcaaagaaatttatatttgtaattaaataaggtgaaagtgagactcaatctcataatatttacttgcaacaatgattaactaaacctattaatggcgtatacattagcatacacgatgtttgcaatacattaattattacttttttgaagataactacggcaagtctattaattaattttttatttatttttatttaacaaaaactacgaccaacgcaattgttcttcacttttttttttttttt

SEQ ID NO: 9294 - DNA, 1127 bp, Cannabis sativa
  modified_base (53)..(64): a, c, t, g, unknown or other
  modified_base (129)..(131): a, c, t, g, unknown or other
  modified_base (396)..(400): a, c, t, g, unknown or other
aaaaaattactttcacaattttttaaggtgaattatctcatatactatttttnnnnnnnnnnnnttttttttaaatttacgttttgagtttccaaagtggttgcagcactagttgcaataggggtttcnnnacgattttttgttacaatttaagttgcaacgatagttgcaataggtgattctatgtagaatttcgtaaaaatacaaaaaaaaaaatattttaaagtataaaaataaaaaaaataaaaacccctttttttaaacaattttttatttttcttaatcaatattttagactccgactccaacctatactttgaaacccgaactctagccccaaccctagtctcggactcgaatcacggtcccgaccctagacccgacttaaataaaatnnnnnaataaaaataaaaattataaaacacacttttattttctgtttttaaaagtaaaaaagaacatatttttgttttttaaaaacacaaattttatttttatttttgtaattaaaacattaaaaatataaaaatattaccaaacacctccaaaatgaattgtttttttaagaagaagatgaattattatttgaatgtgaccaaaagcataaacagtgagagtcaccatctgcatgtcctgtaaattgtcttcctcagagaaccagtctctctcaggctcaggggaatagaaaatgctaatctgtctgtcacagaaatcatgtgcttggtttcattatcctacaaatttagctgtgacttgggtaaaaattaaaatcaagtggggtcaaacccacccaatgtaaccatctcattgtctgttgttcacccatgaatgtccactgctctctttttttttctgttttgatagagatatattggcctagtacgaggagaagcattataacttaaaccaaatacaaaaaataataccaaacaagtaagttacttgatttagaaagaaaatgaaatatgtacaccccaaaagagcataacaaatgcttgttagttagttctcaaggatgatgtagttatgagtggattgaagtaatgaaactttattagttcttgtcaacaatcatcaggaaatcctagaaacctgttgactagctttgctacaggagtggcatcacc

SEQ ID NO: 9295 - DNA, 607 bp, Cannabis sativa
gctttcataaagagagaggcaatagaaaatatgcttagcttcagcttcgtttgctcttgtaaataaaattgtatcatccgcgaacattaggtgggaattaggggaagccaatcttacaatttgaatttcgtgaattaaaccccaaccttttcctctagataagagtttggaaagaactgcttgacaactcagaaagaggaaaggagagagagaggatctccttacctcaacccccttcttggaacaagattttttagaggactcccattgagaaggaccgaatatgaaacagtggtcacacatgacataatgagcatgcaactcgtctcatcaaatccatttgcaataagaacttgatgaagcaaagaccattccatcctgtcatgagcattgtgcatatcaagtttgatggacataaggccaccttttccttttctccttttgatcttgtgaactatttgttactcaaaatcgtaaactatgcaagtgtatgtattgagtagtactcacacaggtgagaggtcgaaccacatagaattaaaattgaatattaccaaactagattaatatttttatttggttaattaaaataattatgacaagaaaa

SEQ ID NO: 9296 - DNA, 578 bp, Cannabis sativa
ccgccgctgcggctgttgctgcggcggcggagtctgatcggacctccctctagaagtcattattgctcaaactccaatcaaaatcttccctataagcatttcaacaacaaaaaaccaaagttcagaagctgaaaaaagacaaaaatagcaacaacaagaagaacaacaagtacagcaatacaaaccttgtggagtgtgaaagagcttgaataaacttgatcaaacgtaatcgatctaacatcgaaaccatacaatgccgaagacgatgaagaacagaacttgaatcttcttcttcttcttcactgaaaccagaaaccctaagagagagaaagtgattagcagaagagagagagaagtgtagtacttagtacagctgaaactttaagctacttaggtgcaaaggaagagctttgagaaagtttttttttttttttggcgctagctaagtgacgtggcaacttatttttgcctaaaaagactagtgggcctcatattctggacctctatttccataattaccctcaatttttcgaatttttacagttacgccattgatagtgagtgttcattagtgtttc

SEQ ID NO: 9297 - DNA, 664 bp, Cannabis sativa
ttattctttaattatgaaaaattcaaaggaacaatgtgctagaactccatagcacattgtattccttttatacactaaaaatatattttttttcttccttgagtatatactcaatgattacatgttatctccttgaaaccaaattttacttcatgtagccctttcataagttaaatatagagaaccattaatcttaaataaaatcaacaataatcatggttatcaaataatttccttaactagtcttcccttcaacacatactttacaacttttattctatttactcaaaacaaaagctctagaatactctaggctcatctggttcctccagccccttagttcgtctggttcttccagtccccctgttcatccttcgtgatgtcatcctctctctttccttcttgttgtcgtatccttcttccccaaataatcattactccttatttaatatactctgcaaaaaccgcaggcaaaaacccccaattaatgctctattagagaactcttggttctcctcctccttggtctctccctcctcatttattaaccatcactatccttagatatacccgcaggagacagcgtatctccatcatgaatctacccttttatagatttgggctaccactagctaggataacggtagcatcttctcaccttcca

SEQ ID NO: 9298 - DNA, 538 bp, Cannabis sativa
ataaagttcataaattttatctatatcattttatttctatacattaatagtgtatgactgattctaataaatatatgtatgtatagtagagatatgtaaagattcatttataaaaagatcattattaaattttagttgtgaacgaaaattgaaattttctccattgatataaaaagaaagggaaacaaactaactataaggggatgcttttcttttcggcaattaatgttctctttctattccattagtcggctaatccatttatatatttgtcttatttgaggttaaatcgaaccataaattctaacttaaacaaatatgtacatgatggtacaagtattaataatattcatgattagatatagtacaaatcaagtaacatggaattagcactatgtgggaactattaaactacaataacataggagacactaatacaagaggcatagtatatacttgaaattgaaacaataatttactagatgaacttaaaatggagggtttgatttttctacacctctatctccaaatgttaaat

SEQ ID NO: 9299 - DNA, 528 bp, Cannabis sativa
ccaaatacatgcttctgcttgttcttatcagtggttcaatttccgcaaactatttggtaattaaattataatatatgtatatatgtgtgaaatttattgtaattaatttaattaatttattgggaaggtctatcttataggttatgattggcataatggtaaattagatccttcaattatgaacttaaatcatggcaaaaatgacaccttgcctcacctacttcaggtttgtatttttctctcttgacttggtgtatgtctgaataaattagcactcataatttataccaaccattcattcataaccttggcgaaagattgagtaatttttaaccatgttgcataattaagttgacacataacacatcattttcatctttctttccttgtcttttttctttgcttcattttattttctccaaaaaaaaaattctagtggggcaatagtatagtatatataagtagattcttagattgaacagaagagctagctgagattgaaacaacattaattgtaggtatctataa

SEQ ID NO: 9300 - DNA, 1128 bp, Cannabis sativa
aaaaaaaaaaaatctcaaactttaatatagtgactcaaatactaggattattttagaattttaaccacataaaaaattgtgtattattatctctttcatactttactttcttttatttcttcaataataattaaatactaagactagccgtcaatattttcaattttcatcatatcctatatgcacattttactaatttaattttacagaacaacatcaataatctaactcgagatgttctctactatgctcatcaaaacataaaagaatacaagaagacatagaacaaagtgaatcaaaagagtaaacaagtttacatccaaacatgctaatgaaagatgaataataagcgttcagttactagatatactgacataaaaggtacgtacaaactaaaagggttaagggtacgaccatgagatctacaccaaactagtagtggatgtacaataaagtaaaattatggtagcattactagtatttttcatgtacacttaacatccgaacaccactacctcaacaccgctatcatttgcactttaacacctgcgagcttacaatgtaccgtatttgctcctaaggattactcaaagggccgatccaagtatatggtaacttgggccattgcacaaggacccaaatatatggcaacttgggctattgcacaagaccctctatattaaacctatattaaaatgctccattttttatcatccacatatatatatatatatataatataataaatatttttgtataatgtataatatatataataaatgttcatattaagaaatatacacttagcacttggagaaaaagaaagataaactcttatggtcccaatatacatgattctaaaattttgcttattttagaatttatgaagatttttcttttaaattgaatttaccgcttaagccaactctgactgcacagaaaatttctcgaaaaaaaaaagaagaagaaaaatggttgaaagtgacaagcttacattggaaaagctttgtttgattgcaagatttttgtattcaagagggatttgagtatatacagttggagttagatagggacaacagtccttatagtttgcaagaattcatgcatacatcttcaagtgattgcata

SEQ ID NO: 9301 - DNA, 750 bp, Cannabis sativa
tcgattatactgatcatcatattcatattccctaccctagtcaacagagaaatgaaagtagttgacaataatacatttcgttaattgccagctggtaagttatttactctatcttaattaattaaaggattaattataacaggagacgacgttaactatattttatttatatagatatataatgacttatttaattttagtatatactcaatattatttctcttaaattgttaagcggtataaattcaaattaagataaattttatttctcttaacttgttttctctttcctgtaatcactccatattattttattggtcactttcatttcaccaaagcagtagccacgccagaggaagaagtaggcttagaaaaatatatatacatcacatttgtataatatattcataattttcttacactatattcataattttttttaatattaaaatatattttttttttaaaagaaatttaaacaatttttttgattacactcgtaattatttaaacttaaaaattataatcaccacaatctacttttcaatgagatcattttaacatatgagaaacatatattttattactgttgtcgaaaaaaataattaaaatcagaagtaattttagtttctttattagaaaatcgaatttttaaatattaactaatttctaaaataactcataagaaatcaaatttttaaacataatctcttctctgctggatatgatgtgttggtgttaattatttaa

SEQ ID NO: 9302 - DNA, 649 bp, Cannabis sativa
tctcgaatgggttccgacctcccaatccctattcttttggatcattcttgctatataacctcaagctggtttctcccctcaaatatttatttaagagatgatgacaccaactctttaatttatgaattttctaggttagaattaaggcatcagggtaggattagccttcctcatttactgcctcatatttatgcttgatgtttttcatatactttttttaacctttcccttgttttgcttttaacaacaaagcctatggatgatttgttggccatgttgactgctacacatagccctaaactagaggtggccaatcccccgttggtggtggtgactcccaaaggcctagatgaggaagttcctggaagccaagaagtagtgctaatcgagtaggaagaggaagaggttccttagctcgatcggaaacaaaagggtgtggtttctaactctgaaccttccaagagacccatgccttctactcttggcccaagcaccgactctgggatcctgtccgaggttgaagacttccctgcccctcttgctatccttctgacccctgcccatcctaatgaagagcgagtctaactttgcattgccaaacacaactacgccgttaatgagctgtcgaagggagaggtagaggcagagg

SEQ ID NO: 9303 - DNA, 670 bp, Cannabis sativa
gtttctcccttaaaatgcttcttgatattttccaacttcattatgcaggagaaatattgggcgccaccaaacctcaaaaagctgttatcaacaaaactaaagcatatgacagaaaacgggaaactgattaaggtaagactatctagattaaaagtgcttgttttaatacatttgccatttgtgcattgcaatgagtaatcgattgagttcgaaaagcattgctctgtaaaattgaatatctttttttcaatctgtaatctaagtatgcacatgtagatcgttttccattgttatgcacacgtctagatcagtgattcgataatttcagataatgtggtgtttatgaaagcacattagtaattgcagagatatgctagaagtgaacgttaaatgaaaaaaaaaagtttaaatgttaaaagtacaatttccagtttatcatttccatattatttgtgtttacaggttaagcatagatacaggattggatcaagctcaacaggtgctgaaaagagaagaaactcatctgtgttacctctcgaggaaaggccaaaggatcactcagtagcagagaagagtgatgtcattattcttactaaatctcaggttgatgcagatctttcaaagatgaggagcatgactgcgcaagaggcagctgcagccgctgcacagg

SEQ ID NO: 9304 - DNA, 822 bp, Cannabis sativa
tcgtatgcagggtatcgatgacaggtaaacaatcttgaattgctctccataggaaaattatttgaaccttagatggaatggagagtgaccaaaatttcttccaccaatttattgttgttgtattgttggtgtttggttgttgttcttccatgagtaaagtgagtttataacctgatttaacagtataacctccatttttttcatggtgccaaattagttgatcattctagccaaatagagtaagaggaatgctttgtatcttctcaatgtctagatctaagaaaagagatttaagaagagcggtatcccatcgtcctattatctaaatcaggttcaaaactttcagtcccatatcttctcctttgaacaaaagaggcttaaaataagtgaaaccagtgattcatggatcggttgcacagcttatattgtgaccattgccaaccttccatcttaaaccatgtatcaggagttcttttccccatatgatacctctccaagttaaggatggataaattccaatctcaacatccaaaaaagtgttatgcttaaagtatcttggcttgggaacacgactaaggagggagttaggatcagaaaaaattctccacgcttatttagcgagtaaagcttgattgaagtgaacgaaacttttgaaacccataccaccttcagctttggcttggcataaagctttccaagtcttccaattgataccacttcttgaagaattggagccccaccagaactaattcatcataatctttatttgattaatgagggaatttgagaggtaaaaacaactcatggcatatgttggaattg

SEQ ID NO: 9305 - DNA, 621 bp, Cannabis sativa
tacaattaattattgttaatagaaaattttaataaatgcagtgccaaatattatcgctatatcctcgagttgaatcgtacgcaaaagagtatcaacttttgcaattggagcacaataagttgacacaccagatatctgtatacaaagatcaagatttactcggacagagtatatatacatatttataaaatacttaatcacttgcttaatattatatatctaataataatagtatttaatctattaataatattatacttttcagtggaaattgaaaagaacacaacagaagtgaacaggttaagggtactctataagcagcaacaacaacaattatatgaacaacaacaacatttccaagcatcatcaatggctcatcatgaagggaatttatcaatgaaccaaataatgtctaatttcaatacccaacctactgagatctttccacaccacccaaacccaggtatattatataaatttagagctattttattaatttataattattaatcaagataaatatttggcacaactttgctggtcattttaatttgctacatcatcacatctggtattattcataattttatatatatgcaattacatattacatgtacatta

SEQ ID NO: 9306 - DNA, 825 bp, Cannabis sativa
ttttataaaattcttagttgacatgtttagtaaaaatgacaaaattaattatgtatgtattttcaaaataaaattgatatcttgtattggtataaaagctttttaaaattagaatattctgtttatgttaataaataatttaatttttctatataaatatataataacaatatttatatttatatgaattatatttatttagtctgatttattgtactaaaccgtgtacattagagtaaatgtgaatatcgttttcttatttatttaagaaaattgtgtttaaactctgtccaagttcgtttgaaaagatttggatttttttttcatgaagatttttttttttttaattgtttgttgttttcttgtttgtaaagcacgatttgatgtgtattatttgatggagtctaaatttactatattgattagagaaattaagatttcgtctgcacactttctatatctgtccaaacagaatttgttcatatttacgagtttttgtgagaaaactaattaatgaattctctttgtatcgagactttttaagcttgattttgggtgtcatctattcctataaatatcacctaaaccaacagtaataggttgaactcttcaactcgtcaatttcttatattttaggaagagagtgtttcttttgtaaatgataattatttcgttattttttggtgagtttatgtgtcatttgattacttttatgtgaagtaaatttcaaaataaagaacgtgaaaaataatcttcgggagaaattttttactagtcttgcatcgggaggaagcaatcactgctatatttgaaagaaaatttcta

SEQ ID NO: 9307 - DNA, 798 bp, Cannabis sativa
ctctttactatttttgtatctcatgtttgacgagatggaaagttaatctctcattatttgattaaacaaattttaatattggataataattgtatttggttagaagaaattctctttgctatttttttctttgttgtaaatgattctatataatttatattttttttctcaaaaaagaaaaaggtagagtataaagaattattggcttcttttattttgcatacggattatttataaatataataaatatacaacaatgacaaaaattttatatttatatggatctaaacagttttctttttacatttgttacagatttccttataaaaatacactattgttttttcattgtttttgaaaatttgtaattgctacgagaaattaacgttctctttttaacaacaatacaaagttttgttttttatattatttcaaaataatattattttgacgtacgggaaaataatatttttctttcgaaaataaaactagttaaaacatgtaaataaaaatttgaaaaactataaataataataaaataaatttgtaaaaatgttaaaaaaaaatctaaaaaggtaaataataataaaaaaatttatttttaaatgtattgtgcaaattttatgaaaacttaatgtgattactttttgtatgaaaaaaaatgctacttattaacgaacaatgggattcatctcataatttttttcgtagaagtatagacttgcattttgcatatgtaaggtggaatccataaatccatatatatgaaaaaggtcttgtttaaagaaaaacctggta

SEQ ID NO: 9308 - DNA, 1489 bp, Cannabis sativa
ttttttagttttctttttttgtgttttagcgacattttacgaaatctagcaacattagagtatgctgaagcttagagatgacttctcacaatatctctgcgtcatagttcacaacatgggccaatttatgcttaccatgtacaatttttgcgatatctgtcgacattgtttactacatgtattgatagtttagagttatattggttaagtacggagaattttgtcaacatattgcaatgtgatgcgactttcttatcaacaaagtttgtgattttttgcgacataacttgtttcttgacatattattcatcaactaatttttttccttttcttttacagatttaattatttttgtgattgtactgtatgatgaggcttagaaagttaaaggttttaaccagtgacggattcagaaattttactttttgggggcttatttatcattaaaaaatatttatacttatattataatcactcttactagatttatttaattttgtggatgcttttttattattttggtctataattattaaatctaaaaaattacattcaattttttaaaaagcaatatttttgttagtggggctatagcccccacattgagaggaatgggtccatcactggttttaactagatattcaatatcccaaatagtacaatgttaatatttgaggttgacaatactctaaagaatatgcatgattttttttattttattttttttttattttttatgaagagttggatataaagcctcttgtgaatgaattgaaagtagaggtgtgttacatgtaaatgaaaggaaatatgataccgtcggaggttttagtaaaacatagtcaagtaagattgttcttaagaatgaaggcaaaaatgagtgtggagaacttgctgccactgtatgtggctaaggttaagaagcttgcgattttgaggcctactatgcctcgtaagactattgaagattgtctcgatgtgtttagttgctttcatcgcgtggccaatggaggctaattaaaaaatcaactaatctttctatcttgagcaggtagtcattaaaagatccttgcattaaagaattttattgaaaaatgcaaaactaaaatattttaactctattaactctagacgtgtagtattctcgaagagttatcaagatctgagttgcggtgtcacgccctaccacttgtgtaaaagcgatgataattgacatgagacaagcgcattgtcttgttactcccaatcctcaaattcagggctaacattgttggcgaggcgatcaacttcaatgaggaacttcagaggaacaagttaaggattaaaaaattgttgtaatcaacttctttaatggcaacaaacacttgatgtttccagagtaagtagttgtgtcatcaagtcaaacagagagtgaatgagaaaacatgactggagaagttttaggaagtaaagtagaagagccaccctcccttaccgtcaaagaaagaca

SEQ ID NO: 9309 - DNA, 560 bp, Cannabis sativa
aagcaaaaatcacaaaggaaacttagtatcaaattatcaatatgaataacagtgtcccaaggatatttctggatccccttatatctcctattacttgaaacagtttttccatgtcaagaaaaaacttaaaccacctaaacagaatccaaacaaactgacatgacaacaatacaaccaagattcatagaataactagtcaaaaaattcttcaattcattattacttaaaatgtcgatctacaattcctggttaagattaagtaacaatgaagtacattctcaatcacaatattacaatcaaatcaaatcaacaaataagcatctgaaaaacaagtaaacgatccaataacaaaaacaagattcaaaaacaaaaaaaaaaaaaaaaaaaagaagtaaattttatacctgaccggtgtgagcaaaacatccatggaggtaagtctcatccatccaatgatgaaggtcaccaacccagatcgttctgatctcatcctgcttatgagactgcgaaaactgcttctgttgatgataaggatgcggcggttgttgctggtaatgagg

SEQ ID NO: 9310 - DNA, 551 bp, Cannabis sativa
ggcaaaccggttccccaatcggaagacagttatgtggggtttcctagggaccaatcgggatccggttcctacaggtcccactgaaccgattgaccggttcagtgtaagaaacacctaaagccccacaacaacctcaattcgaacccaaatgcaaccaaactttccaaagtacctaattacaccatactagactaaaatcaagcaataaaacacaacattcaacccagaatccaaaaacactattgaagagaaaagcattgagttctaaactaaaactttgctcaaacattacacgaagctataacaaccaattagatcagctggaataatcataatataacctcaaaaaactgaaaccaaacacaaacaactctacaatacctaatttatagaaaaacatgcattaacccaattttgaacttaagaaaccaacaagagaggagcttgaaaacttacctaggattggaactacaaaattatgctagacttgccctaaattgtgcagaagaaatcccaaccctcagttggttcttgagagagagagagagaga

SEQ ID NO: 9311 - DNA, 832 bp, Cannabis sativa
gtttattaaactcagtattgctcttcttttctggggattcactgcctccaaagccgactctttcatgttcatttttcactctgattccaccatggttgttgtcttgatctatgttgacgatattatcgtcacgggttcttgttcttgtactgttcaacaactaatatcatacttacatactcagtttgacgttaaagatctccatccgcttcatttttttttcttagcattcaggtcactcagtcaccttcaagtcttcatctatctcagaccatgtattttcgtgatttgctctctaaaactggactcttagatttgaaatcggttgccactccaattgctcttagttctctttctatccatgatggcaccccactttccaatgcaaccgaatttcatagtctgattggtgcactccaatatttcactttcactcgtcccgacatcgcttactctgtcagcaagctatgtcaatttatgcatgctccaaccgacacacatcttcaggtggcttaacgtcaactgcgttatcttaagggcactgctcaccttggcctacttttacaactcgatccacagtttaatcttcactgttatacagatgccgactaggcctcctgtcccgatgatcgacctagtaccagcgcatattgtatcttcctcgaaatgattttgatctcttggtcttccactaaacaaaaaattgtttctcattctagcacggaatccgagtatcatgctcttgccaatggagcttcagaagtatcctagattgaatctcttctctctgagcttggtatcacactcttctctgcacccttcatgcattgtg

SEQ ID NO: 9312 - DNA, 840 bp, Cannabis sativa
tgggttgggaatggaatgtagcagcagattatccccatcagttatatctttagaagggaagacttcaatcggattcgacatttgggttaggacttgctttgagaagagatccttgtagtaattgaggaaacatgttgcaatttgtgcttggtctcttgtccactcgccatcatccggttttttaatacattggatgtaattcctccttcttcgcacaatggtggaggccatgaagaactttgagcacatatctccgtcggagagccattggactcgggacttttggcgccaatgaatttcatctctaagaagcacttcagccaggttcttctttgcagtttctatatgagatatctgatcaggagactttgtttccaagtccctgagaacggaagtggcatcatggatttgctgtttaatgtccttgaagtgggttttattccatctcctcagcctgcgactggtgtttttgattttgcgatggaaattgatcatggggttagtgtgtagtctattcatccaagcttctttgactacccagcaacttctcggatccctattccacatattttcatacttgaataatcggcctttgcacatcactccaccattggtatcaagtaaaattggtctatgatccgagaccgaggaagataggtgattgactattgcagctggaaaaagcaatcgccagtccgtagtaactaggcctcggtcaagtctggcccgtttgagtgatccagtgcctggggaacgagaattgcccctagaccaggtgtaacccggtccaacaaaccccaagtcaattaggcctgtacgatttaccattcttctaaagtc

SEQ ID NO: 9313 - DNA, 754 bp, Cannabis sativa
tctctctctctctctctcttcacccaccaagtaatccctatcttctctctctctcttattcaacatgatattgccataccctctctcttctctctcactctctcctttttctaagtgatgggactctatatataccaatacctttgagcttctcccccaaattatccaagagtagtctctcttgagttgatcttcccttttagatcagcaaaccttttctctcatctctcattcgtttttaattctttagttatttaaagaatttccttatatccctatctcatgacttagccataaaaatagggtcatctcctagtatcactttattactaagttgggctgtaacgactagttcaaatatctttagacaagaaggtatttatcttttcctctttcctatccctttttcttttttttcctctttagatctgtatactttttcattcctaggatacttagattttttagttaggtctagagttctatcttctgttttatatcacctttgtgttgtgggatgggatttagggttagagatttaactatatatccctttttcttcttcttcttcttctcttcttttgatatataatagtcctttttttttgcatggagttatgatgatatatatctgaagttataatgataaagatctctaaaagggtcactgtttgccactggagcatcatcaagattcacatagagaattgctcttttttatttttggggtagagtgctctctctctagatctct

SEQ ID NO: 9314 - DNA, 718 bp, Cannabis sativa
ggaaggtgcctgacattattgtccctaaaattacaaaggcacttgtaattcgaaatgccatgtctcaatgcattacactcagtctcaaccaaattcaactccactccgattgccaaagtttagttcataaacttaataatttgttatctttagatttttctatgggtttaattcttgacgatattagaattttatgttctcatttcaatgttgtgagttttagtcattgttttagaatagctgattatgtagctaagtttgctttaatagttattgcaagtacagtttggtggcctaattatccatttttgtattcgaaactttattttggctgatgctattttaaatgaattctcttagctttcgactcttttgagctcgttgctcttggatggtattttttgagattattttctaaaaaaaaatatttctttatgaattattgaaattgctagattcaagaatttttgtctacttttattaatgaaagactaacgtagataaaagttgagagagtatgattgagtacatgttgaaattcaaaagtataatttaatagatattaaagtttgaaagacattatttaatacatggataattattgcgttaatgaaattaagctgaattaaatagaaatttttaaatttaataatttcaatgaaaataaattttgaaagaattaaaatatttggagacataatttaatttattttttttt

SEQ ID NO: 9315 - DNA, 553 bp, Cannabis sativa
ggcctgaggatggggcttggaacacagtgaacatgagaaaaacggtcttttgggtgcaggctacgggcttaccaacaccttttttgaagatagtcaacactcccacgattgcagctaaagcaggggtctacaaaagtttcgacatggttgatcagagaaccatctccagacgaggcttcttgaagtttcaggttgagttggacacataccataaaattccttttgctttttttctaaatattaccagggatagacgtgaatggatacaattccggttctataagttacccaaaatctattataactgtggctaccttggacacggtttcaaggggtgtatgagggcgatggacctgacttaccctccagaaggtgctccagtgaaaacttacgggccatggataaaggcggagacaacttttattagttgtttcaatcccataaatcaacttctctggtttcgaaattcggagggagttgaaaacaagtgacgtgatggttccgcaccaatcagaggtttgatgtctctgatgaatggaaggagaactccggt

SEQ ID NO: 9316 - DNA, 680 bp, Cannabis sativa
aactaattgaaggtaaactaattcaagcacaattgtatatgaaagaagaacaaatagagttttcttcacacatgcataatggcttggcttagagtctatatgtaggagatctttaatttcctttatcttaatatgcatgtactagctaggctactagctagctctttctcttcttctttttctttctttgtcagtataattttctctgcaacaattaataatatgtgaagttgtactattgattttattccttaattttatcatacacatccatgttatatgaaaataaattattatatatgtatatagcactcaaagcatgacgccatattgttaacgttcaatgtatatatatatccacatagaaaagaaggccgagaagttagatgcatttgattgtttatttcatatatgatcagtcatcacgattagctatatatctctattattcgtgtataaacacatacatttatatatgtatatatatatatatataatgaaatacaaaagaatgaggtaacatgggtaggtacgtaatccatttgtctactaaattatatagttttaacaaaatattaggactgactgtgatcacagtcactattaggccgtgataaaaaacatatgtgtgaacttggatactattaagatttcagaaagaataatgtcatttaattata

SEQ ID NO: 9317 - DNA, 2120 bp, Cannabis sativa
aggaatttcagttgtgggatggacagtgggtctagcagagaattgttctcctgaccgaactgtggtggaagctttgggaaggtggtcgaaacgcgcgtggtggccggccacccaaggttggattggtcacgtcaagtggcacttggatattagggtccatggccataaggtctcgtgattcagtcaaatttacatgccttgtgaaagccactctgaagatgagagcttcttgaatgagaattttagactctcaatgaaagcatcaaaatgttgattgtggatttagccaaccgatgcagagtttgactaggattgttgcttatgaccaccacatgtagaacgataataaatgtaaagacaccagaatttatagaggtccgctcccttttgtttaggtaatgacctactccccttttagttgtatttactcttgagataataccaagcagattataggctaagaccttataatttttggcaagactctctttagtattacaatgtgttttgcatgtgagaagtatgagaaaagagagaggacttattgctatagtgcttctgagtgcaagtgaaaacttagaacatgagcatgtctatcttgccctttatatagttgtaaggcttacaagctgcacatagagatatccttgaaaaatagggaagttacgtacatttgaaatacaaagtaaataataataatccctaaagaatagggttattatttattgatggagagtccctatctttgtgggtagtttgaactgttttaaagtcgtgggaatactgacgctgagttggaaggctcgtgagaaaacacaagtgttgaagtgtttttgcacctttgaccagccaaccttgttgaaggcttctcggtgcttggaagttagcactcctagccagccaactataggtccggccaagaccttactggcaggttcatacatcccattctttttgtgtgtactgtgtagcatggaatctcaaaggttgagaggctgcttggcactaatcttggtaggttagtgttgacctgtcttcaatgtattttctactttttgccacatcaagtgaataaaatttgggataacatgttttattgttgagagggtcctgttattggagaaattccgttgtggatgatgtcattcaaaataatgatcaataaatagaagatattttaaaagcacctctttaagaagatctcaatgacaataagtaaataaggtgtgatggtaattttatttaccttggaaaagaagaatatgatattagtcattttgtgaatgctctcacttatagtgaagcacttaatagtccatatttttcaaaatggattaaagctatcgatgatgagattgagtctatggagaaaaataatgtatgggagttagttatatttaccttatgttttaaaccaataggctgcaagtaaatttttaagaactaaaaaggataaaatgggataaattgaaaggtataaagcacatttagtgataaaaatctttacccaaagataaggtattgattataccataactttctcgctagtttcactaaatattcattcagactttttatagcttcaattgcacattttgttttagagttacatcaaatggatgttaaaactacttttctatatgaaaaattgagagagtaagtctatatgtcaaaacctgaaggcttcaagcaaaatggagaaggaaatttggtttgcaaattgaaacgattcatttatggtttcaaacaggaatctcgccagtggtacttgaagtttgataatgttgtgacatcttttggtttcttgtcctttatgtgcgtgaaactttacttactagtagtgatttgtcattacaatatgttattcttccatatatatgaatacaatgttagatagactttttatttgtttgggcttgcattcattaacttttattggttttaataaaacttgggttgcttgtttagttatttgatgtgttagcccataatgttagtaatcaatagttaatgagcatggcatatgtatgtgtaaagtctaggtgaagcaaagtgtggatttttctagttaactaaagcttttaatgagcaagtccagtccagctagagttatgtagcta

SEQ ID NO: 9318 - DNA, 929 bp, Cannabis sativa
agagagagagagagagaagagtagatagagcggtaattgttaaattttagagggtaagttggagagataagttggagagagaacaaaaatcctatctttctctattatctttctctattctttttctctattcttcttcttcttcttcttctttctccttcacatactccttttatttatacctactacaaaaggagaggagcattgagagagaaaagaagcttttatttgggtaaaataagaaataagaaaagggaaaaatgtggcatgtgagagaagagggaagcctacacatgagcctcgggttttatcacaaacctgtcacagacgtgactttttattttttaaaaaaaacctcacaaatatgacattaccatcaattcaatcactaacactttcctatataatataagatgcttttataatacacgtcactcctttaacaatatattaatgcatctcttatttgttttggaattcgaaagaattttttaatttatttatttatagccgtatatattatagttatttaagaaattttataaaattctaaaaaactcaaaataatttacaatatagaatgtaatgtttaaatagtatatttcagatgcgtataaaataaaagagttaacgcatgcaaccagaatggtttgaaattttatttttggcatgttaaatattttaaataactaaaatatatatacgattataaaaaaaattagattaatttttctttttcaaatgctaaaataaataaaaatatattgatacatctcttttacaaggatatattatagaatttttcaataaaatacattagacttaattcactaaaacaaaattgtcatttttactcacatattgagatatgtgtctttgtacccaacaaagacatcgttattagtttttgtaattacgtatatttatat

SEQ ID NO: 9319 - DNA, 623 bp, Cannabis sativa
gagtgtggttgtagagtacccttggtcaggtccttagaccttgcaggtacgttgtctccactactcgtatgcccttgctttcagagtttgttgaaggcatggttgtacatatcttcgttgcacaccttgtcctcttatttctcctccaatgtcattcttgtcgatatgcattaaaatttaaccttcactcctctttacataaacaacatactcggcacttcataacgaattcatgctaatgggcttgcatgcacacacatgcacgtatggttgcatgtatgctcacggatgcacacacaagtacgcatgcatgctcacatgcaagtcgttgcctcgcagcccctcaagcaacgttacacatgcacacgtgcacacattcgtctacgagcccctcatggccttgcatgcgagcccctaatcttgccgtctttcagcctcgcatcatcgcactagcacacacatgcacattgacatgcgagtccctcatgtcctcgcattcaagcccccatctcatcctcttgcagtctcgcatcattgcacccgcacacatatgcacactcgcatgcgagcccccatctcactatcttacagccttgcagcctcacatgtgagcccctcgcaca

SEQ ID NO: 9320 - DNA, 900 bp, Cannabis sativa
tataaatacgttataagaacaatacatgtaaatgtaatctcctattaaaaaaaattaaataccaaagtaatataattgaatctaccccataaagtaagaataaaataatctttacaacccaaagtaaaagaataaccgattaataataaaatatatgaatctacaacaatatgattatgattatacatataaaagagatatatcatattactatataaagaactatgataattttaaatgagatcaacatgccgtatatttgagatttttttttttaaaaaaaataaaaattattaaatatgtatagatattttttaaataaaaaattaaaatatttagagaattgaactaaaaaattaaaaaagtatgagaattataagccaagaagaaaaagaactatttgaagtgattttatcatattttatcaaatcactcaattaaatcgtaaagaaaaatctttatcaacatatcaaatcgacactatctattatatattagacttagttttagttttagattttagataatttatatatttgataaaaagaatgttatgagtgatatctttgtttttcaattattttttaattaattaatatttataaatttaataaaaaattaaaaaaataagagaattaagaaaagaataaataatgtaattggagtaattacacggtgtcatctaaccgtcttatttctcaactttatatatataatttatttttgttaaatttaaatcgctattattctcaaatgaaaaacgatgtatatatgttatataataatactattattaatgaaaatttattccaatacaatattaatagaaaaaaaaaaaagagaaaaaagataaatagattaacattcaattattaaatattatatattaataatttttta

SEQ ID NO: 9321 - DNA, 888 bp, Cannabis sativa
tgggcaacgtttttagccacagtagccgttctaaaacctgacctcaagtcatgcaattgaacccacaaatccacctcatttaaatccactaatcttggattctcccctgatttcaatctcaaaaaaaccagaaggaatttattaaaggtccacggactacgatcaatgacactttgaatatcgatctcatgatagaactgaaataaaaatcgattagtctccaattctttcacatacataccttttccaggttgccatagagacgccaaaaggtgttgcatagcatcaaaatcaattgatctctcagtcaaaaaacctcccaacaaacctatcatcataatctttctcagtttgatctctggtatcatacgccaatactgcatctgattcttcttctagccatatgttcgaaccgtcctcctcatccctcaatccctgacgactactagaatccataacagaaactcccaaaaactcactttaccgcaaacaaaaacaaactttacaaacagaaaacaaaatcacccaaagggagtgtacacaaccatgtcatatgacaagacttttttccatatgtcttttaacttatttatttaaggaaaataatttataattttgtatatattatataattttattaaatataaaatattttatttatatttaattatatattctatattacatgcataaacataattttaactttctatacaatctatttaaagtaattaattttttctaaatattattcaaaaaaaaacaataaacatgcatatttttcctcacaacaacaaaaagtaaaataaaataaatatacatattttgtttataaaactatatattaaatataagtgaattacttcatatatactatttttttaattt

SEQ ID NO: 9322 - DNA, 519 bp, Cannabis sativa
tatttctaaggcctttgagatttttgacaagcaaatgttaagcattttcttttgttttctttggatggtgtggactcaaaggaataactattttcaccataacagatgtttgcccccaatgtttatatatgatcatgcagtcacttatttgcaggaatttgagtttgcaaatcttaaaattgatgcagaacgggatgtgcagcaaccttccagcagacttcatttatcagttgcaccacgatgttacaagatcaacactgatgctgctcttgatattaatctgaagaagcatagtctgggtgtggttgtccgaaatgatcaagatcaggtgatagctggtattgttgctccggtaattgggaatgtgtcacctgaaattgcagaagcaaaggctcttcttctggctctagactgggctaatattattaaccttcctgttagtgttatggagtttggttgataaagttaatagttctttttgtaattatttgttattagtgatcttgtctcgcgtattag

SEQ ID NO: 9323 - DNA, 542 bp, Cannabis sativa
accacactaatgctaactcattttgttataacaaaatcattgtatatggacatacatgattaagattgatttgttttgaaaaaaaaaaagtactaataatatatataaattataattataattcaattattttttcgtatttaaataatttacaatataaaaaacagtacaaagattcagtagttgtatacgtgcctgtttcttttaacacgcgtgattgtttaaatattatttttaacattttttaaaaataggtaaaatgtctattataaccacactatatacagttatataataatattttagttaaaaattttctaagcctaaaattagagacatcccaaccgataaagacaaaattaatgtccctaaagcagattatgtctataaattgtataactttttatttaatttatacataagtttgtaaataattatggtctattaaaaatacattgtttgaaaacataggaattaaataaactcttcaatctacaatatagtccaccatttttatagttatcaaaacacaaataataatt

SEQ ID NO: 9324 - DNA, 1189 bp, Cannabis sativa
  modified_base (402)..(408): a, c, t, g, unknown or other
tagatagagatggaaatttatatccaccgtggggaactgaggggacccgctcttaatggggtggaaattccccgacttggtggttaatgggaaggtggtagggaataatttcaatactcgaagtagggatgaggcgtgggtgagaataatactatctataccatatccgatcctgaaataaatatgtatatatagttttctttttatttttaatatatatttatcattgataattaaaagtattttgattatcattcataattaaaattgaagagtgtcaattacaactttctattacaactttttagtcaaccactacgtttgaaatcacatgccgaaatatttttttttcatagcggtattcgtaaaatttacagtatcatccctgtaaatttttaaaannnnnnnaatagtttacaataccgaaaacatagttgttgatattccagtttaccactcgcgttcaaaaaacttcaaacgtattttcgacactgtaaactattcgaaaattttcaaaaatttaccgggatgatgttgtaagcataacgaatactcccgttatttttttttttttgaataaaacagttatttagtagctacaaaacagaatttaataattgtagaaaagaacataaaacaaaaagtgcagaaaagataaaagcacacaaagtttttataagattcattagataagttttaaaaaaatacaaagtaattgacttatgtataaatagactccctcttattatatgtcgcaagcttgatgtatttcacttaactgaatcttattgaaaatacaagtgctcgaacccccttcgatctccttaaagagagattgcttcctcccaaggaatgacttaaaaatctatcttccgaaagtttgtagaaccttctctcaaaggtagcattgttattcttctattgtagacttgatttcagacttgaaacaatacaaaatacgtaaacacaaaagaagagacaaacaccctctccacacaacaaagactcttccttacaaaatatgagggaaatacaaaaatgtgaaaaagatacaaaacctacccactataacctatatttataatcaatataccgatcatagacaactcatacacgatttaccacaactcacaaaaaacttgcctaaaaaaatcttcaataactcagaaatttttcttccacaccaata

SEQ ID NO: 9325 - DNA, 985 bp, Cannabis sativa
gaagaaatttcctccttaagcaaaaggtaattgagagatgattgaaggtggttagcaatgttgatgttctgagatgaaagagggacttgattgtaaatatgatcaatgtccaactgaagtttcttgatggaagcagagagattatttttttatttactccaatcaaacagaagatgaatacaactctattgcacaatgagaaaatcacggagaggggtgttggaggtgctggaatcaatagaattaggccaatgactcttgagcaaagggaaaaaatcaggttctaaaaaccaacgattttcaaatcgaaatctcttttcacgaatgccaagatgaggacttaaattgaaaaccaacttaatagcccgatggtcagaaccaaaaaaagggaggtgcctgagggtggcatgagggaaaagattcccccacgaagggctggaaatagcccaatccagacgctccaaagaggtaccatgtttccaagtaaaaggactacccatagcaggaagaggatgaagatcaaacttatggacaaatctttaaaagttaatcatggcatgggaagggggagtattagagttatttctatcattatacccaagataatcattgaaatcacctaagactagccattgtgctaaaggagcagtatcatgcaacctatttaacaaagcccaagtaatatcttcattatgaatataaggagagccatagaaacacgataaataaaaattattattattaacaagggagatattacagtctatgtggtttaaagagtaggacaaaatagtaacactaaccacatcattccaaaacaaaaacaaacccccctaaaccttgtctagggacctcaaaagcattatcaaaagacaatgtagccttcaacaggttgcttagtctccatcacaaaagaagttgaggacgatgttgagtgactagggggagagattttggaatgctcgggaactccctaatccacgag

SEQ ID NO: 9326 - DNA, 804 bp, Cannabis sativa
caaataccacaaaatttggggtctttaccctgtgtcaggccttggaaaggtgcacagaaaaaaaagtaaactaccttttgtctaatgttccactactctagcatgcattgtgcacaatcgacaacgtatgcccacctgtcatcatcacgtggtacaaacatgtatagatgacgagtatccctcaaattgggtctcacctactcaactcaaagtcaatattataatgtattttacaccatcattgggcttattttgacatgcaaactctaatgggtctgggtttacctgaaaacccaactctagcctataaatagggcttttatccttcatgcaaagggttatgatttttggctgtaaacactagttagatattggcaagagcactcttgtgtaaaatacttcatagccaaagagctcaataatattgatccatggactaaggcttgttaatgcttcaaacacgtaaaatctttgtcttctttatatttaattattttctataagcttaatctatttcttaattggatctaaaaaattagttagtattttggtgctttcattgagagcttgaaggaagtcttcaccattggtgtcatctaaaaccatggttacaaccaaaactacgaccggaaaaccatccgctcacaacaataatgataatgttgttgctgacaattttaactgccctcctttgtagacgctcaggcgggcatcgtgggagacagcgagacgtcgaaaacggccaactgtccacctcgaaaagatcaacaataagagaatcatgttgatgaaacccccataaac

SEQ ID NO: 9327 - DNA, 615 bp, Cannabis sativa
gtgtccacctctttgacacagaatcagatattgtcccctatgttagatcattgcgcgcaccaccactgcatacacccctttttttcgacggctctcctatcacctttgtctgtcagctgtcatgggctcaccttttcacgcagcaaaacacttgtgcgacactttgacttatctaagtcaaggtcaaccttccaatcatttaagtaacaattggctcatttttcgtgcgactgtgtgcctcgtgcacactttcgtttctcgaataactcccgctgagtcatgctcttaagcatctatgagtgcatccatgcatcgaggctctctaaccaagatactcacattgtccatataggttcccactatgataaagcaaattccaacaccgtcggtcacatagtcacttgtgactaaggtagtacgttaagttagtaatggcagaggggctccgcaggagatatggcctagctccaagcaccaaacccatctacactcctaaaaggagactcgtccagaagggagaggctattccagcatagacctagaatgttttggactctgcccttatttgagagtcgttggagcatattgtagccccgaaacttattcttgatttgg

SEQ ID NO: 9328 - DNA, 586 bp, Cannabis sativa
accagttggtggagtccatttcgcggcacctggtactgatgtaggcagaggatgagcagatgttgctgctgtatggtacttctttgttgctgatctgaaatttgataggtaattaacagcaaaggaggcaagaatcgaagctggttttgcagaagagccatgaaccactctgtttctttctgtccagattgaccaaagagtacaaacaatttgttccatctcttgtgttgtataaatcgttgagagatggaccaggtagtctcctttgtacattgcataagttttactccagtcaaaaaccagatccatgtggcgccatacagctttggcatatttgcatccaaatagagcatgcccaattgattctcacgctgatttgcataccgaacatgttgagtccgtaatgatcttttgccttaccaaagatgttgcaactggaagagcattatgaataactcgccaagcaaatatcttgactttttgagggagttgcaaagaccagaagtattccaccaagaagcttgtgaaaccgaactggagcaattatttgcactagcatcaactatggaggttgcaagatggtacc

SEQ ID NO: 9329 - DNA, 723 bp, Cannabis sativa
tcagccatgaagcattcaacgactgtgttcggtgtaaagggatgtcgtaacttcaaaaaaggggcatacttggataatttgtcaatcaccaccaagatggtatctcatccacctgattttggcaagccttcgataaagtccatggagatgtcgtcccacacctgagcgggtagcggtataggttgaattaagtgagcgggtgtagtagtaaggtacttgttttgctggcatatggtgcatcactggacaaagttgtgtacagttctcatgccttcgcaaaatagctctgcttgtaagcgtttgtaagtctttagctcacccgcatgtccccttgctggagtgcaatgatactcttgtagaatttgattcaaaaggtttgatttttttggaatgacgagtctgttttcgtaatatagcatgccctggagcaagctgaaaccatgatgaagctgtccttgctgaatatcactactgaccttacccaacaagggatctgcaacgatctctttttctagtttgggccataaactccaccccgcaacaactatcaattgttgaagtttagggatggattgacgggaaagagcatcagccactcggttactcgcctcacacttatattcgatatcaaaatttaggcccatcaatttggaaacccacttttaatattcagacccaatgaacctttgttctaacaaatattttaaactttgctggttggtc

SEQ ID NO: 9330 - DNA, 1201 bp, Cannabis sativa
cctcgaggttctagaaccaggagagaggaaacaaactagggaaatcctcaaaacacctaagaagaacagcctgggtgtacgagggatgttccaatgtataatcaaacaaataatcaagagcaacgacgagacgttcctcaaggatcccaaggatttatgaactaaggtaacgaacaaaatgacgtactagaagcttctcgcaagaatgaggaagcgagacagcctcgacctagggatcaaggaatcccttgtgaaaatgataaaaacccttgaaaccaacccaggacaagtgggctacctccaggacaccctcatcgtccttctcgatcagaaaaggaagatgtatacacgtatctaaatagagggcatgtatctaaactcttccaaaggagaaggccgatacagaacaaagcaagttctagttcaggacacttaaggtctcaaggaaacagtcgattaggtaggcaaacgtgatagagacgtagacctcaacgttatgcagaccaagaaagcatgagaaatacacaaagctaccaatatgagagttgcttagaaacaaggtctatgagtaattacgagcgatgatagcctaatcttcgcgaacacttgaattgaagacacactttatgggattgtttggatctaaaatcacctcaaaaaagaaattaattactattttagttcttcctccaaacttttcccaatatagacacactttatgggattgtttggatctaaaagcccctcttctaactcttcaattagtttgagttggttgttatcatcttggattctaggatccaaatcttctgtttccttctcgacttcttcattcaaaagtaccatcagttgataactaggttttctgttttaaagttagactcgataaccttctcgaaccaataattggtcgcctctaactgttcctactcctgagtgagtaggaaatttctaagataagtgctttatcaagctcactgcctccagtccaatcagtgttggtcgacccatcagtacattatacacagatgggatgtcaacaaccaaaaactcttgaatttgtgtcattgacaatggaggttcacccatagttaagggaagctcgattatgcctaagctcgcaacattgtcacctgtgaacccgcataaattcaccatgaaaggtcttagttttgctaccacattttcttcaatgtgtctt

SEQ ID NO: 9331 - DNA, 703 bp, Cannabis sativa
catgtggatggatcatccacagatcaattgtcttatgcagggattgctcttatcacacttgaggggcaacctttgcacggagcaatcaagtttggattcataacatccaataatgaagcaaaatataaagcacttatcgcgagactaaagcttgctcgagaggtatgtgatgaatatttagagatctatagtaactctcaattggtcgtaaatcatattcttggagaacacgtggctcggggagaaaagatgatggcatatatgagtacaatccaacacttgctcacacaatttaaaggatataccatcaagaaaatttccagagaagagaatgttattgttgatgcacttacacagctggcaagtaacacagtcaccaataaagcaaacttgatcctaattcaattcctaaaagaacccaacatcacctgcacggaagaaattaagatgctggataacatacacatctggatgactccaatagtagcctatcttaacactggtaaacttctaaaccacagaaatgaagcttggaaaatgatgggaaaggttgcgcggtattaaatagtggactatgtgatgaacaatgaggtttctccatgcctttgctaagatgtgttacaaaggaagaagttgaacgattcatatatgaagtccatgaaggattctgtggtaatcatgctggggcaaaaattatctaaga

SEQ ID NO: 9332 - DNA, 641 bp, Cannabis sativa
taaatgtacagttggcattttaaaatgagttggcaaaatataattagttgggacagagatggaacaagaatatgagaacaggtgaattttttttccaggttgattaaatcgcattaaagtgcatacaggtcatgcttatatgaagtagtgcaataaaactcatatcaaagcaaactctaattattagtaatattatatattaaatattttagggaaatctaacatattaataaattaattaatataatacccacatatattaagagaataggtaattaaggaaggaaggcgtgacttattcttttggtcattggtggatggaccacatgaatcatgaagtgttaaaagctatacgttttattatttaatttttaagtctatagttgacataaattttaaatttgtaagtggtataaattcatttagcagaataagtaattataaaagtgtaatttgttttttttttttttaattttgttaatacagattttattttaaatttattaaaagaatatttaaaaataactgacactacatgtttctttctacacctaataatttaaaatttgaatatatattgataaaattagagaaaaattacagtttataaacatttgtatttataccactaaaaaatcatt

SEQ ID NO: 9333 - DNA, 655 bp, Cannabis sativa
ttttggcaaaataaaactgttgctatggatagcatagtttcgtcaacaaaagaattccttaaccaatggctaaatgctcaaaaagctggtttcaaggcttcattttctggttttccacctgaggacagctaagcattgggtggctccacaagacagtagtgttaaggttaatgttgacgcatcattgttcagtgaaacccgtcaagttgggatttctttggtgactcgtgacgcatagagtttgttgattgaaggctgcacgaagatgtttcatggacaattttctcctacaacagccgaagtcatggggattcgagaagcactaagttggatcaaggtacgaaaaatggtcacatgttatacttgaaaccgattgtctcttggttgttcaaagccttacgtagttttattgttatgatttccatgtttggttaaatgggttaatgtatgtgagactatgcttaatgatttaaaaaatgttactatttattttgttagacgactagctaatatagtggtttacaactttgttaaagcctctatattgtagcttcagtttagagtctatttctactgatttgttacttgtttggtaactgaaacaattatctaataaaattattatattctattcaaaaaataaaactttcatatt

SEQ ID NO: 9334 - DNA, 936 bp, Cannabis sativa
tatttttatcttttaggagtgccaatttatcatcaatcataattcatggatatgaaaaatgtatagttttgtagtatttgatgtatctcagcactaaatagtggactcttggattgatttgcatgcatatatataattttgtacagtttgattttgttgcaagcatgttgaatggttatagttaaaatatgtttacaaatttaagaatatgtcgttagttaaattaatttcatatatttaatgttcaggtttgaatgtctacaccaaatcaagaagagaaaacattaacaacaagaagaagaataaaattaaaacaaaaacaatattaacaaactgaaatgcaaaccagaaatgcttggtttcaacagacaaaatagaaagctttgttgagtgatccaaagagaagaacaaccatattaattgcttagaactctttattgatcatgaatctccaaaaaagtgataaaaattcaagatacaagagccttagctttcgagattacaaatcagctcacttgagaggcaatgatcaaacacacattgctctctttaacatccctccaattcactctctaaagacttagaaaactttagcacaaaatgaaatataggataaggactatagctaggacagaaactgaaaactaactaactaacatttctccttagtatttatattattttgtgtgatgcaaatatcactttgatgtatattatttagtgctgctcctgagaaattaagataccataatctgtctatcctcttgtgcaaaacaaaatatgaaaccacacttatttttctaatatgatttcactgacccaatgagaactgttcgaaatgtagtttaaatattttaattctattctatatttctccaagaaatattgtctcataaacatatcttgcattatatgttctcttgtcaaccccataca

SEQ ID NO: 9335 - DNA, 708 bp, Cannabis sativa
ggaaacttaagcataaaatcagcaagggcttggcgtttgatagctgatcgtggtttgtatcttatgtcaaattgacttaatgcaatcgaccattttagtagtcgtgttgatgcatcaagcttggccaacacttggtgtaaaggataatttgtcagtacttcaatattgtgtgctgaaaaatagggttgcaatttttgagaagttaccactaatgcaaatgtcagttgcttcatttgtgggtagcgagtctcagcaaagagtaagtgtttgcttacataatatacatgatgttgtctaccttggtcttcatggattaatgccaagataattgcgcattcgatcattactaggtagattgacagtacttctctaggcatcggcttggaaagtatcaggggttgacccaagtgcatttttaatgcctaaaatgcttcttcgcatttgtcagtccattgaaactttttattaccttttagtatgtgaaaaaattctttacatttatcgaaagaacgtgatacaaatcagtttaaatctaccactttacctgtaaggctttgaaactctttgggcttggtaggagattgcatctccaccaaggcttttatttttgctaggttcgcttcgattcatcgctggtttaccataaaaccaagaaactttcctgatcctactccaaaaatacactttaacggattaagttgcattttg

SEQ ID NO: 9336 - DNA, 619 bp, Cannabis sativa
attaattaaatatattagtgtaatttatttgagaagataatagttaattttgataaatccaaataaagtgttcttttaagttgatttatttcatgtttaagaggatattttttgtttgtgaaataataataattacactattaaaattatttttattttatataagtaattgattattattaaaaaaaattaacaattgaataaataaataaaatgaaagtatttagttttttagcgattgatatattcacttgctaagaaactcaatatatctatacacataactgctcaattaattcaatttatttatatatttatttgtcataaaagttatctatttcttatttttctttcatactaaaatacaatataaaaaattaaaacttaaaaaattcgttactttttgcacttagatttcattcaattatttttgtgtagtaactttccatagctacaaaattataaaaaataaaataataaaaaaaaaaattgtttaaacaaaagtgatcaccaaaagaatagaatgattgagaaaaaaaaaactcaaataataaggatttatacaatttggttagtttgttttatctctatttctttctctctttcatcatctttttat

SEQ ID NO: 9337 - DNA, 763 bp, Cannabis sativa
tcatctcttttgtcccagtgggcaagtaactcaaaatcttaccccatttccttaacttctacatccgaaacaacccttggatatatgaagctcccttgagcagatacggtgaactcgctccttcgtatctcgatagcaactggtgcctctaactcttggaccatgcgatctattttgccagaagaccatgagccttgttggtctacccttgctggaacctcatcttctgacagtgatgtgggaataaaactgtccctcttttgaggtttgtctgcgaatgctccaccctcagactcaaacatctggctgttgtctgagagatttctcatctgaaagatagaagatcttttcagcgtgttgtaattacaatttaaagagtgtcctcatacggataacaaatttagattgaacaaaaatagaaaaactaacaacaagatagaatgaagtggttcagtgtatcacagtgtgttaaggtttatatgggtaaataaatattaaatcactatgatacacccaaccacttcaaactcttttagtttgagatcatggtttgataactatatacgtgaatactcaacatgttctaactaaaggtgggactactcgaagttcataatagaaaagatgcaagcattcaagttataggcaaatttttcaaaaaaattattcttcttttgccttatttcttcttgaggttttatttcccaaaacctatcctactgttgtcatgcaatttttaccccaaaatattcagaaggcacac

SEQ ID NO: 9338 - DNA, 543 bp, Cannabis sativa
aataaaatttattggagtcccatccaatgagcattatgattttgggacgtcggatatctctcatttctccatagtataatattgtctattttgggcttaaatcttcgtaggtttgccttttttggatttcatctgaaaagcttcatgccaatgttccatcctttaagttatataattatcatatttttcatttttaattaatgggagattttaattgcacacccaatagtgatgtttttttttttttttcaaatgtttaggagatatataatgagaataagtataaaaataaattaaaattatattcttcctgatggctgaaaagaataattacactgaaatatttatattgtaaatgagtattattattgtacactaatagagtttagaaccatctataagtagcgctttattaatagttaatgatattcaaatataattattatattaaaattatgtaaaacctgataattaattacaacaacaatataacacaatacaaatacagatgcctttagtatataaattgagcagaaaccatcg

SEQ ID NO: 9339 - DNA, 825 bp, Cannabis sativa
aattcgagatttagtggggagtatgtccgagaaaagtttccaactaaataattttagtcggggatgtattttagttttccagaatcttttccactggggttgggactcattgaatctatttttttgactgagccagtaagcacttttgactgtgaacttgcccgactttgctgccttccagaataaaatgtctcgaccctcattgattggtttgatcctaagaatctcctcagcaatctgtggctcaaaacaggctgtaatcagattttcattccataatctagtgtcctcttgaaacaggtctttaactttacagaaggcctgatttgggataaagtgaaaactatctcgaatcccatcaaattctcgtccaggtatccaaggtttgtgccacagctcacattcatcatccgcaatcaaaattccagccccctggagacacactttcctaagaaatacccttgagaaggtgaaatttacattagattttacaataataaattagagttgtgctaaatatataatgtattgaaattttgcattaaatattggtctaaatattattctatattttcactatatcgaatattgtgaaaggttgggtgggtattcaaaacactagtaaggtaatctgtttcaaaaataacaataggagatcaagaagggaaataaaaaatgaaaataaaactgatattgaaatgtgatatggtatttcataatcactaacattatgaagataaaacactcaattatgatcttctagcacttgtgtgcgattgcaaatcaacaccatttttaaacattattaaatcatttggtaatata

SEQ ID NO: 9340 - DNA, 615 bp, Cannabis sativa
gatggagaggggtggagggagagttgtggaaggagagactaaatcacttgtttggcaagacggagaagagagatggagggagacattctccctccaaactttcaaaatttaattcctctaaatttgaaaggattgtagaacaagacaaaatatattttgcacaatgcaataactacacttaaaaaaaataataaaattttatttttaaaaggataattttgtaattttattaatcaattttttctccatccttcccacctcacacctaatatcaaacaatacaaaggagagaacaatcttctctatccatcttactccctattctctctaacctctccatccatcctactctttctccctcccaccaaacatagccttaatgagaggaccataagtatatattaaacttataatcatgtaataaatatgtgaacaaagtatatgacaagattaagatataatttctaatttttattgaaaataaataagtttacaataaattgaattttatgcttaaacaatttcggagaccacgtggcagttattgggactttatatatcatcctcccttaattaggttatcccttgacccaaataaggaaagattccaataaa

SEQ ID NO: 9341 - DNA, 671 bp, Cannabis sativa
accttttatgtaagaaaaagaaaccctatctgaaatattattagtttttgttttttttttctttcttttcttttttttttccatgttggtaatggtatttttccgccacaagtgaggtttgcttaatatatataagttatgtttttgaaagatgaatttgtatataatcattcattacattaccatttcttgttttatacatatagtatggatgagtactgtctctgtataattagtaataccagaagttaaattttagatttcagattcattttgatatatatatatacataacagcatcaaggccactgattctacataattctacagaacttccggtaagttctgtataatcagtggccttgatgctattacatatataaaaaagaatatggagtctaggtttccaacttttagtattactaattataccgaacttccagtaagttttgtataattagtaataccagaagttgaaaacctagattccaaattctttttgatatatatatatcagcatccactgattatacagaactttcacgagctggacagggttggaatataaccctctacttccaatcgagataataatcatggtcttatttctgctgcattgtagcgattctagacgaggaagtaaacagagtttgaaatcagagaaacagagc

SEQ ID NO: 9342 - DNA, 897 bp, Cannabis sativa
ggcaataatggttgttgaaggcagtaaaagtgatgtatggcttgtggacttaagagctacatggaatatgacctcaaggagagaatgattttatcaatataaacctatctcaagaggatatgtgttcatgagaaacgaccatgccttggagattgctggcattggtattatcaaactaaaaatgtatgatgatacagtttgcaccatccaagagatgcggtatgtgaagcacctgaagaaaatttattgtctttgggacaattagatacaaataagtgttagacccaagtacaacatgggatcatgaaagtcgttaaaggcgtgcttgttgtgatgaaatcagaaaaggtagaagcaaatttgtacatgcttaaagtagaaacacatcaaaaaggagaagcgtccaccactttagcaagcccaatataagaatcaattacgatatggcaccgtaaacttagccacatgtcataacgcggtttggagattctcgctgaacagaaggtatttctagtgcttagaaaggtgtcactatcattttgtaagaattgtgttattagtaagcaacacagattgaagttcaaaagatcaactgctagaagtaaatctatcctagaacttatccactttgatatttggaaagcaccaattttgttcttaggaggtgcaatatactttgtatcttttattgatgattactctaggagatgttgggtgtatcaatcaagataaatttatttattttacaagttttcaaaacctttaaagtaaaaattgagcttgaatcagaaaagaagatgaagtgcttgggacatgataatgaaggagaacatagcagtgatgaatttgatagcttttgccaataggaaggcctcaaaagacagttcacgatggcat

SEQ ID NO: 9343 - DNA, 573 bp, Cannabis sativa
taagacaaatgatataattcaaacttaatgtcttttcaaaatgaagtatagaaagttcggaatataccctttcaaatttcatcttatacaagtaacatgagaaaaaaaaaaatcaattccgtttggtggcctgactggattttaaaaatagaaattgagagaaaaataaaatagacaagtatgtaaattaataattttaagttatttttaatttcaaggatacttcaatgatgcgtgtgtgacaataagtttttgaatattattattaggtattaataatacttaccatgtagacatgtagacctgacaccttataaaaaatttacaataattattaaaataaaaattaagttatgtgaaatataatacataattataaattatatggcatttaagatgttaaaaaaattattattatttttttggtttttttatataccattttttagtaaataatttcttatacttgctattgacatgtagatgtgattacaaataattagttagtaatttttttttcttttacattttattttttatgaataagttttgtattattttttttaaataatt

SEQ ID NO: 9344 - DNA, 699 bp, Cannabis sativa
aattattatatatttagatgatttttttttaaaataaaaattaaacaataaatcacctggaccaatcacaaagtgacacgtaagtactaacatatcactacgatcaatggatcaagtacctacgaaagttttgaaaccctaacagtaactatttttattgtaaaaaatgttacttagttatttatctgcaagtaagagtaacttatagatatttatattgcaaattacaaagatctttactcacattgtcccgtctcgccccatgtgatcacctatgattttttatagagcattgctatttgatattttaaagtgccgaatactaactccgatatgtcatcctataattagttagcagtttctatatcttttattaaattaaaacatgcaaaacttaatattaaaatgtcccaataataatacatcatatctacgttgttctatttctagtacttctttacccttctcacatgtttttgtgaatgcaattgcaaatttgtaatccatacaaagatgtttcaaatatcttttaatttttctacatgatgatttatgagctgatcatattgatttaaacatttcttcccataatcataatcataggctttggcaattaattaggaaatatacaccaattctagactgaaactaaactctagaattggtgtaaatgcaatgtgttcatgttggttaaccatt

SEQ ID NO: 9345 - DNA, 548 bp, Cannabis sativa
tttgaaattatattatatatatatgctctggtacagttacatatttaatataatatataatatttgatcaggacaagatttcacttttcaaaaagttctctcaaagttagttttgtcattgcctgtgggttaaatgaaactggaatgtctattagagcttcgagaagaaactgtacatctcgtgtgctcgaaaattagctagcttacttcgattcatttatacacgtacatatatatgtaccccccaaaagaaaaacactctattcattaaatgaatatataatatatagcatctttgtccttgattgagatcatgtaattcgagctcgggataaacttaattattaaaacacaagaaaataatggagaaattatctctagggtactctctagccacacaatatatatatttatatacatagattaatttacataaaacaaaactttgcaatcttttatttatttatttcattctgatgagaacactgaataatccaagtattgactggatcggaataaatgaccaaaactgtaatggaaactcttat

SEQ ID NO: 9346 - DNA, 1276 bp, Cannabis sativa
tggtgcacaattccgtgaaggccttgtaccataaagtatttttggcatacttgcctacttttgacatggccttgcagttggtgtcacccagccattggcgattaagctggctgaaatagagatagccaattctgttctgcttcagcccaaactttaactcagaaaagtatccaatctcataaggggtaggtggaggccaaccaagtgccctatacaaaatgaacatcgccaacaaatatttaatgctctttggcatgagctatgttgggcacatctccaagtaggatgcgacatccaggaagtaatgatgaagtggaaacactgccccatgctctatgtggcagctagcccatagggggcctgtgtgccctacagttcttgcgaggaatcttacaatgaacacccccaacaaggccactagtaatgaccttgtcaaaggcctcactagaaagagcgaaagctggcaaaacccaccttgtcttaggcggcttagaatccaatatgtctggcatgggagactattttaggacatgatctagtcctactactgaaggcgcgccaagaccattcatcagattgtctcgcacgtcataatggcctaaacgatggttagggaggattaaacatgtcctatatcttattcccttcattggagcggcctcctctaactcggactatgtatcggagcttccagtctccgagtctacttctgactcaacttggataggagcccaagcaggctcctcctccactctaatccgaccccttgtgggcaccatggccacatggggatcatacggggtgccttacacaaagtctattttattcttgccataaatacgagacgaacagaagacctacgcagttgtcacctccccagctcaacactgagcactacctgcatggaagaaacaaggggaggtgaacaatctgacaaagctacaagtatatccaagtcaacgacactcaacggcatcttttaggaaaaataaaggatacaaggtcgaccaacgaccaagtattgtcttaggtgcaattaccaagacacacagtaagtcctaagttgcacaattaactataatggactcattatctagccttatacagagttcccaatggaaaccacgcattaggccacagttgtatatgcctccaaggccgccataagactttaatcgtggtccaaagagggaaaagaactggctccccgcttggtgccttggccatggctggctaggggtcaagggtgtagagggcggccagaccccaagaccca

SEQ ID NO: 9347 - DNA, 541 bp, Cannabis sativa
agggaagctaattctagacagtaagggctagaaaatttccatattcacgcccccaaaacttgctcctacctgaacctaaagctaccaaactttccaaaacaataatttgtggtattcttaggataaccaacaacaaaatcacctaaaataacatgcaaaaaaattcagcatggatgcggaaagcttgagttcataaaactcaaacttcctccaaacttgcctcaacggccacaacttctaaaaaccagccataaacaactaaaataaagctttaaaatagtttctacacaatccaaacttatatagaacaaaactccaaacttctcaaaaccacataattaaaaacaagctttaaccttaaaattaaaagtgggaagggaacgaggattacctttgattcttctaagcaattccttccttaatgcttactaaaaaggaaaagaattggtttgaaaacttttttgggttcctattggttctctttggtttgggttagggccgaaagagaagagagaatttatagatagagagagagagagag

SEQ ID NO: 9348 - DNA, 1680 bp, Cannabis sativa
tcgccccccgccccccaaatccaattttctgaggtacagagtaccatccacctttgtgaagaatgtcgttgtagccgaagctctatggcgtcaatttgacactcgaaaataaaatttaaatagtttatttcacacatgactattttttcttatacatatttttcgcactgaaaattattcaaaataattttttaaaaatttacaagtggtcttaaataactataccttacacgattatgaaaaaaaaaattaaactaaaaaactctcctaaatgctaaaaaaaataaaaggggtctaccaaaacatccatttaacaaccatttaggggagtgtactatttttctaatgcaagatataaaatttgtgttaaatttggtacaaaaataaatttgtgctatatttaacccactatatataattgtgctctaatgcacaagatgtaaaataagtaaaaaaaaaattatatttttattgatagttatttaatattttatcgagaatagacaaaaataattatttattgtttaaataatgataatatggtaaataaagaagataaaattttctaaaagtcaattaattataataattattgatactacaacaaataaaaaaaaagatattttattgtaggttaaatttgacataatactatattttgtgccaaatttagcacaactttttagtatgtactaaatttaacacacattttagaacactattagagtagtattctttctaagtgtgctaaaatatagcaatatactatattttagcacttccttagagatactcataatttttttttttatttttttagcattgcttaagtgtattggctaaaatatagcaatatactattttttttagtactttattagagatgctctaaaacactaatagtacttagtactatctagatgtgacattttgtaaatagttaacgatattatataataattattaaattaaattatatgggacttaatatttaattatattaataataataataataataatatattatttagagtctactagtgccttttaacactgtttttattacccatatagaaaaaacatcattaatatcatgtgatggtgaagttggtgttgttacctatcatgtataattaaataatatagaaatatatacaatgtttattattctaaaaaataaagtcatcatgctttgctaatgcttggcatgagcatgcgtatgagatatggttgttaaaagtattttggagaaatttttagttttgtttttcttttatttttaattgtgtacgttatagttatttaaaattatttataaattttttaaaaaaattaaaataatttacgatgtcgaaaataaagatcaaatagttatttaccatgctacgtaaatatttgaattttattttcagaactagaaactattcaaatttttttaaaaatttattaataatctaaaataactataacgtacataattatgaaaaaaaaaaattaaaaatttcttataaataaatagtaagggatctagttacatattttttttatttgggtaagtctatgatcctaaaaaaaaaaggtttattataacataataaaatataaaataatactttagtagaggtattaaaaaaaataaaactgtcttgctatatatgtatgtaaatatattcaaga

SEQ ID NO: 9349 - DNA, 1570 bp, Cannabis sativa
tcgtatcgaccatgtgtttcacaatgacgagtgggttgatgatttttcgaatacatctgcgcatttctcttgggagacttgttctgatcattgtctttgtgttgttcattcgattgctacagaaagtattggaagaaaaccgtttcaattctacaacttctggattgatcattaggattacaagaaaattgtgttggatagttggggcaagcctctaagatgttgttggttgaaggggatatatctataaaccacgagactcaagcacaagttaaaatccttcaataggcactcgattgggaacattggagatgcttatgagaaggccaaggataattacaaagaggctcagttcccatgtcaatctaacccgaacaacaatcatttccttgagttggagcgtgcggctactaaccattttcacatttagagaaaaatgtacttaaactttctcaaccaaagaagctcggttaattggattcaaaaaggagattgtaacacagcttattttcatgccatgttgaagaagcggaaggaagaaaataggatagttttgtttcttaccgagcaagatgatttaaatgatcactttcctgatgtcgtgcaacattttcttggccattttaaaggcataatggggaaagctgagcccacctccatggagatacaatatgattgcatatccatgggccctaaactcaacctcgatcagcaggttcatctcttaaaacctttcactctcaaagaagtcagagctgcgatgtttagtatccctaatgctaaatctcctggccctgattgatttgatttagggtttgttaagtcagtttggcctgagatgggaaaggatatccacattgagattactcacttttttgacactaatcagttcttggaagagcttcatagtacgactctctgtctctcttatcccaaagattgatattccttctaaaactattgactactaccgacccattgcctttgcacaactttatacaaatgtgtttctaagctgatttgttcccggtttgctaatgttcttccttctttagtgagtcagaaccagggagcttttgtaaggtccgatccattgcttacaatattcttattcttcgagacatattgaagaactattgaaggaaaattgttcccccagatgcactatcaaaattgatataagtaaagcttatgatacggttaattgggattttcttgaaaagcttctagtggcctattgcttccctactaagtttatcaagtggatcatgaattgtgtgagaaacacatcttattctttactactaaatggtagaattcaggggacttttaacggttagcaggggctaagacaaggggatcccatctctctccttctctttattcttgtcatggattatttgtccccaagaatccaaaaagcagtcagagaaaaggattttaggtaccatcccttatgcagaaaaatgaaactcacaaatctttgtttcgcagatgatttagtgatattttggaaagggaatgagggctctctaaatgctattagggtcatgcttgatgagtttagcaa

SEQ ID NO: 9350 - DNA, 846 bp, Cannabis sativa
aaagtgtcatattgctcttattattgtaattcaatttcggattcatatattttaacttaataattattatgaaaaactgttaattacttgtaagtaaggtcgactttaaacatatgcagactaggcctatactaagagactacattttttgggagtccaaaataaaaaataaaatgttttgctaaacttttatttgaataaaattaagtgtattataaataacaaatattcgtaacttgattggtaagaatgtatgacacattctacaatagtgtgaatttgattctcaccataatcttttttaatatttttcatatatatatattattatattttataaaatgagagttctaaaatttaaatgacctaaagcccgtatattctgtataagcatcattgattcattatactattcattatgtaataacaatgcttcttctaatatagtttttgaaggactttatgtggtcctcatttttaagatgaataaatagattggtcattaaggcaaacagtttgaaagtttgctctaaatcccaataaaaaaaatactagctaatatatagaataatcattcaatatttaatgcttaaacacaactaattatcagtttggactattgggtacatgacacgtggcatttgcccgttaaattcacaaaacattatatttaaagacaaaaagaacaactgtataaacacttaaaaaaaatttatggggacattgtcaacattcttgaagaaaagattccttgcctcaaatccacacatctattgtttaagttgccataaccatttttttttgttagtgagaacattaatattatagtattataattttagtatt

SEQ ID NO: 9351 - DNA, 978 bp, Cannabis sativa
agagaaaataaggcctcaactaaatccttggttttgccaccttctctcttgacgtctagtgaggagattgtgattgctgatcttcctcgtcctatgctcactgcccaactataatagaagatggacttgaaagacctacctcctactcaactagctactcaaaaggttaaggaggagactctttttgtggtgcaaaaatgaagagagcaaataaggttgttgggagttaccaagattgtgttcaggctaaagggaatggggttttgaaggggtcgaaggggcttcccttggacacactggtcgagtactttttgagagagctagctaaggtatatcatattccctttatttactgtttgtggatagtgcacaatttttttgatacttgttattatttactagatgcaattttaggcaagatacatctattctcaaactaaagtattaattggtcaatttgctgctgataaggatgaatggggaggtaaaaaaaaagaaagttgccatggggaatgctaacaagctattttaaactaaaaaatgaaaattgaggagcttgagaataagctatatgatatgcccactattgaaaagttacaggaagacttggaagttgagtcaaaaagggctaatgacctcactgatgaaaggaatggcctccgcacactccttcaaagtaaaattgagaaaatcaaagacctcgagcagaaggttaaggatgtggaagatcgggaaaatattgttgaagttgctcttgaggaaaagatgtcaaactagattcatatataaaccttgccacagtggttttttatgagttttgggtgactaattctaatgctgacttctcctatatgatggagaatacccgaaatacattgcttggaggatgaaatgagataaattgtgtgagaagctaaagcagctgaagaaaaaaaatttgaacaaccaggtgggggactgttggtgaactctctgagc

SEQ ID NO: 9352 - DNA, 538 bp, Cannabis sativa
agataccaaactgtctcgaaaagtaaaagattacttgggagataccaggcccaactttgggaatagacggattaggcctgtgcttagagcccaaacaaaaattatacccttttaaatatatttttttactaattttgaaaaggtcgaaaactatgtttttttatgacccactaactttcaggaccgattttgtgagatactaaactgtttcgaaaagtttggagctttataattttatctttgatatatctaaactaggacattagtgtattgaatgtatcatcacttgatttcttctaatcattacataatcatgcagagcaaatttatggtgacactcaaccactagtgaggtctgtgttagacggctacaatgtctgcattttcgcttatggacagaccggttcgggcaagacttacacaatggtaatatgctagactagatttgttatcataaatcataactagtttattttgtgctgtaaaaacttgacaagtttttctgcaatttatgacagagcggtcctgatttaacaac

SEQ ID NO: 9353 - DNA, 1169 bp, Cannabis sativa
tatttaaaagtaataggcctaattaaataattttaagttattttgcaatgataacattcttttgataatttattcataaatatatctatataatgtataaaatagggtgttaatgtgtccaaaaatatatttagtcacagtcgttattatatcaaaaataatatatttataaatgaaaaccattaccttgtaatagggtctctatatatttagcaacattagtaccttgtaatagagatttattacattaattttataataattatttttaatataattaattacactaatggtgatcatatatcacctttaaatgcgcactataagtaccatttgtgcttttcaatatttctctattacatattatatgaatagattttacaattaatcaagttttacaaaacaattaataaaagatttttgctaattaaattgattgcttagggtttagattcacagttgacattatttattggtttacatgcaactagggttacataaatatgtctaaaagtgtattagattactagaatgagacaaagcttttatatatattatgattattgtggtttaagtcttccatggccaacttattcagtgtatatatctcagttggcaaaacatgcactttactcttcgttgactttccaagcatataaaagctttagttaattaataacttattataatatatcttactaaacctaatgacaatattacgtatatatatatatatatatatatatatataggttacatggtcgagtatatatagtactatatattcatttaaatacaataactcaacttttcttatagtgggtttgtgtaaggaattatatatatatatatccttaattacctctctgctaattaattaccgccccactatgaaataatgctatatatatagcttgttctactcatcatcatcttttttcttttgaaaaatctattttattttttcttttaccaatttaattaagttttatagagagagagagagcccgacaatagaatgtggatagtaacaaactgcatggaatctatatatgtgtgaataaaaatacataaaaaaactaaaatagagtgtattagatgtttagttaatgtttttaaatttatttaaatctaatttaattatacattaaatattaaatttaattatt

SEQ ID NO: 9354 - DNA, 705 bp, Cannabis sativa
gttatagtaccaatgaactgttacatcgaggacgagagctaaataggcttttttcatacatgacaaattgaacgattatctttctctacacaaacaaatacttgaacaaaaaattattaaaaccaaacaatactaatttagaaaattaagagctattcattttaagtacaagttctatcatcattaattcatgtataattttacaactaaattataaaagagcttttgagtgagagagaagagtacactattttatactagtttaccaataaagtaaaacccaacacttcacctttcttctattttccactgctttttggttccatttggattcttctccttcttatttcctcaacttctctcgtaaaatacacactcgcccacttccactaccaccaccactaagactaaccacctcctttttctttttcatacgtacacaaacttttactgtagatttacacaaacacacacatatatatatacactcaaatatcttcaaccatggcagaagagcatgcaccagaacaacaacaacaaccaccacctccaatacaaacacaaaaaatgacccacgaaaaaggcaccccaagcacgagcgacccccgcagggccctctgctcctgcatctccgtcttcctcctcctagccggcgtcacagcgctcactctatggctcgtctaccgcccctacaagccccagttc

SEQ ID NO: 9355 - DNA, 560 bp, Cannabis sativa
tggctcctttcgccttagaaatggtgagccactttactgctgatttaacccaacttcccaccaagagatatgcggcatgtgcttgttctaaccccgtataccagatccaagacatgagtgttgccctgactgtggtaagtaataatcttctgggtctcttttatgcttttactttcgtagttctaactttattcttttttggctgttagattattgcggaggccggttgtctttccaggaccttgatcgaccaagggttcaccgtgtcagaacttggtggcatggatggggttatgaagaagctccgggagttgaaggaccaggtggagaccgttcgcaaagaagctcgagaggagaaggcccttatggagctgaaccatcaggcggtgccgaaagctagggacgacatggttgtgttggcaaggaaggacctccgagactctaaggaggagaaccaggaccttattgtgaagattaaatctctagaggagttacaccagattggaatggatgcaacaaccaacatgactgttgaactaaaaaagcttcgcgagttttgg

SEQ ID NO: 9356 - DNA, 654 bp, Cannabis sativa
taattttcgattcaacagaaaacgtgcggattctccttctagcagaccgatcatgacaatgggcgaagcttcgaaaatcatctcggcagtggaacgttctcggcctcgttattctggccctaccccggagcagttggctttgacttctgtcttggaagctcgtgagcgtgaagaggaggagaagagtgctggtgttgatcctggaattagtggtgatatggattatatgggtgaagttaataaagatgatattgtgggtggtggtgttcaatgtgttatgggtgaagttaataaagataataatgtggtgagagagtgtgagtcggctaagatgggggatggtgtggcgtcacatagtgtagctgagttgttgaaaggtaaggaggtgattaatggtgggtcacatgatgtggtagcttcctcgggttgagtgcatgtgcaatgtaatgttttgagtcaaacagggggtcccagtaaggtgccacttcaaccaattgataacggaaaagaaattttgcatgatcctttaaatgaacatttatcttttagtcatgcttttcaacaaacttttgaaccccttatcaaagcacaaaaagctaagacttggaagcgtgttaattcgtcaaaggttcgtggttctaaaggtatgcctaa

SEQ ID NO: 9357 - DNA, 1448 bp, Cannabis sativa
cataaaatcttaatatgtgattcttgcccccgccctgtttaacattcaatgagaaaaaaatatttttcgtccctgtcctattccctatttagacggataatttgtaccccattaagggcatgtctcgggggagcccatttctatggaggaaatgtgccttcctaattattagaaacagtctttaaaaaactgatttaaggacggaagggaataaaaagttttatagtagtgatatatacaataattatagtgggttttggttttatgatcattttctccctttgttaattataggctattaattaaaacaattgttatttttcttttaatttacacccatgtattatgataactttaaaatggtatgattggtctaaaatctataagaacaatttctcaatattatatatctttccaagacagacgaaagattattcgtttttgaacatgagaaaactgtattttgtagagactatccaaacaagtcctcgtaccctttttattcgtacgtattatattaagaagcaataaacagaaagctcatgacaatctacaattattgttataaaatattatactattagaactttcttaattaattagcaatagagattgctcccaggagaaacaccaaactgtctgcagtagtcattgtaataattgatccgagcttgaactttgtcaggctgtttgccatcgcattcaagagcaccattgatctttcttgtggtggcaccaaacccttggcccatcacagaatgaacattcgtcatccagaaccacaatgctgatttgaacgagacgatggcgtcctgaccaactctttctggtgagttcaaggtatcaatgttgttgtccctgccgaaagctccatagttatagttccatgtcagctgaagtggtccacgcccgtagtatttcttgtttgggttacagggatactctctacttgacctgtcgcaataatcgtgacttgcacctccagtctcttctatatagcatagaactgcagtttacaaagccaaattactcgcacattattattaaaaaaacaaattgtatgtgagacaagatatgtggatggatcatagctgatggtataatcttaattaaatcttacatccagtttcgtgagtaatgtgggcaaagaaagctgcaatctcacgcttagattgatcagcggagccagaaccaaattggcgaaacgagttggcagcgttgataaaagcctctcggttgtagaagctcttaccgggacagttcccagtagccttgttttttattccattgaaaaattggggtgtcactacagaagctacagaaccaccattgttggaacctgtacaaggtccggatcggcagccttcgccgcagtaagcttccccagaaccacaatatccgtatctgctgcagcaaaggttagagctacagccacagttttgagccag

SEQ ID NO: 9358 - DNA, 843 bp, Cannabis sativa
tactttaatggggtatagaaaaaagaaaatatggtattttttaaattaacaaaaaaaaataagtatattttttaaataggagtacttttttaagctctagaagcgagcctagcccgtgtatacacaagagcctgattaaatcgtatataataataattaattaactgattaagaaactatttacttaccaacataataggaagattagagtctgtgactgaaagggttagatcttcattccactcgggattaacatccttcttaactactcgtgtctttagtttctgtattaatgttaattaaagaattaattatagatttgaactactaatatatattagaaagagagggataacgataaagggcacaaataatacttaacgttgatatcatatttaagtattggatcagatgtcacatattttaatttaataattattataaaaaaattgttatatatttgagaggatgacgaacgtgaaaataattattccctaagtaacaacaaaattattgggtcatttctaaaagaaaatgtagtatatttcaaaattactaaaaaaatatgtgtatttttaattttaatttttgttttcgggccctctggatggggcctaggccagcgcttagcccatcttaactaagtctcaactctataaacactcactgatacttaataatactgatttattaaaaaaaacaattaaatcttttgatgccaaaatcatatataaattaaaattcaaaacaagggaaactatatggctaattatccataatttaaattggaaaaaaaagtttaagacattaatattttttctttatatgaacttgcttaacttt

SEQ ID NO: 9359 - DNA, 948 bp, Cannabis sativa
tatatatataacattatatatatgtatatagtctttgtcaaatattatatatcttttgtgtacagatcaagttcaacaaaacacaacacgaaataaataaaataaaaggataatatttgagtaactatatcctacaatatattgcaagcaaatactaatgcaacatatatgtatattagaaaatacattaaattagagataataataattttaattattataataataataataataatgtgaatttactttatatattattttttaactttttttttttaaatttacggtttggattgctccggtaatttctatgtgggttgcttatgtgaattttgattgcgatttatgttgctattagtttctatcgggatttctgtgtgaattccgtaaaaatatataaaaaaaaattattttaaagtgtaacaataaaaaaaaaaccctaataataataacaacaacaataataataataatacctaatgagaagctttccttcaacctctacacattcaaataatctgcagctactagtgaagggtatctctttctttttccactctgaaagtgagaaaagactttactttattattaaatatttatataaaaaatgtcaaatagaataaactattcaaacttatagtaataattaataataaatctcagattcaataataataatttgaagaaggtagggattttttaacaaaaaaataaaaaaaaaattattttttatgtgtataaatttttataatacgttctttcaaaaattattttctttttccttcaaaaaaaaattattttctttttttttttaaaaaaaaaacattgtttttaaattaattacaaaaatacgttattttattatgaaaacacgattttgaataaatatttaatttagatcatgaactcaacatacccaatatatattataaaactaattatttt

SEQ ID NO: 9360 - DNA, 582 bp, Cannabis sativa
ttttttatcaaaattcagtattttcataaaaatccaactaaataataaggcaaaggcgtgattattgggctcaaagtttgttaagtttggcccagtgatcattcttaattatgtgtgggcttaatttaggcccattttgatccaatatcccaaataacagcgttctctccaaaatctcaatactaacaataaaatcggaataaaatgagttgaaattaaaatatatcgagtgggatgagatggggcctaatttttgtaaagagaggccagttgccaagtgactatagtttatagttacttataataaagaagattcagcagatcttgtatttttccacttaaaatattctgacaaaacatgtaaattttaaggtcactcacaaaaataaatgtatatttatttattacatgtgaatcgtacaacaataagaatttaattagaacagtatatttgtcccacccaagtgtttaggacaataaattattaacataaataaattaattattcaaaaacaataaaaaatttacatttttacagaattttatttatattttacgtacatttttttacgttattttgtg

SEQ ID NO: 9361 - DNA, 635 bp, Cannabis sativa
gtggaaagtagtggtggcggtcgccggtggtggtggtggccgaaaaggactttagccggtagctttatacataacttgcttctatacttatagtttacttataattaattaagctcaattttggcgtgtgggatttctctttttggccatcatcattatcatcatcattaatacataaatataaagtatatattttatgtcatatactatagtaatattataatttatataatagtaaccccttaaataggttttcattattgtttgttgtcacaatgcctatatatgttttcttttatattatgtgtctctttttgttttgttattattattggaaaagaatagaaaaagatttataattcatgcaccaaacatgcaaagatggcttaaaagactttagcatttaggtcataataactaggaggattttttaaatttgggtaatggcccataatttatttttggcactatatatgtaatatatagtcacattgtttgtgctctaattatgtgggtagtctttctttctttttttcttccctcttgattggtaaccaaaggcatgtaataaaaaagctttaataattcattactcaaatgtttaagaaagaaaaaaaaaagcattattataaaag

SEQ ID NO: 9362 - DNA, 609 bp, Cannabis sativa
ataattcatgtcattaagatgaataatgacttattataataaacaatttttaatcgagctttacctttcatgtttgttgttttgaaagatgcacaattcaaatcattttgtgttttgaacactaatctttcggtggtgctattggtaagttaatttttttttttttacatatatatagtaaaatattagataatgctttaatatattaaaaataattttatgtagatttattttttttttaaatatgggtaattgttttattttatatccatatttaatatttatgttttttatttttttttatatataattatttgtcaaaaaaaatttcttctcacttctctcttattttctcactctgtaaccaaaattaagggctttgatattttttttttaaaacaaaaatagaaaaaacacgcgaaagcctacttatagtaaatgttctaatagtaaatgttatctgcatttttttcaagacacgacacatgacatttattgaagaaggtcaaattaatgctccattgcttgaagtactttaaaattgcctatcactgaaagctctccacaaacaaagaatcatccagaacgaaagaacacgcgaaagcctac

SEQ ID NO: 9363 - DNA, 550 bp, Cannabis sativa
tctttgtctaccaagtatttcacaacacatgtcttgcattattactactaggaaaagaaattttggggcacatatttatggtgcctagcattttctcgacatgtcgcattacgattggttagcgatactctttaaaagctattatattaaattatatgagacccgatacttagttggaccaataacgatgttgacatgtaggaggatgctaggcaccaatttagtatttatccatatttatacaagtttggaagatatttatatgtctcagtctattcttgctgtcagttcttctctctctacttagattttgatataaaatatttatttcaactttcaagctaacgtttattaatatttaacagggttagttaaaatggtcataataaaagctgattttctttttctcctcttatcattaatggcggttgcttcgttcaagtcaagtcacattaacttttttatatattgtgaaaaattattatttggaaatatatgggatgttttttctttctcagttgatgcaaccatagggtttgataggagatgt

SEQ ID NO: 9364 - DNA, 2116 bp, Cannabis sativa
gttcagcatagacatcactaccagaggctgttagtttctcacctccagtcataggagtaggcagagagttggcatgttccatttttgccttaactaaaagatcaagaatatatttcttttggcatagatgtaatccctcggatgagtgagttacttcaatgcctaggaaataactgagaaaaccaagatcttttagagcaaacatggagttgagatttgtaattaaggatgtgacagcttcattagaactacctgtaaccagtatatcatccacataaacaagcacaaatgtggaatgatcggctgtatgtctatagaacaaggagttgtctgctcgagcacagagaaaaccaaatgtagtaagtgtggccttgagcttatcaaaccaggcccttggagcttgccttaggccatatatagctttttgaagtttgcacactaaatggggattttctttgtcctcaaacccagggggttgagtcatatacacctcttcctctaaatccccatttaagaaagcattatttacatcaagttgccttatagaccatttgtagaacaaagcaacagtgagaacaatcttgattgtagcaaatttcaccactggactgaaggtttctttgaaatcataaccatattgttgaagaaaccctcttgctacaagtcgagctttgaatttagacactgtgccatcaggattttctttctttctatagacccatttgcaagtgatagctttcctcccaggaggtaatggaaccattatccaagtttttttctttttaagggcaactacctcattactcattgcattgttccacactggatctgcaagtgcagctttgtaactatgaggaatggtactggtaagaaaagctttgggtttggtaatacctgctttagctcttgttgtcattggatgactgttaacagggataggagctgatgcaggaggaagtatgggggcagataatggtggttctggtgcagaaactgaagctgcagtggagggcatctgagcaatgggagagagtgtaggaacaatagaagcatctattgactgaaagttatcattgctagagccctcagttgcagaaacagttctagatgaaccagaagagagagagggaaggggctgagaagatgagaccggtgaagaagaaacaaaatctgaggggtgaaagataggtggaatggattgtggcatgctggtattggtactagaagatggtgatgaatcagttgatttggaatagtcaacataagggaaataatgttcattaaaaattacatctcgagagatgtatattcgaccattagaagcaagacatttataacccttatgttttagactgtaaccgagaaaggtagacatgacagacctgaattcaagcttgtgtctgttatagggcctagtattgggataacaagcacacccaaacacccttaattggctgtaatcaggttgtttgtggaacaatttgtgcaagggagtgtcattattaatgactggtgagggaagcctgttgataatgaaggctgaagttcgaacagcttcatcccaaaatttgagaggcattgaagcttgagctaagagagtaagggcagattctataaggtgcctatgttttctctctacaacaccattttgttggtgtgttgtgggacaagacaatctgtgagagatcccatttctctcaagatatgattcaaaagaacgatattctcccccccagtcagattgaattgacttaatggaacactcaaactctttttcaacttgagttttaaaatttatgaaagtctgcaatgcttcagactttgtttttagcagaaagacccatgtgtacctactgaatgcatcaataaagtgcacataataatggtaattattggaggatggcatgggtgagggaccccacaaatcagtgtatattaactgaagtggttttgtgtacacagtatcagatttagggaaaggaaattgatgaattttccctttacagcaagcatcacagaagtctgaaacagttttattaacaccagaaacattacattgagataaaatctgttttacaactcttgcagagggatgtgctaacctattatgccaaag

SEQ ID NO: 9365 - DNA, 694 bp, Cannabis sativa
agccactgaatttaaggaaacctccactatctgagcttcagctgcctccatggatggtgtttcaaaggtgccgggagtccaatcttccggtggatcttctaatggttcatcttgtacacaatcacttgtaactccgctgatttacattcatgccccctataccaccgttcatcacacttatagcacacaccacggtttctcttatccctcaattcggcctctgtatatttcttgaatcgggtgggtgaagttgatgattgagtggatttgtaactggagttggacgaagctagagaaagaggagatgacatgtgggtttgcacgtgagtccctttagtggcttcagaattgaaaaatgaattaatgggtcgtattgggcctgggctggacttacttggcccaatccgtgagttacggactagggtttggttggcttcaatggactctgccagctccattgctttgatcaacccattgggctccaagagacgtaaggggccttgcacctccatcttcaatccattaacaaaggcagcttccaacgccggttcagacatctgccccatggatgccgctaaagcttcaaatcggcgtctatactcctgcaccgaagtcgcctgctgctgtaattggaaaaaacgatcatacatcgttccttcatgcgccggctggaacctacgaatcaccatttctt

SEQ ID NO: 9366 - DNA, 1286 bp, Cannabis sativa
caacctaggcattggtcccttattttggcctccaaattggtctgtttcttccccgaaagtacttgttttctcgttttttgatgaagacgaagaaaattcccaagacgaattttcagtttgatgcttggaagtggcccaggttgagaaaatgtcaacctgggtgtgcccagggcatcgggtgctaaaaaacgaaagttctctgaatctgattttgatgcctcaaatatatctgtgacatatctagttcatgtcctagtacaaagtttgacctatttgcactaagacggtcccggaaactgaatcttagttgagttgccaacctaggcactcgggttgatttttgtggtgttgtttcatctattttcaacttctagtccttggactttgatgcttcatgtcttattgatacaaaatactgaaagataatgagttgaaaacaacttggcgggatctaaacaaccattctggagttctcgtagtcaacttgggtgcagggctagggacccctcccaggtcgactgatatgactcgggagtactcaactccgagatgttttctttcttaccacatgtcaaacattgatgtccatgtcactacgatcaatttctaggttaacactaggtaacctaatgacaccgtgggtggtttttgcatcatgcgcctaattaatgagagacttaattatggcaaaaaattcaaaaaaatatctttcaaaacacgtaagtaattaacatatttattaaatttgatcaattttgaattatcaagaaacgaacataacatatttatacttatgttgcagtgtgatagtaggacagagtatacaatggatgaaattaacattatgcaggaagaataaatcgattactatactaagtattttctaacatagtttttatatttttttttggtagcaagtataatcttaattagatttatagtttttatattgtttttgtaattgtcatacttaccatttactattatatatagtgatatattatgaattttattagataatattgtacaacaacttatctttgtatgtatcgcgaatacatccatataatcaacactatcaaagcatgaaattttttttgaaaaaatattaaatttattttttccccacttaaatcaattacaatagttgtgaaaaaatattgtaattgacctatcttagtgatttataagtgtcaagattgttacctatctcggcagtttactatgtaaccgtcgagattgctacttatcttggcagtttcgggtgtcgagattgcataaacgta

SEQ ID NO: 9367 - DNA, 613 bp, Cannabis sativa
aaataactctaaacttaattttaaaagataatttaaaagtcttgccagctggcatagtcaaagttttctctcaaaatattttcgtcgaaggtttcctgcgtttgcgcctgggtatgcgtctggttgtttttctggtccgtttgtttcgtcttcatcggtggagcacgacgtcgagcctgcaggtttcttcgtcggttctcagaggagtctagaaggtttgggtttcagcgtatgcgactggatttttctgttccgtttgggactggcatggttttgatcgtttctctctaaattggttctgcgtgtgcgactggttttacgtttggtttgttattcggttccgattggtgcggcttcatcggtggagcacggtgtcgactggtcggttccattgtcgtctcatctccggcttccagaaacgtttcacgtacgattgagttttgggattgtattctctcggttcttttcatcgtgtgaagctgggttgcgactgggtttttggtccggttttgtttggcgttttcactggtggggattggcgtcgactggcttggttcatcttcttcatctgtcactgttttggtgcggctgggttagttgtttcttctctgtt

SEQ ID NO: 9368 - DNA, 626 bp, Cannabis sativa
aaggtgtcactatgcccaaattagttctattgaaagctatgtgcaaagccggccctattatgaacacagtcctctctgaatttgcaaatgctacttattattaggtatagtattagcgggtctaattctagttatgggatgcaattaatgttggtcattattacatatactaaataaaatgttgtattaattagcaaaaaataaaaataaaatgttgtattcctttatttatagtaattttataagcaaattattctctatataggaatccttttaatatttattttaataccaaagtcaaaaatggagaattatcttatattctccttaattagcaaatataggaaaatatatcaaattgtgaaaaaaagaaaaaaaaaaaaaaaaaaaaggatctcctaaaaatggagtaccccaaatttttaattagtattgttgtgggtgcaatattatggtaggaactcactaaatagattaattaaataatacaaataagacttaaactatttttttgtattaaaaattgtattgagaatcttatatttaacattttaaaaaatacaaaatttattattattttgtcatttaaaaaaaaaaatccaatcaaataaatacatgatccaaaa

SEQ ID NO: 9369 - DNA, 624 bp, Cannabis sativa
ataatatgattttttttttatagtaaaagaaatgagaaataataaaagatatttgagtaatattgttatgggacaattcaatatcatggtcttatttattttaatttaataaatattataaaaaaaaaaactattaattaataataaaacatgatagagatactaaacaacttaattccttacaacaagagcattaatattaaacattagtggtgcctagtactttttatacgtattattttataattgtctagcaatactttctaaaggttactatattaaattatatggggcgcgatatttaattagactaataataatattaacacgtagaaaaatattaaacactaccaatatcttttagcatttctcaaataacaatgctcaagagaaatacatatttatcagaatttcatttataattacaccaattttgctgttgtcttgtctcccctactactacacccattgatattaattatgctctctttttagttgtcagagcatatattcattcattcgttacgctttatattctgcattagtatactatatgtatagaaaattcttgtctctcgcttcttttcgttctaccttaaacttaaaatggccacgtgttccaac

SEQ ID NO: 9370 - DNA, 1546 bp, Cannabis sativa
aaaaaaaaaaaaaactaaataattggaaatgtggttgtcatttgccacttttatatttattattttgtttggacagctatatataattggatgcggtcaatagatattggagttgggtgtggcgataataagctccctttctttcttctgaaccaaactccatattggtacttggtgcgtgtgcccaatgacttgctgaattgacttgacttcccctcactcttataacaacagatattttcttttttagtttataaaaaatcatacaaacttgtcctattgccttcgtcatcaatacataaacaaaaagaaagaaaaaaactatactctcaatttagtaattaactaaacatggacccctacagagtggtgagctctagttgctttggaactcatcaaactgaaaactattttataatcatcttgatgggatggcttgctagcacaatcaatatatcaagatattttgtggaatcagaattattagctttcatactgcacactcggctcgtggttcccagtgtccaattagattgtagttcatggccgaagaagccgaaactttgactctagtcaacgctgtcgacggcaccgttgactataaagcccataaggtttcgaggtcaacctccggtggttggacatcggcggcttttattattggtaaactagattgtttttattaatttttatattaaatattgttgaatgaatgaaaattgtaatggaagaacaggtgtggaggtggcggagagattcgcctattatgggatcagttcaaatctggtcatgtatctgactgggccactcgggcagtcgacggcggcggcggcggcaaacgtcaatgcttggggaggaaccgctgccttgatgcctctgttaggagcattcatggccgattcttttatagggcgttaccgcaccatcgtcctcgcttccctgctctatattttggtagctctaaaaatatacccctaaatatattaaaatttttctccaaatatatacatggggctcagaaaattcaattgacaattcactattattaattaagttgttgtgacataggaaagagataattagcaagttttatttttttgtatttttattatttgggctagttttctaattttaaatatttaatgactggaaggacacatgataatttttcaagttgtatacgaacttattttttgtagaaagatggtatagaaaaaaatattaggtattttctccaaaacattgttttaatatttatctaggatatgaattagcatcgattttcattagttggtcaagtcactaactgcagatatgcttcaagatgtgcttattgaacttattatggccaaccctaattggcccaaattgatattatggatgacaggcacttggtctgttgactctatcggctactctgtcttctcagagttgttttgactccgaaaacaacaacatttctgcttgttctcctccacagctacaagtaatattgttcttctttgccttatatctagtggcagtggccgtaggtggccacaaccca

SEQ ID NO: 9371 - DNA, 721 bp, Cannabis sativa
aatctatttccaaaaaagggaaagaaagaaggaagttagatgataattttgttgagctcattccaagaagaatttaaaatcattaaaggagagaaagtcgaggggagtttgattgtaaaaagagaaagaatcaagctcttcatttgattgaggtttgcattgcatttttttttaattttgccatattttagtttttattgcttttaggtatggttcttatgctttgataaatattatttcctagtttattttagatctgttattgagtttcatccgtatttcctattagttggttttaggtttctttccatttctcaacttcgaaaccatgtttctctttttaatagtttatactacttgctgttgatttttttatttttatagttttgaatttatgtatgttgaatgcttactgtagtgcgatttgttgtttttattatttttcataaatttcttaagtttcgtttatgatttatttttatttattttttttgttgatattcgtgatgatatttatagattgctgtagatttttgttctgatgtgaaagcttcactaagagtagtggagattgcttccctacttagtcaggaaaataagtgaattttatttgcgtcgttgcattttagtttttcatgtgtttcagtataattgtttttaactattttaataactgttttattacacagtgattgtagtacttttgttgctgcatttattg

SEQ ID NO: 9372 - DNA, 764 bp, Cannabis sativa
ccacgaaatgaatttactttaatcagccatcatttctttttctttttttgctgaaagaaccatcttataaaccaaagactcaaataacagagtttgtggtggaaacaaagagattcaaattaattgtcaacaaataattattaaccaaaacctgaataccacaaacagtagggaaccatccttcattaaacgttctatttcttgcactcaaaggcaaaggcagcaagtaaaaggggtaaaagagtaacggctggcagcagcaggggcatcaccaagaaaatcaagcactaagatccaatgcaacagctccaagggataagaaaagttcaacaactggctccttccgccaactccaacgcctaattttcatcgtagtagatttctattagtccaagaacagcaatcaaagttaagaagattgcgtgggttgatttctgtcagtccaagaacaacaatcaaagttgcttgaccattaaagaagattgtgtgggctgttacaattgccattgtcaagcaatgataagtgggttatttttcttttttcttttttataatttttctcttaaaatgtataattaatataatatttaaaacattaaaagtaatttaataaaatattaaataatagagtgtggatctattttcgtgacttttagaatcgaggaagaaggtaactaaatgaatcattccctccgaggtagcaaacataggaaatcacgttgcgctcaaatgagtaacactcttgtagcaacactgaagaaggt

SEQ ID NO: 9373 - DNA, 523 bp, Cannabis sativa
gaaaccttgagagctaagtacaatatgcttggtttatgattttatattatctaaaatctcttaaggtttacattatttgatactatttttgtccatgtaatatttgatgtggatttgactaactttttttagtctttaatagtttaatagggttatcattactctgtttctcatggtcaataggatagaatccaagttaacttaaaaaaaaaaacaaaggaaagtccatgaattgaattctacttttcgttaataaactttgaaagacttaagaaatattataaagctgttaattaaatatgataaaattagtgatgataggtatattttagtgatattacatttacatggctttatgaggtctgagattcaaatagctcctccccaaatctcaaaaagaaaaaatataaaattatttaatttttttagtaagtttaaattatctcattaaatttaattacataattatatttatttaatatattctgtaataattacataaacaaactaatcacatataaca

SEQ ID NO: 9374 - DNA, 990 bp, Cannabis sativa
acaacttttcatgtttgaagtttctttagaaatgtaaatttctgtccaattataaattacccaaattgaaacaatatagtcgttgaaaatgttaagtgataagtctctagtaagatgtgacatatattgatgcaatttagtattagatttatttatagaaaaatgccctttaacatttcttggtggttctataatcttaattgctacattttgaaaattccagtcactcgttttgattaagttttagttagacgtgcatggtcaatcaaagttttcatttaatgtattccattccattagtgaaatgataatcaagtgttgtgatgtgttattataacagatacttgaagttgaattgaagaaaatgtatgaggctgtgacacacatccatgatgagatgtttactctccgtgagaggtatttagtagtcaaacataacatcttctcttaataatttacaattatttagcattttttagaatgatgtgatgagatttgattcatgcatgtgcacttatttaaggtcattaattctatttaataatcaaaacccataattaacggtatcttaaagtgtcaagcactataagagatgacatatcatattgatgtaatttattatcgacttccatacattttgattaaataaatgatatgaaaaattactaaccacttataacgtgctcagggacggacccattaatattgatggggcccccactaacaaaaatactgtctttcaaaaaattaaatgtaaattttttaatttaataattatagatcaaaatagtagaaaagcccccacaaaattaaataaatttagtaagagtgattataatgtagttataaatatttttttatgataaataaacagagtaaaaattctaggtctgtcactgaacgtgctatattagtatgatgttaggcacctttaagtgcttaataacggtgttcttattgttattgcttgacgttctttttttcacttta

SEQ ID NO: 9375 - DNA, 676 bp, Cannabis sativa
aagacatggacaagaaaggatctatagtaaccattcccaaaaatgacttgtgattactatttgaccctaatagattcacctatacactacaaaaaattgtacttttgccagcgcatttggccaaatgcgccgacaaaagtcgccgggaaaaggtgctgaccctaaaattaaaaagaaaaaagtcatcttgcacttttaccagcgcaataatgcgcagtaaaagttcttaatgccggtacaattcatgaattgcgtcgacaaaacaagtgaaatgaaccgccttatggcgggaacatttcgcaatggttcgataacttttgtcgatgcaactaaatttttaggagaaaaacttttgtcggtgcatatttgcgccggcaaaagtgtgctagggaaaaaattgcttttagtagggaaatttaacttttttcggcgcacatatgcaccgaaaaatgtcccaaaaaaaaggtgggaaaattctcgcgtgagaaggtggtaggtgggaatacttttgccggcgcaaatgtgcgtcaccaaaagttttaccaaaaacacactgtttcaatttaagttaattttaaatactatgtcggcggaacattttcttttaccggcgcaacaaaatgcgccgacaaaagtctatatataataggggggacgaagcccccgttcaccattt

SEQ ID NO: 9376 - DNA, 1580 bp, Cannabis sativa
tcttttcttgttctgcaatgtcgaacaatgatcaagagactgagacagaaattactgctccgattattacctctaatcctcagcagatcgtcaatcaaagtactcacatgcaggggtcaagaaatccaattgaagatccttcagacccatattatctccatcatggagataatccagggaacatcctggtttctcaaccacttacagggcaagataattacatctcctggagccgtgcgatgcagcttgcaatttctgttgtcaagaataagctaggattttttcttagacggttctattcctaaacctccttctactgaatacaatctttataatgcttggattaggaataataatattgttatatcctggattcttaactctgtttctaaagaaatctcctctagtttgttgtatgatgaatctgcagctgctatttgggctgatctcaagattcgtttccatcaaagaaatggaccacacatttacaacctaagaaaaggtctgatgaatcttcgacaagataaccaaaccatcagcatgtattacacaaaattgaagaccatatgggaagaattgtctaattatagacccaactgtacatgtaatggttgcacttgtggtggtgttaaaagacttcaagaacaccatcacatggaatacataatgtcattcttgatgggtttatctgaaaatttcactcaaattcgtagtaacatactcttgatggaccccctgcccgaggctaatcgtgtttttcacttggttacccaagaagaaaatcagaaaggtaataacattactgggcaaacttcaaatgctaatattgcttttgcttttcagaatgataaaaatcctccaccaagatctgattctcagggaaacaaaaatcagcaaacaaaaagaaataggcctttttgttctcattgcaatatacatggtcacactattgaaaagtgttataaaatccatggctacccacctggttttaaaagcaacagatcaaaggatgcaagtgcaaaccaggtgcaaaccagtaatgaaccaagtccctctgaagaatcaaacactttgcttccccaactcagtgcaactcaataccaacagctgctgaatctccttgcaaatcaaccaaatggtatgaccaatactgaaccgagttcctcttcaggagctacaggtatcgttttatcaaatcattgttttactcctaataatgaatcttggattatagattcaggagctactagacatatttgcaacaacattaacatgtttcaatgtgtatgtcctataccaaaagtaaaattaattttgccaaataatgaatttctctttgttcaacaaagtgggtctgtatgtattaacaaagatcttatattgactgatgttctctatgctcctcatttcaagtacaatatcatctctgtgagtggcctaaccaatttaaattccatttctgtaaagttttctactaatgattttcgaatacaggacaaactccacaagagggagattggcagaggtagaaatttggatggtctttatatcttggctactgctcaatcagaaaatgtcct

SEQ ID NO: 9377 - DNA, 1083 bp, Cannabis sativa
  modified_base (125)..(127): a, c, t, g, unknown or other
aattattagttatagttattaataattagagtaatgctataagacactagtagtgtctagcaccctcttatgtgttaatatcgttattggtccaactaagtatcggatcccatataatttaatannntaacttttaaggagtatcactagtcaatcgcaatgtaacatgtagagaatgtgttataagcaccactggtgcttaatagcaatgctctaataattatatgtgtctttgtggtgatgattgtgcctagaacttaaaattatttttctatatcagtgatgtgcataatgcaaatttattatatacatacgatttttaaacatttttatttgatttttaaaacagtaaaaatttctttagatattttttaaaaaaatgttttctttacatattaatattaatattagttatacgttgaagagagtttagaaattaactgcatgtgtcaacatgaatattaattataattaatttgtttgtatatatatacattaagagaagattagtttgttacaacaattttttgtaatcatttacttgttaattatatttatttttgtatagcaaaattgtaactacttttgcttctcttgttcaactgtctttaagcttttacttgtgtatattaactctaagcttcttgcttatctcaatgaatagaattcttttcttcagtttcattttttttttaatttttacatggtatcagagctcgcttctttctcttcgtcttctttcttctattttctcatcttcttgaagctttcgtccatggttgccaatgaaggttcgcctcaagtagtcactccgaattctggtgtcctcaatcttccaaaatcttctcctgtcactttctctcattctctctcagttcgattagatgaatacaactacctccccatgcaacaccaagtgtttgcagtgatcaagggcagttcgtcttcagaagcatcttgatttagctctcactcctcctaagtttcttaccaatgaagatcgactgctcaatcgactttctccagagtataaaaatcgagactaacaggatagcattctggtctcctggttattatcctcca

SEQ ID NO: 9378 - DNA, 669 bp, Cannabis sativa
tcttgccttacttgctaaattatgctggatgatgttataaaaagaaaataaggtttggttgagtattatggaatcaaagtcctgccaattattcgatgcttggaaggttgagaagcatgctggagattttcaatgctggcagggaattttggaagcacgatatatatgtcaagaaggggcagggatcttgattggaaagggtgatattgatttgtgggataggccttggattccagagaaaactgtggaggaaatcaaagcaagcttccaatatacaagaagacatgtgtttttgaaggtctcagatttatttcttaatggaacaaaaatgtggaattaggaccttattaaggccagctttggggaagacgtggcagcctctatattacagatcagacctctctcggacgataaagatgtccttttttggaaagcgtctaagtctagaaaatttttcagtgaaaagtgcttattgggtgagtcgaaaggctagattcaaggaaactaataaggtttgggaagctttttggagggtagatttacaccctcatttgaaaatactgctatggaaaatcttgtctgatatcctaccaaccaaagagcgcattggtctagaggaaaatagatgtgttttctgcaactctaagattgaatcagctatacatattt

SEQ ID NO: 9379 - DNA, 854 bp, Cannabis sativa
tatatatataaatattttctagtgctttttttctgaccatatcccaccaaattaaaaggaaaaaagaaaaaaaaaaactatatacatttttgtataaacaatgtaggatacatggtgtccacagcaaggtggcgtggattaaaggaatataaatatatataaggctgctgttaaagataataatttatattgtttgatagaattttaaactgataaagcgtgcactcactatcaaccttttctcatgtggctatctttacataaacacttttaagtggacacaattataaattattattattatatttttcatgtccgattattataataataatgataattaaaaagaaataaaactttcttaggtgcctattcatcaaattgatgaattctctctttgcaataacatatagtgtacgtacataaattactttgctaagaatcaagatctatagtatccttgtagttatcctataaataattaggccgtagtcttcttggtttattatgttatattaaaatagtacagaaatggttttggccacttcggaagaaaaaaaaaaagaactggatttgaaaaatctggatgattaaaatgaaggctacacgattttttttaaaaaaaatgaagtctacacgtgtcgtgcaaatatgaggcgtgtgattttagtttgttttcaggcaaattaattatatgttggtgagacaagtcaagtaaagtagttggtataaataatatccataagaaacgacactaagatactatactcgctagctaagctagtcaagaatttttgttgattctccaaccacaatggtcgaacatatactagtggtatattaaaagaaaaaaa

SEQ ID NO: 9380 - DNA, 1029 bp, Cannabis sativa
tctgacaaattttaggaacaaatttaaggggatagtgctagttcgtcttattccccccaaaatggtctcgccagtaggtcacacatgaagttccaccattattgggcatattgaaattgatgttattatttttgttattttggtttgtagccatcgtgatctttctccaaaatcacaaaatactgctggaaaagcacccctccttctagcaccaaatgttgttggaggaatttcgataacaccaaaaattatgagtattcaaaggctatttggttagccttttatagaattgcgagtattcacctaaattggtgaatacgtaaagaataatgttggttatgattgcaagttttgttgtcagggagtggaagttgtgaagccagagagtatataccaaaagtatattgtggatctaaaaagccctttatgggaggtcttgtagagtctgaaaggttcttcttcataagcttgtaccgtgtatagattatctctcttagatagcttgttatgaatttggaggtacactccttgatagcttgtcagtcttgaaggttcatcttggaaggaagccatgtacctatctggaaggattgggtgtttataatgctctcaaattgcttgtagtaaaaacacatatttcaagatgacgtggattattattactggtgatgagttggatcacttaaggtggtgtaaatgtgtcacaatgatttaggggttatttttggtaacaatgtaaatctataaatagttgtaaatctttgtaacttgggacgagatttttagaccagatttgcttgagtgaaaattgtgatggtgtaagatagagtataaactagagagagaaacatcctttcgtaatctctaagaagttcgtaaagattcttatagccttataaatactgatatcaataaaagttatggttgatgttctaatagagatgtaaagcattgcacaaggctcgaactcgttaaacctggtgttgttcttttttattttactatttaattcattatcttgaattcttg

SEQ ID NO: 9381 - DNA, 919 bp, Cannabis sativa
ttagtaattaatattttcattactcattcattactataatttatagcaaataatattaattatcattatgtataattataaaggataatattatttttgatcccatgcatgcttactataaaaaatattacttttactaataattttttagtcgcaataatttttttgattaaatgtgatttttagtcacaacaatatatttatacaaattgtcactaattatttagtcacaacaagtattgtgactaaaaaatatatttagttacaacgaattgtgatttaatcttgtaattaatacaattagtacggactttttagtcataacatataaattaatgatgatttataataagtcacaacttttcaattttagccacaaattttgttgtgacttaaaagtaagattttttgtaatggcttaatttataaaaatttatttattggacattttgttttgtttaatgacaaattggatcatatattttaatactttaagctcaatttttcgtcaatacttttttaatataatctaaaaccagtttctaatacgaataaatacacacaaaaaaaaaaaaaacaatcatattcatgccataacacctgcacctccatgtataagtattatatgttttagtgtttgacaaaaattgaagctcagagtattatttcatcaaaattgttgttaacaaaataaagaattgattggtaacttttaaaaaacacacaagattcaaaataatatttatcttatatcataactattaattaatgataatttgtgaataaatatttttttatatataaataaaacttattatttattatagcttacgtaagcggtgaaagagatggaatagtaccagagaaagcattcgagtttggtgaaacattaaagaaaactttcaccaaacttgatttt

SEQ ID NO: 9382 - DNA, 759 bp, Cannabis sativa
ccaccagaatttcccagaaataattataatctttagaagaatattatgttgttcttatgcatacataagatataaatatatgcagttatgagattcaaatacatacattttggttcaatttcgcataaattcataacatatgagctaaaatggttctccataaagatgtcatagctatgatatgaaaagaaaactacccagttccgagaattactacatacacaaaaaaaaattaaaagtagaagtagtttccaatactttctcacaggaatcaatgaggacacccacattcaaatcccaagcgaaacatatactcgtaccgtaccagacttaaaacaaatggatgaaatcgcttcgttccccacttccatggtgttcaccacatctttgcaccgcatatcaaaccagcacacacgaccatcctgtgatacatgaatatatatagaaattgataaatcattcgattttgttaagcagagaagagaaaaatacctcgccggtagtgaggacaaggccagggctcagacgtgaggcgatgcaggaggtggcagtggcgttgtgacctcttagtcgccttgggtttgtttctgtcatgtttgtttgtcgtccgcctttaccttctttctgtgtatttcttaggcaatgaggaacgacagttggtattattatttacaagtttacgggccaaccccaaatacatagaatagaattctgcgctacaagaattccaacccaaaaatttttgttttgttttgtttt

SEQ ID NO: 9383 - DNA, 702 bp, Cannabis sativa
ttcttctttgttttcatacttccccaacacaatgtctaagagatttaatatggtatcaaagtatggttttccactattactagctaatgtagtcacgaatttaggagatgaatttcatccccaagaaagaaacactttgaatcaaacaagtattgttcctactttgtcaaatgcaagaaaccgagaaattggtggatcttcaccaatttacttcaatcgcaatcttttaatacatttgaatgatcacaagtatcttctgtagaagaataggtcctagcagctatcagaggaaattgagtccaaacttttattcaagaatcgagttctcttgtgaaatacgtgacagatgaatattgagctgctcgcaatctcaatcctgccttttcagagtgcaaacttcaggataaactccttgtatcttggcttctatcctccatgaccgagagcttgctcaccagaatgctatggtggaacactactagttagatctgggattacactaggaatatacttcaccttataagtatctgcaaaaattctagtgatttgaaccaagcttcaaaacttgaagaaggatcgctcaccctcaataattatcttctcaaggtcaaacaaatagttaatctagttgcatttgttggaaaagttcttagtatcagggttcatgtggcaaccacgtttaatggatgtctattctagata

SEQ ID NO: 9384 - DNA, 1117 bp, Cannabis sativa
cgatccctggtgtttcgaacccaaggcggcggaggagcagccggcgctgaagatggcgtagggttcggtggtttagtcgagaaaattggttccagtattcgtaaatcgagaatcggattgttctctaagccaccgcttcgggcgcttaccccaccgacagcgagggacgacgcgccgccgatccggtggaggaagggtgagttgattggctgcggtgcgtttggtcgagtttatatgggaatgaatctcgactccggtgaacttcttgcagtgaaacaggtctatttttgtctctgattttagtattcataactctatattcgaatttcattttttcttttttcttacactgaatttgaatttgcaggttctgattgcggcaggcagtgtttcaaaggagaaaacacaggtattaattttattagagagaacgcaaatttgaaaacttagaatatagtttgattgattgtgctgttacttttttgtgccatttatttatgtaattttctgtttgttgaataagatttttctaactttggttttgactaaatgtgtgcttacttcgttgagttttcagttatttgacttaacagttcgaacttgaaatacttcagtttgttatttaaataaattataagtgtatttatttcaaataggctcacattcgagagctggaagaagaagtgaatcttctgaagaatctttcacacccaaatatagtcgtgagtatactttgcttttcttgtttttgtgggaatggtggttgattgcttaatttcttatggggtttaatgttttgatttaaagaggtacttgggaactgctagggaggatgagtccttgaatatcttgttggaattcgttcctggtggatccatatcttcgttgttagggaagtttgggtcatttcctgagtctgtaagtcatttattgatactgtttatttttactttatatatatctgttgaacttgatggttatactggtacattagctataagtttttgattggacaggtcataagaatgtatacaaaacaattactattgggtcttgagtaccttcacaagaacggaattatgcacagggatatcaaggtgactctcccttaagttac

SEQ ID NO: 9385 - DNA, 1142 bp, Cannabis sativa
ataaatgaatgttttctaaattagttaatctttaaactttatacaaaaaagataaaggtatatctcaaacgctaattaaaatttttgcttaaaaattccgttcaaattagtgagattgttaaattcaaagacatttgtcttttgtctaattccgttatattttaataaagtgctaattgttcatgtactaaatcgtgttaatttctcaaacattgatatctactaattcatctccgaattttgttatctaccgaattgtgcccctgaactttatttaacatgtatcaattcaactccaaactttgagtctaccaattttaatagtgcagaaaaaaaatttaatgacaaaaaaaattcagaagatataatttaatatatgtcaaaaaatatatcccaaaattaaataaattaatttgaacataccttaaataaaaatcaccacaaatgagagtgtgagagattgttgatcatgttattatgttgggtgcaatgttttgaaaaatcaattaattactgaaaaatacgcgtgcacaatttttttcatggtatatatatcttcacaagcttcatctaatttaagacaagtacatattttacaagaaaaatcaacaatttgtatatatatgtatccccaaaaacatcatgggagatgtgttatatttttactcatctttgttttatgtatttgaagaaattataatttatgttgatttttattgtatttaaattattgtataggtatttcaatttttgaaaaattataaatataatatatgaaagtaaagttctaaataatatattcatactcagtataaaaaaaaaaaatacacatacaacttaatgttacaaccatatttttagcattatatatataaattatttaaaaattttcgaatacagttaaaatacatgctatataactattatagtatctatcattaaaaaaataacttatatttaagtgtcaaaatagaaatgtaagtgttacgttcctaccaataatgataaaagtaattagcccaattataaaattcctccttatataattatagataatacttctacatatatcgtaaacacagaaataaggtgattaaatagttttgctaatatttaattaatatagattttttttttcaaag

SEQ ID NO: 9386 - DNA, 852 bp, Cannabis sativa
cttagcatttttctatatatttatgatgaatggttcaatatagggtgttggctactttttgatctcttctgactgttcatactccagcaaagtgggtaaggaattttaaggcacaagtgtcgaacaaatgttatggctctgaaatctactagtttcagacgaccaaatatagtattgtatgctgtcaaacaatcaacgaccacgaaagtacaatacttaaaggtgctctgggtatattaggacaaagggtgatggggagacgtacttttcccatgggaatgagagaatcctcattgaaattagtgagttgggaactgcatgggaccagatcttggttagtaagaccaaattctaagaattcagccttgaacaaggtgttatctgagctttcattatctaccagaatgcaggctacaattttgttggaaactggagtatttgtgactaaaggatcatgatgaggaaaatatatagatcttacatccttttgtaaaagttatgacttagtccataaatcgaggtctttgggcatgcaactgatttaattcccacacctcatcattgtgatccaatgctttgacatactatttttgatctcttcaaggagttctttcgatatggggacctctggagattatggctatttgcccgtttggcctaggaggaagactcaattgtccgataggttgcccaggacctaatgctagcgggagtgcttctagaggtgcttgtatggctctgggagaaacaggagctcctagtgcatgtggaaaccttcttggattccttgctaacgcttgcggtctaataggtcttcgcatttgcgctaaatgattccttacccattcatgg

SEQ ID NO: 9387 - DNA, 973 bp, Cannabis sativa
tttggagcaaattcatcactaaagaaattttaggtaaaaggtaaatgaaaaatatataaataaataaaagcctcttgtggaagagaaaaaacacaaaaaaagctaggcaaattagtacacattacatgttcctattagttatttataattttaactacatatttgataaagggtcttttggcacaatttttataagagttaaaagttgattttttaaaaaaactgtgataaaaatgtatttagcagttaaaaaatagtttattgaagaatttatagaaaaggttaaagtgggcacaatttaatttttagaacaaagtgttttgattaaaaaaattataataaattattttgtactaaaaatatatttaattatttatcatatattaaaaaattgatggaaaaaatatttaaatttcttattttttattttattttaaaatattttatatttatatttctattatattaacaaaacatatcaacttagagcgatcttataaactatatatattttttttttaaaaaaaagtaataaaactataatttgaaaatattataaattatttgtataaaatgtatataaatttatactatgagaaaaaaatatttaaaatatatagacaataaaaattttatttaatataattttttatatatttgtgattataataaaatagaatattacattatcattattataataaaattttaacaactcacaacactttaaaatttataatttattaaatatttagttcaatttttttttttttttacaattttgttatagctattttttttaatagcacatatataattatttttcccaacacataattgtgccaaaatggctcaaagtgtctctaatctgagtgtgtctcaatattattctaattttaataccgtattgtggtaaaagcgtatagacgaaatttattaatgaaaactaacagctagcaaagatatagcaatt

SEQ ID NO: 9388 - DNA, 541 bp, Cannabis sativa
atatggggtgatggggcagtctttgccctcttcttctcctttggctgatcctagttaggtgcctcctgttatgaattttgttaaggtaaatgttgatgggactttagatattgatggtgggttttgtggaattggtatggtggttcgtgatactgaaagtgttgttttggcctccggtatttggacacgttcaacctgaagtcgttgtagctcttgccttgcgtaatgcaggaacccaatgtcgtttacttggttggttaatattcaatttaagtttgattgtcttattgtggtgagtattgagtaagactaataataatcatgtctctctagacttttttttaggcctagtttttcgggacgttggttgtagttttgctcctttagataggatgagtctttttcattattctacaactgctaatgttattgctcacactcttgttaaatatgccttgtgtattgctgttagcaaagttttgtggttttcctgattgtgcacataatattattatgcgtaatttatcattaattgatatta

SEQ ID NO: 9389 - DNA, 880 bp, Cannabis sativa
aatcatatttttttgagttaacttcgctaaaaaatttgcaggagacgaagatggtctaactaatgtcatagaaatgataatgtaatcggctttaaatagtatttatcatttgtcatttgtcaatagtctaataaattcatttaattttcaaaactatacaataaaacgtatgtttttttttagcattgctattggataatagtatttcatattttttataagtgtcacgctatatttaattagcgatatttcttaaaaattattttttttaaactattcttgactcactacttaatattacccgaacaataaaacttatgtggtccaatattaccattaggcaaaccattggtgcagcaccaccaaaataatattttgccatgagttaaaaaattagtgtaattacactaatgatatgttttttttttttaacaaatgataataatatgatacttgttattgtgtatctatcttttaacatttccttaattttatcaatccatgtgtctatgcagttaatattttcttgtatttaatctaaaaatataattaataattaagtgaagtttaatggtagttaattaattaattaaaagataaaaaagtgttattaattaatcacctcaataagctcagggctcccataatcttgaattataccagcaagttgagcactatccacactgtacggaagattcccaaaataaagcttcgtattctcaccactcgccgcggctgccggctcggcttcctccacagattcggcggcgtcagctccctcagactcaccggcttcatcagccacctcatcggcggtcacggcagccacctcgtcctgagccacggcggcgatcaccctcataagtcgccccttgtaacc

SEQ ID NO: 9390 - DNA, 695 bp, Cannabis sativa
tatattccttaatacatatatgatatattgagcattaccatttaccacctctcccaatttaaaagatgaaaaaggttaccaaatattttcaatgtcaataaattacactaattatatgccttatagttaatgttgatgaaaataagttacaacaagttagaacttacttgagcaatgtcacctacagtaaccaaaacagagtccgccagaggcgacacagtgacccgacccgaatccgcaagcaacgagcttttgccacctcggatttgatactgtaacccgactatatacgggtaaaacccgcctgacgtcatcatctcgtttccgggagaactttctgaagatatcctcatcaacgtacaaaaccgctccggaccatctttccccaacgggttatcaaacccgaccgacccggaaagcaactcgacgatcctcaacccgactttaccaagagcccgagtcaactcggacaaggatactaaacgtaactcgcccgactcggccgcacacgactcgtccagacagaaagactcggcgagtccgtctccttcttcgtcttcctctccttcgtatccaagaggccagtccttacgaaagagagattcttttttctctcttgataggtcgaagagagagagcgcttccaactcggccgacttagcgagttcggaggagatggagtggttaatgagttg

SEQ ID NO: 9391 - DNA, 755 bp, Cannabis sativa
catgctcttgaaccaaggtgttaagggcctattagcaatttattagaatatatttatgtaattgtgtagtgattaatgtgtaagggagattggcactgttgtctcgaaaagtgcatatttgagtttgacattgactcgaagagtgcgtcctgatacttgtatcacaatcatttgcaggtgcatctaaaattgctgaattggacctatggggaaattactctgttcctgaagacaatccatattctgatgacaatgagttacaacctgaaatttgggctttgggatttagaaatccatggagatgtagttttgatttagaaaggccttcttacttcatgtgtggtgatgttggtcaggttgggattctgttgatgctagctcaagtgtttggtaccatatttggctatgtaatcctatcttaagtatcttgactaacctttttaagtcttgatctcataggaagaatttgaagaggttgatatagtgagcaagggaggaaactatggatggcgtgtttatgagggtccattcctatacaatccaccaaaatctccaggtggaaatacaacttctagtgccattaaaccaattttccctataatgggatacaaccactctgagatcaacaaggctgaaggatcagcttccataacaggtggttacttttaccgttccaagaccgatccatgcatgtatggaaggtaacaaaaccttatattattctcttctctcctctttcatatatatatatatat

SEQ ID NO: 9392 - DNA, 651 bp, Cannabis sativa
caaatggatttatgagaaatgagatgtgtgtcttcgagataatataaataaatacttattaattaattatgagctttttatttgagcaaattaagtattagctatatgtaatggtaatgagaatgaagcattaattaataaattatattaattatattatggaccttatattatggtttagaagaaagtctaaagactttgttatgaaaatgagagagagagagatggaagatggaatgtgaattgaagctctgtttgaaacagagagagatgctggtatttatacatgaatatggttacaaacagtgtaacagaaagagtacaaaggacacacactttaccaactaactaaccccttaacagaaagcaaataacagaattaactgacattaactaactgagtttgttatctctaacatcccccctcaagttacactcattggcagtgagtgttaacttgtccctgagataattgaattgaggattgtgaaggggctttgtaagtatatcagcaacttggtaaatggagtcaacatatcgaacatctaacttgttttccagccacttctgtttcgaacaaaatgaacatctatctcgatgtgttttgtgcgggcgtggtacacgggattggaagccaaggaaccagcacct

SEQ ID NO: 9393 - DNA, 681 bp, Cannabis sativa
tttataaattaatttttattggttgttgataattatattttaaatataaatataaattaatcttaaattacaaaattattttttaaaaaagaaataaaaacctttgggcatgataatgtcgtgccttatagcatggctgatagtgtttacgattttaaatgggcactacatgtgtcgtgctattagatcaatcaattggtacgatattatttatggcgtccgtaacgtttttaggcacgaccaaaagagcatgataagtcgtgctaacatatccatgaacactaaaatgaatttgttagcactaatttaatcgtgacatgcgaataacatttttttttccttgtagtgaatattatatgtttaatacaataattgttatatattaacatattgcaatattttcatttttggataaatttcatcaagattagatgaatcatgcacattgttactaaatatattgaagtgtcttcttgaggtaataaagtagggcttttccatcactaaagaggttcttcaaagcataacaaagaaaacaaaatctccaggtatgaaatatacaatagtcctctaaattaaattaagtaaacttctctaaaaataaataaataaataaatagaattaagtaaactttacaaatttgtaactaaactttacatgttctgtaaccatatatatat

SEQ ID NO: 9394 - DNA, 657 bp, Cannabis sativa
aattatatcatccacataaataagcaccatgagaacataattcggatgcttcaacatgaatagagatgtgtcagctttggatctaacaaagttccatttcaacagagtgttctttaactgttcgtaccaagctcttggagcttgtttgagtccgtagatggactttaacaacttacagacatgatgaggttttgttggatcctcaaatccctggggttgcaccatatatacttcttcatccaagactccattcaagaaggcattgttgatgtcaagctgtctaatgtcccaacctttcgagaccgctatggtgagaatcactcgaacggtagaggctttaataactggactgaaagtctctccaaagtcaacaccaggacgttgatgaaaccctttagccactaaacgtgccttcaaccgttgaacggatccatctgcattaaacttaatcttgtacacccatttgttgccaaccacattatattcaggagaagggggaaccaatatccaggtaccattctttttgagagcataaaattcatctcccatagctgagttccacccctcatgttgaagtgcatcatgtaccgagagtggttcatggtggtcaagggaaaatgaggcttggccaaggaaaactcggggtttgaagatacc

SEQ ID NO: 9395 - DNA, 550 bp, Cannabis sativa
atggctaagtgtgaatgagagaatgtaagagtagcgttcatcaaatccttttacacttgatttttttttgttggtgtgtagattagagagtataagagaagcatgagaattcatggcattattagaagataaaaatgtcttttataatataaaatttgatgctttaaataagataatattatattgtttcggatgagcataattgttgttgtaatctctgattgtgttgtttgatgctcaataaatttaacactatgcacatatgccaatgcgttaggtgtagttatgctataaatagtctgtcaaagctcttatgctaactaaaacataaatttattataaacatttgcaaaaacagttcaccaagtcatccgcaactctcactctcttaaggcctcgaaggagcctcctcacccataatgccccgacaaaattgccacaactgaagtttataatattacaactgggaatacaaaatatcataaggccacttggtagaaaatcacttataataaacatgcagtttaaaaactttacaaataggtaagac

SEQ ID NO: 9396 - DNA, 803 bp, Cannabis sativa
gttgttataaattaatcgtgaggattagattacatatatggtgtgaaaatagtttagaaacttgggtaaaattttgtgcccattctgtctccatcagggtataataattaagaaaatgggctcattcgaccctaaaatatatttagttattgctgctgatttgtcttgacaaacgttggtttttcatacagaattaaaatgtgaataaactgaaataggaagttccactcaagagaaagtgaaaatgaaataatgtagcctcattatcatcttatatctctttttttcttcttttttttttcttttttcttttttacctttctcatacacaccataaagaacagagatctgaactctgccaagttacccattacaacagatcaattataaaaactcgaagatatgaaaggatcagcagacatctgtcgatgaagaagaccttgccataggaagggaaatcgaattccactctgcatcaccactacaatgaccgacttttgcactgaccacctgtaactggctagactcgccaacagatccatgagtttgagtaagagccacgccagaagattcatgagtttgagtaagagccagttttttttctgctacagccttgaggcgatatctttcagcccgagagccaatcacctgtcccagaattgatgctgcaatagtaaatgccattgctgccttgggcatcaacacagatttcctaagcatccctatgaaaggaacagcggcatggacagcagcaaaccaggacggtgagaatttttcagaatgctctcgccatattcccagag

SEQ ID NO: 9397 - DNA, 503 bp, Cannabis sativa
ttgaggtgttgccaaaaaatttgtggggattggaacatttgaggtatcttaatctttctgacaattcttatttgaaagtgcttccaagccttttaataagattacagaatttgcagactttgagtctcgcgaggtgtggtaatcttgttagattacctcaaaacatgaagaaattagtcaacttaaggcatcttatgattgaaggatgtggtagattgaaagagatgccccttgaatttggatatatgagctcccttcacacattagatagatttgttgtatcggacaagagcgggtttgatgaattgagcaaccttattaacaacttacaaggaagcttaagaattgaagcacttaggcacaccaactattctgcatcaaaatccacttcaaagcgagttgtttgtgatgggaaccataatcttcaatggttaagtttagagtgggaagaagttgttggcggtcataaggtggtggaatattatgaaatttcccttgagggt

SEQ ID NO: 9398 - DNA, 531 bp, Cannabis sativa
gtatgcatttttctgtgttttataaattttaattaagtatacatatatactaactttactataatttatttgagatactatataatgaaatttctaaatctcttaaactaatatgggcaagttaaattatattatatattatatttccttaatttgagaggagctagcaggaaattcctcttgaaaggagaggcatctctagctttgtataaatattattgttatatacaaataatatatatatatatgaatgaacagaatgtttcttaatatattgagtagtagaaatcttctttaatatttgttgaacgacgagagtaaagagcaattaaagaggagtaattttcagatgaattttcaacattgactctcgttgctttatctggattacattaaaaggaattttatatattaatcgatgagagaatgatgtcttttgttgctttctcacaaaaaaaaaatagtccaaaaatttatgacaaaattgccatggtctccttttctcatcaacgtgaataagtgacgagaata

SEQ ID NO: 9399 - DNA, 731 bp, Cannabis sativa
caattatgttaaaataaattttaagataatcacatcttatattaaatgtcagtttaaatcctgacaatcatacaaaaaaacagagtgtatgtatggaggtttgaacctttaacctacttattaaagttatacattttaccactacatcaaataatattatttaataattttcgactagactagtatttgtataaatgctcaaaaaatttatttagacataaatcctaaattacatcgaaccaagccatatttcaggtggggcatccaccctacttaggctcaatgtggcttcgcccatgctaaccaccaaaccttagcacaatctaaagaaagagcaaactgagcaagattgtgtgctagctagggtattagtggacctaaaacaatgctaaaaagaaatgacataaatattattataaattatagacccaaatttctctacaaggggagtcttattagtcaaagccaaacacacacgtcgacaatcagattccccctcaacatttgcaagacccaaccgagaccacaagagaaatccctggaaaacagccatcgcctctaccccaagagctaataagtaagcattaaaaggcgatgtcgtcgacgcaataacaacaccagtatgatctcgaaccacgactctacatccaacatgacgatccaaagagaaatacttgcatcgacattatgttttatgcaaccaactggaggaagcacccccaaggtgtgtt

SEQ ID NO: 9400 - DNA, 507 bp, Cannabis sativa
ttttagccgatttacctggttatttcctcttaaggcaaagactgatgctctagaggcttttgttcaattcaaggtgtttgttgaaaaccaatttgacaccaaaattaaagctttaagaacagatggaggaggtgaataccaagccttctctgagtgtgtcaaaactcatggaatttacttccatcactcatgtccccacacctctagccaaaatggtagagccgaaaggaaacacaggcatatagttgagatgggattgaccctccttgctcaagctagtatgccattgaaattttgggttgatgcctttcagacatcggtctacctcataaatagattgccaacacccgtccttaaacataagtcacccttcgagactctctatggaaaaaaacctgattacaagttcctgaaagtttttggggcagcttgttttccctgtatccgaccctaccaagctcacaaatttcaatttcattcactcaagtgcgtcaacctaggatatag

SEQ ID NO: 9401 - DNA, 1284 bp, Cannabis sativa
ctgtaataatgttcacattgttccacctatttcagttatcatttgatagatatttgcataaaaatttaggtcttaccattagaagtgattgcaagaatctttagcttcaaacatttgtgatttgtctcaacttgttaatggcatgtagctccaacttatgactaatttacttagtttgcttctgcaacagtctccctttacttttgttttgttttttcataggctggagaataaatagtttaatatgtttattgcaaaatgagtgatgttggatatatgtattatctatatctataatttatggctctatgagtatatctttatatattctttcaagttaataagtgttcagattgtgtactagaactagctgcctaatagtaatgctatgtttactctatgagacttggaatttcgattgatgtatatatactaatttacaagtattatatatatatacaaaaattgaattaacttgtctatcttatgtatagttcagactggtggtgcgtggtcttgaaatttaacaatcttcaagaaaaaatggctttggcaagcttggctagaagaaagggtcaccttctttctagaacattttccaaccagacctctgaagttttcaggtgctcgctttctcttacctcctttgccaggggttttgcctcttcgggatccgatgagagtgatgtagtggtcattggcggtggccccggcggctatgtggccgcaatcaaggccgctcagcttggactcaaaaccacctgcatcgagaagcgtgggactctcggaggtacttgccttaatgtcggctgcataccctctaaggtatttgttttttcttagttatttttctaatttgttattgtttgattggttttgcaactttttctcagatcgatttgtgatagtttagttttcgaattaatctagtattaaagggaaattgtgaagcttgtgaaagagaaaaacaaaatcaaaaataattttgattgtgctttaggttgaaattttgtgtatgcgacatggatggtgatttctgattagttggtataactgcatgaatagttattatcattgctatgtttttgacatggaacatgttcacttgaaaatcttaatgctgaatggaatgaaatggagttggaaaaaggggtaaaacaaaataaaaaatttgagcttatagttcataaatagatgtattttgttttagtagtgattgaaagaaaattaatctttccaatttattgtttcttttcgtattttaggcacttcttcattcctccc

SEQ ID NO: 9402 - DNA, 673 bp, Cannabis sativa
ggtatatatattttgttggcacagtgattaaagttacttgaagagaattcacgatgaagacataggaacctcttagacatttctaatgcaagatttaaaatttgtgctaaatttagcaccgaaaatgattatgttatatttggcctactatttacaattgtgctctaaatataaaataagtcaaaaaaataattaattatattaataattatttaatattcttttgagtttgtgttatatttgattttctatttacaattgtgcttcaatacatgcgatgttaaatatgttaaaaaaataattaactatattaataatcatttaatattcttttgaaaatatataaaacaattttttttgctggtttattgtttaattaaagaaaatagtattttttatgaattaaatttgacacaagatattgtgttaaatttggtataacttttaacgtgtgtcaaatttaacacattttttaaaatatggttggaatagtaatttttttattttttttagaactttattgactcttgctgaaccaaattcaatatttttctctccaatttgtctcagcaaccatatatactcacaacttaagttttactctctttttaatagagcctaaaaaatagtcacacattcaagagatctgcagtcataaaaaatgaaaaccaaa

SEQ ID NO: 9403 - DNA, 513 bp, Cannabis sativa
attcttctctttttatatattataatcatgattttttacgtatgaaacatgttcatttgcaataaaatattttctttgcacggtggtaaaaagaattttttgaagatatttttcacctgtcgattttccacaaaatggtgacaaaaatagtactctgatttcaatcaaatttcatttttttttttaaatggaataaaaattacaattttaaaatttacatctagatttaattaaacttgtagagcttgtttgactattttcttttgaattggataaaagtaccacatcccctcataatcacactaatattattagaattaatctcataatcacactaataaaaattcaatagttgtcaaaatcaactcaaaaaataaaattttagaattaatctcataatcacactaataaaaattcaatagttgtcaaaatcaactcaaaaaataagattacaaggaggaaaacacacactaagaatagtttgtcatggtcgttattaacaatatatgtcca

SEQ ID NO: 9404 - DNA, 707 bp, Cannabis sativa
aaatcttaaaatatatgcatctacctacagatttgagttcattttttttctaaaagttaaattatttcataaatacaaagataataaaaaatttatatttttacgaatctattatttatatatatattttttatagattttattttaatttttttactaaaatacgaattattatttttcagttgtttttcatttttttctttgcgatatggttttcattttgttaagcaatttgaaaataacattttgtttttctaaaacaataagtaaaaccctataaaaattaaacaaaatctgtaaatatataaaaagaaaattaatcaattttaagtagtttttgtattttttttaaaaaaaatatataaattttagtatacaaattatgtcaaaaagcataaagcaaatattatgatttcatcaaacgtaaatttaacatgataaagaacattcaaaacatattttttcttgtttaattttgattttacaatggttaaattaatacttattaatcaaatagtgaaactaaatttatagtattaatctttcaaaaaaaaattatagtattaaactttatcaaaagacattaaaacaaatccattttcacatatattgactttttcctttacacaaaaattaaaaataaaaacaaaacaaaacaacaccaccctatatattgtgttgagactacataataataataataataa

SEQ ID NO: 9405 - DNA, 1139 bp, Cannabis sativa
  modified_base (556)..(561): a, c, t, g, unknown or other
caatactatgtttggtattgacttccattaatagattgtatttttattgtattgtattagtattatttaatctgggtcctagacctgggtcggggtctgggtccgggtctggatctgagtttgggtccgggtccgagttcggatctaggtctgggtctaggtacgggtcggggtccgagtctgagtccaagtctgaatcttgagtttaggtttgggtcccgggtcgaggtccttctggggttcgagtctcgagtttgggtccgggtctcgggtctgggtctaggtccgggtctgggtcccaagttggggtccgggttcagggttggggtccaggtccggcttagggtccgtctctgggtctgggtcccaagttcggtttggagattagtgttgacccggaatcatttgtaaatattataatacaagctaatacggaccgtttgttatgtattaaataatacaacatatattgtattaaaatttttagtcgtaataattaatataatacatttctttatccaaacatagtgttatttattatttaatacaataggannnnnntacgacgtaccaaacgagctcttaatgtgccaaatttgtttacttgtatacatgtctaatcatatgaaaaaaaatttactttttacacccttttatctgtataaaaaataaattcattaataaaaaaaatctaaaaattacaaaccggctataacaataaatttttttatttcatattatctatattatgacgtggacctataacttattaaattattcaaaatagtactattattatccaaaattgcatcagattaattttaatgtaaatataaaagtgtaactcaacctgctttcctacatggcgggttggaatcgggcccttatattatatacctttaaatatatataattaaatgcggattgaattggatcgtttactttttgagatcaaacaacattcaatctgtataagtgcggattttatattttttttaatccaatttaattcacataattaaaaatatttacattttgcggattatgttatatcaaatcgtacaaattagatcgaatcggatactttatgaataattctaaaatgtatatattgtgataataatcttagttctgttttt

SEQ ID NO: 9406 - DNA, 709 bp, Cannabis sativa
tatttagggcacaaaactcaaaacattgaagtccaggagataaaggaccagggcgacgaccgtcctcatagcccctccgaggctgaggagaagggagtttctcgggctctgtgttttgggggatagaatgaggccagagagctggtgtccaaaattggtgaattattggtcgagggggaagactacgtcacctaagaatatactaaggcagtctctcatacaaggcgaggtgccatgagggcaagattggtgtgtcctgcgtccatcgtaactgaggaccatttaaaaagtttagagaaggctgggtatttgggcagagttgagtcctttctccttactccaaatcaccagacaactagttcgagggaaggatactgtgcctggtcgggtgctcacacaaaacaaggggcgatgatgcctttgcatccgtacttcaaaagcattgcggactattattgcctttgtctgacccagttcaccccaagggcattaaatatttatctgccctattcatcctctatgctattcaaggttggggtgagccgtctccgcacgacaccaactggctctttgatttgaagtctactgcgaaatagagtaggtcggggtgcttctacttctctcagctggatgacaagtggctgaagggcactgtggatttggaggttagcaaaattgggccttttgttaacgaatactactttgtgag

SEQ ID NO: 9407 - DNA, 1028 bp, Cannabis sativa
gagactcggggccttacacctgatagcctccataatttctcgaaattggtcgtattcaagccaaggtatccatggctgccaccagatgtcaatactctctcccgacgcaattatggagcaagccccttttgcaataatgttcctggcacaaagaatacctctccacacaaagctatcactgcttttctcctgaatactccagaaagactctctggggaaatatttcactttaaaagaatgacaccacggtttgtccaagttgcttgctaactgccaagcaagcttggagagaagggcatgattaatgtcttcgaatctgcgaaatcccaggcccccacactgcttcggttgacacaaagaattccaggaaataggagcccaaaatctcttactatcgggggatccgttccaccagaatcttctcacaatggcatcaagatctctacaagaagaggtagggatttgaaaagtggacatagagtacgatggtaaggccagagccactgagttcacgtagacagcacgaccagcttttgaaagggatttaagtctccacccttccaacctttcataaagcctggtcttaagaaagttgaaatccttttttttacttcgactaaagaggaagggattgccaaggtgcttctcattacttcggacactcccaacattgagaccattttcaattgactctcttagactccgagaacaatttctggaaaaacaaacacccgatttttgcttgctgcaaagctgcccagaccaatcctcatactgttttatacatctattaatagtgtccacttccttgaggttggctcttgaaaagatgatggtatcatctgcgaacataagatgagtaatctcaggaccattgcgggatacccgaataccatgtaacagccctttgttttgttcatttactagcaatcgcgagaagacttcgttacacaagatgaagaggtaaggagagatgggatctccttggcgaatgcctcttccggggaggaatttcttgagaggtcttc

SEQ ID NO: 9408 - DNA, 524 bp, Cannabis sativa
aagaccaaaaaaacgaaacatgaattgaaatttgcgttcgattaagatttcaaatagagagatttctttcgtccaagaaaacttatcatctattggaaggacatgtttagctaatttataaatcgtaacattacaattatgaataacatgagaaataaaagagataagttttagtaggagaagaaagcaagtaaaaatgttatgttgaaaactcatcgtttatctgaaagggtatgcttacctaatccatgaacaacaatattaaagttacgactaatatgaaaaagacacgagacaagttttagtggcaaatgaaagcaaaatcatcagctaagggtaaaaatgttatgttgaaaattcatcgtctatttgaaaaggtatgcctacctatgaacaataatattaaaattatgactaacatgagacgagacaagttttagtagcaaaagacacaagatgacttgaaagttaactattttagtagcaaatagtgtctcgtgtccacaccgcctttttctttaaca

SEQ ID NO: 9409 - DNA, 520 bp, Cannabis sativa
tctattctgagatcaaattgaagcgttggttcatctattttatttgggacacactatgctatctgagctttctgtgatcagaaaaattccaagtagtttatgtctgaattaatcatgtagattacgtactttacactagtttgcttctttaacttttagtttttggtcaaatagatttgaataaaattcagcccatgacagatacctactttacatttaacttttagtttttggtcaaatataaactcattttcctattatatccaataaagccaaatccattcataacatggatcacttgattgattcttgtgaagtaagggtcacgttgttgctgaaattgccacaacatttggcgtccaacttcgaaacttgatcgaattccataacttgaggaaggcaaacaacttgctcataaatatttggaaaacaagagtagttgttcaggttcatttttggaatgaaataatgtcttaaacaaattacatatattcaataagcataataatatctatgtcaa

SEQ ID NO: 9410 - DNA, 664 bp, Cannabis sativa
atgcacctatatctataaacatgtcattaaaattggagaagtaataggaattaatgttttcttgttcatcagagaccatacgagaaacaaagtacaaatattcataaatttacattttcttttacaataatagtcaaaacatgtgttgactactcttttacaaattataaaaatatgattaaaaataaaataaaaaaccctataatttcagtcccaaattttgagaagtgaaaaattggcaataccaactaaatatttctcatccacaaggtttcactgttcaatcatgtactttctttcctctagctgcatctgcatcacagcaaatatttctatgcatagccacttctaaccattccaagagcacagtcaatcatgtaatagagggtttgttttataataaaaacaagtattatttctattgaaactcaatagcacaatggaaagagaacaactgtcttcaatcacattacgagggcaataaacaaacaagttagagagtgaggaaggagtggagagagcccaaatagtaacacaaatattattgcataactagaatttaatagaaaacaatataaacagtataaaacatctgtttagaattccaatgatattattgtatgaatttaataagtgttacatgatgagtccatcacaagacaat

SEQ ID NO: 9411 - DNA, 596 bp, Cannabis sativa
tttttttttttttttattcttcttagatgggacttcggttgtagccttagttgtgcgttgtctttctagttgagggggtctcatactatttctttcgtagaatcagttaaccggttcataccagaattcccaaaccagttcgaatctcacttaattcttccccaaattttgtcaaactttccaaaacacctgaaccaacatccaacaatagtttccaagcagtgataacaagaaaaacactcaaaatttgaaagtgtcattaatgaatcaagtttgagtttttaaactcaaacttgctcattctcctctcaaaccaacaaaaccaacaacaagaaacttaattccactcaaaacaatctcagaaaacacacatgaacaaagcctagcctaaacatccaccaattctcaaaatttgcatgacaaaaccaaacttaaagcttaaacaacataaaggctaaagttctagggtttaccttgatgaaatccttccaccaactgttgggcaacactctgaattgtagcaagaatcaatcagatcaaggagaagaaccctaagttcttggtttcttcttggttcaaaagagagagagagagag

SEQ ID NO: 9412 - DNA, 811 bp, Cannabis sativa
accattactccggccagattcccaaacgttcgattcgtacttgcattaactctcttacaggtattaacttctttgatcctttttctctattcactgtcaaatcccatcagagaaatgagtttttcttagggtactttagatataaatttggaattactattaaattagctgatggaactcgatgccagaaaagggttttagatgggaaaatcgtttttatattaatctccagaaagggttttattctttttgtcaaagtttttcaaaatttagcattaaattttgcctgcaatcgtgatctgcctggtactatgcgatatctctttgtgcagcaactctgttcgttagtaaatgcttcagatgggatagttaccaaatttggtcataactatcccaaattctatctcctatataagtgcagaacacttctgcgattttgtacatatatccctaccatcactaagtattattccctgcaagaattttcctacaatagcttctatagtttaaatatatactacagccactataatattatagtaacccagtcgagcctaggtttctacacaatccccacatatattctctctgatttctccaatcttccctttgttcatagtctccaggtctgtattatagtcatatatattctctctgattatttctttcttaggttaaggtatcatattggccccctgttccccccgctgttgaaatctcctaaccaacactaccccatagttcatagacatctactttgcagttatcttgtttttagactctcgaatacctctgtccatcctccaaccag

SEQ ID NO: 9413 - DNA, 522 bp, Cannabis sativa
cttagttctctttctcttacttcgttcttttttttttcaattgttggattgtggttgaaccttgcttatcatattatgtctttggcccttaaagataaacaaaaaggaagagtaatatagtttaattttttggattgtatacttaactttagaccatttttctaaggggagttgagtttggtattttgtgttagagttagtattttattttgtgctaatggtgtgcttttcagggggagtgtatttttgtgattttgctacctttgttttgcatgtattttaaagttaaaatatattttgattatctaaagtgccaaaggaggagattgttagatcatttttttagaaatttagttgtcaaaatattatttaaagtttattgtgcaattaaattaattttcttgtgttaattcttgactttgattgcactttttctttaaggaaaattttatttacagttggtattttttgtttaaaaaacttgttttacaagagaacgaattttctttatggaaagttatc

SEQ ID NO: 9414 - DNA, 646 bp, Cannabis sativa
catatagacatcctcactcagagttccattaaggaatgcattgttgatgtcgagttgtctaacttcccaagattttgagacagcaattgttaaaacaattctgacagtacaagctttcaccacgggactgaaagtttctccataatcaactccaggtctttgtctaaacccctttgcaacgagtctagctttgaacctttgaaaacttccatcagcattcaacttgattctataaacccatttgttgtccacaatgtgcattccaggaagtttgggaactaaaaaccaggtcttgtttttcaccagggctttattttcatcactcatcgcctcattccagccttcatgttcaagagcttctttcagagagagaggttcagcataataatcactcgattcagctttactcaaataagtttttggcttgaaaaattcctgctttagccctggttatcatcgggtgagtaggaacaggttgattaattatttgagtgccagttgctgcatcagtttgcctttcagtatcctgaccacccgtgtgttgtgcatttgactgctcattgtcattaagatcatcatcttgaataatgttatactcatgagaaacataatcctgatctgtcattcttgtattggactgatgagt

SEQ ID NO: 9415 - DNA, 503 bp, Cannabis sativa
atgaatgggacaacctgttttttggtgcaagcgttgtgtcaacagttggtggccactctgggtgtgacaggtaaataaattcttaatataaaattcatatcgagtattatatatttaaatttaaattaatatttcactataagtaatgtatcacgtcctaaaatattggacaccctaggattcctttccttatggtaatgctctaataataatagtatggcttaggtgaatgttttacaagacaacacacaacacactttgcacttctaattttgcccatctttcattttatcaatgcttgttctaaaagatttatcgatttttaccatgaaatttaaagaaaaccaatttccttagcaactttagatcttctttaccatttttcagtttttctcttctgttttaactttcacaataaagttgaatatttactgaagttacgagctattgtattcataattataacttcgtagtttcacaccttttcttaaaaaaaaaaaaaa

SEQ ID NO: 9416 - DNA, 632 bp, Cannabis sativa
tatatatataaatatatatatatatatatatatatatatatactaggcatagagaatgtgccataagcacataaccctctttaaaacctatgggttataattatatatcttacttttattaattatgtttaaaataattgttaaaaaaagttatgtttaaacaagtacatagtgtgatatatgttaacttattaaaattaaaatcatttctaaatgtaagtctatgtgatttgttctacttttatttattgataaggaaaatttagaaaaaaaaataaaataataaataacaaaaatctacgaaaaaaagaaagaataacaacacaaaaatgattaatatcatatgtatgctcgtatagtcttttacactattttatatttactaataaataaataagaaaaaagaagtaataaaattgaaaaaaaaaaaggagaaaaaagatgataaaaaatataaaatagacttaaaaatattttaaaaaatggcactacaacaattaacgttattaggggcggaggagtctgctggtaataatctcttaatccgccggtatttggctttggcggtggggtccgccggtaatgccccgccgctattaatcattaatagggacggacaattagcggcgggg

SEQ ID NO: 9417 - DNA, 661 bp, Cannabis sativa
taattttcccactgatgttgttgtttgaaatgtggagctcagttatggaaatcggcagaacatctgttaaagggtcttgaaacctgttgtgacttaaatcgagactcaacaacactttccatggaggcacttccaacacttgttcataaccagtgatgaaatttgtagacatatttaatgaatacaaggtctcagcccctatggtgaagaaccatttggggatcttcccttcaattttgttgttggaaagatctaaatatcttagctcattttgggtttgtaggaaaacaggaaattctgtgatgttgcatgaacccaaacccaaataattaagtttattggttatggtggaatttgttgttgtatttgtcactatagacagaccgttatctgaaagataaagatctcgaagttgactcaacttcgagaacatgctcatatcaattgtgccacttaagtaattttcactaagggcaagttcttccacttttttcatctcaaaaattgaggttggaatttgtcctgttagcttgttcccatctaaataaagatttgacagttgagatgacaaactgacatttggaatggtcaaaggacctgtaaactgattatgtttaagatctagatattgtaaattaggaattttgaacaaagatgatgg

SEQ ID NO: 9418 - DNA, 1766 bp, Cannabis sativa
aatatcagtgtagtgggtgttgaataaaaagatggtttcttttttgccgtgagcctctctgtggtctgacacatgaaacaaacggcctaaattctcgagatcgtgtcaaaaatatgccatgtgggtcgccttccgcgatcctagtttttgctggacgccgttttacattttgttccagaagtttcgtacaagcattccctcttaatttacatttgctcgctttttacaagatcgtaggtcaatccgacttcagttctctaggttacccgctagaagacatctttggtggatccagctttaggtttctagccttctgcaatcctagtttttgctggacgtcgtttcacattttgttccaaaagtttcttacaagcattctctcttaatttacatttgctcgctttttacaagatcgtaggtcaatccgacttcagttctctgggttattcgctagaatacatctttggtggatccagctttaggtttctagcttgggataagttgaaaaatacctcttttttgtatccataatcaaaaataccctcatatatattattttttttattaaaatatacttattttttttagaggattgcctaatataccattaagtctagcatataatttacataacttaagggatctaatggggacatcatctataaaagtggatacatctaaaaaattataaaaatagaagtaaaaattaaaacaaataaaacaaataaaacaaaatgggtatacaatataatttctcttctagctttgttctctccataagcaagctgtctgaataattcatctgagctcatcgaatgggccttgttcccatgggcttttgttgtagtccacttactagctatccgaaaatactaataacaagtatttatataggtatccagtttcactttttaatgtaataaaaatataaagtattactataatatttcttttctttttttaaaaaaacgctcttaattatttagagttgatacaaaccccataaccacaacattaattgataacccaacatttaatttctacaaagtggcaataataaaaaaaaaaaaataacaaaataaaaaacctaattaattaacacaattatttatgaagccaaaaaaaactatataaattggatcattataattttttgtggagacgtttgagggcaaaaacaataagcaataggaaggcaatagctccaagtgcagacaccacaaaagcagccgctgcttggtgacaaaacttgccaaatacattacaaaccttcttccattgcacatgtgagttcccttggtaacccatcagcccgatgctcacggccgccccgttgcttgagaaaagcaacgcaaccatcactatgtcggccatcgcaatgccgaggctgatgttgcccctctttccgccgcggttacccaaagaaagaagtagagaaagtactgcgtatgaacatgctatggcatgtgccaccacaaagtacctaaccattttcaacacatattagaaaatggagctaaaaattcattttaggtaaccgttttccatctcatgcatgtcatcataaaataaaacatataaacgaaatttatttattgtgttgtctttaagaaattaaaatattatgtaagaaaaaaaaatattatgtattttgccaaatagcatgtaactgtaagtcagacaattattgtcgtaaccatattttatggttgggaagaaaatttgatgctgatgtgacttttgaatttttggtttaataatactta

SEQ ID NO: 9419 - DNA, 520 bp, Cannabis sativa
tctatcttaaagtacatgtatgtgaagtgaactacaaaaatctagttttgttagttttaaatattgtgaagatggttaccaactctgtggcggattgaaacgagaaggtctttgaaaacgcatcaaacagatagtgaattctttagttattgcaccttgttagaatttgggataagataaatgaggttccatctcaaaactaattgacaagctcatttctcttatatattctattatctttcaattcattagcgttgtgggactatctaaaacacctccttcaacctttgatcaacaaattttgctgctcattttttagccaaaaatactttaaattataaaacaattgcttccaagaatagacgaaaaacccattttgctgtttgtctaagtaattgctaattacattctaattcattataaatcatatggtgagaatagtatgaatatatactctcatttaatatagcatttaaatcctaaaaatcaaggaaacaacacttatctagatttggataaa

SEQ ID NO: 9420 - DNA, 783 bp, Cannabis sativa
aacaaaggtagcattacatgcatggtttaatttagaatgggaactcatatttattaaaatttaataagaaatattggtatatggcatatctaaaatactattttatatattaaaaaaatatatctaactggcgaaatttataagaaaatctgattttttttttttttggaaggaatctattttttggggggtacttttttatttatatttttataatttatttttttattcatttataattttttaatttactttttatttatttataaaaataaaaacaacttaattttaaaatagaaataatataacattagaataaaaataatttttataaaatataaacaacataatctcggaatgcaaataatataatttcaaaatagaaataatttttataaaataaaataaaagtaaaaaaaataaaaaaaataactgtgtacatatatactaaaataatcaataatctaacatgcataggaaacatatcatcacttaacttatataaaaaatataattaaattttttttaaaaaaaaaaaaaaaatagaagatgagataaaatggatcatgaagccacttaaatcagcttattctaagagagtggaaacttgtggcacaagtggcacacctacatttgttgtgctcttctctttttctgacaaaagctcaactagagggaacgagaaaccatcagatgtgtgcgtgatggagtggtcaagctttagctttaatgggagaatgattttgtgggtagggatgcacacgagatagggaattggcgggg

SEQ ID NO: 9421 - DNA, 541 bp, Cannabis sativa
agtatcttccctggagggattattagggaccttaagaatagcattcacaatatcaccagaaaagaaagagtttaacttattaacatcccaacaaccaaactcagtgataaaaaaagagacagttttatcagtaggtacaatattatttttataagcaagaaatttaataccaggaatccaattgaactgaagagtggagattatttagtcattcccaactttccaaagaagtcattggtttaaaagatccctaccccaaagaagactattccaggtataagatgagcaatggcctttggatgctacaaggaaattattatgtttataatagcttgctttaagaagctgagaaagaagagaggaagggttgaggaaaattctccaagcttgtttggcaagcatagcctagttatgatgaatgaaagatctaaagcccaaaccccaaaaaaactttgaatcacaaagagtagacaaaattttccaataatttttttcgcaatttctaatagttccccaacagaagtttgcaattagcttatca

SEQ ID NO: 9422 - DNA, 743 bp, Cannabis sativa
ttcatttgttattctttcattttctcacttccaatctgcttgggttcaattactttcagataacaaaacagattcaagctgttaatgaggtttataagcttcataatctacctgaattttataaggttagccaactctgttgtgaatattatcttctgaacaaaagcttagctttaataaaaatcttaagaagttttttacatggagcttattacttggggctaacattggatgtttttcatgtttgttataggatccacgtcctcacatatccgttgcttgggcatctggtgacatcaaccattccttgaggagtgctgttcaagaagaacgaagaggcatggttggggcctctttgcataaatgcatttttactagtaaattcggtggtattgagtgtagaattggtaataaggagtataagatatgtaaagttttagataagtgaaaagattcgatccccacaatcacttccattacgtttttatcttatttttaacagttaaatatttgttttaaaagacaacaagcttagtcccattgaaaatcttgtggttctgttcacaataaatttatgtagggaaaatcatatatttccaagtgaatgcctcctacgaggccttggttataacattacttagtcaattggatatatgcacaggtgtttataaatctttcaaagaaacagtacacatttgctactataatatgtcctaaagaaattttgatcgcattgcagccaa

SEQ ID NO: 9423 - DNA, 934 bp, Cannabis sativa
aactgtactttaaagatggtcatcggacctgagtactagttactttgtccgaacctttaagcggaatccgcctagaaggccatttacttaagagtaaatgttctagcattgtgtacttaagatggtcatcaaaccttgtacacttactagtagtatttctcaaatgttccccattcaataccttggtactcgaacgagctccatatttttgtcataccgtcccatcttatatgcttcagaatttgtgacttcaaccacctaatatggtccttcccagttaggtctgagcaagccatccatgccatcttttgtgtttaggaatactattctaaggaccataattcccacatagaattttcttgccctcacttgcttgtagaagtactgagctaccttttattgatgagccactagctttaggtttgctgaggtccatttttcttcaatctcattaagtgattcagaaccataggccataggaaatggagtatgccttgttgctattttctctattgtttggtatgaccataatacttctggtaattcctccggccagttccctttggcttcttcaggtcatttattcatggtgtctttgagtgtctagttaactgcctcgacctggccatttgattaaggggtgctacttcgtagaaactttttatgattccacatgtcacacagaaatctgtaaacatttggctattgaactgtttgccattgtccgaaacgatcttgtgctgaagttcgaactgacatattatgttttttttaacacaaagtctaatactttttcagatgtgatcgttgctaaaggctcggcctctgtccactttgtaaaataatccactgcgaccactgcatattgcactcgtcccttgcctttgggcaattatccgatcagatctattccctatatggaaaaaggcaccca

SEQ ID NO: 9424 - DNA, 578 bp, Cannabis sativa
ttggaagtggctgccattgaaagtaagaagtgtagaaagagtgagggaagatgaattgatatttttgcaaatataaaagtttaaaaagtaaaattttttaatttataggtataacagtttagatacccttataaaaatatttttgtaaataaagttgtttgttaaattttatatgtaaaaatttcatcaaagaaactttgacccactgtatatattactaggtataacagtgcactctctaaatgagtgttttgatagacctgctttatgtttcggcatctaaaaaatttttttagttttttttcttaatcgcatacgttcagtgtgactatttttctttatacgtgtggtaaataaatgtactataaactattcaaaattttctaaaaatttataaatagtcttaaggaattactaacttaataaaaaaaaattaaactaaaaaactctcctaaataccaccgaaacaaatatgagtctaccaaagcaaccttctgagagtctactacagatattttctatattatatttacctatttggttcaaataagtacttacatacctggatctttatggag

SEQ ID NO: 9425 - DNA, 543 bp, Cannabis sativa
attgtttcaaaataatgttgttttgacgaaaaaaataacatgaaagcaacattttttgctggaaaaataacaagtaaagatttgtaaaaaaaatccgtacaaatgtaaataaataataaaaaaattcttaaaaatgtgagaaaaaaatcagcttttaaatgtattgtgtgaatttaataaaaaagttttgacttgtgtaacaaaaattattgagtaggacttttgttttgttaaatgaacaattagattttgtattttttaaactcaactcaatttatttaattttttttaatatattaagctgaagacagtttctaagactaaggaatataaaaaatgtaatctgattatatttattttgaaagtcaggatattattttatattattttaagaaaatataaaagtctaaattattatttatcaaaagatatagtctaattggtgaattttgcaacacaacatttttaaaatggtatttacccgaaatagaatcatttagatacggtgtcgttttggagggcaatttggtcgtcgttttcagc

SEQ ID NO: 9426 - DNA, 1370 bp, Cannabis sativa
tttttttttttttttttggtcctagcctttcttaggcataggtgtagctaagtcggggttaagttttactatatattgtgattagatttttgttactgtaattagtcttgtttttgtgacatgattttgagtattttagccagtctcagtgacttgattttgagtgttttagtttctcctttattctttgatagatcgccatcaaatcactgtagtggttgagaataataagttctctgcgactgaagaggttactaatagtgaagttacgtaccttgcataatagttgagtacttaagaagcctgctgagactaagtagaactcagtgtacatagcaatagagactatcattcttcctttgttaccaaatgctctctctccaatattagggtaacttcttatgttggaatcaaaatccatacatcttttaattaacaagcctgagtagaatgctgctgttgctaatgcatatggaactgagagtattcaaactcctgaaaaccccaagacacattatgagtcataccaaatcttttaattacaaatatgaaaaatattttacaatgcatatccttaaaatggatgcaccgatacactctatgcgttttggtatctgaaataattatttaataatattttttttgtaaaattttaagaaattttaaaatatttaaccgatcgaaaacatggtttaaactgtgtattgcaaggatgactattttatttgaatactgctttttatattgtaaattattctgaactttttaaaatgtatcttaaattactaatagtgaggttaaatctgctgctacaatttctattgttatgttttctaaacaataaataaaactgtaatgcttcactttttttaatttttttgtcaaacaatttgggaattacactcttgattatttaacttatttttctatcaataaacttgcataatttattttactactataaactcataattataaactgttttgttaaaattaactgcttcaaaaaaaattgcgtgacaaatattttcataccacttattaaaaaatttcttataattaataactaattttataattaaaaaagatgtgacaaatttttatttttaaattaaaatattaaagataataagaagataaacgcaattttttttaatatggttgtactgattactaaactatatataatagtggtttattcaaaaaaaaaaaaactatatataatagtggccagaatatataataacgtttattttcaataatagtacatattattaatttacaaaaaccaacctttcttttcaagaaattacttgttcgatttcattggaaataattaataatagtaatggctatggagcttgacactt

SEQ ID NO: 9427 - DNA, 601 bp, Cannabis sativa
tgtcaaaggttgcatgctaactatgtgtacctacttaaaatatgtcaaaggaagtctactctagtactagtcatatgtgtaccctcattatggatgcagagtgaagagacgtcacactctttaaaggacttgtcttgaaatctagcaatgatctttctaaacataatgaccttcgaagtttcaaactttacccagggatcctatctgaacgccctgagtttgttgtccgcaagtggactcacacagaatatccaaaatagtgaaacacgcatttttatcttcatttggaaggtagcaattcatttggaaaagaagatttaaagtcaattattataatattgtgactaaaaaaacaacaaattattcatattttaggagacttctttaatacaaaccctaaatgagatagtagtgtattaatatttatttctattttgacttgtgaagaaattacaaccttaatttatctatacaacgatgtttattatttacactgttaaaataagagtaagagtttaatacaatttttttttgttgtgtgtaacaaattatttgaactataattttattaactatcagaaatatatttttaattttatat

SEQ ID NO: 9428 - DNA, 604 bp, Cannabis sativa
ataacacaattatatatatagagactaaaaattaaaattatgtctataatcacaaaagaatatattagctatgtaacgtctaaaaataaatttgtgagagttttaggctcaaaacagataatattatactaatgtgaagataaatattgtgttcaacgtactaacaagtggtatcaggattgggttccaaaattatttatgtgaatgaatccttaaaataccaaacaaagaagatgagcatcgataatctcacaataggatccatggatgtgcttagttggacatatggtgtgctctagatagaagagttggcctgaataattgcaagaactcttgaggtagtagtggtgctccatataaggcatttgatccaacacatttgagagaagtatacactaattggtggagagtttgacgaatggagaattgtttatggggaggcaaggtgatcttttatttgaggagagggttgttgggttttcagtcaaaatccaatattggctaaaaatgaaaaaaagaatatgcatatataaaaatggacaatatctccattgagtataaaattttttgaaaagatgctcaaaatattatattaataaatatc

SEQ ID NO: 9429 - DNA, 584 bp, Cannabis sativa
ctataaagccaataccatgcttaccgtctgcctcaaagatagttacgtcaatgttaaccttgatgcttgaatcgggtttaaaccaaaattctttgtcatccccatcatgaagaggatgcaacagaagaatattacctcttccttggaattttcaaccattgatcaagagacttagcaacaaaggcaactacatcttccaccttcatcttacggttttgccaaataagctcaaaatagtccaattaaccaattatttattgtcaaatttttttcttttatctggtttgattattaaaagggtaaataatattttaattgtgttttacgatgttaaatgataatttgaatactatattttttaaaatggtacaaaatagtacctaaacttcattttcgtcaattaaaatttaatattaacttacacttgaggtattatgatcatacttattatatgtttttgcatttgttcaaactaaaaattaacttcagattcattatattacttgcaaatgaccttcaaacacgcacataacaacaatgattagaatttgtagaatttgttaaacgtagagcaatgtgtaatt

SEQ ID NO: 9430 - DNA, 881 bp, Cannabis sativa
  modified_base (362)..(362): a, c, t, g, unknown or other
gacatggaggctactagcagggtgtttgcatgcggaggggctttagtcaagctcctgggcgagcttcctcaaacaagtattgtccaaacacgcatgctcactgagtaacactcggtgcgctcgtgcaggggaatgaccccttcaaattcaattctataaaaaattaaattgcttaatgttttccatactatctaaataaaataattttagatagtaaatctaattattttttataaaaattttgtaaacatcaagtaatcatcaaataaatacatagatcaatatgaatcaaataacacattaaacaggtaatgaaataaatttatttctttattaataaatgaatataaaagattacattnaaatagagttttatttagggtacaaaattaaataattcatcactgactgtgtattacaatgtgattcattaatgatgtgtattatgagatgattcataattagttgtatattacaaggtgattcatcactattgtatattacgaggtgattcatcaatgatgtgtattactaggtgatttatcacttgctgtatattacgggatgttgaatgttttaccaaaataactttccaacaacgctgaaatacctcatttcacaaatcttgtgatccttatttagatgaggccacctcaaaggttgagtcctgagttttttctgacttatcccacagtgtatttgttgcaagaatttattatctacgccacatggcgttcaatttaactttttcattaaatagtctaaaaaataggtataacatgttttattttacactaatgcacatatacaacataaacagtaattaaatcactaatgaactgctaatctccatagtcattatgtttattattattattatt

SEQ ID NO: 9431 - DNA, 729 bp, Cannabis sativa
gatcattgtaaaaaagattaagcaaagattacgcacttggttgagcagacatctctcctttggtaataaggttcaattaatccactctgttttacttggctttcgaaattattggatgagcatctttgtttttcttcatagtaccactaaggaggttgaaaagctttgccgagaatttctttagggcatgaatggtaacaaaagtaagatccacattgcttcttgggagaaaatttgccttctgaaggcttacggaggccttggctttaaaaatggagtcaagtggaaccaatctattcttgctaagtatatttgggcgatttcaacaaagcaagaccttctctaggttaaatggatagataacgtctatctgaaatcagtgagcttctggacttatgaacttaaactagattctagttggtattggcgcaaattatgtcatttgaggaagaaatttttgagaattaagattcttaaagcaagtacaactggccggtttaagactaactggttatataataacaatttggtccaaaatcagatcaattatcacaaagctatttagaattctttaatactgcctaaacacagatttcttctataattgtggtcacaaatattatttgatctgaaacattgaattccgaatgtagttcatactgtaatattgtactttatctggaattatagaattggtgtttgttcgagttagcttgttactctattgat

SEQ ID NO: 9432 - DNA, 784 bp, Cannabis sativa
aactttatttatgaaatagtttaatatgtaaaaaagtggttatataccattttattaatattattattatttttaaatttacaatttgagttgttatggtagtactttttatgtagattgttatgtaaattttggttgttctttcaagttccgttgattactacgcgggttgctatgtggatttccgtaaaattacagaaaaaaattattttaaagtttaaaataaaaaaaaattcctaaataatatctattaaaaaaaattcaacgaagacaaataaatcactcataaaaaaaatatattatttgggacaaatgaaagtcacataataaacaaatataataatatataataaaatttataatctacatgtacatataaaagtctcacaaaatttacaaaatataatgaaaaagaaaattagaatgccacctaaatatttttgtgttttctattatataaatatatatatatatttaaataaactattttttttaaggatacattaattttttttaaaaaaaaatgtacttacttatttatacttttagagttcgtttggtacactgtgatgtattgtattgtattgtattaatttgcattatttaataaaatactatgtttaatattgacttgtacgaataggtagtgaaaaataataaatctacaataaactcgaccccaaccccgaccacagcctagacccggaacgcggaacatgctccgaactcgaaccctaactgggtcttggaccccgaactcaaactaagatccagacaccaatta

SEQ ID NO: 9433 - DNA, 979 bp, Cannabis sativa
gtctgtggtgtaacggggaggacagctctaggaaattacgttcctggcatgtatcctggtccactagttggataatacccgccgtaggccactatctgcgcctcttccaagttgatgtatttttagtcccttttttggaagtcttgtaggctggtagctccatcctgttgtagctcattccaaaaagcagttctagctagttcgtgtcccagcttggagtagtgctagctgttgtccatcatcaacttttttggtttttgaggtctcttctttgaatctttttatgaagttctttagggtttctgttggtagttgcttgatgttaggtaaggcactcacctcgaggttaatcttcctagctgccatgaattgtcttcgaaaattgacttgcaattggttccaacaatctacgaatcctggttctaatttttgaatcattcttcagccaatccgcccaatgttagtggaacacataaacattttgcgtcattactaagcctcatgactatcattacttgattgaatcaagacatgtggtcattggggtctgtatctcctgcgtatatcgttatctcaggcattttaaaatttttagggagctctgcctccagaatgtttttggcataggattcccggtcttcacaatcaaactccgaattatcccctttttgcctacatgagatcttggcaatgtcttttcggaggattgctagttcggccaagatcccttcgttcaagatgccctcctacactagtatctcttgtttcttattctccaaatgattcctgagggcaccgcgtctattattgagcttttgccttaagtcagtagggggatgcacagatacactttttcggtcctctcggtcctaagggccagtgctctctctagggagcctgcccctctacgaaccttttccttacgggaaatcaaagcgaatttttcgcggatcctgagccttcttattctttttaggga

SEQ ID NO: 9434 - DNA, 678 bp, Cannabis sativa
ttatcaatattatacatatttttttgtttatattattgtacatatgtatcaccgtcatatatttatggcctatatatattaatcttggatggcatggtaacttcccttagtttccctatgctatgtgtatattatatatataaagttagttttcaatattaatagtattttctttgggcctcatgatgatgacaaattttatttttttgggacttctagatgctttagtttctgatttgggacctttatataatgttaatttttatatatattactattcgtatatattaactttttaactaattaatggagtttttattaaaagtagcaatcatggacgtactatttttgaattattgattgtaatatcctagagtctcttttcattattgtgctggtgcacataagctataaactatatagtgaatgaatcactctcaagaacacaatgcagcaaccaaaatcaaacaaactaaccaacacagtttgatcataaactttacgtgctgataaaaaccagcaatttaaagaacaattcaaagaggaaaataggggtgtgcagaaagtcatctattccaattccaaccgatccaagatcggatatccaatcataattggatcggatcggatgcaaattttaaaaatccaatctataatcggatcggatcggatgttgga

SEQ ID NO: 9435 - DNA, 704 bp, Cannabis sativa
tgttctgggttctagtgcttcagtgataatgtatggtctttccctagaaggtccgagtaatcatgttgttgtctctttagtgtttaggaatactagttgtaacgccatatctctaggctaaaagttcctatgtttgaccttagagttatagtgtcttgtgactatttgctaatacacagcctgttagtgctcagacctttctcttatttcttcaatcccatctaaagactcattcaataatatattattggtgtgttggtcatatgttagtctccgatgtgatggtgttaggagatctatgagtatcattgctttgtacatgtaggttagagcaaaaggagtatggttggttgttatttcttcaggacaattccctttgtcttgctctagttgtttctttaacgtatcgttaagagtctattaactgcatccacttttctatttgcttgtgggtaagagaccactgaaaaactcttgatgattctatgtttgtcacagatgttagtaaagagattgttgtctaattgcgttcagatgtctaacactatcttttgtgggagttcgaagcaacaaatgatgttctttacctcaaaatcacgaactttattcaatgtgatagtggctaagggctcttcttcaacccatttggtaaagtaatctaccaccacttctgcatattccactttgccttttccctttggtag

SEQ ID NO: 9436 - DNA, 582 bp, Cannabis sativa
ttgctttcgggagaaccgttccaccaaaatcccctaactactgcatcgagttctttgcaagttgaaaggggaagttggaaagtggacatggagtaagccggtagtgcaagtgccaccgaattgacataaaccattcttccaatcttagacagagatttgagtctccatccctcaagtcttttacataaattattctgtagaaagttgaagtctttcctcttgctatggccaaataagaatggattgcccaagtatttttcttcttcacgaatgtcccccatactcaaattgttggtaatggtctccttcagggctcgagaacagttgctggaaaaaagaacacccaatttttgcttactacacatctggccagaccaagcttcaaacgttttgatgcatctaattacagtagttggctggcccctttttgatttaggggtcgactgttttattaaacatatattcctgttaaagaaagaaaaatatattaaaggtatcactttcacatatttgattttatatgtaaaatataatttttgggtttggggttcaatattttaattttctcatggacagagatta

SEQ ID NO: 9437 - DNA, 502 bp, Cannabis sativa
tctttctgttgcttctcagaacaacatgccagtcactgcatatcctctataccaggtgcttgattatttcaagttttctcaccagtttagagctatggttctttccatttctagtctccaagaacctacctattttcaacaagccaaaggcatttctgtttgggacaatgccattggattctaaaatagaggctctagagaaaaaccagacttagattgttgttccccttccaccagatcaacatgttattgggtgttagtgggtctacaaaatcaaattaaatgctaatggttctgttgaaagacacaaagccaggctcgttgctaaagggtacattaaaaaagaaggcatagactactcaattacttttgcaccagttgctaaacctgtcacagttaagctggttttggccttagcaacagcttgatgttaacaatgtcgttcttcatggggatttgcatgaagatgtttatatgactacctccagggtatagtcctaag

SEQ ID NO: 9438 - DNA, 732 bp, Cannabis sativa
agttttgctattgaaaattagtaaagtttaacactttctataggtgatgttttatgattagttaatgatattctttaaaaattattttaaattatatttaatccgatacttaaattatataggtataacatgagtgataccatttaacatttattggagaccaaatatacactacctacctattcattctaatctctaccaagaaaataatgagataccattttttttcttgcattttctttttcagaattgtattaaaataacattaattgaactctaaattataaattatacataagcgttgaagaattatagaataaccacgataaacgaatatgtttgattaattaactcttcaataatttttctttcaacggcctacttcaaaattttcaacaaaatgatttcttgaaaggatcaaatatagaaataattgactgtaattgtattttcaagtgaaagtagttattgaatgttaaaaaaaaattaatcaactgattatcaatttatagaataaaaaaaaattgcaaaggaaaaatatgctagcatatgatgcaaaatatacttacaccatttttctcatccaattttacccctaaataaataaaaactaaacattcatctctctcatactctaattattatagaacctgatctggaactatttaataaaaaagagagcatacattactgggagaacacgatatgattaattaataatataactgagca

SEQ ID NO: 9439 - DNA, 716 bp, Cannabis sativa
acaccaagcacctcgttcatcacaaaaatatttctgagtgtggagtgaactggcattggattggatgataaaaaatacatacaaaaagaattaaggataccctgataggcattaagaggcgaaatttctttttcttacatattagatttaatttatgtaatcatgttgagatcttgtggattatggttcatattagattcatctaaaatatttttataaaacctaaaatatgctttctactctgataggaatcataaaaaccaacaaactggatttggaatattagatggattctcttcagtgccctgtttagtgtcctcctcagattccttctcactagatcaatcttcttcggtgtcttcatcaggaaggtcaacctcatcagtggtgtcacccatttcaatcacacaagatggttcaacattaggctcagtctcaattctccttgtggcgaatcttgccatgttagggttgctaactagtttggcttgagctgtctgcatagtttgggccatggcaggtaacatattcggtgacagagcaactgtaatagcaatcttagcaaaaacaaccttcgatccactgccaactctcttcaactcttaaatatgtctgttgtacgcctgcctaccaactctcgatatagatgagggggaaattcagatccaccgctagaactcttgtctcaagacaagtgaggggaagtcaaagatgac

SEQ ID NO: 9440 - DNA, 524 bp, Cannabis sativa
atattacagatatcacttttgtttctgtttcttttgaaattataattcaattttttttttcttttatatcttaacaatttttaaaagtttgaaataatttatttttttgagtatagcgtaatgatattttacaatcaattaatagtttaaaagttttaggttcgaacccataatctttcctttttttccattccttcctcaccactaagttaggcttaaaacttgaaataatttacttataaaaaaaaacttcaaattgtcaattacattagtacgcgtgtagttaattattcgtactttatttttagcactgtaaattttttaaaaattagtaaaatacatgctatataattataaaaaaatatatatttagaatgaaaacaaaatcttccctacttggacaataaatttatttctatatataaacaactaattaattttaaaataaaagaaattgaataaattaatatatttttgcatgcaattaatttgtttttttttttcaggctagggatagaatgtat

SEQ ID NO: 9441 - DNA, 531 bp, Cannabis sativa
acagtggcgggtatcaaagctttaattcaaaactctgcaaaccatatcctttaggtcgtgactcctgatatcagaagttctcctgtagatcatagtgttgatgtcgtgttgccggtcttcccaagaaacactgtttgtatttttttggatgtttgcttgtagaggctcgtgggttgtgggagctatcattgtgaagaacaatggcagagttgtgttggaagctttgaccgttaggcttgatatctcctctccccctcagggagagaccattgttcttcttcatgcagcttccctatggttcttgcgtgactggcaaagtttggttctcctttcaaattataaagtgttgatcgatggtatttctgctaataaggcacatactagcaagataagtattgatttagttttcatgtggatcaactcgattctttgattgaagctcgggtggggggcctgctgctcattcttttttttattttttgtcctctaagaaggtagaacctcttgtttccatttaaactttgtcttttg

SEQ ID NO: 9442 - DNA, 752 bp, Cannabis sativa
tatatatatatatatatagcattagctacatggaaaagaaaagaaaaactatgaataattgagagaatcagtaattagtaatcactatacatataactgataaattttgcttcaatatacatatataactcagaattagttcatatataagttatattcatagtgaacttcattgtaatctttaaatataaaattccaagaaaatgatgatgataattaatttagcttcaacaaaagaaagagtcttatagttcacatattatacattattaaaaaattaatgcatataatcttcaagaaatttcttttctaaattactctttttccacaatatattaatcaaattaagctatacgcgcgtacattaatatcagtacaaaaaatatccgatcctagctctctaaatttttccatgtccaattttcttcaaatttaagtaatatatatacactatatattaattatatgcaatgtaaaattataattcagaagcatacatatataatattaatatgtatatatattcagtttaagtataattgtttttttagttatgtgatgatactaattaagtacaaacgttacttttgcacgattattataatagaatattgttaatcaatatctatatagctgcattaattacttaactgaagtttggagctttgatgatagcctctttttcttaaaaaaaaatgatatatataaatatatataaaaaaataatcagtagcaaattactgtaaaattat

SEQ ID NO: 9443 - DNA, 971 bp, Cannabis sativa
tacgatgattatttagagcattttaatcactttaccaacacgtggcccaataaacaaaaattatcttcttcagactgaattcagtctaaaaacatcggcgtttaattggaggtagtgttgtataagtttgtgtatgttgtgttggctcgtattatatttattcgtatttttttttaaaataaatcttatcgtgtcgtgtcacaaaaaaatatgagtcatgttgtatcgtgtcaatatttttaaagggtacgtaggcctgacacggcctacaagcccagtattttcgtaccatgctcggattcgtgctggcctgtattttttaaacaagtcagtcagtctattttcatattcgagcttaaattcatactttactttttcatattttttttacaattactaaaatatatgtgtttattttataattttatttatataacttttcaacaatattttataaataattatataaaaaaaaaattattagcattattagaatttaatatttacttatatatatactcagatttttatatcacaccctataaataaattaatatataaccttattttttatattttaatagcgttaattacataattataatattcataattatatttaaattttattattatgttaacttatttataattgataaattcaattattattattattaataaattataagattttgtaatatgtggtgtcgtgtttttcaggtttgtcgtgtgtcatgcttttttgggctaatctattcatgcttacgtgtcgtgcctttcgtgcttctcatgtcatgtcatatttttcgtgtcatatcgtgccaatttctagctttgtgtcctgtcatatccaagcctatgctcgtgcctttttggactctcgtgctaatttcgtatcgtgtcaaaaaagtctaacccatcggaggtaatgaaataggaagaacacaattttcatttcatttatttgt

SEQ ID NO: 9444 - DNA, 1273 bp, Cannabis sativa
gagaatgtctttggtgtattcagggtgaccttgaataccaagaatatggtcttcaatggtgaacatctccaccccagttttgtctgaatatgctattacatttgcacccaaaggaacctcccaaacctcatcttggtggcattctacaatggaaagagaagctgggatatcatccaattccatttccatttccaattctttcacatagctacttattaatggcaccaaatcttttgttatcttcaccttccttatccccaaatcccacccactatcagctttccctaccttccctcccagtgccctgcatatcacctgaaaatgaaatttttttatatatattttctactatggagttaaatgaaatgtgttatctatatttactatagtaattatatacctgatgaccaaagcaaataccaaggactttcttgcccatggaatccaaagtatgcaagagagagcaaagcttgataatccaaggctgattgccataagcatcatagggactaccactgaccacaaagccatcatatttaggcaactcttccaattcaggaaattctccttcgacaaccctaaacaagtcccatctctctccttcttctccaaaagctgccatgaacacattcaagtaacctccatacatatttttcacatactctgagtcctttgctgctagaagaagaccaaatcttttctcatgattaatatcatctctttgttcatcaactttcttcatctcttaatctattattgtttatatttccaatgcaaccaaaatgcccagaagaaatatataataataactaaaataggtgcttaattagcagccttgattaattttctcaaatcaaagtcttttgtctaatgggagaatttaaagtgtgaaatgattaatcaaacaatggtgtatatatatacatgaagatgaagatgatgaaagagtaagtttttatgtaaagggtttggatggaaacttctatgtcaatggatataactgagtccagcttggaatttggaaaaaataattaaccttataaaatataaatttctaaaacgtgtgtccatcaagaaggaataaaacacacggtttaattaaggttttcttttattaaaaaatatatgaacaagaagaagaagaagacacggtttaatttttaatttttattttgttggtagggtctactttttctgtttgaggtcaaaaggaattacaataggctcgtacccataatagtactgtgccatgaaaatgaactttcaaactcta

SEQ ID NO: 9445 - DNA, 548 bp, Cannabis sativa
accaatatacattatatataatatttacttggaaaatttccattaaagattcttactctaacttgaaattttgtaagaacaaattaaaataaatgaagattttctcttcaaatttgaatagttatacaacaatagtaattataataaaatattgtaggattaggtgagctaagcctaattaaataacgaatagatgaattactttttaccctaaacaaaggaggacaactagttctagtatagaaatcaaaatcataggctacaacttgttctagtataggaatctagcctattagtttttagaatataaattaaatcatagtacaatgacttgtttaattatttattttgaaaaggaaagcatgtctaataattatagaagtgagatattttatactaaaaaaaggatatcaatttatacaacaaatatgataagtggggcaatttgccattaatgtttgaattggatacgcaatctaataagttttgtgctaatgaaagcaatggtaacaatgatagatgatgactcataagtatgtgacttcctt

SEQ ID NO: 9446 - DNA, 530 bp, Cannabis sativa
gaattaggaggaggtttgttagttgtgttctctcatcttgttggtggttatttagattgttcttttgtttgttttaataataataagtgaatcttattgatcacatgacaatgaaaaatataaatgagtttatattatactatgatgcatcttttcatgtcaaagatagtgtcaatttcattacttcatttgatgttggggtgtttgcaatgctcacaatgtaaattttggtcattttttcaaattgtaatcgcactattattattatcttattattatcgaacattacaataaaaaaataacgtcataacatatacactatgatgtatttttgtaatgagattgctaaaggtactagtgttatctaacacttttttatgtgtcaatatcattattagtctaactaaatatcgagtcgcactacactattacctaataataatgctcttttgtaatatataatgtggtacaatttgaactaccattattaaatttaaaagcattacgtggtgtgggcttgtgggttgttt

SEQ ID NO: 9447 - DNA, 618 bp, Cannabis sativa
cccagaactagactggaatcgaaacatgggacctagacttggcccaaataccgacccaaacccgaacctgtgacccaaactcaaacgtgacctagcccaagatccgaaaaacccgtacacgaacttggactaagacttggaccccgactcctacctggactcataccctaacccgcaacaaaactcagacccagaatcaaaactagaactctgactaggactcggacttgagaccaagaccaaatccaaaacataacccaaactcggaccagaacttggaccgagaccttgactaggactgggacctgagactagagacctgggacccaaacctagaccgagcatagtcctaagcccgcgtggggacctagaccaggatcaagaccctgacagggacccaaacccgaacctagatgaagattgggactgagacctggaccggaacctggacagggaccgagactcaaactatgactcaggacccaaaccaaaacctggacctagaccaggaccaaggaaccggacttacatgggggacctaaaccatgcacctagaccccagaaccaagacccaaataaaaatttgggactcgaacctgaaccaagacctaacctgga

SEQ ID NO: 9448 - DNA, 1051 bp, Cannabis sativa
accgaattctttaaccctaattatgacaatttaataatgtatgattgaccctttatttttctttctttagtttatatatgtaatgatttgttcagcctgaagaaaactactcaaaaaaaaaaaaagtataaataaataaaaatgaaagaggtgtagttgaccccatgaatagttgataataacaaagaaaatgtttattatatataaaattaaagcttatttatttatttatttatttatataactccttagaagaataaagaaaaaaaaagtttaattgtatatttatatatggcacacatggtcggtaaagctggacccaatggtcacacttgtgggccattattctagccgttggaatcgccattaacgaccttttaaaaatttatgatttatcagctccctttagattaaaaatataataataaaaataaaatggtcctacactttaatcaaacactaaacatttgaacaaaactaaaaagaatataattatcatgatattacttagaatcttatccctactaaacaagcattttttatttttattgttgtgtatggaataattatattattatttttatatgagaacttatattatagttatagtaatttttttaaaataatttatagtattaaaaataaaatttaagtaaattattaaaaaaaattcaaaaacatatataatttaaaatagattaggacatacagtaagtaatatagatattaggctaattataatttttatcctttaacttagacatttatcaaattatattttttttttaatttttttgactgttaaaattttttcttaaactattgagattgttgaaattcttgtataatttcattcaattttactaatttggtgattgtctatatactaaattatgctctgtaaattttgatatttacaaaattatgcccctcaaattttaatatgtaccaaatcatctcttttaaattttgattcatgttagacttaagttcttaaattcaaccatctcaataattcataaattttttttttatagtcttaaaaatttaa

SEQ ID NO: 9449 - DNA, 741 bp, Cannabis sativa
caatacgtacaacttgaagacaactccaaatatctagaagtagttcgaagacaactaatagaatactctgcacaagtatatttttaacttatccatacatataaattattgtgaagaaatttttaacttaaaaatagacaatacaattatatgtagatccaaagaaaatgaaaaagtgtaaaatacaaatattttaccattccatcttctattaacggccaaaaaaactcagagaacatgatttgatacatgtcaaagtttgaaaaaaaaaaaaaaatcttaattaacctttaaagtatgagcaattatcaaactctatatattattttgctttcaatattataactttgttattgttgcttttaatatgttttactaacattagtaaacataataatttaatttaaatttatttttcaaaacaattctctacataaaatattatttattttgatttatctttctctcttaaaatttataataaaaaacctgacataaaatataatatacctgctttgcacataacaataaactaatatatatatagatatattgatagatggaatatagataggattatatgatttttttttttcaatttaggcatattaatttagaattctagtattttttaataacgtgataatatattagtgtaattaagatttgttaaagtatgctttcaaaaaaaaatatatcaaaacaaaaaaagatttgttaaagaagttttgtaacttagtt

SEQ ID NO: 9450 - DNA, 996 bp, Cannabis sativa
ttacactataaagaccctggaagacgtttcaattgataacaagtggaatgaggaactgattgagcaggtgtttggccatgaattggggactcgaataagtaatatccctagaatcccttcccctttttctgatcaggtcttttggaagagcaatcaagttggacatttctctgtcaaagatgcttaccgtgtggacaatgcatcaaggtttggcattggaaaaaacttgtggaaatggatttggggaaatggagttcacccaagagtttcagtgatgctttggcgagtcttgaatgaagcaatcccaacaaagaatcggctaccctttctcaatgaaaaattctgcaatctgtgtgatactgaagtggagagtgccttccatttattctggcagtgtagcttctctagagcaatctggtttggtggaattttttcctttagaacagaatgttttagtgatgataatttgatcaatttgtttgaaaaagtgttagacttgcaaggagctgctcacaggattgatttgctcaactatgttggatgtgtttttactgaaatttggcatcaaaggaatgctctatgcattcgaaatacagcagccaatactgccgtggccctgcacaaaattgggacgaggttttttgaaattcagaatatatccaacaatctaggaaggactgagtctactatgacaaattcagtccctttgaacacagcagtaagaagcttcagtgcagattacaggtgttcttctaatgttgttttttctgatgcttcttggacaagggagaatgcaggaatagcagatgtatgtgttgatattcacaatggacgctggtctattcaatcccagaaaattaaggctctttcggccttagaagcagaatttcgggccatctctcttgctctgtccagtgctgctgaattgggatggcaagaagttcatctcctctctgactcaagcatagctatcaaagcccgttctcgttcaggggg

SEQ ID NO: 9451 - DNA, 846 bp, Cannabis sativa
tttacacttacccatcattcaggttgacatcatatgtcaatttgttcttgggatgtcaacctcagcactggatgttaacctgggcattgggtcatgaattgcctttagtaaaatagccataacataatatttatccaattgatgctattcaacttgactgttcaagataattcaattatttatcaagttgagtctcacacttaaatcacaattctaaagctattagtacaaaaaataaccctaagggagttacaaaaataagcttctaattactgtagttggtcgcgctggacttcaaaaaattcccatcaccaccaagatctaattttcattatcaaatcatcatctataaggaagctctatatcccatatggctttccaatctagttttggcaccaaagcctaatgggacatcaaggatgtgtatagactttacaggcctgaacaaggcctgtcttaaagagtgcttctcgcttccacacattgattagctagttgatgatactttaggatttcaattgttgaacttcatgggttcatactctggctacaaccaaataaaaatgcacgttgatgattaggagcacaccggtttccaaactgacaaagggatctattgctacaaagtcatgtcattcggatgaaagaacactggaggaacttagcagccaatggtgaaaaagatgttcgagaatgtctaggggaaaaatatggaggtttcaatcgacaatatgcttttaaaattgaagacgtctaagagctattaccaagatctagaagaggcctttgccatcatctggaagtacaaaatgaagtaaaacccaaataagtgcacctttggagttt

SEQ ID NO: 9452 - DNA, 553 bp, Cannabis sativa
aaatcacctcatctctttcctgtttcaggcttgtgcaaagatctcgtgtgactgctgcaatctgaaccaactttgctaagtgtttgcttctgctgctgatatggatcatcctaggaatgtgacggtggaggaatctgtgaaggaggtggaaaacttctccttggacaacttttcgattcaaatagtccctgatacaaaggcggctaagggtactattgctacctatgtggtggggcacttcttctctaagagggacttctccacaaccactatgagaagagccctgtctgttatgtggagactccaaaggggctggcatttccaagttgttgaccgtaaaaccaaaacctttgttttttgtctgaactctaagggggaagtgggttttatccttgccaatggaccgtggtccccctgtgatgggttcatgatggttgctgcgatgctggaggatggtctttggacctcggcgaacctcgattctctggatgtgttggtgaaggcacatggtatccccctcgagcttatgacagatgatgctactattctgctg

SEQ ID NO: 9453 - DNA, 1012 bp, Cannabis sativa
ggaggttatttaagtcaattacgctctaggtcctctaagaattgggaccaacgggagatctgccaggtcccgaagatactatttgtgttgcagatggcttttcccatcagatgtccattcccggattaccaagatatccctccgaggaattttaaaagttatctcgattaatcatgtcaactaataccttttttttttaatcatgctacatttctcttgcttgaaaacacggataacaatatttatttaaactttattttgaacattttaaactattcagattcttttgaaaatatacaatttatcttaagaaattataacgtacacactatcatggagaaaatttaattaaaaaattctcttctatgccaaaccaaatataaatatttaccaaaacacccctttagaaggtctcctaaatatttttctaaagaacgttgttattaggcaccaaaaatacttatcaaggtatagttttataaataatttattcgattataattattgaactaaattatgggcccgatatttaattataactaataatagtatgatacttctagatgtgttactgttgattttaacatttcactttgagcaatttgtgtcataaatacttaaatttaacttccagtcgtaaataaatatataagtttaatgtttagcggtaataatacctaagttatatttctggaactctgggtacctaactattaaatatcaaataattatctatgtattatttttttattggtacatttttttaaaaaaaaaacaaaatttaatgtcatgaaccaatcaagaattgttacatggcaatttatttcacttaacattcgattatctataaaaatttcagaaatatactttaagtatttttacaattatgtggtacaaaagctccttgtataatccggtagagataaaatcttaggttctttacggtttgccaatgaaaattggggattaaggaaggccaagattaagggtgtatggaattttgaaacatata

SEQ ID NO: 9454 - DNA, 780 bp, Cannabis sativa
gccccaatttcagttgtcatggcgttgttccattttggctaagcaagggcagccttgaaagacttaggcttagttggtaacatagactcgggcagggggtgttttgttgccatatacgactttggttttcttgtgcctgactgagatctggtgcgcatattgtgagtcctgtgagtagtacctatggatactgattctgagttagtaggagcagacgggagagagttgggtaaagtctgagcgttaggcatttggctggtatttatgggctgtgactgagaattggggagatcaggatgtggtaaattggtcggttcagatactgggaaggttgagattgctggtgcagagggaatatttgtggctacagtgggattttcagtgggcgtaatgtttgggactggtgaggaggtgttatgaggtggattgatagttggggagacatccttagaaacaccagaaccagttaccacagtagaaaaaccaccagaatttgtgtcagtttgcgtgcaagtatcagtagaaaaatgtgcagtgggtaaaagagggagactgagaatttacctgagttgatacttgctgaatttttgttgcagggaaggacttttcatcaaacacaacatgtctgctgatgaacaatctgcctgaccaagccttatatgacctgaaggctgtcatatcaattttacattcgtgcatcaagttcccaacaaataatggggtagggtgcctaaaaggaaatcaacaagtggcacgagaatgttacaaccttgcattgac

SEQ ID NO: 9455 - DNA, 830 bp, Cannabis sativa
atgtaaaaatattgagtgttatattaaaattatatgagttactttattcatcaccaattaattttaaaatgaaaatccataattctttccacactctatctgacatgttttttatttttcccaactactttcgatctactttctaattctaatttttttacataacaatttatgtattgtagttatttaaaataaattttcacaaattttgaaaaaatataaaaataatttacagtttcaaacaatctttttcaaaaacttattaaaataagtacatgtgtaataaactaattgaaccttatttcgacattatgaattatttcaaatttatcaaaaatttctagaatgtatcttaaatatttattatgatgtagagttgatcataccaaaaatataaaataatatattaatacctgaggggctaatttgtgcacaaattgaacaattgatagcggaagtaaatctcatggcagcacacaggtatgcgctacattcttggaacaaacatttttctcaatggtttagagctgtttattttgatttctttctctcttttttcttgttaaaacaaaaaattctcaagtttaaatttttgataatttcactagcaatttcctttgagattttcagtcatctatttccaatagctattatttggtttgttgatcttgatttgtgtatgtgcaatagagattcaatgatcatcaagtgaaaagcaatctgaagcttgtagatgaaagtttcgaggaggatgaagacgttccatgggattttttttttttggtgtatccactttattagccgacggttttaaactgtcggctatagta

SEQ ID NO: 9456 - DNA, 608 bp, Cannabis sativa
atcatctgggagactttagtgagtcgacttgggattttccttgagggcctctggttctaatgaaaagcctatattgatcgaaagtcatgggcaagtatagtggtggtctgtctggagtgacaagctccttcgctggctctattggtatgtcacttttcggattgtaaaagaaggccattgagatcctctctttccctgaatttactactactctgtgctctacgctcttgtacattgcattgcttaaaacctacgtacatacatacatacatttatatgttaattaattgatatattaattcatcaaattaacatcacatgaaattttcaagatacatatatatatagccacctcacatggaaatagtcattatatgtaatataaatatatttatacatgtttgatcctacctagctagggtaggtataaattaaacgtgtaaaaaaaaagaagacatacgttaaattggttggtgtcgctgaatttatatatatgtacctaaaatggctgagattgagatatattccctagttaggttatataggctttagtaatatatatgtgatacgacttatttatttaatataaatttctagggaaaaaggta

SEQ ID NO: 9457 - DNA, 1109 bp, Cannabis sativa
tatataaatctcaacattatatatgtagtgtcatttaatattaattaattgtatctatctttgaaatcaccaagcattatcatctccacaattttgcaaattttagcttgcatgggagagtttcaatttaatttgaattttatttttcaatttttttatttattgatagttgttgatttaatgtcttatgtttgttcataatttgatttattttaaaaatcaaagtgtaactaatattttcttattgtagtttctattgaagatatcattatggtcatttttttgatgattaaaaatacattctcaatttaggtttaacataatacacatttgttgattgatttagagaaccatttttttaatatttttaactggtcattgaactagtcatatattgtaattcgatcgatgataatttattgatattgcattataatttttaatttgtaaaatgatacatttttctaaatttaaaaattcttatgtatattggaaaaaatttatttagttggataggttttctaaattaccataggtattttaatgtaatgcttgactattataagatatattttttttttcttttttgatacaaatcaaatatcattgaattgttattattattattattttttgagtgtagtcgtgatattacaatttattaataatgtattgaattgttattaattatcacaacttttgatcattgtcaaaaaaaattcaaccttttaaactaatatatgtactaaattttcctcacacatctatgatattattaaaataaacatatatgtcatgagttacaaactaattaaaaattttaaaaatttgcttggtatcataaagaaatgaaaagcaggaaaaaaaaagagataacactgatggaaaaaagtatcgtacgtaatttcttgaataattgaatgttattttgcttcaaactagaacagaatcgtgtacatatataaaggaaacatatatctatacattgagcatttgaaaatatgaaaagttcataaaagaggtatttcattttctatatttttcctattcaaaacttattgtatataggtagatcattttctaacatgaaaatatatatatattgtata

SEQ ID NO: 9458 - DNA, 1252 bp, Cannabis sativa
cacctcgttattacttacttttttaagaggcttaaagtgtggtgtctagtaggagacttagaatttttactttgttttgtggagttcccttttattaaatttatttaattttgtagtgatttttttactattttagtttataattagtaaaataaaaaatttacatttaattttttaaaagataatatttttaatattaatagatccgtccctggtcgtgttcatatctacgtaatgtatgcatagtttgatcattctcttaattcaacttgccctgcagtcggaggcagacgcgaacccacattcatagaagctagggagtcagtcgccctttctaaaaaagagaaaaaatatatatacatatattttaattaattacaatatatatttctaataaaatataatatttataaacataatattagttgcagtgtaattgttaagttagattgcatatataataaaggtcaaggttcaaatctcacaaagagtattttttttttctttttaagtttacttttccccctatcttacaaaaaaattacacccccttactttaaatcctgggtccgctactgcccgagccattatcattttgccacagctcattaacaagttttctccatgaagtttcttgaggatgttttgttagaaattgttgtactctaataaaaataccaaaccaacaagattacaattctatgaaaaataatacaaataaaaaaatcatgaattaaataatatacactaaataaaatatacacataaaatagagaatatagagatcacgggcgccaaaattagatggtaaggtcaataacaaacaatatttgcgaatataggtttcatgtttatgaattttgcaacaacattttcaatataagttggtgttgactatattcattggaaatcacatgagttgttggaacaagctacaaactaacttccagagatagcttgatgcagtgagaaagataaatcttgaagttagtgttctaactaacatcaaacaattgcccacacaaactttgaaatcgttcatcaaaaggcttaaggaagaggtctcctaaacaaaaaaggtagatgacgggcagcaattggctttattacaaacagggatctggacgcgtaacctcttctagaatgagcttcagtaagagggtgcaacaagttcacaagacttccagaaacaagcccaaaagtacagcaaccttgaagagcccaaattcaaaggatacaacccagttgtagg

SEQ ID NO: 9459 - DNA, 1125 bp, Cannabis sativa
tcaggtagtgtcgaaaatttaagggcgaaaatactaattattctatttatatttttatatatgcaataattcagagtatttaatgtaatttagatatagcattaagtaacacttctgttttttaaatttgtaaaccatacgagtgatagtagaatttttgtttttatttttatttttgaaaaatgaaaatattttgtgtctacttttgtttttcatttttttttctttttttaaagtgtatttcataattatttttattttttaattttaaaaataaaaagtaaaatttattttataactttatttttaaagaattttaaagcaaaaataaaaaagggcctggggttggggttggggcttgtcttggtctcgggcttattctagatcgatccgagacaatgttcaggtcgggtttatgggtcgggagtccaggtctgggcttaggcagggtttaagttagaattcaaacaggggctagggtctaaatcgagtctgcgttaggaggcaggtcgagatcgggatcagagtcagggtctaaaatattaatggaagaaaatacagatagattatagtcataaaaaagaaattgagttaaataattcttttaatcaaacttgtttaaataaattttgaaagtactttgtttttgttttaaaaattttgattttttacttttaaaattagaaagtgaaaataattttgtaaaacatattttttttttccaaatattatcacttttaaaaaaattaattcaaaaagtattatcaaatacctccttagagcatcttcatagagggctataaagtggtgtatatttcagctcgtgttttttcaaaaaaaaaaaaaatatacgacgctccaataatagtgtaaaatgtatgtcgaatttaacatatgctaaaagttgaacaaaattttatacaaaatatagtataagctaaatttatactaatataaatatttttttttatttatttatttaccattaattaatgatttttattaattaaaactttttaacattttagttattcatttaaataattatttttttaatataatttgaataaaattattgactttagaagttaatttgtatcttatatattacagtacaactacata

SEQ ID NO: 9460 - DNA, 1215 bp, Cannabis sativa
cagttaaaaatgaaaatattaaagtatttaactaaagggaagagagatatccttttggttacaatcttgaaattttattatagcttattgataatattctacatgctaaatattctactaaatcacaaccttaaatttattttagatagtcttcttgtatctaaaaaattttaattgaactttaaattataaaaccaaaataatcagctaccatatacagcacttccagccaccatacatggtacaaccaaccaccacacatagattcaattaaaaagaaaaaaattgaacaaatataatttaaaaactttagacactaaacagtgaatacactttaaaataaaagtaaaaattactattacaataaattctcagcaattattcaatatttgatttaacaccaactatctcattttcaaaaacaaaatcttactagaaaagtggataggggaaaaatagtgtcattaatgtttgaattggtttgtttttgtgtctatagctgtaccattaatatgatatataatagtttcaatcccatattatatataattaatgaagtgatcaatacacacagaaagagaacccttcaacttgctactaaataaatgaattttggcaacatgtcaattttgcgaagagtattgttattagtcatcagtgatgtttgatactttctacacgtgttgttttgtgattggctaatgatactctttaaaaattattgtattaaattatataagacttaatacttagttagaccaatagcgatattaacataaaagaaagtactaagcacaaatagaaccctttaacatttctctttggcaaaatagagggttatccacacatttaatgtatactaatctggaatccagcatccttatccctgaatagcttttggtgtatataaataagtttgtaagactttgagagagcctaccacttggttttgttaaatgtcatcaagaagaagactaaagggaatatgaatattgtacaagggttgaatatgaatattgatgactctacatattggacaagggttggaattaggaacatttcaacactttaatattttggaccttacattagaattagatgccatgaaagtgacttcaagttgtcccaaaaatggattggtgtaattggagactttagattttgcacttatattataaaaagtcctttttttttgtatgtgtgtcatcagttgct

SEQ ID NO: 9461 - DNA, 763 bp, Cannabis sativa
aaaagggaaggaagcgactcaagattgattgatcaaccactcaaacaaaccaagttagcttctttaccacactggtacctttcaaaaaatacttttaacctttataacttcttctcactttattttatggtccaagtagttcagaagtattattttattaaattaggcatctacactaaaatatagagcaaccaaccactaacgacgttgaacccaaaaggagttctaattctaatctagaaaacataatattttctagcatatttgttaagaaaagagaaataaagaagcaagtagcaaacaattggtagtaagaaacctatcagaatcaatagatgatatcttttttgaaagaagagaaatacaaaagcattattatgttaaataggtttcaccttcaacctatgtacaatacaagagaattagaaagaaatggaaaagtagagcaagagaattaatgaaaataggcatggaattgatcttgtccgcttttttttaaatctcttgcgcctactccagcttatttcccagctgcaagtcctaagttatatagcacaaacgaaaagagcttgaaacccaactctggattgtctataaataagatcccttagttcggttcaaggacagccagacaaataaattattaaagagcacaaattgcttccataatcaaagtacatattgagctcaatttaattatctgtctttgtagttttactttatgtagtttcagtagtcgtaatttataaatattgctaatcaa

SEQ ID NO: 9462 - DNA, 914 bp, Cannabis sativa
gaattcctcaaaatgcttggtcttaaaaacccaagtggctgtccaattccttgaacagtttaatccaattgctgtgagtaaacctgcattccaaaaaaagatgcaccacctgttccctattgctcttacaacacatgcactaacccggagacatacaaatgtaagggcgttttttttgtagcatctcatgcccatttactttatctagtgccactaatgaacaaaacactttgacttttgacagaattttacctttccataagatttttagtccaaaacatatcatcagggttctgatttgaagtaaaccaattgaaagctgatttacaagaaaaaatcccaccagaatctggcttcaacaatctactatcatccatcacattgagcaatctaagatgttctaactgctgtaacatctccaagagattgggaacttcgttctccttcaagttccttttgaacttgaagttccaacttacaacactattttccacttccctctcaatggcaacaatatctttaatactcgcattcttggtcttggataacacagctaagtccggaaatcgattccgtaaaagatgaaatcttgagccattcatctttccaaaagtgtatactatcatctctccccactttaaattgaaccagcttcaaaaactcttcttatagaactgaaatacccttccaagggcctcttggtgacatcctttcaccttgtgccaaagtgagttaggttctaatgagtgtctccaaagccatttcataagcaaccatttgtttctcacatttaatctcctaatagcgagccctccctcatgtttggtctaaacacctcctcccaagccaccaaatgatcacctcccactaaatctccaccttcccaacaaaaaatctctcatcatcttttctaa

SEQ ID NO: 9463 - DNA, 646 bp, Cannabis sativa
caggaagtttggttcaagtggtgactcaatcatcgaacttcaaacattgctatgacaacagtgcagtattcccaagccaatttacaatttccttacaaattacattcatttcatggtccaatatccctgactaagtgtgacataaacatgcattaaaaaataaataaattgatatgccatcgatatattattggactaaaagattttaacttttctcagcatgtatactctatcttcatcatatcaggcaccttggtccaacaaataaattatccaagaaataagcatgctgacaaacctaggatctctccagatgctatgataatgaaagttgggaataacaagtgttgcattaagatatcccgccacagcaacagcattgcagatctgcaaagatgaattaaaatcatacacaagaaaccaattaaaagagtgctgttacacaattgatctacaaaacattagcttgaaactggtgagaagcaacaatatttaccgaagtcctttgctgatttaggccaccatttgcctcaacatatatgtaaccattcgaatcagggaaacctgaaacaataacataagaactacttaaaacagcttagcaagtacttgcgatcaatacaatgacaaatggtatatatacata

SEQ ID NO: 9464 - DNA, 1013 bp, Cannabis sativa
tccttttttggcctgatttcgatcccttgaacaatgagaccacctttccaatttccacctttcacctccaaaagattaatttccaattctccttcttgtcctccatcgtagaagaactcaccaagctccacttccatccacccatctcctctaacttttggatggttatgctcatcattacgatccctatccctatccatgtccatgtccatgtccctatctgatctggttgtcgatatttcagtttccatgtttctgtggtttctaaaaagcagccccatacgccgcggcacaatctgactcctacgcctcctttgccctgcttcatcatctaaatacaccgatcgtgtagatttttgcccaccaacaagtcccactactgcatcaagtgtttgatgttcaaatccataagcacccctagttgatttgaacacgaaatttgcagtgtacaatgtagatggggacagcattcgaatgtcaatcttgcccagaatttcgaaccaacaaacgctaataagctcggctacatctccaaatctgataaccagtacaaaagcatacattttagtaaccacaaactcattcttcgtatagtatgacagtatgataatatattaacatatgtgataaataagatatatagatattgcaatatgataatatattaacacatgtgataaataagatttatagctattgccatagtgtgtgtgtgtgtgtgtgtttatgtatatacctggcctctggggatggaatccatgtccaataccttggagtgtcaccccaaactatagatagtacccttgctgacagcatgtaacattttttcccactcactttgtccagtgagaaactctgagcaatgtttcaaattaacaagtcagcacataaaattgagaccgatacaacatatggcacagtgaaagagccttcatcattccaaagagaataaaaacagaagaaaagtttcatcaacagtggaagaaacttaataagctagttaaaggtggaca

SEQ ID NO: 9465 - DNA, 586 bp, Cannabis sativa
tccttcgattggtaaatagtttctcatttgacccaagaaatctttctcttgtcaccattagagccccaccgaaattgcataataatagatttcaatttattacatgtatttacaagaagctaaaagacactcataaggtaagttggaatagcctgaaaaatagatataaatagaacctccctaccaccagccaaaaaaaaactatgcttccaaccctagactcgcttcttaaccttctcacaaatcccctcaaaagtacgtgttttattcctacttacaatagttaggagcccaaaatacttatcatgagtatcaacagaagtcaaacccaaaatattcagtaccccatcacgatcggtctgaccaacattcgtactaaaggtgataatagatttctcaaaattaatcttctgactggacacattctgatagttcgtatttattttaatttttaaagttatttgatttaattttaaattaaaatgaaatatttttcttcatttaaatactacattattttttgatctctttcgatcacttcccctgaatccaaatacagtattcaagctttcattaatttttctaa

SEQ ID NO: 9466 - DNA, 646 bp, Cannabis sativa
aaaaaattattaaacaaatacagtaaagcactacaaacaccagactatagtggtggcagtgcacccaaatacccaatgcagtactctctctgcctctcgttccttgagactcagagcttttaatgagtcttcttcctgccccaaagcccattttttcaagctccaaactcagagcagcaatggaatccatactcaaagtaagatttcaatgccttttctttttactattattattagtatttttaggtattcaaaatatatgaacgatttcgtcttcatttacacttagtatatttcatgtcactgctcatcactcattgatgattttctatgcggattagggtttatccttgtcagatttttttgtgtgtctcaatgtggcgctgtaggaaaatgcataagctattacttactgtgtatagattttatctgtataatatggatttttcttggttgcgcagaattactttggttattcttcctttcggccgtaccagaaggaagtgatcgagaatattctagaaaaaaaggactgtatggtggtcatggccaccggaagtggcaagtccttatggtaagctacccaaaatcagtccattcatttttttttggcccgggcaagcaacagtttttttttttttttttt

SEQ ID NO: 9467 - DNA, 550 bp, Cannabis sativa
gcatcttggtgtcaagcacagtacattttaatattgaatattacacattaagcttgtcaaaatctctaccacttacaaataattattttatttttttcttacattattttttctatactttttgttttaaattgtttaaataataaccacttctaaaaattattaaaaagctactatattatttaatatatattaattgattaaattttcctattatttttaatctaatttaaaatgtctattcaaagatgtaaaaaaaaaaaagttcagattaagcattcttttaagtattcttattggttttttttatatatatataatctcgtaatgtgtactaaaagctgaaaatataggttagtaagtcaaatttttttttcaattccttcaataatatcgacaatttttggatcacatgataattataggggttatatattttatcctgccttaattgagtcatcaatatatattttgaaaatttatatcccattaaagatgattatgctacagcaagacaaattgtgactagcttgaagtggggttaaataaa

SEQ ID NO: 9468 - DNA, 663 bp, Cannabis sativa
ctttgtattagccttctatatcaacttgaatcgcccaacttgggtcaatatggagagagttacactcaaaatacgaaaggggtgcaagacgagtaagactcacttgacaaagaagccttggaccatccttaagtcactcggccaatgttttcgagaagtcactcaaccaaggttctcgagaagccactcggccaaggttctcaagaagtcactcgacccagaacttcaagaagtcacttagccaagaactttaagaggtcactcctcaagcacttcaagaagtcactcagcgaaggttctcaagaagtcactcgaccaagcacctcgagaagtcacttagcaaagattctcgagaagtcactctgccaaggttctcgagaagtcactttgccaaggttcttaagaagtcactcgaccaagcagttcaagaagtcactcggtcaaggttctcgagaagtcactcaaccaagaacctcgagaagtcacttggccaagcgcctagagaagtcattcaaccaaggttgtcgagaagtcagtcgaccaagcaccttaaaaagtcactcggccaaggttttcgagaagtcactcatccaagcactttaagaggtcactcgaccaagcttcttgagaagtcgctagactaaggttctcgagaagtcactc

SEQ ID NO: 9469 - DNA, 1024 bp, Cannabis sativa
atttttcgcaataaacaaaattatcccattttagatagtataattttagaatctaaagctattttagctagaaaggagctacaaaattattctcaccaacaatataagaaaaaaaaaatataaaatagtagcatcaataatgtctaaacattcttatatattttataatgattattaaattaaaataaataaaatttaatagtattttagtacctttaacacttctatttacaaaattcaacatatcaaaatgatttttgtgataaatgaagcaaagatagaaaataaagatttttttttcacttgggatcgatatgaattcaaaattagctacatattattccaataaatatagaatggaattgatccattggatgattttgtgtttattaccatcattaataaggtaagatattaatgaaatttgtaagaaatagaattaactaaagtatttcatttgaataaatatagatcctaaaatattggataattttatgtttattacatataattaataagttcaactattagttaactctgcaaaatatcagagtttagaattagttaagtaatttattccaataaaaatagaatcaaaatggattaatattttatatttattataaagtataactaagttcaaatattaataaactatatagaagatacgagttgagaattggctaatttcaaaatgtaagaaaagttatctattaaagcaagtgtaaaaatagtaacatatcttgttttatatatgtttattaaaattattatatgcattagtctagtttatttaaaataagtatactaaaagtgagttgttattgcaatattttaagtggaatacatattttgtaatttttttcatgagatgtgcaaaaaatatgttttattattatatatatgtatattatgaaaaaaaaataaaaaaatatgaaaaataatttggaacagccagctatcttatactatttttgctatatattttttaactttcttttaattttttccacaattttttttt

SEQ ID NO: 9470 - DNA, 516 bp, Cannabis sativa
aaaaaaaaaagaaagaaaagtaagaaaaacaaagggatcattgcggcaaaagtccctaaaaacttatagctgatgcaaattaatccctaacctcaaaaatttgcggtaatagtccctaaggtcgccatattcgttagttcgttagtccctaattaaatgttccgtttgttcatttaaaaaaataccacgcgttgacaaattattggtccacatcataattttaatttaaaaaaattcattttttttaagaaaacaaataaattattttaaaaattaagttttttttttctttttttcttttaattctcagccccgacccttctcttctctctccccttccttttcttcattctacgcctgaacctccatagccaccgtggccagaagcttcaaccacccttcgagctccacttctctcaaatccgttcgagttagactatctcaagatcacaattgctgattttttaatctcaagtggatatagaaagtcatggagaactctctctctctctctct

SEQ ID NO: 9471 - DNA, 1771 bp, Cannabis sativa
  modified_base (336)..(340): a, c, t, g, unknown or other
ttaataaataataaataatatcttttgtatatttaaaaacaagaatcacgtacgtattcttgtcggctgttttaaataaggttaattaataattttttcttatgaatttggatatgtactaaattatgttcactcaattattttggcccttaaaaactcccactgaactattaagattgttagatttaaggatttttgtctaattttagtaaaaaatttctaacatggatgaaaattcaagaagcataatttagtacatattaaagtttgacggcatgatttggtagatatcaaagtcctgagagtatgatttaggacataaacaatcactgaaannnnnaaatgaatgaaattagacaaaagttcttaaatttaataatctcaatagttcaagaagaatttttaatgaccataaaagttcaaagagcacgatttagtacatgtcaaagtttaggaaaaaaattactaattaacctttaaataattacgggaactactgactaggactacatatgtttctaatagcctgttttaaagctagttaactcatttaacaaaaaaattaaacactaatagtgtgctaaaaggttttgcaaatatggcatataataaatattatgtaaaatttagcacaatattattatgatataaaatttatattactataaatatattaatttttattattattatttttatgttatttttatctatttagctataatatttaattaaggattttttacaagttttttttattgattttatctagtaaaactaataattaagttattattttttatgtttttaaaatattaattaaatattaaattttcaatcaaattttgtaattatgtattaaataagaatactaaatatcataatttttttttttggtgaaatataatataatttattaatttttagatgtcgagcaaacactacaccattgaccaatcataaattttttctatttctttttttaaaagtgcaatttgcggcaaaactccttttatttaaccctttattttttttttggcaaaactctctaatattttaatttttatatacttaacctgcttatcttttttttggcggcaaaactcttttaatctttatacatttaacctcattatttttttttgtggcaaaacctctatatatatgtttatttttctttgtaaatttgacacgccagttaaatattaccgtcaaatatcaactggatgacccctgtatttatacctgtgttatgtaacagtaaaacctcgaagtcgatacaatagtactaatccagttaatgtttaatggtaatatctaactaaaactttgtaaagaaaagtaaacttaagagtgttttaacactaaaaaaaaaagataaaagagttaagtgtataaaaattaaaacataaaaaattttattactaaaaaaaataaaaagttaagtatataaaaattaaaatataaaaaatttcataaattgctctttttaaatatagcacaatttttagatgatgaacaaacattacacaccattgaccacagtgccacacaacgtgatataactgttatatattaatacacgtgtatcattatacccaaataacgacactatatattatctttatcttatacacgttgaatgcaattatgcaactaccataaaattatttattgtttcgcaaaaataaattaatttaaataaaattgatacgccattgattttagtgtacgtattaatatttgcatggatatatatgacacaatcgaa

SEQ ID NO: 9472 - DNA, 958 bp, Cannabis sativa
tagttttgcgccaggattcgagcaattattttataaacaaagttgcacagagcaatagggcggaaccgattgacactatccgggttggtgcctttgggaatgagacaaatgaacgtatgatttaaccccggacacatgaccccagtggagaaaaccttctgaatacagccaacaacatcactaccgataacgttccaacattttcgatagaagcatcccgaaaactcgtccggtcctggggctttgagagggtgcatattgaacacatgggatttgatctcctcagcatcagggatacccgtaagcagagaattctcctccatggtaacagagaggtcaataagttcctccaacccatcgaattgaacctcgccattagacatatacaactctttgaaatagtcattgagtatactcccattttcctgctctttagaacgcaattggcctctaggattcttgaggttccaaatgtgattccgctttctgcgcaccattgttgaggcatgaaaaaaagacgagttcctatcacctttctataaccacaactcccgtgagcgttgcttccacatagactccttacgatcccataaatcaaggatggccggttggactcgcttctcctcctccaaatccaatgcatgatcctccctggtttggagagattgaagctcgttttccaagtgtttgagccgtaattcagtatccctaaaaacgttcttgctccacccacgcagagcattttgggtgttagtcaattttctattgctgaatcctccacagacaaggccgtatctccccaagcttcattaatgacctccaaactggttggatccgagaaccatgcttcaaagaacctgaaaggacgggagcctctttgattaaaggcgtgagaattaaagagcatcgccacatgacccgaacaaagaattagaaggttgcgaaccccccccccccc

SEQ ID NO: 9473 - DNA, 727 bp, Cannabis sativa
gtaaggaagtgcttttagaagcggtagtacaatctattcctacctatgccatgagctattttcggttgtcggtaactttctgtaaagaacttgaatctgtgatgtcaaactttttggtgaggatcaaatgaaaatggaacaaagatacattggcgcaattagaatctacttttcaaatctaaagcttcgggtggtatgggtttccgctccttcatgcactttaatcaagctctttttggctaaacaagcttggaggattttgcaaaatctagattctcttattagcaagctgttacaaagtcaatatcacccctacaactcctttcttgaagcacaatcggaacactctccttctatgacttggcaagggatcttgtggggtcgtgagttgttggaaagtgatttacaatggaagattggtgagggcagatagatatgtcagaagtggttcagatccatgaattccatgtcacatttcttttcttccactttcaattatggtgggcctgcgaatggggtgatagcgaacttgataacagaagagcgtcaatgaaacatacacctcctgcaataatatttttcaccacttgatgtggaaaagattcttactttactattgagtttcttcccaaacccaaatatgcttatttggcatcatcactactccagccactacacggttaaatcaggctttcatttggtagattcaattgaagatgcacatgct

SEQ ID NO: 9474 - DNA, 777 bp, Cannabis sativa
gaaaaagataagcatcagaattaatgagttcgaactatgtgtaatattttatattttggttggaataacaatagttatatttttattaatatttgtttacagactcggttttgggcggattaggtctgtgtcttggttttgagttggttcagagttaaggacttaaaattttttttttctaaagatacatattaattttaaaaaataatacatttttttaaggctcaaaaatattttttttcttatagttcattattttaggacccatttttttttacaaggttacaagaatatttcactttcacaaagattgtaagatgaattttttctctaaccttactctctctctctctctctccaaccttacctaatggtctctctccaaccttacacaatgatgatatcactcaagctgtcaataatctgatacaaataaattataaaggtggtagctatatataagtttgtattgttactaaaattagttttgttgatatctttactaattaagtctttaaatcagtttcaataacgcgctttttaaacaaattatctggacgagttgattcggataggtatatttttggacgagcattctggactgactacaagatatgtggaagtacgttctaaattgatgataagttatctgaaaaaattatctttataaatgacaagctatcttgtaggactatctggactggctacaactttctgaacaagcaattcaaaacgtcgccaagctttctgtgacttctttttggttgcaagttgaag

SEQ ID NO: 9475 - DNA, 732 bp, Cannabis sativa
cttacatcctcagaacctgtaaatggccgaactactcctcgattcatcagagacttgtggaaatcagagagtttccatctacatttctcaacacccataacgtagacaggtttcctggggagcaatagtttttttagagggaaaaaaaacccacagaatgtacaaaagtaattaaggtgaagaccacatccttattaactaattatgttcgattaagtaactacagagataatattattatcttacccagtgctgcaaacctcacttatcagactaacagaatctgctgtcacaacgaaagcatcagcccaagccacatttcccatgtgaggatttggttctgaaaatcattataaagcatcccatcaaaaactttcctacttcactactctccctgataagcatacatgagatatcaacttaccttcaccatgccaaatgtaaacttttggattatcaccaagctccttcaaaataatattagacacctgttgatgacagcatcagccaacacatcatattatataggcatcacttatcgaagacgattctgcaaaaatgttgtgcatggcataccttgtcgggagtcctatcagcaaaacatattttgatagttccacagcttgcaagaacactgagcaaactggatgtcaactgctttgcaaggtccgcaccaaatcgacaacagcctattaaaaagttgtgatagaatatcatacaaatgcagtggta

SEQ ID NO: 9476 - DNA, 1384 bp, Cannabis sativa
agttcagtttctgacctgaagctttacaatagagatcaagggcattcttgatagcagtagcagagcggttgttggcacgacacagaagcaaactatcatccacaaagaataagtgtgagacacttggagcactacgggcaaccttcagaccttgtaaattacccctagtttcttcatgttgcagcagccttgaaagtccttcagcacaaattataaataggtaaggggatagtggatctccttgtctaataccacggcttggaacaacccttccttgaatagaatcattgataaggaaggaaaatgagacacttgagatgcatcttgtaatgagattaacaaccgaggaatcaaaacccaaagatagcatcatatgctgaataaaattccactctacacgatcgaatgctttgctcatgtccaacttaatcgctgcataaccttcttttcccctttttaagtgctttagagaatgtaaaagctcaaaagcaatgagaatgttatctgtgactaaccttgatttcaaaaaagcgctttgggattcagagatgacaacgccaagtattggttgtaaacgaagaactatggccttggagactaacttatagagcacattacacaaacttatgggacgcaactgagtcattaaagtaggttttttcacctttggaatcaaagtgattattgtctgattgaagcttgaaggatcgcccccatcattaagaatgtgaagaacagttttagtcacaaggtcaccaacaattccccaatagtttgagtaaaacatgactgacataccatcaatgccaggactgccatccgattgcatagataagagagcgtcataaactttagatgtagtgtaaggtcgggttagaagcagatttatgtcagctgttatgaggcaagggacagttgacataacttgctgaagagcagccaagtcgacaccatcaaaacttaataaagaatgaaaataagtttgaaccacctgagcaataccatcgagggaagtatgttccattccattgtcatcagtaagcattcggatagagttgttggtccttcggcttaagactttttgatgaaaaaatcgagtatttgagtcccccgattgtaaccaagagatgcgagatctttgtttccaatattcttcttcttgggacagcaaatcatcaagaatagactcactagatttgagctcttcaaaatggctactgctggtatcatgtttgttgtttaaagcttcaactttttgttgggaaatcttgattttctttggcaaatctccaaaccttgaacggtgccattgttgaagttgagtagcacaattggaaatattattcaagacacggctggtgggatcagttgcagcaggttgcca

SEQ ID NO: 9477 - DNA, 503 bp, Cannabis sativa
tcattggaaaactccaatatcttacactaacaaggccagatctgtcattctcagtaaatagactgagccagttcttgaatacaccaagaacatcacatatgattgctgcacaaagagtgttgcagtacatcaaaggcataccagggcagggtatcttcttttctgccaaatacaaggtcaaattcgaagcttatactgactcagattgggcagctttccctgacacaagaagatcaactgctggtttttgcatattccttggaagtttactggtttcatggaaaagcaagaaacaacacactgtgtctaggtcatcagctgaggctgaatataaagcaatggctaataccactgcagaaattatttggctattgtccttactcaaggaactgacaatcgagcataaaggacctgatatcatgcactgtgataacagagcaacacaacatattgctgctaatccagtgttccatgagagtacaaaacatatagagattgattgc

SEQ ID NO: 9478 - DNA, 591 bp, Cannabis sativa
aataataatgccataccaaaattgtgtgcgtaagattattattatgtaatcataatttgtgattatagaaaaaagaaacatgcagtgtaaaatgttagagaatatgcatataaagagatatggagataataaaaatacaattatataattctaaagcaatatcaattatcaacttatcaactcacctatatatataaccatatatttgccaacatatgaaattatatgtacctaactgttaattttttttttctttaaggcctaactatttgatttttatcatattaatatttgattttatgtactcataaatgagaacacaaatttggaaacatgtctcactaataactagtgagtctcaatttttatgcgaatgcaactttaaaatagtctacaacaacactcatttccaacacatttgctttgtggttgcatatgggcctaacggttagcccaaatcatttttacttttatacaaaacactgaataaagactggtaattggacattaagcaaaaaaagaaaagaaaatggactgataattgggtttcttgtacttggatctcatggaatattgcagatccgttacaca

SEQ ID NO: 9479 - DNA, 729 bp, Cannabis sativa
tggggttttctcattcagttagtgcctaggtggcatgggtctttaagtgataccaggtggatgttttgggcaaaaaggtggtccattttagtgggccaaagtggaggaaaatagatgtggactttctaactttggaaagaacccttttcctataccctagttggcatattgaagaaaaaactagccaccactaccaaaagaaagcttccattgttaaataaaagttgttgaaattatcaaagtaagatgaagaagatgaagaaaaagaagagaaagaaggaaaagaaaaaaacacggggaattgaaagaggaagataaggacaaaaggattatacctactacatcatcaagctaggatttttttctcattcctttctttcttctctattttgtattttcttattttgcatggctattctagtactcattgatattttttctctattttggatacttgttattaagctagttataagctaatctctttaagacttgaatgactaataaccctatgttttggtatgttaacttttattgcatcatttcagtgaaaattacaattgttcattcaagtgagttttatgattattaattgctattgtttggccagcaatggcaattatttgagccaaatctggttttggaaggattagatctaataatttgtacttgaatgatggaaaagaatacccatttctaagttcctcttagtgagtagaatatgaatat

SEQ ID NO: 9480 - DNA, 700 bp, Cannabis sativa
atatttacaacatatataataaatagataagtgctataactgcttttatctttatccaaaatgattatgctgaataagtttccatgcctcacaacatttactggcaaccactttttgtgtttatcttaaaggtagtttcttttaccgaggtatatatcatatgtaagatgctcctctcgttctttcataatgttaggactgattagtcgtgttttgcgaaatactatcctctcgtgtcattcatgaatatcctgaagtgaatcgtcttttgttcacatcccttagtctttcaaatatactaagtatgtagatcaatgactgtaagcttttaaaaaattcattatctgccctttctagcgacttgttcctacatggacaaaatggggctcaaagaaaattataaattagtttttaaaagattaaaaaaataaatttttattggttgttatttttttttaattgagtgttaatttattttaattgggttttgataacctaaaaacatatacatcttatacaatcttgacttttaaaaatcatataaatcaatgactaaaaaaatgtgtgcatagtataggaataaaaccataatgactaccatagaatttctctataatacttttaccttatatgtttctcaaacaccaacaacatcttcaattatgtgtgtttatagaatagttaaaaccaaaaccattgg

SEQ ID NO: 9481 - DNA, 575 bp, Cannabis sativa
taatgttggaaaatctgctttgattaattccatacatcaaattgcctcttcttattttcctggtaagaaattatgtgatgattaagattttttcagaactgatatttaggttgaattcaaaaaagaaaagaaaaaaaatgatgtttttgagtttttttttttacaactagttcaagggaagaataagagagcaacagttggtcctctgcctggtgttactcaagatattgctggtttcaaggtggacttacttttgtgtttttgagttcctttctactgtcaaacaaagttgggtgtgttgtgcataatcatgctttacagtctattcttaagattcatgttggttatgtgcattttaatatatttaagacaagactatgttatagtggagacatcacttttgtctctattggttggaacgtttttattttcggtatgtcaagaaattatcatcaattttttttaatatgacgatgtattctgctagttttcgaaaaattctgaaagatttacagtgttgaaaacaagattcaaacaattagttgtacgcctgctagtttttttttttaaaaaaa

SEQ ID NO: 9482 - DNA, 549 bp, Cannabis sativa
tcaaacatatttaaatattctgcaaagagtgagacaaatgaataagatacccataccacattttattcatattcctaaattctaaaattttcactcataaaaatcattaacatgaaacaataacatgaactcatctaagaggattcaattaacttgcttcttttttgcatttcaccctctagaactgtttttgtttagtttgcaaattccttatgttttcttaagtccataaccgcatttactagagctttacaaaactaaataagagttaagctcattattcaggcttttatattatggtttaattgctctagtttaaatggaaagatggacatgttcaatcaagtgttgcgcaactatagcctagacttcattttacttgaaagaaaaacacttcttttctacaatcccaaacaaatccagcaccaactcatagctcgcatgtatttatgagcacagttaaatgtacaaacatatatgatatatataaataagcagattcatgcagtaccacttaaaatgcgaagacgctcactgacatcatcatct

SEQ ID NO: 9483 - DNA, 1092 bp, Cannabis sativa
aattctgtttgctctaattatttctgatatacactatcaaaaaaaaaatatctttaataattacatttaaatgtgactttttagttatatatatgattaaaatataatattaaaatacaagttgtcactaatttaatattagtcacaacaaatattgtgactaaaaacacattataatttttgtgactaatacttttagccacagattttttaatcacaacaaattaattattcttttttttaatttgtcacaactttttacttttagtcaaaaaaaaaaagaaaaacttacaattaaaagtgagatttttttgtagtattacatataatttttgcaatggtgaaaaaatgtcacatattgtaattggtttttatatattctaaaaaaaattaatgtcacatattattagtcactactctctctctcactttgagaaaatcactatactgtcttctatatacgaacccttttctatataaaagttataattgacttatacttggataattaatgtgaaataatatttgtataaaaaatatctgataattgttgtaataataataaacacccccaaatgtgtcgagaaagatttatgagagattttaaaaaatatcgattataaggtactttgttttcacttttacattaccatgatcattttttgagttatattttacaaaattaaaattcaagattaatcttaattactctttctttctctctaaatatatatcaagtaaaatcgaataactcaaagtatcacactagcaaactcaacatcaattgattatcgatatatccatattatatatttcatcataatttttctctaaatataatataatttttcttaatgttcataaagtaagccctaactcatgtacaagcaaacacactccttaactcatatacatgataattttccatcttgtactaataatttcgatattatacacataaaacatatagatctatacaaattaaatcgattattaaacatatataatgataatcatcaaccaaaaacaaaatcaaaccaactcatgatgtatatatatagatgtatgtgtgtgagtgtgtgacacaatata

SEQ ID NO: 9484 - DNA, 686 bp, Cannabis sativa
gcttcttaccatgaaaatcaagagtagcatcagtataaacctataaagaagctctcagaacatcatccgaaaccctgctttgcaagtgagctaaaacactagaatgctgattagtttgttgggcatcaaggtactgaaaaaaatagttgacacaccaatcgaaaatatcagaagctggtaaaatattgttatggtgcaaataattgttcctttgattccacagagtccataaaaaacaaaacagaatgttaacataatctttgtccaaaatattaaaagagaataataaaaaatcaatgatatcaagatgtttatatttataataatgatccacaaacctagaagatttccaagcttttttcaatctgggacaccctagcaaagcatgatgaaccgtttctggactatttttacaaataggacaaagtggggattcaataatatgtctagcaaaaagtgaggaagcaactgggacagtattagatactactctccaaatgaagtgcttaattttaagaggagctttagagtgccatattttattccaaaacttcttagaatcagaaatagaggaagaagaggggatatcctgacaagagagagctaattgattggctgacttaacactgaataaaccagaactctctctggccatggaagtggctccagtatttaacaaactaatt

SEQ ID NO: 9485 - DNA, 821 bp, Cannabis sativa
agatgtagtcttcttcttcgtgtctagtgtgagaagctgccgatgaatctcactactacttgttctttgattgtgtttataccaagaaagtgaaggtggagataaagacttggtttagctgtctgcagtggccaaattctctggtggagtggttttctcttttgaatttagtttttaatgctgtaatctttgcttctgtatattttaatgttcgttttgatagtgtttgaaattagctgctttataaaattagaggttttaaccatgcttttctcaggaaaaatgatagagatgtagctgactctctctctctctctctcttcagtttaaaattctgttttgttcggacagcttttgctatagcctttgtttgaataaatttttccattccagaaagaaaaaaaaacaaattattttttatccctttttattgagagaaaaaaattgataattgtctaattctcaattccacaccaaacaaatacaagcttcaaaatcctactctcagcagaagaagaaattaaaatcctacacccaataataaatttttagctttattcatttttccagttttctgaatttctccatatttttataaacaacttataaaaaaaatctatatttataaaaaaataccatcttttttccttacactattgggctgggtccactgatttttctcttccaagacccatttgagttagcaggcttgtagcgacaaacgtatttaaagacccaatgcatttggcaggcttggcccaagtattaaaaggttcataataataccataaaatctaataaatttactaatgttactatat

SEQ ID NO: 9486 - DNA, 937 bp, Cannabis sativa
ttttcaaaaaaaaaaaaaagtaagtttgacaattctgtgttctataaaagatcaactgtattattttgtcgcttgtgtatgtggatgacattattattattggaagtgatactaggggcatttcttcccttaaatctttcattcatacccagtttcacacgaaagatttggtggtgctcgagtatttattgggagtttgaaatcactctgtgtaaacaaggtatttttctatctcgaggaaagtatgtacttgatttgttatctcagatgagaaaattgggaacaaaacctactttacggtagcctactttgtggtggcccactctaggcttaatccacaagttgcccctttcatctgttgccccttccatatgtcgcttcttttgcaacgtcagtcccaagagaggcgacatatgattttgtttaaaaactcactcccaaaggctagcctaagagaggagggtgcccaaatagttctataccaacaaccaatccaatacttgtacaacgtgggattctaacaatttcctacacatatcataatacctattctaaagcttgtattttctatttggattctttagtaaaatatttaggttgtgtttggttggagtaatgtaatggaaaagtattaattttcatttcattaatttcttttattgcattttaaagtatcaaagtatcattctaatggaataaattttccatcattttgtttgattaactattctatttaaaaatacaaagaaaggacattctagtgcaagacgaaaaaaaatttattagtgctttgttcgataacaattaaaaaattgttttctatttaattaatcaaaaactaagaagtaattataaaattttgttaagtggaattaagaaaaacaacaaacaaaaaggttactgtacatgccttaaatttttttagcaactttttgtt

SEQ ID NO: 9487 - DNA, 526 bp, Cannabis sativa
tcggcgtgcgggtcggatccctcttcttccaatcacttcacctgccttatctctaggtgttgaagttggtcagaaatggatctagcaacggcgcctcctgagaggagaccattagtaccgtcggcgtctactgggttgccagtgaggcctggttatggtactcttggtagaaatgggccacgttggcgcacttcgctcagtgtcgtccttgtcacttggtgtagttgcgtcgccagagttacaccagagggaagcggctcatgcaattgaaaactagttagggagtccttgcgacctgcttatcatgctaggaggttgagttctcgcttcaaagacccttaaatgacgtgcgcctcaccacttgagacagactgcttgcgagatccaaaggtgtaaacatgcacctcctaaacctcccccaatctattctccggacttggaagatcattgggagtgctacccgtcttcaacaatcattccaggaagggaaggacagcttgacgtctgctttactcccaaagactct

SEQ ID NO: 9488 - DNA, 525 bp, Cannabis sativa
gagatttcaaatctgaaagatgtagcctaagcatgttaccaaatttggccaacagaaagaaaaataatgttaatttttgcacaatatattgtatctacaagaatatgtttctatacaagagcaattaatcagctaattaatgttgttaaggacttcgatctttatcacactgaccaacatactatgctaggattaggttcaagcactccatttatcacactgaccatattacaacagatctgatacatctgaattctataatgaagcaaagatactagccgagattctgtattgcagatcataactaaagctaaaataaacacgtagcaacaaagagggaatatatgctaatagatgattccactaactacttcacaaagtccaggaaagtgagcagtcagcgaaaatactcggtaaaaaagagccagaaaaaacgtattataattcgcaagagtaacaacagaacatgcatcaacatgtatttggaaaaataactcattgtcaactcaacttcagcaacataag

SEQ ID NO: 9489 - DNA, 621 bp, Cannabis sativa
ttatgatttgtagttatactggtaatataagaaaaacaaaagacaaaaaaagcctaatataatctttgttaataatagaataatgtaaactcagatcaactataaaatcaacctgaagttttgtaagatgcaaattaattatagtcagtctttgttttattaattgcaagtttatcaaggatataatcatagtatacttaccaatgattaaaataagttagaacttatgagataactgccattgtactcatgcccttcatccatatatattatcaaaccttaaaatgttgtgtttatgggcttcatctttttccatatatattaccagtataactacaaatcataaattgtacaatggaaattacaaatttaaggagctatctcatctaaatgaatttatttgcattttggaagtgtagaatattaccctcaaattctatatatacttaccttctaactaataattttagttatgttattacacattaaaacacataaaaaaggaaaacaagtaaaaaaacaaaaacaatttttcaagggagcctatgcttgatccaatgcagcccaacaactcaatagtttagataattttcactcaccaaatttgtgaacttagtagaa

SEQ ID NO: 9490 - DNA, 1012 bp, Cannabis sativa
gttgtattgatgttaataggctatcatggagaatgtggttgaaattggttgagttctggttggtttgtgaagtttaaagttcaatgcaaagagtcattactctaaattgagaccgtagtgacattggatgtctggttaggcttatcaaggttgtctcattaggcaacagtagataggcttactttatgaggtaaccattacagcttgtcttattagacatataattgtgtagctttgaattattttacatatgtgattatttatactacttatatgtaattgattggaattatttgtatgtcggcatgtgattattgctttacttttctcgatgagtcgttgtaactcacaagtactttttaatacaagtaagggcaatggtaaattagggcagccatgagttagcattcatcttcgatagatgtacatttcaatctattcggattgcagagctgagttgtcagggaatattttggtgttgtatctgtatagtattttggatataaattccgtattaaaccttttgtaaaacttttgtaacaggagatctctgaaacgaaatatttattgatgtaacctttttattttaaaagtttattttagtaaactttatttaaataaaaaaaattaattaaactattagtatattattataaattattttataaaagtacatatgtggcgtccttagaggttagggtgttacacaatacatggttaattaaagagaaatgctaaaaggcaccagtgatgcctaacgccttccaaagtgtcatatcgcttctagtgcaattacatattgggtctcatataatttaatgtaatcatttttatgtaatttcactaaccaattgcgaattatcacctctacgtggtgcgagacgcctatggcattaagatctcaatatgagattcagaccaaacccttactgcagtagcttgtagaggagaggtccataatcttacagatgttgatattctgtgtttcgaaaaggaagtcacagatgatgaa

SEQ ID NO: 9491 - DNA, 771 bp, Cannabis sativa
tcagattggatttaattcaacccggctatttttaaaaaaaaaataattttatatctaaatttataattttatatctattttaattttgtattagtattatttaatataatgttatatttggtatcgacttgtattgatagattgtgtaaaattataatatatttttaataaaccgaccctaacaccaactacaggttaggtccggtccgggtttgggtcctgaaatccaagtctaggtctgggttcgggttcgagtccttagttcggatctgggtcccgacttcgaatccgggtcgaggtctaggtgtttgggtctggtcttgggttcgggttcgagtcgaggtctgggtgtccaggtttggtcccaggttcgaggtccaatctcgggttcgggttaaggtctggtcccagattcgggtcagaatttaggtcgaagtttaggtcccgagcctaagccccagattctaaggaatccgagtccggagtttgagtcttgaattaagtttttttttaatatattgaaaccgagtcagattagatccgattcggaaaaattattaggcagggtggagcagatctaatccgaaattcaataagtatccgaatattttcagattaaagctctgattcactccaactaaatggatttttttaacatgactaactctattatgaatgtgtcacatgagcctcaactgaatgcttgatgtatgagtgcccctgcaatgcgagttgctcttcttagttcattttttttttcaatttattttt

SEQ ID NO: 9492 - DNA, 618 bp, Cannabis sativa
catcttggttggtaggacaaatttggaggaagttagaggtttgtggaactgcttggaagagttatgctcttggtcaggccagcgggtcaacaaacttaaaacatttattttgtttagtaagaataaacctgatcaggttaaaaacgaaatcaaagctaatctgggtattagagatcttgttgcaaacacaaagtacctggggctccctctaattaggcccaggcagaaggatgcggactacaacttcattttggaaaacctgaccgccaagcttcaaggctggaaagctaaatctctctcgaaagctattcgggcgactcttattaagtcggtgggtttatcctatcctagtcatgctatgcaaactactaaactctcgaatcgtctcatgcataagattgatggcacggttcgagacttctggtgaggttttgagaaaggaaatcatggaatgcatctttagacttgggataaaatttgccttcccaaatcccgtggaggtctgggtttttgaaaaactaaggaaatgaacctgactttcctggccaaatgggggtggaacctgttaactggaagtcagtctctctgtaacagaatcttggaagcaaagtacctaaa

SEQ ID NO: 9493 - DNA, 593 bp, Cannabis sativa
ttttatgtaaacaaaaagagtatggcacggtccgctaattgtgttgctcattgcttagctagagtctcatagttagatgctgatcgtagctactcacgacttctatcccgagtattcttgatgtaattgctcaagagatgatataaatttacatcttttattcaaaaaaataaaaaagagtatgacaccataaactcttaacaatatagcgattgatactcaataattaattagcagtttttcatatctaaatatattagacccgatattaaaacgcataaataaaaatatattagttcttgttgtgcttgatatgccctttattatttctcaaacagaaatagtactagttgctagagcaaaaacaaataatattacttctaaataataattaattgttaagtgtcatataaatatgagacaacttttaattagtttctctgttgatatgctagcaaattggcaagtaggcagttgattgattaatatcttcatcttggataaatagatcaaagaaaaaaaaaactataatttaagtgtttgtaactaactttttatgatatgggataatgggagtcaaataataaacacac

SEQ ID NO: 9494 - DNA, 771 bp, Cannabis sativa
ttttagggagaatttttaacaaggcgtatgttttttcttataaggaattcaatctccctcttcaagttttgactctcgttggtgttgtggccgaaatcattatgaaatagacagaacttagacatgtccctcttactcatctctttttttaataggaaggggattcttgtatgggaaagtagctagagtggccatgtaaatggtctcaggttttccctttttgacactgctccagccagaactgttgttgttgcgcttgcctctagtattcttgctattggagggttggttggcactactagtgctggcctacttgtttgtcaggtcttggggttgtacagcactctgagactgcatattgttgactttcctcctgtttgggcttgtctgacgtcttccttcagttttatgatgttgtttgctcgttcgaggaactccttcatgttgttggttgatatcctctggatgtctttctagaagtcactcaacggaaggatacctcccattatggttgtataatggccttcttctattaagcctttgaccttggttgcctaggccataaacctttagatagaatccttcaaaggtttgccttgttgctgtttgacctcaacaaggtcttctagttgtgatggtatctgtctctaggatgagaattgtgtgtagatttctcatgaaaattcattctaagaattgaatctttctagagccagcttgaagtaccattgctgggttgttcccgacagtcaccggaaagatctggcacca

SEQ ID NO: 9495 - DNA, 514 bp, Cannabis sativa
atcaaccatgagtcagaggtctctcgactaatgtacatatcaaccctcccgtcttttgtgctcagttgataggatccaatttttataatattttgaatatatattaatatttgtaataaagtaatacggtgatattctagtaaaagtttataataaaagggatccccaactcagtgatatttcagaaaagagtttaagttatattttaagaaagaatttttaaattttcaattaatacacttttttattaactattagtttattattataaactaatttataaaaagcacacacatggcgcccttacgagttagggcattagagcggctaaggtttaaagatcctaaaaactttttagatatgtacattgaatatgaagactcatttggctcatggtatggtaagtgttaattgattatctgctaattatttgacatgcttgtatgagatgcatgtgttattagaagagcatgatgggtttatagataatgatgctatatatatgtaggtatag

SEQ ID NO: 9496 - DNA, 503 bp, Cannabis sativa
ctttagcatttctcgatgttagatgttgtaattgattagcaatttttttttttttttacgtattagtaaaaatattaaaatatgttactggtgtttattactctcctatgtattatattgatattaatgcaattaagtatcaaattctatataagttaaaaaaataatatcaaatttcatataaattaaaaaatattattaaccaatcgtaagatatcacctccagatagtgctaggcaacactcatgtccaataacaatgcacataaaactcgatatttaacttgactaataacaatataacacgtaacaaaattttaaataccattgataccttttagcatttctctaaattaatttatactattactagacccaatattaaaatatagtaatgcttaacagttaactctattaacattttttattatagaatatcgctagccttttacgctatgaaacacatctaatgaatagatggaaccgattcaattaacataatta

SEQ ID NO: 9497 - DNA, 1004 bp, Cannabis sativa
ttttttttttttttgaaatttagacaacagcccatgtcatctcatcatttttaagaaaatatatatttattatatatatatttcgcttgaattaatcggtaaccacacacacattatttatttttcattgtttttgagctctctctctgttcatcttcttaattttttggcttaattttatttcttattcagttcttcttcttcattttctttttattttattttttttttagtttttgaagttttcagtcatatttcttggaaagataagagtatatttttttagtctgatttttcagaattgggcttgcaaatatagcctttattgtatcaggtgttgaggttgtgcagaaaatggttagttttttcaattgttttgtttatttattttagtattgttttacggttgttttccataatttattattttgacgtcaatttcactgttcttgctccatctcgctggagttaatgattgttttttgggtgttctcgtggtgttgtggtggttctatccgtgggtgtggaagatggaggctataaaatacatttcttcttctttctctatggttattttgtagttttttatttgggttctcctataaacacatttgacaagctcactaggaaaaaagttttgagttgtgtggttcttttatgtttttctaaatggttatatctgcttattgttttacatttgtttttgtgttattttagtattctgattttttaagattgggcttgcaaatatagctgttattgtatctggtattgaggatgtggagaacattgttagttttttttaatccctttttcctttctttttgtttgatttgttttagtattgttttacagttgttttgccataattatttatttgacgtcaatttcactatttttttctcaatctcacagaattaatggttgttttccgattgttttggtattccagtagtggttctgtgcgtgggtgtggaagttggaggcctcattttttttttttt

SEQ ID NO: 9498 - DNA, 600 bp, Cannabis sativa
ctgcttccatctatggctgcttttatagttttgtcattaatgataagtgcctttaaatgtggatattttcaataattacatttattaaaaataattaaatcacgtcaatatcatgtattattctctccataaattaatctaatatctaataataaatattgactaatttaattataatcaacagccaaatattaaatattttaaattagattaaatgttatttttaaatatccaaattcaatatattcagtatcttatcaaacaaactaatattaaaattttacttttttttattagatagatccaatccaatatatactgaatatattagatgaatctgatctgatactgagtctaaataaacttaaattaaattaatgcatatatatataaaatacatttaagatccaatccaacattgattagaggattgaaattaattagatcggatgagattataaaatttaacatccaatatataattaaattagatgtaaatagctttaaaaatattggatgtatagtttaataaacacccctactcattattatagtcattacacaagctttatcttcctctctatcttttctaactaaatt

SEQ ID NO: 9499 - DNA, 567 bp, Cannabis sativa
aaaagataatcataatataaaactaattaaaggaaaaatagttctgaaaatacactataatgattagtcaagataaaaccaaatctttgtaatattattgtttgtgcatgcttataattaatttgtaatattttttttaattaattagctcttcttttaataataatattctaactaggataatgtgaatattataattaaactaaaaagaacaaaaaaccaaaaagaataaaatcaaattatttggatcccctatgcccatctagaattattcaacctgatttttaaagaaatgtgtttggtccaatgaaaatgaaatgaggttttgtccatgttataatataataatataattttattttattattttatattttattggacaaaatttaaaggtgaaaattacaaaggaatctcaagactccttttttgaaggaaggaaagagatagagaaagctgacaaattagggcaaaataaagctttattgtgtccaataaaagtgtgacatgaattgctaaatcttatgctcttctatcatatgttactatcaatcacactattccaat

SEQ ID NO: 9500 - DNA, 1037 bp, Cannabis sativa
  modified_base (166)..(179): a, c, t, g, unknown or other
  modified_base (341)..(346): a, c, t, g, unknown or other
aaagaacattactaatctagctaagaattgagttctatataatttagtggttaattaggatttttttccctaaactttcatatgcacaaaatcatgcccctagaacttttttgaccgttaaaaatttaccctgaactattgtcattgttagatttaaggacttttnnnnnnnnnnnnnnaaaaaattctaacatggatgaaagctcaagggtatgatttaatacatatcaaagtttgagggacatgatttgatagatattaaagtctggggaccatggtatagtacataaacaatcacttaaacagtaaaattgaatgaaattagacaaacgtccttaaannnnnnaatctcaatagtttagggggaaatttttaacggccaaaaaatttcaaaaaacatgatttggtacatgtcaaagttcgaagaaaaaaaaaatcctaattagcctaatttaatattcgttgatactaaaaatataattagttatttatttttgtatgatactttataataacatatatattatacatatgtgatcacaaataatattttaatccatcactaaaattatatatatttatatatacttgccacatatatttatatctcattatattttttacaagtatagtttgaggatcaatatagaatttatatgtctctatgagtagtaccactcactggaaattattaggtcgatttgatatgatagcatgtcaaagttgttaaaatattttatatgcaataatgtaatctttacccttagaagtcctcaatttcactcctaaaatatatttttcttgtagtgaattaatatgttattctctaagtatcaacattagaactgtataatcagtattacatatattactatcggactataatgggatggacataatgtactaacatgtttagagcccatagacacgctctaaaatatctttgagcccattgggctaagacaattaattctgaatcatattggacatctaggtctaataggccaacttttacttcttaaataaaggttatgccc

SEQ ID NO: 9501 - DNA, 1125 bp, Cannabis sativa
aataagtgatgactgaggctctcatcaaattaatcactttcccaaggaatatatattcaactgatgagaaaattataattcttgtcatgtgacacgagacagacagtccatcaataaacgagaggactattcttctgaggggtctttctagaagtcaccaatgagtacgtaatgaatcattcaacaggaggactctagggatatatatgcacatgaacacatggggccggcgatgcagggaatacattttccgccccggcccctatcatgttttccgcatcgtctccgtctattccggaggtgaggcgggaaattcttatcggtaatggagaggttttgtttaaaaaaattgatagtttttaccacacataataaacaaaacctcatgtccactgtccacacacatattatattagaaaaaaaagttctacatgataagaaaagaaattaaaaagagaataaacaaaaaccttaaaataatatttaaacaaaatacattatatatacaacaataatattaatagtttaatatatactcacatttctcagtttagtgtgaataatcaccttaatgatgcagtcacgcttacaccagttgcagttgaataaaagaatatattgtgggactggttaactatacaagtagagttcgttgaaagtggctattccaattccgatgactattacaattccaaataagctagcataacaactagggtttataattgaaaatgctaagtggtatctcaccgcatgaggtggtatacatagtgttattattagtgtattttaatattgagttctatatattttaaattaataaatattttagagaaccgctgataacttttaattttgtctttaattaagctatttatatttagtattttttaagtctttctcttttctttatgtgacttttggtattttattcaagttggtaacttttgaatgatttttgataaagaaaaggctctatgtgatgcataatttttgtgcagattttgatgcaccaaaagtagttgtggctgatttctctacattaattgatgtgacaattttgagacttaggtggggggatgggattagtgtacgtgcagcagatctactttttttttttttttt

SEQ ID NO: 9502 - DNA, 602 bp, Cannabis sativa
aactgattaatgagagttgttttaatagttagaagagatttaatgcgaataatttttacgtggttagtgtgtgcattaatgagccttagtccacgagtcactgctatttaatatagtagtttttttacactattttttttgaccccttttccagaatatggttagggtatttatagctttatgaagggagccaataggtctctattgttgcaagtgttaaaccatggcttgcacaagttcttaggttcgaataatagggtatatatgtttgcacagtaggttacatagagttttgctaggtgttgggtaagacaaaccattaaccttctttgattgacgtgacagttcattatgtagccatcaataatctcatcgattagagtgtaattgtcaaaaaataggtttaatgcgtctgacatatcttttcaaacccatacgcagatgcttctcccatgttgcatttaatgcacctatataagccatgtctgggacctagtgaccggccctagagattgcctagctcttggagaagaataaaatatcttcgcatctgaatacagatgaagcacccgaagggacctctcggacacatccatccaata

SEQ ID NO: 9503 - DNA, 1039 bp, Cannabis sativa
atggggtgtgccgtctccgcatgaaatcaattagctctttgacttgaagtctaccccaagcgaagcaagtcggggtacttctacttctctcagctggacgacaagtggctaacgggcaccgtggatacgaaggttagtaacattggacattttgttaacgagtactactttgtggtcggcatggaaactgctcatactcagtttcagcagatccccatatacttccatcctcccttcactttgaggctttgggaaaaggccgagagaattctccaactgccggaggctgttcggaatatcagtttgttgatcacataggtcaaattcgtgaagtaccagctttacccaacagattttgtacctaagtccatgaaggggaagaagaagaaatccaggccaagccaggttgagcgagatgagcaagagaaatagctcattcaactcaagcatgaggctaagttgaagggtgatgctggagccaaacaatatgctcaagaatattctgagcaggagaaagaggctcaagaatattcagagcaggagaggccgcgcaagaagaagaaaactctcccgacctagcagaggctgatagaacatgctatccagattaggaaacctgggttgcctgctaagtcatcagttcctgtcgacggaaaggaaaaggctgtcatggaggagcaagaagactcttcagacgatgtcgctccatctgtgcttgtttgggagaacgcttctgccagcgtgcagagtacttcaactggcatttatctcctttgatttttatgccttcatatattttatgtcttcttctaattatgttgttttttccatccaaatatgtctcaggagatgattgaagctctgaagaagagagtagggggagctcgggcttgtctcctccggctaagaagtctaagggtggcgagactccatccaaggagaagctgccggctgaagaggtcattgatctctctgaggaacaaccttctagggacccttctgccttgaaggttgctaagttcaaaagttcccggagggg

SEQ ID NO: 9504 - DNA, 1239 bp, Cannabis sativa
ttattagggtttaggttcaaaacgacttgtagtcttgaaagagagactgtcgtctggggttctcaactcttgagggtcaacttgtgtttgattggggtaaaaggtcagtttcaacctttataaaacttgattattgctttgatgtgtgtagggcaaattgggaaaaatccctacatgaaagatgactgcaagtaatagacaatgaagttttacgtggttttgaagttatatcttcatagtttacgagtccatcttatttttagggtttttgtttatacaaagtgcaaatatcacacaagtattgatcataaggatctttgtattccctgccattcattctcttgtctagtggtttttaccactatttataaagtttcaagaatggtagttattctatttgttcttatcttgataaccgttcatgaaacgtgaataattttcagatttcattcaattgctaatatgtataactatcaaataaccgcttatttggccttatcctatagacacagttattttaccgagatatccatttgtaaagtgctgctcgcaataaacttatatgcagatttgtctccatctatttcccagtatacatgttctttgtaatgattagtctcgtcttcacatatctttgtatttcttatttagaatgcatttatcctatattgtcttgcgttgttatggtggcgagacgacacatgcgagatacatgtttggaaattcttctcgcattgatcattcatgatgaaattttgaataattcttatataaacttttaagtaagctctataaattgtatcatttatgcttcttaggtcgacctcctttattctatcttattcgaccaacaaagtcctttgtcttatttttcttgtactctgttgttcccgagatagttgttcttgatttcgctagtctcctagtgagctattattttgacttatccttaatcacttaaaaacttaaatttataaccatacgtgactagtatttttgaggcgatataaataacgtatttgattttttgatatctgagatggttgatttttaactcttatacacgtgtcatgatcatattactgctcaaaatatgaacataacaattgctcctaaaaaagtatttttaggagttaaaggactttttaagaagaaaaggatagaagcgtaacttttccaagtgtgtaatgataatttcagcagttttaatcccccaagaaactcaacatctaaactcgt

SEQ ID NO: 9505 - DNA, 1558 bp, Cannabis sativa
ttagctatgaataaaacagtcggtaacatattaaagtcatggaatctttagtcaatggttgcttgtacaattcactaatggccgttcttcggtgcaagtaatctcagttcgaattaataatgtaggatgacatctaagtgaaggtgttgtacataatagagattatatatgacaaagaccaatatcaataaaactgtctttatcaaacatatcatttactataaagacctaattcatatcataacgatgatcaatggtagatcggcctaaatcctaagtaatcatgaactcatgttcatgtcattagtttctttgattcatctgttaaaatttctgagagaagatgattcttacaacttctgttttgggaatctaataatgtggatggctgaaaacatgatccacaattatagaatcttgactttcctaatggattgaatgttggttccctttatttgttaattttagaactagaaacttgtgcgcaaattcagatgagatctgaattacacttcaactagtgaattagtggtactaaggaataaagaagtaattagaaaggtaaaatagtaatttgaccaaaactaattaggaaccaacataaggagggcaatttactgaaattgattatatcaatggacagtgtagtaaaactcactagatataattttataattactaagagttcaatttcatatttatagtggagtaatcatggaattaataaacaaagattattcggttgatgagactcaataaataatctagtttattgtagcttagaattataggtccatggttcccaaatagccaccttgaaacactgttaagggtaaggataaagaattgtataatattatttgagaaaaaatattttaaattggtaaaatagtaattatttatttttataataaatatttttcaaattaattaaataggaataaagataaatgttgttaagataaaaattgtcaagacataattgttaagaccaaagttattaggacaaaagagaccatcattgtcttcattcagacaaggtaggcgcctatcttatagtatggtgtccctattagttttgtctttttggattaattaattcaattagataaatatttgaatttaaaaagtagttaaagatatttcaagttagttgagatattctctcatctaaaatatcagtaacctaattctgttatagttattttgtttaaataattacatatgatttaaatatgatttaattaatatagaattaactactataaatagaagcctgatttgagaaatgatgatttttcattgctacattcaaaatacagaggagaaaagatttttttttctctcaaatagttcctgtttatgtgttgagaattaatcaagagcaaattatatactttatcttaatagcccacactattccttgtgtgcggtggatcgattgagaaaactacaatcaaccaaaaagatacaacttataagaagttttaaggataccctgatagtcatccagaggtatatattcttttcttgttattttatgtttagatttaatgta

SEQ ID NO: 9506 - DNA, 658 bp, Cannabis sativa
tttgtgttaagagaagggatgactcctgtaattttcatttatttttcttaatcaataaactcgaggttgttttaaaagaaaatacaaagcaatatcaatcgagctttctttttctttaaataatattggatcaatctcttcaattagcacttttagagtaattgtgctttccaatatattttccaaacccaactatcaaattctctcttaattaataatactcgaattttcctagttacaagtacaactaataaacttttctcaattctgatttgatgaattgtctttcttatcttgttattgctttactatatatatatatataaaatcatgatcattgctactcatccaagaccaagtatatatgtccgtcccacgttcacacaaacacttatatatatatatatatatgatcaccacaatacataatacaacacttatataagaacttctacattaaatttaagagaataatgttaagttataccttaaggtgctaagtaaggatgatattcggttattagtgcaatttaatatcatgttttatatatttttatttattaaataatatcaaaaattactaactactcacaacgtaacaaattagtataatgttgggcatcttaaaatgctcaataagaatactctaattaaattt

SEQ ID NO: 9507 - DNA, 628 bp, Cannabis sativa
tgttggagttattgattcaggtaattattaatttataacctatttaaaaatctcaatttgtaagagaattttaatgatgtttataggaaaaaatataaacatgtaagaaaacttttatatatggatttttagtaattattttcgatagggaagaaattataatctatttttttcatctgagataatttcttaataaaaacataaaatagtaggaaaagtttcggactacccccataattctcattttcctttaagaaaatttacatagagtacataaagttggacttgtttttatatatttttaaagattttttatatatatttttatgaattttgttttatacatatttttttagaaaaaaaaaaattattttcatgttgcattctgcaaagcaatgttaaaacaacgtacggaaaaacaaacctctatatttttgtaaaagaaaaattaaaacctgtaaaaatgtaataaaaattgtaaatctgtaaaaagaaaaatatattatttttttgttatttttggatatttgtaaaataatctcttttctttaatattactcacaaattccattgaattatattgattggtgaaatcatttcctagttactcacaaattccattgaatta

SEQ ID NO: 9508 - DNA, 737 bp, Cannabis sativa
ttaaagtaagaaaaaaaaaatcgtacccaacagagaaataatatccaaaaagattaaaaataaacaaaaagttatctcagactcatcccttggtcatggtcttttctagaatttttgattatattctatcaataacattcatacccagaaatttttaagcttcaaattcgtacgcaaacacacagatatttatatacactagcaagatctataatctcattgaagggttttatcaaacagatggtagctattcctaaatagattatactttcaaaaattttaaacattttataaattataaactaacaaaagcagttctctaacaatggtggtgtgagatttggacggtaaattttatgatattaatcagaggagatcaaaattaaatataaatgaaagattcatataagaaagaaggttaccacatgaaatattgagacggaggagattgtctgaaaggaaaaaataataagccggagagtagggaacggtgcaactaaggagatacaaggaatgaaataactgtaggttgtgcgatacagcccaagtacaaatattacaatactgccactgtgttgtgtttgatatataatagagttttttcggtttaatcctctcaattatcatttcactgtatttaactttcagtttaaattttctcaaaaaaaaaaagaaaactttcagtttaaattttggtagtaaaaacctctacgctattaaactgttagtaaatttaa

SEQ ID NO: 9509 - DNA, 1725 bp, Cannabis sativa
  modified_base (1456)..(1460): a, c, t, g, unknown or other
ttatgagctgcaaataattaaagaaaaatgtgagataaaagaaaacaaagagaaaatttaactaatcctaactatacatatatatctgaacaatgatgaagataactccggcggaggcgatgggaatgtcaacaacggtggagggagtggactcatcgttgcgtgcttggaatggtggactagtcgacgatgaacaaatggaggtgaataagtgttttgatattgaggatgaagaggaaaagatgaatgttggtggtcaaaatttttggggatgaagagggagacgaaggggagagataaataagggttctgatatatataaatataaaattattaggggcagatgtccgccggtaataataggatacgccaataataattaaaagtataacattttaaataatatttaatgttattagcgacggactttcaccggaaatagtccgctgctaataaatttgaaatttgatactgagaaaattcttgcacaaagcaattctttcaatattattacttttgttttaaaaaaattctactcttaccagcagatttagtctgcccctaatagtttcgccggaaataaaacattttcttgtagtgaatgcaaaattataaaattggcttctctgactttatggatctttattattgtgagaaactagacagatgctcgaaacgatattcgattcagatacgcgcgcaccaggccttttgtgaacctgggcgttgggtacttactcccgagctcccgtaatcttgtttttaatacttctaaggcttctaaacttgaggacgaggtctcttaccttattttttgtaccatttcaaattcaatgatcgcatcgaatttgacatttgagcaattgaaggcagaatcccaagttgattgtcaacctgggcgttgagccctatttttaagctctcagatttgtggttttcttctcgagtttgcttgaatcttcattattttttatgacagaaaaaatgcttgaaacaatttttactaaccttgatcggaaacaacccaagtgtcaacctgagcactaggtccagctttggccctttagaaattctgtttggtccccagaattagttaaatcttaatattttctgaaaacggaaaagatgggcaaaagaattcttgaaaaattccatttgaaatggcctaggttgacaaaatgtcagcctaggcgtagggtcagccccacgtgtcaacctgggagctgggccctatttttcgtacctaagaattgttattttttctttgaaaggacctatttccctattttttatgaagatgaagaagatgcaaaaattggatcttcgatctgatacttggaaggctcctagattgacagattgtcaacctaggcgatgggtgctcagggccttagggtccccggtgctaaaaaatgaacttgttctgatttaaattttgatgcctcaaatatgttcnnnnnatgtctagttgatgtcccaatgcaggttttgacccttttgcactaaaggagtcccgaaaaccaaaatcttagttgaggatgtcaacttgggcgttgagtgaaaccctaagtgcccatattggcttcagggttgtgtaatttcagtttttgggccttggattaatttgttcaatgtcttcatggtacaaaatactaaaaaaatagtgatttggattcaagttattgaaggtcgaacttttatcacggagatcccgaagttaacttg

SEQ ID NO: 9510 - DNA, 579 bp, Cannabis sativa
tgatgatgatgatgatgattattccaatattggtgcattctaattaggggtgtcaatccatctaacccaaccgatcaatctaaatatctaatcgattgaaaaatattgaatatccaattgtgatcggattagattgaatattatttttaaatatccaattcgattggattgaatgttgaatgttgtgtttaatattcaatcaaaataattaatatttttatttagtttagttaaataattaaattttattgtgttatagtaaaaatatatatggatatgaaaattaaaattaaaattttacttttttttattagatatatagatttagtcaaatccaataattattggatctataatatttgttggatttgacactgacaaatccaacaaatattaagtcaaaaaaaaatattaagtctaaaatattggataaatcttgacaaatccaataaatatatatatatgaaatacattcaatgtataaaaccgatcaaattgataggatgattaaaattgattggatcatgattgaatggtaaaatttaacattcaatgtataattggatcggatctgaatat

SEQ ID NO: 9511 - DNA, 1135 bp, Cannabis sativa
aaaaaagaaaatattgaagaggataattttcctacttatgaaaaatgttgtagcacaataacaattataataatatctatagtcaataatcttaattgttgaaataaaaatcaagcactcatatatgatgtatgattatatatacatttgatacagttgttaaatgtataattatataaatacatacttgtagacgaaaaattatagtggtatttatgtcagaataataataacaataataataataataataacctcttagttaacctctttttagaagtgctaccgttatttttctgtttcaatctcttagtcaatctccacgcccgaaaatacaagttttcaattttttttttcacggaggtgtttgttatgcttacaacatcatccctctaaatttttaaaaacatttgaatagtttacagtgccgaaaatatatttgaagttttttgaagacgcgtggtaaactggaatatcaagaactctgtttttgatactgtaaaccattcaaaaaaatttcaaaaatttacagatgatactgtaactataacgaatactgttatgaaaaaaattgaaaaaaaatatttcagcatgtgattttaaacgtggagattaactaaaaagttgtaataggacgttgtaattaacattcctctaataataattatgatgtttgaaaagtgaagtatgtaaaaaattatattgaataattttatttttatataaatattgttgttatgtggtaaaattatcctatagctatggagcatgtgagaactactcaatttgttggcctttcataaaaattgagctgattctatcactattctaacgatcaccataataattttaatttataatattcaccaactattttgtaagtgatcctaatatcattttaagaaaactatggctagtttagtagtgagggagagataggaaagagagagatcatgagttcgaacttaaattttttaaactattaattaattgtaaaatattattatgctacattaaaaataaatttattattttaaaaaatagatgaatgatgaaactaaagtggagggaggcacaattaaaaaagagttacaccactataaattttgtattattgaatttgtgtgtaattgga

SEQ ID NO: 9512 - DNA, 833 bp, Cannabis sativa
ttaaaaaggaaagtaaataaaaaacaaattttttttttttcttaatttagtacttatatgagttttaacatagatggttggattaaattttatctaaagatttaaaatttgtgttaaaaaattgtgtcataagttgtgttaatagaactcatccttgatataattttttttttttgacaaaatattgatatttggaaacaacattattaaatagaatatgaatattgatttaatattattatgataataattttttattgttatttagatattataaacttattataaataaaaaaaattactgaaaaaataaataattactgtgaaaaaaaaatagaacaactacgaaatacataaccaaaccagtttgtttttgagtggattgatttggtgtggtttgatcatttaatttgtctcgtttagttttaaatttttaaaaaatcgtagtttagtttgataaaattaaaattttgaaccaaaccaatacgtgaatacttttaaaagatagtactaaatatcattggtctctaataccaatattttataaaattctgttaaaacatttataaaatgacattactcatattatatgcaatactttactcatatctaaaaaaaaaataaaaaaatactcatataatcatattatatcaaattccggtaaattcattttcccggagtgtccaaaattaacggtcagattttattagatcagtcaaataaaaaaaaagacttgcttgcacgtttataaccatgtctcttgaatttgatttgtcttgttattttattttatatttgaaccttggatcatgttataaaagttttcatgtgaa

SEQ ID NO: 9513 - DNA, 995 bp, Cannabis sativa
atctaacgatattagctatgattgcattggaagttgaaacccttagtgacatatagcgatatgttgtcgacatcatttgcgattttgatgtcgttttggttgtttgctctgtcttgctatagttagcgacaacgacacgtttgtcgacatgtcgcgacatatgccttggggattttttctcacagattatgtgtatattagtgattactatcgatatgtggcaactttgtttgcgatgtgttgtaatttattttacgacatttagcgtcgacacatttttatgtgttttaatatgttcctttttttgtcttaaattttacaaatggctcttgaatactatttttaaaactatccacacatatcacagattatgtcgatagacgtcacaaaaattgtaagtggaaagaaaatatttttaattgtcggtaattatatcactacatgtcattaaaagtcatccctaacctccagcacacaccaatgtcgctagatatcgataacaacattacatcactaagcattgctaaactaaaaaagaaaaatagaaaacgcaaagttcgggcagttcgagcttagcacacactaatctgagaaattcgaatgatatgtgtagatctattcatatcaacctaaatacaattatatacaactacatccaataataattactaaataaattacatacccatattatttttttcaagatatatgttggtaagagagtttgggttacacacttagttgtcaagctaagttgatggcctctgacaaagggtgctccaacaaagggtgtgtgtgtctttctagagtgagaaacaagaatgagagaagggaggataaggtttaattttattatttaaaagtataattggaactgaaaattataaatagtatatttagtataatatttaaaagggtggaatattatgagaccatacaacatatttaagtataatttctcaaatttcccaatacaaattcaaattcccctacaa

SEQ ID NO: 9514 - DNA, 2400 bp, Cannabis sativa
cctcccgtccgatccttccagccgtcgtgtctgcttctccggtgttgctgtgttcttctaagctttgtcttctccttctccagtgatcctcttttcgttctatacattgattccgcgcaatggctacagaaaaagatcaaaccagaactcctgcaactattgtcgatctcgacgattcttctactaatcaaagtcttcgaatcgcagctgccaagaatccaatggaagatccttctagtcccttctttctccaccatggagataaccctggaaatgccttggtatcccaacctctgactgggcaagataactacatcgcatggagcagggcgatgcaactcgcgatctctgtgaaaaacaagatcagatttctcgacggttccattcctaaaccccctatttttgaactgaatctttataatgcttggtatcgtaataataacattgtcatatcttggattctaaattctgtttctaaagagatttcatctagtattctttatgatgaaagtgcctcagctatatggaatgacttgaggatccgtcttcaccagaaaaatggtcctcatatatacaatttaagaaaagacttaatggatcttaagcaggaaaaccagagcattagcatgtattttactagactcaagactatttgggaggagctaaccaactacagacctacatgtacatgtaacggatgtacatgtggaggagtcaagaaacttcaagatcatcatcacatggagtatatcatgtcgttcttgatgggactctcggattcttactcccaagttcgaggaagcatattactcatggaccctctacccgaagtcaatagggtgtttcatcttgttacttaagaagagatcaaagaggaactggaactaactcgaacaatgccaattctgccatgacatttgcgtttcaaggtgacaagaagagcaatcagaaggatgacaatcaatccacaaagtctcaccatcctaagagaaatcgtcctttttgcacccattgcaatatattggggcatacgatcgagaaatgctacaaaatccacggatatcctcctggatttaacaaacagaacaagaacaaggaagccgctgcaaatcaaattcaatgtggggatgagagcaactcgactgctagtgaaaatcatgcaattctccctcaattatccacggttcaataccagcagctactcaacttgctcgcttcacaacagagtggtatgaacactaatgaacccagtacttccacgggtaattcaggtatcatactagcacattgttctaattctcctatacatgattcttggattgtggatactggagccactagacacatttgttctaatatgaaactttttcaatacatgtgtaagataccctctattaaacttattctacctaaccatgactgtttaattgtgaaccaaagtggatctgtcaaactagaaaatgaaatggtgctaaccgatgtattgtatgctcccacgttcaaatacaatattatatcagtaagctatctcaccaacaagtctgcaatttctgttctttttacctctgatgggttcactatgcaggaaaagggcagcaagaagatgattggaagcggcagtaatgtcaatgacctgtacattcttgacaatacaccaaactccagtcaaattctatctgtcgatgttgagacttggcactctcgtcttgggcatttgtctcacaagcgtttgaatttgcttaaagacactttgaattgtaaaatttctgatttacataaagaaatgccatgctatgtttgtcccattgccaaacagagaaaacttccatttcaaaacagtaatactgtttctaataaagcttttgatattgttcattgtgatatttggggaccataccacattgtttcacacacaaatcacagatatttccttactttggtagatgatttttctagattcacatggatatttcttttacagcataaatcggatgttagctttgttatacctcaatttttgaactacatacaaactcaattcaatcaaagttgcaaggtatttcgttctgataatgcaccagagcttgcatttaaggaattgttttcaaagcacggaattttgcatgaatattcatgcgttgaaacaccggagcaaaatgcaatcgctgaacgaaagcatcagcacttgctgaatgttgctcgttccttgctattccaatccaaagttcccataaagttttggagtgaatgcatattgactgctgcgtacttaataaataggatcccaactccgctgctaaagaacaaaacaccttatgaattactattcaaaaggctaccagactaccaacatttgcgcaattttggatgtttggtttttgcatccactctatctgctca

SEQ ID NO: 9515 - DNA, 700 bp, Cannabis sativa
  modified_base (453)..(457): a, c, t, g, unknown or other
tcagactcccgcacaaatccctctctaataatgccaaacagtttgacagccagttgtttaaagatttttgtatgactcatggaatcctaaagatttctccacagtggcacacccccaatcaagtgctcaggtcgaagtagtcaataagaaacttaaagacaacatgaaaaaatgacttgaagaagctaaagggaactggctagaggatttaccagacgtattatggtcataccgcacaatagaaaaaacaaccactgggcagacactgttttttatggcctatgattatgaagctatgtttgtcataccctaggattaaggaaatggattagtaaaaccctaactagttaattgagtattattgtagaattatattattatatactttattttatgcgaattaatatgataaatgacatgttatgacgccgttggtgagccaggggcattttnnnnnttttgacccgagaagggtaaaactattaatttaatttatttacgtgcttatgaactatattattatataatatatctgctgtgtcctttttcaagtgtgttctgacaagttggcgcggtatagtcacaaccgggtatttcgggccgaaccgagttcggggccgaaatataattctaggaaaattattggaattttgtttatgtgtgaatagtctgaaagttttttgagtttatttgtgatgtg

SEQ ID NO: 9516 - DNA, 1003 bp, Cannabis sativa
ttccatttcccaatgaccaatatatgtagacagtacaagcaaccgtggatttacacttgcaaataaaaatgattaaaaatatctaaacttgcaaatagattggcatcacatgtgatagcagtagcactataaattaaatcctttacaaattggaagaaaaagtcaagaaacctgtcctatatagaactatttgttcaactaactctaatacaactctcacacttggggtttatacagttcatcttaagacaaattaataaacaatttacaactaactatttctatcttgttcaaagaaacctcaaccacctgggagtttaaacaaatgggcataaaaattacgaaactcagacctgttcaacaatttaatgtggctgaagattccttgaaaaacccccattttcagttgcacaaaatgagcagtgcaaaggcagccaacctaattaatcaaaggaaatttagttgcaatgaatttttttatttataaaaaagaaatataaatatatatttatagaaaaagaaacacctcagtacaacattttaacaaagataaaattaggcctttttgcaaagtagccagcagcagcataagaaacaaaaactcacaatttgagttaaaaccacgttccttttcacattacattatattcttgaaaatatttgcaaactatcataaagtataatactttgcaaacatctttattagtcataaaagagctaaaaaaataacggctactatggtgccaagaaataaaacaatattttcaaaatgataaaacataatctctgtattattccttaccaaaaataactaattatatacctccaaaatctaatctaaataaaatacatacaaatcttcattggagagccaagaggagaagtgcttcgttgctttgtaaaacgtggagaaccggatggacttcttggagatagtggaggagtactggcagcagggaacatggagaaatttacaagttgcaacttgcatacttttatttta

SEQ ID NO: 9517 - DNA, 596 bp, Cannabis sativa
gtaaatttttttttgacgccgtatcaaaatcacacaaaattaacaaaataacaatttacaagtagctgtagtattttctcaaactaagatagtttatcgtctaataaaaaaaacagtaattcacaattggcggcggtactttcttaaacaagaatagtttatcgtctaaccgagaggtatgctttcgctgcaaaattcttattttgagccacataagacaaaattattctcaaaaatttagacaataaagttataacatcctcaaataacacacttatacatcctcaaataacacacttagagctcattaaagaacaatcttcctttattgatagttgtaacaagagacaacgaatatgaacaaatctctttaattgggattccgcacgagagagcctaactgagtccaactaaaagtgccaaagtctcaacttgtaatactaaaatacaacctgaaaacaaacaaaactacaagataccacaataaaaagatataagtatatacactcgtatgctaaataaaactaaaaacaaaaactcaatatagtacaacaaaacccaaactaaggacgaaaccaaaaaaaaaaacaaaaaaa

SEQ ID NO: 9518 - DNA, 1183 bp, Cannabis sativa
gtacacatctccatttcaatgaattaatatgaatattaatgataggtgtacacataaattatatcaacactacatacatggatgtgatgcattctaagtagttaatagttttttatattatgtattaaaacaaaatatgtaatatccaatattaattataccaatagccaaataatttcttaaaactatgacatcacatataaatatgtgtcaattttatatataatttgtttctgcatataaaagaaaattaaaaagtcaatgatgaactgtattaaaagccttagtaagctaggccggtatggctgcccatgaagggaacatcaacgagtaatttttttcttttattatcgcgtgtggaggtttctaattaattctatccaagtagttagtattgctatacattagatagtaatggtgtctaacattgttacaatgtaacagctttagttatcatggtattatataattaataattattaaattttacaaactactagtgctcattagcgtttctcattaaaaaataattaattaaaaacatcatatatacccatattctacaattactcccaccataatattcagtacatatataataaaataaaatacgatgggtttgcttcatggatccatttgtgtcacctgcaaggcagtatgtaattagaagcaaaagtcggtgcataaaattcataaattatgtaaagaccaagaaatattaaatggatataactgaaagagaaaaaaatgtctatatatactgaaagtaacaagactttatctttagatatatctatcattcacaatattcatatatacacatattcttatatatagtaacagcaaatactttccgaacttgttaatttcagcaatatgacggtaagcacatatatgttgatcttacatattttcaacgagtttgatttattatttataattattacacccattgattatgatgtcgtgatttgatgatgatgttcagatcatagagatgagagttcacatagattgtgccggatgcgaaagcaaagtgaaaagcacccttgaaaaagtgaaaggcgtggatgaggtggatatagacatgaacttgcagaaggtgacggtgactggttacgccgatcagaagaagattctaaaggcggtgaggaagacgggaaagcgagccgagctgtggcag

SEQ ID NO: 9519 - DNA, 1665 bp, Cannabis sativa
caccagcagctgctgtgtctcttccagcacctgttttgccatctgtctctctcccagtcaactctcataagatgcaaacccgtgctaagagtggaattaagaagcccaaagcttatattgtcactgaaattccaactacattacagcaggctcttcagcagattcattggaacaaagctatggccgatgaggttctagcactaaaaaggaataaaacatacactctagttcggttaccacctggaaggactgctattgggtgtaaatgggtgtatagaaagaaggaaaatccagatggcagtgttcataaattgaaggcaagattagttgccaagggctttcaccaacaacctggttttgactacacagaaactttcagtccagttgtcaaaccggtcacaatccgagttgttctcactcttgctctcacaaaggaatggaccatcaagcaacttgatgtcaacaatgcttttctcaatggtgatctccaagaagaagtgtacatggtgcagcctcctgggtttgaggatcccgaatcacctgatctcgtttgcaagcaagcttcacaaagcattcattgttgtatgtatggactcaaacaagctcctcgagcatggtttgacaaattacaacactgcctcttatccctgggatttgtgtcttcgaaatccgatcatagtctctttatcagacatactcccttatccatgactgttattcttgtctatgttgatgatatcatcatcacgggaagtgatcctaagctcataactcattatacagaagctctcaatgccaagtttgctctaaaagacttgggggatttgaatttctttcttggcatagaggtaacttctacaccagctggtcttcacttatctcagtctaaatatatcagggatctattacatcgggctgaaatggatgctgctaagccgtccaatactccaatggttagtggactcaagctttctgcctatggtagtccacctgtggctaatccgcatctataccggtccattgttggtgctttgcagtacttggtcattactcgccctgaaatttcatttagtgtcaacaaggtttgccaattcatggccaaccccttggaaactcactggaatgccgttaaacgcattctaagatatcttagtggcactatcaactatggcttgcatctcagaaaatccccaactcttgacctcactgctttctgtgatgccgattgggctaccgatcctgatgatcgtcgctcaacatctggttttgccatattttttggctgcaatattgttgcttggcagtgtaaaaagcaacacactgtatcccggagcagtactgaagctgagtttcgtagcctcgcacaaactgtcacagaaatcagctggctgcactcactttttacagagttgcacgttcacctgcctcggccacctaccatctggtgcgataatctcagcacggtgttgctcactgctaatcccgttcttcatgctcgcacgaagcatattgaactggatctatattttgttcgagaaaagattttgcagcatttggttcaagttaagcatgttccagctattgatcaaattgctgatggcctcaccaaaccaatctctagccaattattctcctctttcagacacaaacttacaattggtgatc

SEQ ID NO: 9520 - DNA, 625 bp, Cannabis sativa
agaacctgcatagacttctttgacctgaataaagcgcgttcaaaagattgctttcaattaccaaagattgattagttagtcgacgtgacagcagaacatgagctagtgacctctatggaagcatattccggttacaaccaaataaaaatgcatgtactagattaagaacacaagttttgttatcaatatggggttatacaattacaaggttatgcctttgagactaaaaaatgctagagcaacgtaccaacacctcgtgaatggtatgttcgaaaaccagataggtcggaacatcaaagtatatgtgaataatatgttagtaaaattaatcaagagcgaggaccatgcagaagacctcacagaatgcttcttaatatttaaaaaattctgaagttaaacaccaagaaatgttcatctaggatttcctcagcgatctttcttagttttatagttaacgcaaaaggaattgaagctacctctgagaagataaaagcactgttggaaaggtgaatgctgggattgacgaggttgctcgaaaggtggggcttggtgcaacaatccatgaccgccatggtctttgtttagcttttgcagcgtctccagttcaaggaatcttatctccttt

SEQ ID NO: 9521 - DNA, 1411 bp, Cannabis sativa
tattctataaatactcttttatctttttctttcttcttcttttctattctctatctttctaatccatgtgcttgctcttcccatatctatacaatacaaacattttgttaaaatagaataaatgattttatttataacggccgacaaggtcacaggggtatttgggtccatgtgattctggttatcttaatttattaaagcaaattttatttgcactataaaattataagcacaccacgatattaaaaaagaattaacttaaattattttttaaaaattacttttaatattttttttaaatttctttttcatattattttctttaaaaatcaatagttaattagttttattttatttttgcatttttttaaatcatttataattttttgaagaattattatcccatatactattttttaactttttttttaaattttcagtttaagtttctccggtggtttttatatgggttgttatacggattttagttgcgatttaggttgttccgttagttgctacatgaatttctgtataggaatttctgtatagaattctgtaaaaatacaaaaaaaaaaaaaaattgatttaaattgtaaaaataaaaaaacccttaattttttttcctaacaaaattttatataatatttattttttatttctttgtcataattattaaaatatattttataggtatattttttaaaaaatatgacaagaaaaaaaaataaaaaaaaaaaccttatacaaattaagaatatataaaataaaaattattaaaataggttgtatttgtatatagtgcaaataaaactccagacaacaaacaacggtaaatttatccaataactaaaactacattatgagattaagatttaaaaattactaagtctaatataaattctacaaaataattaatctgggacaaaacatacacaaatttcaaagagtggtatagttaattttaataatattaaatggtatatattactaaggtaggtgggtagtgtgaatcttcccttatgttcaataatgaagaaaaatatattaacatgatagtgatagaacttagaaggtacataaatgatcaacaaaattatggtatggccattgtcatcaaccaacttagaatgctacattactttcttcttggaagattttggtaaaaaaatactaagaaaggttttttttttaattttttaatagagttcaatcctcaagagtattcaaatataaaaaatagtgttcacctatgcaacaataatggggaatgactctcgacaagagaagtggtacacaatggctggaagtggagaaggaaaatctgccttggatgttgagttaaaggcaatcggtttggcattgaattgggctgttgagatgaattggtggactttcacggttttctctgatt

SEQ ID NO: 9522 - DNA, 610 bp, Cannabis sativa
tctataattatattcttttatttggctctatatagtttagttggtaataacaattgttttaataaattttgaaaagtttaaagtgaaatgctgaaaggtaattatggtatttaggatttttttttttataaaatataatattattattgatgtaatttaatataagatattacttattttactttaattgtaagatgacacttcaccgtgatactagacactatgagaactttatcccaatgctctaaatatttggaaaatctatatactcgggtgttttaatagactccttgtctagttcgacatttactctgaaaaatattttaatttatttatttttcataatttatgttgtgattatttataattatttgtaaattttttaaaaattttcaaatagtattaaattaccgtgttgaaattaagattcatatattttgatgcacgaataattatttttttttatatgtatgataatttataatttatttttttactataattattaaaaaaaatttaaaaatatatgcgatcattaaaataaaaaatacttctaaatacataaacagataaagagtccaaactcttacatattttttttttctaaata

SEQ ID NO: 9523 - DNA, 666 bp, Cannabis sativa
tttttgctttgtttgctctcctcatttctttttgaataatcacattattgtaaaccttctgaagtgatgtgatgactatactaaaatgttattctaatacttcttagtaactagaaaatcttattattccgtatagcttattagtatatataaagggttcttttttttttcttttcctgcctgagtagttgatttgtacttttatgaactatggacaatggaatgagttttttttttttcttctttaattttcagtcccactcatagatgtataatatacatatatacaagtttataattatgaaatgagtttcttttcagtgttttcctcaagaatattaatattgtgtttgtaaggtaattggtaaaagctgggttttttccattaatgatggaagatgatctaatattacaactatattatacgagttttaaatatggtatatcataacacaaatctcagggatgtggtacaacttaaaggttttgatgtatgtacaaatgattaaatcgtgtcaggacgaaagagccaaaatggaatgaggacttcacatttaatatcaagctgccttcaaagaaaaatcttcaggtcaataggcagagttactgaaattacaatttgtttagtgacaagaagactctactctaatctctctctctctctct

SEQ ID NO: 9524 - DNA, 973 bp, Cannabis sativa
gacgacgtcagggtggccttcgcaagtagcgatgtggagagcggtgcgaccatgcaaatcgatgttgttgacatcgaggttctctggggcagagagcttgttatcgtcatcggatggactctagcgaatggggtcaagggagggctgcctgccgaaactgaagcgaaggttggtcttgcgtgggtcgagggatgattggcgggtgaattgtttgctgaaggagcgacgtggtggatctggttagtgattgatgagggtggatgtagtgttgggtatttgagattggaagaaaggagatgaaattagagttagtgttaaaaaaaacaaaaagagaaaaaaaaaaaaataaaataaaatattttttgtaatttattatttttataatttttaaattattttaaaaaaaaaggaaaaagaaaaaaaaaaggtaaaaaaaatatttcatttttttccaatttttttaatctttataattattttttaaaactaatattacgtagaccactaaaaacttgccacgtgtacaagtgtatacacgtggacagtttactgtggcatttaactgtgatttttggacgggagtgtacagagcaaaacggaacccgggtttaggtaatttagccgccaaaaattcaatttttatggttaagtgttacaaactgtaaagttcaaatggtttaaccgccaatatcccatttaatattataactgtaacaaataattatgaaggcaaaaattgatataaaagttaaacaacaatcctgagggtaaaatgtatacatgtaatattccacactaaaaacaagaataaaaaaacaaagaggagttgtgagagaaagagaattaatattattgaatgaataattgtgctagtgaataagaatgaataagtccgtactcttatctatagaacaggttgaacaaaacggattttatcggagtggcagcaatgaaaacaactatacgtggacca

SEQ ID NO: 9525 - DNA, 1010 bp, Cannabis sativa
tgctgagtttttgtttgtttctctctgtctctctttcagtcaaagatgtcaaattatctgctaaggatatcggttgctctgctctttatgtcaatagttgcacagatatcaggtaaagaatgataatgtgatatagtcgtatacattattgtgcattagaaatgagttgttataatataatgtgtggtgtggtgttttgattcgtacagaaggggaatttgagcaatggtgcatagcagatgagcaaagctcagatgatgagttgcagggagccatggattgggcatgtgggaaaggaggagctgactgcactgagattcagattaacaaaacttgttatttaccaaacactctcaaagaccatgcttcttatgcctttaacagttacttccagagattcaaaaataaaggagccacttgttacttcagaggagcagcccttatcactgagctagatcccagtaagcttattactatattatattaacttaattatataaaaattcaaacaggactaacatggaccatggttggtttggttggctggtagtattggcttcctaatattttattccatgtgtatggggtttttaggctttgatgttgccgtgaatgtaggcaattaaagataataataataaaaaaaataataataagtgaggaataaaataagaatttggaagaggaatctactacttagatatatctgatgctttgttagaactttagcatcatattttttttttgataaacaactttagcatcctagttagtaggctatctagtcataaagggtgtagtatataaatagatattgatgaagaaaatcactatcaaatcactttcttgaactatcaaattttaggttgtgagatcttagattttaacaaaagcggggataagactcatacaagggattagaatctctttatccttatctctattttctaactatgaagattgcttatgatttttctctataaaaaatgaggtgtgggattaaacaagcc

SEQ ID NO: 9526 - DNA, 1002 bp, Cannabis sativa
tgacaagaacataacctcccaaacccaggcaggaacatgacctaccagaccctagcaggaacacgacctgccggatcctggtaggaccatgtgccggctagacatcatcctgtaggtgtatggacgaccagcttctccctggtagtacattgatgcacaaccttcatctgtggacagtaagccaagctatgagttgggcgttgacagcccgctaagatgctacgaaaatatctacttttaaggggaaatttgatcatttgtatttattaatttaatatgtaaatatcaattcttttatctgctacttagggtttatgctctcctatataaagagcctttactcaattctagaaaggctaagtcactctaggattcatttaggccataaagttctaagtttaaaaccctcgttctctctctatctctgtatctcttatgcacgcccaaagggttctccacctttctctctcacacgcatccaaggattcatctctctatctttagagatctacctactgattcatactttgtaacctcaaagaaaggtatatcagatcccacctatagtgatttgaatagtattatctctcggtatcaataaaactaaacgggggcaataggtcattacccactaactaaagaggtcaaacctctataaaaattgttgtgttcttttacttattagttctaattgtgaaacacgtggcaagcatcagtgttaatacaactccactaccggttggccactttttgaggtcaacactacatactccacgagtcaatattatttttgagtttcggttgtgtttaaaattttggcatagtttttgtatcaaattgcctctctctttgctttgaatgaacccctatatataggaatagggtggtggttactcagtcttatcttagtgaaaatttacaggtgatgggtgttgaatggccatgtttcacgtataactgaacatttacataagttaaataactatttatatttaaaagaca

SEQ ID NO: 9527 - DNA, 1029 bp, Cannabis sativa
gtggcaacatgtgtaaatttgaaactattatcactatccttggttacttggaaccaggtacctggtttttcaggcgaatcttcttctatggggtcgtcagaggaggcaagaatgagccacggatcatttacattatccttgttgacttgcatggccaagaatttgttgttgtggcagcaccttatgtgaacccattccgggttttcttgtgcacttattagttcgaatttcaccaaaggactcgtaatgtcctttccatcaaaagccaaaaacgttggtggcaccccttttgcgacgctctctttcttagttatatgtcgcaaataggtgctgtcgtagttatatgtatagctcttgaaaactgatttcagaaccacaaaccttggccatccactagatattgtagatgatgacattattatctatagataatataatatactttgctcagaaatatatatactcagtagtaatttgggtgagattgctaagttgatatatgtaagctatatatttatagggcaccaaaaacaatggatcaacgagatatagattcaataatcattacgcgtcgttaactaaataattatatgattactatcataaagtggagagtacgtgatataaattgtttttattattattgataattagaatatgctaatatttaatttcacgttctacattaaacataaatagcttgtttagtaggtcgtatataatagttgtatcatattaaataacaagtaatattacgtattgataatacattgtattgtattaattattataatcatgataaatattaatgcaatgtgaaatgtattatttaatacataataaataatctgtattatagcttgttttataatatttacagagagtttggagtaagtaaccctaaccccggacctgatgccgacgtcgactaagattcagtttcagaccttggacctggccccgaccccgaatcctaggcccagacccatactcggatccgaaccctgacccgaactcgcaccctggccc

SEQ ID NO: 9528 - DNA, 697 bp, Cannabis sativa
tatatatatgaaaaattcatcaaaattaattccaaaaacttcaactttactacaatggaataatcactttttctccatctcaactttttttttctccctttttcctcattatacttggcttgctttgtcgaaatatatgtatgatgataatttcaaataataattaaaaataatcaaaattagtaatacgcgtgtatcatgagaagtaactagtaaggcaaaatgaattattatctatcattattctttttatatatatatgtaataatttttttatatatataggatccgaagcatggaaattggtggcttgaattcgggtcgggtgttcttgtcgggtactggccatcatttctattcagtcggctaagggatcatgcaagcatggtacaatttgggggtgaagtggtaaattcaagggcttctggttatcacacagggacccaaatgggaagtggtcattttgcaggagaaggctttggaaaagcctcttactttagaaatttacaagtggttgattgggataacagcttggtacctttatcaaatctcaaagtcttagctgatcatccaaactgttatgacatacaagggggtattaataatgtgtgggggaattatttttactatggtggacctggaagaaatgtgaggtgtccctaagggaaactaaatatttatttcctatagaatctgc

SEQ ID NO: 9529 - DNA, 682 bp, Cannabis sativa
tgggtaagttgatagaaatttatattgggggaatagataattgttggaactcagctctaaatagtgtaggaattccttgatttaatagctaatggggtggtagttgtgaaaaacaatttttaatacatgaagtgggaatagaacaaaagcagaagtggggatatatataattttattttatttgtaatatatagtataatgaatatttgtgagaatattaatttgttttaattttttttttaattatttcaaattattatatatatatatcggtttgaattcgctgattattggggggcggagattgtattactgtacattaatggtccaatttcttagtaagttccttttcaaaattcaatttaagttttaaataataataataatataataataatgaaaatagaaacagtgaagaacatgggattcgtgaagtgaagcatgattctcatttggtcccatgtgatgtgcctgcctcatcaacaacaagaacaatagccatttaagtcaagccaaaacgtacactcaaagtctttgctcttttaacactaatttaataccttttttctataatcacagatccaaaaatcaagaaaccaaaaaaaaaaaaaagtgaagcttgccggagaaatgtttcaggtactatcatcatcgtcgacgttcaaaggtccgatcttttgcc

SEQ ID NO: 9530 - DNA, 501 bp, Cannabis sativa
taaaactccacagccccaaccccaaaaatttaactaaagcatcaatatgactcttagtgttgactgaatttttagctaaccaacgaaaaggtgtaataaatgagaaattaaatcaaaattgtaataaatactaatgaagaataccataatttaaagaggtttgactccgagtttgataatgtcctgcttcccttatattttattaatatgagttgcaaagtcaagaataaattcttgaatgtaagaagtaaattgggtagagtttatgctcactaaatgataatttttggatcccctcttatatgaaatattacaatttctattcaactaattattataaaatgttattttccatgtaattataaactaatttgtatataaaagtaaaaaaataaatatataattaaatcttaacatctgaacatatctttctattttaaatagagtttattaaacaattagtaaatgaggtgatttcaaaaaaacacaaaaaaaaaaaaa

SEQ ID NO: 9531 - DNA, 596 bp, Cannabis sativa
gagaattgtatcctccacctcccaacttgtataaggcaattgtagaatcatgttagcatcatcagtattaaatttggcatggatgaactattcatcccatcttccatttggaagtttcagatccaccacataaagattctctgaaagaggacgtttatcaaatattttaaagcttcttggtctcagcagccacgggtcctctaacaccctcatattgttcccatcccccactctccacctataaccatttataataatgtccttaccccatatcaaacttctccaaacaaaagaagcatggttcccacatttggcttgtaagacttctttgttcggaaaataacaaggttttaggaccctactacataggctaaaaggaaaacggatgcaacaccagatttactttgaaagcaaagcttgattaaataactctaaatttcgaaaccgcaaaccaccattctccttcaatttgcataaataagaccacttacaccattgcactttattatttttctttaaagaaccccactgaaatctcgctgccatcctatgaaggttattaattgtggcttttggtaagattataatatctttac

SEQ ID NO: 9532 - DNA, 697 bp, Cannabis sativa
atatttacaaaaatatatatggtttcctttttcctttcaaaatattatttattttatgaaaaaaataatttaggtaacctgccagttgtccgttgttataaataattatctatattatttttttttgaaatgggattcttaagcaacaattttttttatttgttttagtttttcaataaaataattgttattttttaagagaaaataaatcatattttgtaaaaagaaaagttttatttacttcctaaaaatttataaaaacactcagttttaattatttttattttatataaaatatatatatctttaatttatatgtataaatatatattatataaaatcaaaccaaacacaatatttatccatttctattaaataaaaataaattacatttcaaattttatgacaaaaaaatttatataaaacttttgttagaaaaaataagaatttattgtacatgatttttttttttaaaaaatataaaaataaatatgaaaattaacacacattaatatgaaaaaaaaaaaaagtaaaaaaaatattattaagagaaattttaaaattatttttttaatatttgaggtacactataattttatgagagtgcaaattaaaattctcattttccaaactttcactaaaaaatcataaaaatgaaaataaaaattcgggacaaataattaccactataagaaat

SEQ ID NO: 9533 - DNA, 651 bp, Cannabis sativa
tgagacactcgggccagaggcggaacaagtgtagccagtgatcaacccttgtagctccttagcactgatcattcttgaaagaacctccgagcataagatgaataaatatggagataacgggtctccttgccttagacccctcaaaggccgaaacatcttagtaagaccaccattcaataacacttggaaagataccgaagtgatgcattccataatcattgagcaaaagcgatcatcaaaaccgaaagctcgaagaacttttaagacaaatctccaatcaagcctatcataagccttcgacatatcgcatttaatcccaatgaaagcttgactccctcgtctgcgactcatgtcgtggacaatctcatgggcaatgatggaattctccgaaatccaccgccccttcacaaaagctgattgatacggcgaaataattttgtcaagaatcactctgactctgttagccagaagtttagcaataattttatagcagacgttacataaactaatagggcggaaatcgtcaaacttacaggcattccctttcttagggattaggacaatgaaggttcgattgacttccctcgtgaattttccagagacgaaaaattcctgaacaaagctcaccgtctgctgcccaaccacctccca

SEQ ID NO: 9534 - DNA, 1122 bp, Cannabis sativa
gttagaaaattaattaatagtgtatgtgggtttcgggcgagtccgggtgcaacccgagttctgaaactgtctatattctcaaatctggacccggttgataaccgagtttcatcacctgaactcgtcctataatttttacaacctttttttttttttggattttttttgattccaatcaattaggtttctcaagtggttgggttttcgggtacaaatatttcgcccttgaagccaaccacatttcttagtgggggtaaaaaaattatttttggttattaattaaaacaaatataattttttatggaggaaaaaaaataattatgtgatgataaaaatataaaagaacaagttttatagggaaaaacataaaattgcatggaataaaataaaattatgtaggaaaataataaaaacaatatgaaatttataaggacaaaaatatgtaaggatacaaatgaaaatatatatatattaattttattggacaaaaatgcattttttttttttaatttatatatagaaaattgagaggtgggggtaagtttatattttttaaaatggtacaaaataatacactaaactcaattttcgtcatggcaataacaccttcaaatcattttattatttaattttattttgatgataattaagctcatggtatagattatattattttagaaaaaacagatctaaattatcatttaacaaaacaataaaaaaaaaagaatctaattgataattttacaaaatacaacacctaaaatagtatttaccttatagtagtttctcactcatttgatgaaaacaaaaataatggttctaccaaaaataagcaaaagtatatgatcagtgtcccattatagatataggttttgtagaacaaggttggaccaaaatgacatggttgttcccctgttttttttattaccattgtagtgggttggtgacctttttctatgtctccacccaaaagtataagaaagaaacaatatctctatcctctatctctaaagtcatcactacaccaaaattaactttatgtttacttaaatcatcttctcttcatcactttcatctttccaacttttttctatatacatatatttgctcatctattcatat

SEQ ID NO: 9535 - DNA, 574 bp, Cannabis sativa
ggccatagaaaccttgtagaaagggtagccgagaagtgtttttgttttgacactagctttgaccttgttttgctttcaagccttgatgaagttgagcgtttcacgtgacaactcccgggggtcctcgagtgctcttcgtgagtaggtgaagatcttagaggctacccttctggtgagggaccagactatatctaagatggaggctctcgacctgcggaaatggagcatgattttttgtttggagactatgcttggtaataggaaggaagagaacaccacacaggctgctaccatctccaagttagaggttgatctcataggatctgagtagaagttgagaacagctcttgatggccagcaggccataagacgagtatgttaacttgtctttagaactcatttatgagttcaagctgcacaactccaatgctgacctttaatacatgggtgatgaggccttctggatagcacattggctcaacagaaagcattgtacgagagccagttgagggtggaccgaactgctgtccagccagaggggtcatcctcgaggcactatgatgaggagatggct

SEQ ID NO: 9536 - DNA, 997 bp, Cannabis sativa
atatgtaaaagtgtagattagattaattatctttttaatatttattatttaaaatatattaaaatatttttttcagatcattaaaattaataaattacctattgaaaataaaataattatcgtaaatttaaatcttcaataatgaaataaacaagctcaataacacataacaacaaaataaataaactctaatctattttagtaattttttatatatacatataatatgtattttttaaaaaaagatatatatacacagatattagctctatttttaaatattaattacacatttataattttaaaatatatttatacaaatagtgtgtgtggattagattagttagttttacaagtaaaagtgcacccaatttacataaatgcgaattatatagaatttttacataaaatactttatttcattcaaattttacatttataccgtggttaataattttgtacatactatctatattttattttattttattcatttttactgatcttttatttattcaagcttctatgtaactttttttactgtatttttctcctttttctctttcttttttcagtcagccacactgatctctctctctctatgaagaattgcaagaaatcgttcgataacacttttttctattttttaatgatatccgacgatcaagacaattcttgcaaaactcttttatttcactcggccttcgcaaataacatttcttattgatttgtcttattttgattgaattatccaattattcgtatatctctctctttttcttattatatatataaatataataagtatagcgttttacatcatttttttttttttattttaacattttttcttattttttcaaattactaataaatccttataattcttttttatagtgttcgtaaaaataaaagacaaattcaaaataatgaaaatcaaatttagcttattttgtgtatcagcgtccaacccatgttgaaagcccaagcccatgtg

SEQ ID NO: 9537 - DNA, 599 bp, Cannabis sativa
gttcttcgtcccctgtacatgaagtctaaaggaacttctataggcttagatgggaatctaggcatacgtgagacccgcaagggtttctgtgcaaaatgggcccactaatagggtaaatacatagaataacatcactttgagggccacgacagggttttgaatcgtggggcaaaaatgtccatatggaaggaggcccatgcgatctggataagtgtcacgtgggagtactgctatactagatagaaatgtcaaatggacatcgctggacaaagggaatatatccctttttgcggtacacgcactaccatgtcttgacataggggacaggaactgacttggtgggactaggcgttagagagtagtcatgtcaccttataaggcttccaaatgcaactcttgagcttcctatccagatgtaccttattaatcgctcgaaggaccttgctggttctgtctcttggaaggctatatgggcttccaggagggggatgattgtgtctcccaaagcgagggtccgacagtttgtaaggccttgggcctatctccgtcttggactgggccttcctatgcaggaaggtttggtctggaattatgtagac

SEQ ID NO: 9538 - DNA, 1006 bp, Cannabis sativa
ttggtagtcctcttcattactgaacaatggaggttcttgccttggattggcccttagttccctttgttggatagcatcagccaacctcttgctagatcttgaggagggattggatgaggaagccattgatgtgaagaacaaaactttgtatgttgttggtagggatgaaggttaggttgaaagtaagaaaagagagaaaagtagaatgggactattaaattaggctaataaatcagaatgagaattgaaaatttgatggtaggatttttaagttgtaaaaattgcatttgaaaagaccaaaaagtccctggaattcagttcctatgccatgtagaattccagatggtttgtgcacagacaactagagtttcggttggtgcaaaaacaagccagattttcagaaaaaaccaaaaaagctatattttttgtccaaataacccaaaacttttctaatccttaagtatgataaaacagaaatgctcaaacaagaaaaatataaaaatgttgaaaactgacgatttacggtaagcttttcaaatttggcaggaaaactagaaccttactgaaaatgagttttatgcaacaaaattaaaaaaattccatttccaataatttaatgatgtgaaatgttagctttaaaaacttacataattgaaaaatattgaaaaatgagaaattttggcgaaagacactcttttaggcctaaaaacttataaaatgaacaagtagaacgccaaaaatttgttcaaagcgtatttcagttaaagcaaacctataggcagactaaatacactaaatttgacatgttcaaacatatattcacacaaaatagtaaaaagttcaaaaaatcacatgttcacttgtttgaaaacaagtgcaaaccttatagttcaccaaaaatccacataatgacctacaatttcgagttttcagcaagtatagttgatgtaggtcaagtgtcaagaaattttttcatctatgcatatagaacacataaatatgatct

SEQ ID NO: 9539 - DNA, 685 bp, Cannabis sativa
ggcactttgaaaaggggagataagtttaccgagaacactcttaagacgattagaaagcattttagacatgatcttgtaaatcgtcgagcataggctgattggacaaaaatctttaagagaagaagcatttgactttttggggatcaatacaatgagagtatcattgatggaagaaaaatcagccttgttattaagagtgtcaaggatgacagcagtgagatcatgcccaataatgtgccaattcttttgataaaatgccggattaagaccatcaagtccaggggccttgtcaccagaaagttgaaacaaagcctgcctaacatcatgagcatcaaaaggagagtcaaggaattgaatttgatgaatatccaacgatttatcaatggcagaaatgaggtattgagtagcatctctattggaatcctaagacttaaaaagatcaccaaaataagtacacacctcatgacaaatatcatcaaacgaggtaaccactctcccatcattgcatttgagctttcagataaaattggtctttcacctaacagtagctttgctatggaagtatttagtatttttatctacagcctgcaaccagtggattttggatcactgcttccacaggatttcattcttataaagaagagaatccaactgagattgcaaagcagacgcacgttgaatctta

SEQ ID NO: 9540 - DNA, 1113 bp, Cannabis sativa
ccagattagtttccacactctgttttcggaagttctcggactcgttgatttgagtagtctacacgcagatcttatcgaaaacaatccatttctttctcccacccatagccaggaatcatcagttttggtgtctgggagatcaatattaagaatagtcttagcatcctcttgtcgaaaccactcattcaccatttgcctattccatgtgttatctgcgtttaagaattggtgtacccaggccactccatgagacgcatctttttctggaatcggggtgcggtttagggaaggaacccaaggatcaaaccagattgacgtcttctccccgttgccaattttcctacacagacctttccccaacacacccctggcttcaagaatggctttccacaatcctgattcgcttcctttgcgttcaaggtcaaggaagtttcttcctttgatgtacttagcatttaccaccaaactccaaatacttgttttgtctgttaatgccttccacgcccacttggtcataaaagctttattaacagtttccacctttctgaatcccagcccgccactgaattttgattgacagatggagtcccatgccaataaatgtaacttccgcttctcttctttgtctccccaccaaaaatctctaaggcatttatccacattccttgcaatgttaaggggtatcggttcagtggctgcggcataggttgccagtgaggatccaaccgattgaatgaggcatgtttttcctgctttggagagtagtctagttttccagctcttgacccgttggagggccctgtccaccaagaagcgcaagtcccgtgatctattaagagatctaaataagggaaggcctaaatatgtagcatcgtccttcatccttttcatgtttagaatctccgcaatctcccccgcaagtcttgaggttacacctttggaaaagaacaccgttgacttatggtaatttacaccttgacccgaccaagaacaatattcctcaaggcaattgaggaatcccttagcttctctcaccgatgctttcccaaataagattacatcatcagcaaacattagatgtgtgatgggcggaccatttctagccatcttgaa

SEQ ID NO: 9541 - DNA, 635 bp, Cannabis sativa
aaaatgggctacaatttatagggtagtatataaattaattacataaattataaaatatttaactaatactgaatattttctaaatttctagtctttaggcactcataatagcctggtcttcagggatttgggagttgatttcgtggatctggttaaatcattttatctagtcgatctaataaccaaccaaataattgcttctatgccttttttagggaatctgatatctttgcgagttggcccacacttcctatccgacactgctaactggacaaccactagtggtaggactgtctagttgattcaataattctaaaattgcatattgtacttccttctctttcagtagccttccactcttaatgaccttcattcattaagtgctgcccaaacaggatcgtctcatggtgttgagaggcctaaaatgaaatttaaaacgagctttttttttttataaaaatttaaaataaatattatttaaattttgataaaatatcaattttaactcatttaatcccatataacaaataatttttctcaccacgtaagatatcttaaagtaatatttgattacaataacatctctattaaagtgttatacattttagcacttttgtaataataataatagtaat

SEQ ID NO: 9542 - DNA, 947 bp, Cannabis sativa
ttgaagataacaacggtaaacttgtggtcaaagtccttctagccattcttgtgataaaaggccaggcattaccttttgaaacccgttcggtagcgatcataattattagagggaagcctagcacctttaagtcacgggccatagggaagatcatcatcattaccactgtcaatatgctccataaaagagatgcattgttcaaatggatgcccgagacacccacactcaaagtgaaatttaagaagtctttcataacgatattctatctaaaattcatcccttacttttggtagacggatcatttgtccttgagggagtggtttagcaatataaagtttgacccgaacacgcaaaaatggaccccatccttcattagctgagtcttcaaacacatctataaactcactaatagtgttataaccaagcgcttcagccaatgccttagacttactaaggaaaggcaagcaataaatctgagtccagaaagtggtgaagattatatcctcctttgtgacattttgcatagcacctggcgcatatgagatgataagatgattctgaaagtgccatggttgtttattaagtatccgacgtttgtcaccttcgcaaccgaaagcaatgtgaaacatctcagttttgtaatcagttattgtaatggggaatcttcctttccaatgtcctgccatttgatcataaaaggcaggcttatagattgttttttcagtaaggacacgggcaagaagaatatgggtggatcgtgatgcagaggggatatatagttgggatgtcagacagtgttagaattgaactttcttcttgtgtgagtgaaagtgtgaagttgaaatcgcatggagagaggatccattgcgtctggtatggcagggaagggtagaaagataagaacaggcggtagactaccgtgatcagtggtggttatcgggaagagg

SEQ ID NO: 9543 - DNA, 546 bp, Cannabis sativa
acaaaattatctccaaccatctttgactcctttactttactttcactagtcttagtactaagaaatgtataaaacaaaaattacttgatcaaactcaattggaaaatgttaaaagatttttccttgtacctgaacagaatttgctccaagaagaataaattcagcagcatcaccacccgtctcaacaccaccaataccggaaagagagtaatctttgtcaccgaattctgccttcatcatctttgcaatgttcatcacttttgcaagcgcaatagggtgtactgctttggaagaatatcccccgggagttgagtacctgatgaaaaattaggcatataaacttctgcaataccagacgagaaaacttaaaacaatttataattatagagaagtataagattcaaacccctcaacacatggttcgggacgtaagctatcaagattaattcccattacactcatgattgtgttgattgctgctacgccttcacatccagagcgcagagaaattctcgccggctgcagaagatttagacaattgatatt

SEQ ID NO: 9544 - DNA, 1116 bp, Cannabis sativa
aaaagagaaacttgttactaatttcagatacatattatatatagagaaagaaaaaattgaactaatagtaatgacttagttacccccaatgctaacatctgttattgcctctctacatgtgaacaatgagatattaaccacacgtagtgtttcatcaattacctaattcaacaaacagagctataatgttggtatagaaaatgagctgaaaaatttgcatggtatttttatgggatatttataaaaatgtgggaaaaaagggaaagttttgatatatatatattatccaaacttaattacatcaaatatgatattaaaaaacatttaaataaaaagaataaatcaccaattttcttaatgaaaaaattagtttcttaacgaaaaaatcagtttctaaaatatgatacgtttcgtttttttggtttatgcttcgaacaaagagaaagaagttttaaaacattaaatatgggattcaaaaagacatttacaattatatgacaaatataagtccataaaaaaagttaaaaaataaaaaacaaaaaacaataaaaaaaatgagcaaagttaaacctgttatatttaagtaaatacttttaaaaggctaatagtacttataataccatagccatactctctcggcagaagattgggtaagccttagaaaaaaaatattattcgaatttatttaaaaatatgtagtatttttaaaaattacaaaaaataaattgtatattgttttaaaaatatatatttttgggaggggctctggcctagaacgtcttagtcgatgtccagccctaggcccctagccctactcatactcatatagtatacataatttaatgtaaccttagaaaggtattccattttcttaatttctttgatgctaagtccttcctctattgctgttctttttaacagaatttcctcttgctctgcctaaaaataaatcaaccaaactaacatcaatcactttgaaaacaaaacaaaacaaacaaatgtgcaaaaagattctaaattttagtaacataagacaaacaaatggagaccatagacattgcatatactaagtaagtacatccatatgtatatattccaaccttagctttttggaga

SEQ ID NO: 9545 - DNA, 669 bp, Cannabis sativa
tttaccaattgtattttctaaggcgagtttatcaaacatatttatttctttataacacaagctgatttatatactaattcctttacacgtgtctcaactatattgcttgctcaaagtatatatgggtataaaaaattattttaataatatttatgaattaaatttattaagtatatattaatttaataaaataataaaaatgtaataatactttcaattaaaaaactattaaaaatatttagcaaaatagtagagagctccccacatttaaagagctccttatctatttctattttttgtatagttggagctcattatattttgaataaaaagtatgtttagaaagcaaggttggagatgctcactttatgacgtattatatattcttcttaatattttgatatattttctaatatttggctaatatgattgaagtaaatattgacggggctatatctgaagcaaattattcttttggattcagtttcgtcgctagagatagtgcaggacaaatcattgaagatatctcaaagtgtcaactaggccacgcttcacctgaagttgctgaggcaagtggaataaaagaagctctcagcttgataaagggcaaagactggtaatttatttctcttgaaactgactgtctggtggctgtacatggcatcgaaa

SEQ ID NO: 9546 - DNA, 776 bp, Cannabis sativa
atgattaagtgataattaaattaattgtgtgattaggcatggaatattgcaatttctgagtggttgggcagatggaccagcatatgcaactcaatgtcccataaagcctggacagagctacacctacagattcaacatcaccggccaagagggaaccctatggtggcacgcacacgtcggctggctgcgagccaccgtctacggtgcccttatcatccaccccaaatctggtcgatcctacccttttcctaaaccccatcaagaagtacctatcttactaggtatacatgcacaaattatatatatatatataagtatacatatatatatatttgttttcattactgatttagaaacattattaacattgatgagtacactgataattgaacttggattaggaattttataatatcttctaattattctcttttttttttatttattttttattttttttatttttaacaatattcgtgtttttaaaataaatagaatataagaaaaatgcaataataatattaatataatattgatatcgatcgaacattgttataggagatattgtcatgtatcacatactgtattttaataaataacaaaaaaaaaaataaagtcatgtaataatgtaagttgatgtattggctacgattttaacaatattcatttttatatagctacgtaatatattagtaaaaacaattatatagcattaatatttataattaaatttaaattaaataatatatacaatgttatgtaggagaatggtggaa

SEQ ID NO: 9547 - DNA, 708 bp, Cannabis sativa
tagtttggaaactcaacatgaacattcctcttcttccactaatcgacaatggtggaatcgaatgtggtctttgaggctgcctaaaaaactgaagatttttttgtggcgattcattaatgaagcacttcccacggctgttaatcttgcgcataggaagatcagttcttccaatgcttgttctctctgtcaatgcagttgggtaacatctggccatgctatctttaggtgtaaaagggctaaggctgtttggcaacaattccaatacaaaatttatatgccgaacatgggtaatgctaagggttatgatatcttctcttacattgcagctgctcacaatgatttggaattagagcagatagtttgtttgatgtggaatatatggtctgaaaggaacaaagagactcatggttctaagccaaaaccggtcgatgttttgtgttcttattctgcttcttatttggatcagtttcacaaagctacttcttcaaaacaggtggctgctggtgcttcatcccaggaacatctttcgactcccccctctgttcctactgcttctagagctcctcaaacatggcgttctcctcctgctgggctgtataaattaaatgtggatgctgcgtgcgatcaggctgccggaacattaggctatggtgctttaattagagatcatatggggggtgttgtggctgggttttcttagccgtttcc

SEQ ID NO: 9548 - DNA, 589 bp, Cannabis sativa
ccgagctcggagacaggctttccgacctcattgtatccaccaaatggaagagcctaaatctcttcctcttcctcttcttcttctcctccttcaacattaggagaatcgacaggactgacctcgccctggtcctcaatttcctggacttcaacgtccgtaacatcggtgtcctccctaggaggtctaggttggtccgtccaagttatagaatctttttcacgtgtcacttaggtggatttaacgtcaccttatgtataaattgagataacacaattcaacatggcacttaacatttaaaattggatgaaaatgctaaattactaatataacatgagtttttaaggttttaccgtcaaaaattgagttttggaaattaattgctagtgaggtaagacttttagagattttaccacaatttactcatgttactattggcaaaaatcagtacaaaatgaaaaaagtaactttaagtagtataaatgtaaaaaaaaaaattaagtaacagtaaaaacataataaactcacttattttagtattttacggaaaaattcttaaattgttctcctttttattgggcttaatttctct

SEQ ID NO: 9549 - DNA, 889 bp, Cannabis sativa
agatgagttgccatgagatatttttgtcttcttaattcagaaaataaattgaaccttacctacaagttcatcgaattacacccaataaaggcgtaactccatttgcatggtggattataagatcttctatagtttcattgtatcagggagacaattgaacataaaaattggtatcaagtagcacactaattttcatcctattttttttccttcttctaatgcgctactctttctcttttataattacataattattgtacattacgattttttccggaaatcgattaagaaactttaaattaatgaattttagtccacaagtcagtaaaatttagtaattgatgccttgacctctttgtttaaaatcactctataccactacactaaacactgtttgccacccttttccgtgagtacgtagaggagacatttttattgaatttgttaagaatacaacaaaccttttgtgagtacgtagaggagacattttattggatttgttagggatacaacaaaccagtgaatagattccggttagaaattaattttctgttattttcagttattattttataacagaattactttgcgaagttatatttgggaatacatgatgaagctaactactagaaatggtcccaaattggttagctgtgccttttgcttcctgagactcctaggtgggaggtctaggctttaaacttgtttgatcatgttccatccttcgggatcgttgtattttttacattcttggaaggtaatttcgagctagtcttggattgttatgctctagttgtatttgggcttgacatgccccttgctgtcttattgggacccatttatgaaggcacgtctcttactgttagaaaatatacatataatcttcttt

SEQ ID NO: 9550 - DNA, 849 bp, Cannabis sativa
tatttaatgtgaattatatactaacttaagtttaagtttgaaataagtaaatacatattttttttgttatttttttaataatatttgttgattgaaattttattaattatttttttttggcatatttgagtactatatttaatgttggtgtatttttagtttgaaataagtagataaatattgatattgagaaattttatataatttttatttagaagagtgataattagttttcaaatgttttaatatattgatattgagaaagttttactaactatattctactaattatgtgaataatttttttgtacttgtttatagtagataaattgagtgattttaattttgatttctaagaagtttcaagaatatgtagtcactagttatatatgtatcagttacttgttattatttaacttaatttttattttaaatttttttttatattacatttaataagttgtgattgttattggaaaacaagtaaaattttgattatcattcattgattgctaattagaggaattggtgacttatttctttttactaattataaaactattagaggaatttgaatattttagatatttattcatagtgaaataaattatgtgatatagtgtacttcaatgaatggataattaatatgcattttagaagagtttgaatatcttaaatattaattcgtaatgaagtaggttctgtgaaatatatatatgggatgtaaattattatatttttaattacttttctaatttttgtcttgttatcaaatttgcttgtattgtttgttgtattcttatatagttatcaatttgagaaatattattgaaataggaaaaattcttt

SEQ ID NO: 9551 - DNA, 762 bp, Cannabis sativa
tgtgaatttatttaacttagttaatttagtttaaaattattttacttacatttacattaaatccattttagattaatctaaaattctagataaatatttataaattttgttattaggctattgtttatgaatatattattatacaaacattatcatccactactataaaaatgactttttactataatttttaagtgacagataaattatttgcttaggagggtgtaactgacgatatagtcatagacgtcaatactaatttttttcttaggttatgaaccgaagcaaaaaaagttttctttctcggttcataatcgaaacaaaagaccagtatagtgacactatctattttttattcggttatgaaatgaagcaaaaacattttaaaaaacataaaaaaaaaagttgaaaccaaacaattctaactaataataaatataatatcagatcaatcctttaaaaaaaataatataatattagataaacaatatgagcatttgtttaaataccaaaaatataaattcaaatctaaaatttcaaataaaaatctcaaataataaaaatatatctcaaattacacattattattttaaacaaaaaataccatcgcaccaccaccaccgcaccatcgtataaccaccaccatacaaccataagcctgaaaaaagaaaaggcaacattagattaattataatgaaataagaaatcgaaaaatgaaaaattaagagagtgattaaaagatagaaatatatatatatatat

SEQ ID NO: 9552 - DNA, 544 bp, Cannabis sativa
atacaggttgttcctacatccaatggtgtcattttatctcagcaaaagtatatccaagacatcatttgcaaggctgagatgcagggagtgaagacacgaagttctccaataaatagtggccttcgattgtctaactttgggagtgaaccagtagctgatgcaacaacttacagatctttggttggtgccttacaatatgcaactataaccaggccagatatcgcatttagtgtaaacaaagtgtgccaatttatgcaatcccctcttcagtctcatcttgtggctgtcaaacgaatcatccgatacttggctggcactcttgactatggattacacatgaaatgccccacaaccatgcatattgaagccttttgtgacgctgattgggcctccgatcttgatgatcgacgctctactactggctattgtatttttcttggtggaaatcttgttggctagcaatccaaaaagcaacaaacagtttctcgatcttcgactgaggcggaatatcgcagccttgctgctgttgttaccgaaattagtt

SEQ ID NO: 9553 - DNA, 1022 bp, Cannabis sativa
gaataagctccaagttgatttcattcgaaatcataggctgtatcatattttgcagatggggaggaggaggagaagagcttgataacaccgaaataaacctctcacgaaagtaattccccacttcatttctaccggagatccatccaagcccatccggggagaccgtatctatgaagtttcgctttcttcgaatgaccgtcgcagcatggaaaaaacgggaattccgatcaccatcttcataccaaagttctctagacttctgtttccaaatctcagattgtcgggtctcaacttcttccatttccaagagaatgtccgcttcaagattgagattagcatccgagggtaagcgctgttgaacttcgatcaagagacgattaagagcttttaatttctccttacacataccaaaatgcgttctattccatttagacaagcattttcgagtattttccagtttagagacaagttggaaactcttgatcccatgaaccacaatatcccaggcttccttgataatgactttgcaactttcatctctagaccacacatccaggtaccgaaacggggtcttgaatctctcacgatcaaagagcaaatccaaaagaacaggggcgtgatccgactctttgatagccagggatttaacaccagccttagggtacagaatcatccacccgggatcacaaatagctcggtccagccgctccttgaccagagaaggcagtcttcgaccattagaccacgtgaagaagttccccgtacacccaagttcaactccacccgtaacattcaacaattcagagagatggtggccctcctccgcttcgaccgcacgacccccaaatttatcaacttggccagaaataatattcaaatcaccaaccagaacccacggatggtctaacgacaggatttccataattctagcttcccaaaacaccgctctgtccgagcgaaccggaggaccatagataaagagacctgtccagtcaggcccattgaggacattggaaaaaacc

SEQ ID NO: 9554 - DNA, 591 bp, Cannabis sativa
ccctacctaaaaatagggagcaagtaccttttaaatatctcataagtcaatagaggggtgaggggtcaactgacatcaaaggtttgaagtagtggtcgttggaaccacatgcttctaaatagcctaagaagataacccttaaaataattatacaggcccacacataaagctaaaggttgaaaacagaatgaaatatagaagtctaagtgtggtgcctcgcagagaagtaaatcaagttattcctgtacaaaaggcgattgttatatacagccccgcagaccaggcaaaaataaacacaactctgtgacaaaggaaactaaaattgtcttaagataagacaaaggaaactaaacttgtcttaaaaaagagatagacagcgagaaaaaaagtagttcctaatgatctcgagtgggggaatgtactgttgagtcgcctcaggctgagtcatcaaccgacccctgtggagcatctggattaggctcaaccgcatcttggacaagccctctttggtcctcccaaaggacgcctcagcttccacaatctcctgggaacttacgatctcagcatcagtttcctcatcgctctcgatag

SEQ ID NO: 9555 - DNA, 629 bp, Cannabis sativa
attaatttttttattatcaatgaataccttagaactactaaagtttagaccatatattttgtatatattgttgctttttaactgtattttttttcattttttgttcttcatcaatgtattattattatatatatgattaacattaacatctccaaactcctaattaatctaccaaacatgattgttttttgtttttgttttttatttttaatttcagtgttttttaggtccacgttgacctaaattttagtaggtaatacttgtgatttaatttctatttccaaccaccattgattcttctataagaacttctttaaaatccaacacatacatgatccaacaccattcaatttaattgttaaaatgtcaacatatataaatatatatattgtttttttatcaaattaaaaacatacataattttatccattaaaaaaaaaaatacatataattttaatatgatgaattgtttccccaatatgttactcctactactatatatatgttactccaatattataaaaactaaatatgtaaaaaaaattgttctctttaattgctagtttataatttaataaaaatttccagctcactcgagattgtttttaagagttagtatctaacttgtg

SEQ ID NO: 9556 - DNA, 519 bp, Cannabis sativa
aatacagaagaaacaaaaatttcagcaaatgttcaaacaaagtatcaataactttgagcctaagaaactaataaaaaaatcagtttaaaaccaatgaaacaacgagaatgagataataaattaccttatctataaatattcatgcatattcgcaaatcatatttgataaagttagcttcgtgtgcaaacaaaatcaagaaaaagaaattatagaaacgaattacctcttatcagaggggcctcccttttggctgaggaatgatcggaaaagatgcgagttcacgtcgtagatcattgtcgctgttttactctgtatctcttttcgttgattatgcaaccaatttatcaatctcaaaaaccctaaccctaatttcacaacagttctacaacctcagctacttgaatgggctccggctaaatcgtctttgcagtaaatatgctcatattttagtctaatgggcttttcattgggcctgatggactgtaattttcacgtgaggtacgaaataaacttttttt

SEQ ID NO: 9557 - DNA, 1244 bp, Cannabis sativa
tttactaaatatagttagaaactcaataataatcattttaaacctaactaaaaacaaaagattaatactatattagatctattatttgactaaacatacccatttggattctctatttcaagagatattttgttggattttaatttttttgtgggttaatggttaaaaatagtcattacaagaaaagaaaagaaagattttactttgcttttaaataatttagtccattgatgtcgaattcagataaaataattttttcttagtggacttcctttaaaaaaggtatattgatgcaccttctacttgtttcgatattccagaataattttttagtcaatttcttttttcatattcatgtatgttaaaatattgtataaaattttgaaaaattcagaataatttacaatatagaaaataatatatatttaaatactctattttatacgcatataaaataaaatagtcacgcgtctatcacactgattgaatgcacttttcggtaattttacaggatgtcttaagtaactacaatttacatgactataaaaaaaattgattaaaaaatatttcggatactaaaacaaataaaaattattagtagggggtgcattatagaattttccaattttattattgatcgggaagcatatggattggtgtagataggttatgatttatttattatatttttaatcaaaattaattaggctcaatagaatattttttagaataaatagaattttttctttcgaactatggccctaattgtgaagttttaatctctttgtgaaattttttcctaaactataaaaattactataaataacccctgtagttatattttgctcagttttaaacaatttgttaatgtaacattaacatgatttaatcttactcaatttaagagttcaattattttgcataataactagagtctatatgatgaattataatattatgtatatgtgttcttagagtattaatatttgtatctttactgtcaataaactaaatttctataattttaagttgttaaataaacactataccatacatgcacactcatggccatttaaacaaattatgttcggaaatatatgatcacaatgtaacttaaggaaaatatttgcaacaatttatttagttcgagtcgaaaataacttttgcaacaaattaaaatcgttcattatttgtttgtttacaaattaatctacaagatatatattggttcctaattaaaatat

SEQ ID NO: 9558 - DNA, 576 bp, Cannabis sativa
atctcaaaataaataaataaatatgattgcatgaaattttaaatatttttaggatttataagtctctatttacaaaaaattacacactattctcattttttttttttaatgttataattttattttttctattatttttatgttttattaatataccttaaaattgtaatcaagaaaaattatgaactaaaatttaaaaaaatattgtaaaatgtaaaaaataattatttaactgaaaaaatatttaatttttggttattgcattaattcttcttcgatgttttggatgaagtttctcaattcaatttaaattcaaatgcctttcgattgagttatctggagtaaggattactctaaggttactgattatttaacttaccgattttcaaaaatggcagaacctcttgttgattactgattatggtccatgtttagatcacactgcatcaactatgtttttttaccagtattgcctcatcgattagggctagaagaagggaattgacattctctatttgcatttaaaacagagttaacgggaaaaaaaaaagagttaacggggttaaaatcaataat

SEQ ID NO: 9559 - DNA, 647 bp, Cannabis sativa
  modified_base (360)..(376): a, c, t, g, unknown or other
aacacaaaataaatcacacaaatcatagacaatagacaatcgaacaaaagataacagaatttccccaacaaaaacaagaaataaacttgagtatgaaattccaaaagaaaaccctcattcttgacgtatctataaattagagagacccaaagaagtgataaccaattaatatagctgaaatcaacaaagctcaactctaaattgcaatcaaagttgatgattcaatacctgctttgagggccgccggcgttgagagaaatagttagagtgagtggaagcaaatcagggttttagggtttacgtctttcagaattgtcctttaagggtttgcctttcctctttctttctttcttttttttnnnnnnnnnnnnnnnnnttattattattattattagttgggatattgaaggctattatctcaaaaattaatttttgtaattaagtattaaaaaatttaaagtttaagtggtttagcggctaatatttttaaaagaaaatatttttaaaattattttttttattttttattttttaaatatttataattattttttaaaattaataccgtctgtaacacttaactatgatttttaaacagaagggtacaaaccaaaacagaatgagagtttagctgtcaatatccctaa

SEQ ID NO: 9560 - DNA, 1330 bp, Cannabis sativa
cccccccatcagccaccaccctcccccattcgaccaaaccaccattcgaacccgacctccccagtccgacgaacccttcgccagcagtgccagtcgcgacccccagtgcttcctcctccgtttacccagaacccgaccaccagccgccgcgtactccacgatatctcagtgccggcattgcattcattgaattttttctgtggtgagatcgttctctcttattttggtgtgtaatattgttgggatagaattctattctaatatattgtgaaaataatgttgaaagtgctacccatttttgattaatgatgataattttagtgttgggatattgcattttgagaatctacactgtttagaagaagaaggaatatcaaaatactttaggattaattgtggtgaacaatgattttgattctagtggtggatattcaattgggatggttgttattgtcacttcaatgggttgatttgttgctaaactcaatgtgtttttggttggttgttgatgttctgtgatattgttgagattgtgtagcagatatctttgccccctgtcacaggttcttgagcttatagttgtgatattgagccatggcaaccaacaaatccaattctcgtaagcgtaaagcttcggccaacacctcgctcacacctccactgcaacaacctatcaacacaatcccatcaacccttgccttgccttctcccactccaataccaaccattctcgaacctacacactcaccaccccgtacacgtccccgtaaagtctcttcacctaaacccaaagctccaactgccaaaacagatccctctacctccaagggccaaccaaagcctaagcgcaccacttccacaatcccaccacctaaacataagcccactactcgtcccaaagccaaagccgaccctgtccgccatcaagagcagtttgagatattgcaaacccgcaaccagttggtcgagcgtggctttctccctgccccagaggctttacttgtctatattacaaatttgattgcggagcacaagtgggagaaattttgtgcaattcctaaacctgctgtggcctcagttgcccctgaattttatgctgcacttgatccaaagtatcctgaagtcgttcgggtgaggggtcagagtgtcccctttcctcctgatgtgattaaagacttatatggataggcagctccacttaaggatgagtttgctatttggaagattaacccagcctctatcccatttgacaccgtccttcgtactgttgctcacccaggttctgaatggtctgtctcttcttcaagccaccgcactttgttacactcat

SEQ ID NO: 9561 - DNA, 596 bp, Cannabis sativa
tttgggagcacgaggttggtgttgtgggctgggattacattattagattatcatacattacatatatgcatatagtattatatttaataagaatagtatagtctctacttgaacatattatattattggaaattattattataaatattattttgtatgtatagtttttataattgtttttatttgtatactttaaaataatttttattttggaagttttataaaaatataacaattcatataataactaacatgataacttaagtcgaaattaaaattcacttaaaaattagtggaataatctaaattacaaatttttaaaaaaatatataaaataattctcttttttataaatattacaaattaaattttttattttttaaaatagtactttgaatagatttttattaaaataaaactttataataatttgatataaaaatattatatttatttgtattaaaaaatttaaaatttgaatttaaattacttagagttttatttatatcattttaaaaaatataaatttaatttatgtctaattaaataaataattaaaatggtagtaaccattgaaaataatagtagtctaaatt

SEQ ID NO: 9562 - DNA, 791 bp, Cannabis sativa
tatgaggcagtaggggacttttttcaatcagggactatgcataagggtctcaatgatacaaatgtagtcgtgatccgtaaggtccccaacccaaaaatagtgtcgtagttcaagcctatttccctctatagtgtggtttacaaagatatctaaaaaatcattgagaatagaattagacaagttatccccaggctgatatgccctaatcagttagcttttgtcccatggtggaacatttagaaaataatgtgttagtccaagagatcatccacacgtttaagctcaaaaaaggaaaagaggatttctttgccataaaaatagatcttgttaaagcctatgataaattaagttagaaatttatagatcatgtgctccgcaacttcaagtctcctgacaagttttgtaattgggtctagcgtgtatctttacaacttctttcaatattttccttaatggaggtaaagttagtacgttcggccctggttgtgacttatgacaagggaatcccctatccccttatctctttatctggaccgctgatattctcttacatattcttaaggaacgcccttgatagtggaaccattagaggaatcaagttgagcaagaatggtgctcggatatctcatgtcttttttcaagatgatctaatccttgtgggtagggccatgatggaagaagctaagggcttttggaaatgtttggagaagttttatgattggtcgggccagcaaataaataaactgaaaaccttgtttttcttcagcaataatactagagaggttatgaaa

SEQ ID NO: 9563 - DNA, 589 bp, Cannabis sativa
tatgaagaaattacatttatctatttttgtacaaaattcacaatttacttaatggctagagagatgccaaatgttgttgtgagaaacaaacacatcaaattgcaaaatatggttcgcattcaaagccctgcaggtaattatttgacatattcttcttttgaagattaaatatataaaaacttatccacatttcatattaatgactcaattagtattgattataatcgtcataaattgtggtttgactaatgttgtcacagttatgatccacttggaaacaaaaaaaatctagaggaaaaagaagaaaaaataaaaataaaacattggttttaataaaactgatttatttatgtatattagacaaagacctttggaagttttgtttggaccaaaaaaattaatttatattttggagcaaaagaaaatgtgattgaaagaagcagccgccaccagccaactttcaactgttagaaatcgaccaagaatcaaaatcatcataataatagaagaagaaaaaatacaccaagttaagaaagtaaccaaaaattaggaggccaaccccaccaaataattaggatgttcactgcgg

SEQ ID NO: 9564 - DNA, 711 bp, Cannabis sativa
gactattgaagaaatctatttacagagtatatgctagatttttcaaacacccagctccaacagtcctctcagtcagaatggctaagtgggatgcccataattagaactcgatctatttcaaaaaagatgtcatccaggatttcagtatcccaatttggctcaccaatacacataagatttgcaactttcttatcatttaaaccatggtgatttgagatgattttcgggttatgcacatccagcaactaggggtcagcggtgatgtttgttttcaactcattccttatatgtattttggcaccaaccacaataatatatttggtttcgattaagctcttccaaataaaacttgggttacagccaagggaggctgtgaaaaaagagccttgggagtgataccttgccttataaactcttaaaaccattgatgagtcattagttatcaatctctatgcttgtttaccaaacattgctaaattatagtctctcaaatctctaaagcccaaacctcctgtgtttttatacttactaagttttgtctaacttgcccagcttactctttgatttttgttttgataatttccaccaaaatttgctcataatatcctccatcgatttgcaagtctcaacaggcaaaagctacatgtaattaagataagacattcttaaatcaaattgctaatttcgattccattatcttccctttaagat

SEQ ID NO: 9565 - DNA, 504 bp, Cannabis sativa
gtctaaatcataaatttaattaaaaataacttaataaaataaacaagtaaatttttttttttttaagaacttaagaagaaaaaaaaaacaaaaagcttcatctctccccaagatcccgatcacatttgtttttatctttttcggttctatagctaggtctctctctgcatgttaacgacagagatctagcgactagagatgggaaccgaaagaataagttttatgggactcttttttcctaattggttctgggggtttttgggatcaagggatgagatgaggaagaaagtgatgacggaatattgattagcgggaagcctccaccacaagaagggtgggtggaaaatcgtagaaatttgttatttttttctttgtataaatgttttataatttttaatataagaaatgacaaattcaaaaaaaaatcttcaacataataaattgagagaagaaagttatcgagagtgagatgttgaaagcacaatgaagagagagagagagaga

SEQ ID NO: 9566 - DNA, 569 bp, Cannabis sativa
tgattgaaagctctcttatttatacgtgagcctaacaccttaatcccaatgcaatttggagtcttttaaatttaaagtttaaaaggaaaagataaatgataagaaaaagatcaaaactgtttctcttctccttttggcttagtatttttgcaatttctatgagaatagagagtttaaaaagaaaaatacaaatgataagcaaaatatcaaagatcttttctcttcttcttttgtctctaattttcgaatggcatgtacaaaaagtaatatgatttcaactcagctaaatctaatgacataagaaatttacaaaaattttaagttttcaaagaaaaagataaaacataagtgaaaaatgataagttaaaaattctcaaatacaaaagtaagggaattcaaagtcctaattatgttaggaataattgaagaactacaaaaaatttgtctaagattatcgaaattgatgcccatctgctagtttcaggagaaacgggctcggttcacgtaatcaagtcaacttcacactattgtaaacttgacttgggggaaaatgttaagccaaaaaattt

SEQ ID NO: 9567 - DNA, 546 bp, Cannabis sativa
ctgccgatggaggccaggctgccgccgagcatatagataatggcatgccagccatggttgtggagaccgtatatccgggagctttggaccaacatagcacggtctcgacccggctggtgagctcattttaatgtccatagaattttattgcaatgcaaatttaatatagaaatgaatgcacttatataaacttaggtttcttgcaattgaacggcgttatatctgtttgaatcgttgttcgagaaacgcattgttaattaagttgaatagaacttgaattatagttaaaaattgattactttcaatccagcttttactatttgcgtttatactattaccactttggtacatgatcatgatttgcgggaattattgttcttcaacaaagtatgatgttttcgattttactatctatgctgtatttactatgttcagtagaataagattctctttctttcgcactgaattcagatattttcttatgtggatagcactgagaaacaaagagcttgattgatctataattgtcttttacattggggctga

SEQ ID NO: 9568 - DNA, 1564 bp, Cannabis sativa
acaatactagtgccaacctcaccttaacacaatatggaatgtgtttatgattacaagcaaactcactatagaaatgtattaatacattgaaagaacctagagtgattagcaagcacacttagaaaaaataaatataaattttcgctcgaaatgtgtgaaaagtgtttgaatgagttaaatttttgggagctcttaattcacttgaaaatttttggtatatggaataaatactcagccaacattttattttgcctgaaaaataaatttatatagcggaataaaatgtagtcgtttatagctattaaacacaaaaattgagacaactacagggaatttcagttcaccatttcgtcaatggtaaactggcttctgggagaaaaggtttaccatttggtagatggttaaccaaaaattaatagagacaaaatgtcaatttgtctgcactaaaaacttataattcctagcttgtttatctgatttaaaaaaaaaaaaaaaatctaattggattctcttagtttaatgatatttgatcttaaaaattaattaagaaaaattagatattatttctgtgaaataacttgtcgcataagttagtgagctaaatttcatacttaaaaatttgaagtgtggacttgcaaatcattgtacaagattaagaactataaataaactttcatggagttttgtcttgagttccttgagttttggagtccactacgggtcattttttgtaaaattatcattttgtccttagagtcaattttttcttaaaatgcttaattatttttaatttattttactaaaaaattaacaaattattagttacaaataataatcgaatatatattttttaatcatcaaaataaggagagttgagagtttagatcaacattaaaaaggtgcatcatattaattaatgctcttcacatcctcatctttaaaatttgggtgtgtgtaacgttaacttgataaacctaaagatattttcttgagtgtaccgaaagaattttagaaaaaggatggtataacttgtgtacaaatttacatttgtattttgtaaaaaagaattgtgtataaccagtgatggactcagaaattttactttgtgggggcttatttatcattcaaaaatatttatacctatattataattattcttattagatttatttaattttatgggggctttttttacaattttgatctataattatcaaatttaaaaaattacatttaattttttaaaagacaatatttttactcgtggagctatagcccccaaactaatacacttgggtccgtcccttgtctttgctggacttcccttgtatttgcatatgttccttctttttacttatatatattttttatagatttcaatacacatatgactaattcaattaccaaaatatgttgtattatggaattaagacttagtaccatctcccatccttcttgtttgtgtagtgtagttgtcgtactaaaatataatagaattggtaggttgtgtggtttgagtggtaattgtaagtactcttcttcgacagatcttgataacatttac

SEQ ID NO: 9569 - DNA, 974 bp, Cannabis sativa
tttcttcctgttcgcgtaaagttggtgttgtcgaagtcgagcaagaaccaattcgagatgtgtcacatgatccgccaatgaggggctgtacacaaggatgtcatcaaagaatacaagcacgcaagtcgctcggacgtctcgaaacacttcattcatgagcgcttgaaaggtggctggggcattgcataagccgaaaggcatcactaggaattcgtagtgcccctcatgcgtacgaaaagccgttttcgccacatcccccggggccattcgaatttgatgatagcccgatttcaaatcaagcttggagaacacctgggctccgtggagctcatcaagtaattcatcaataaccggtatgagaaacttatctgcaaccgtagctcgatttaaagcaacgcaaaacctccagctgccatctttcttcttagccaacaacactggactagaaaatggactcgtgcttggttgagcaatgcccacgcggagcatctcctgaaccatcgtctcaattgcagccttttgtatttgagcatatctatacggacgcaccgcaatcggacccgtattcggttgcaaggtaatagtgtgatcacgaaagcggggtggtggtaaccccggtggcatttcgaagacatcctcataccgatctagcaactgaacaatggcaactgggggcgatggctgagtgttcgcctcctcagcagtcacattgccaaaatgaacccaataagcttcagccccatgatccattgttaacatcaaagccttcaaagaaattggtgatttacataaacttggatcgccttgtagagtcacccatgttcccgccacttcaaacttcatcaccatcgatttccaattaacttgcatattctccaatgtttccagccatttaatccccagtataacatctgcacctcccaactctaaaggaaggaagtcggtgatgactcacaaggcccccaaatctagtt

SEQ ID NO: 9570 - DNA, 633 bp, Cannabis sativa
aactagagtgtgcttgacctgatttttgaaactattctatacagcatatgaaatttcacaacttagtagtcggatttatccaaatgatcctagatgtttcagaatggaggttggccagaacattgaagaattcaacaaaactcagaatgttgtaagaagcctttctttgttaatattgtttaaggtctttggttactattatagtattcattcattgaacatataggcatacatatagattagttacacacacattttaactcgaaaatacataatcaacttgaatttgacacagctattcgaacttcacttacatatccttacatattgatgaagtatatgggattttgagaatcgggatttcgaactttcaagtctccttatcgtgttaaagaaaaaggcggtgtggagatgagacactatttgctactaaaatagttcactttcaagtctcctcgtgtcttttgctactaaaacttgcactgtgtctttcatgttagtcgtaattttaatattgttattcatgaattaggaaagtatacctttttagatagacgatgagttttcaacataccatttttacccttatatattaattttgctttatgttactaaaacttgtcgtgtctttct

SEQ ID NO: 9571 - DNA, 722 bp, Cannabis sativa
tgggtgcttgacccagcgctagctctacctgggcgttgggccttatttcttggggctcgggattgtagttttctccccaagtttacttgaatcttcaatatttctgatgacaaaaaatgcctgaaatactttttgttgaactggatcggaaacaacagaggttggcaatatgtcaacctgagcgctgggtctctcttttggccctttgaaaattccatttggtccccaaaaatatttgaatcttaatattttctaaagatggagaaaatttgcaaaattattcctaaaaaactccaccttaaatggcccaattgacaaaatgtcaacctggcacatggccagtcccaagtgtcaatctgggcactgggcgctattatttatgcccaaaaattattgttttttcctctggaaggacctatttccccatttatgataaagatgaatatgattcaaaagtcaaatcttcgattggacacttggaaggtgccccagattgagagattgtcaacctaggtgctagatggttggggtcctggggctccaagtgctcaaatatcaacttgctttgattttaattctgatacctcaaatatgtcagtggtacgtctagttgatgttctaatgcaatttttgactattttgtgctaagacggtcttagaaactaaaatcctagttgagaatgttaacttggtcgtcgggtgaaaccttaggtgtccatgtt

SEQ ID NO: 9572 - DNA, 1324 bp, Cannabis sativa
tatatacatattttatttttgatttcaagcagaaaatctccattatggattatatatataattactatattaattatacatatattttggcataaaatatatgtataattaataagaagcacttaattggattgatcgtcatcagtgagtgaatgtgattgtatagacaaattgtttgatgtgtattcaagctttgtttagttctgtctctttaccttcccagtttgatttaattgttttagattgtaaaagtcttttactttctcttaataatatttttgtacgttttgttaagcgatttattaacaaggccgctcattatattatgtgtgcttcttgttttttcccaaatcgtactatcctggagggttctctgtctcctgagatagttgccattcttttgacaaatttttcagtttaataattactggtattttcattaaaaaaaaattatacatatattttttgaaaatgccatattatacatattactaaatcaataaagacatttccatattggtttaatttattcaatggtagcattgatttttttcggatatatacaaaggtctataaaaatataaatatataggtggtccaatgcaaattaattaattgaataattatatatgtatatatcttggtaacaaaattagctatacctatatctctctcatcaagataaaacctatatatataatagagtaattaaatattttcattattattttttttatttttaaaaaaaaaaaatataaaacctagacaaaaagatactgaatatggcagttgagagatcatcatgtacatataatatataaatgtatagatatagcttgcaatgagatcgatcatagatccaaaatgatcatgatgatcaaagattattaatttagaatcacaatgcattggtaatagtaactcaataaatgtctcataactaatattgttatagctaatttctaatttgtttgtatatatatatatacatttatatatatggttatttatgtagatatgactagaacaaatgaacccaaaaaaaatgataaaaactttgtatattcctaaatgggaaaatttaaaaataaagatgataaaaagtttgtaatatatgttacctatctatatttatatatatatatatatattttttttaaaaaaaagggaaataataaaaaaatagagaataaccaatagaagaaaaaaggggacatttattcttgtttgtgtttctatataaaggactcccaaacacacccccaaaacacatcaatacattccaatgttccattttcaaccaacaaacacttctctctctctt

SEQ ID NO: 9573 - DNA, 1057 bp, Cannabis sativa
aatgaccgttgttcttatttacatgggattcttttaggctcgctttgattgttggcttctgaattattgggattgtaagtctcactgagaaaatatttgaagtcaactgaatgaagttataggaagccttcccatagcgagataagcacctcccttattaggtttcgagtcagcgtgattgtgacacttagtttgtacattatgcactaagttcttctgcagttgatatgggtctcttttatcttcctagaagtaatgtacttgatgcctcactatttacattcaacgcatatagtttctcgctaatatactaagcaacagtttgtatattgactcctcgcataagacgttacagttagcaggttataaatattctctgatacttacataattaatgagttattccataaaaatcgattgcatcgtccatattccttttatcatgacatgtgtcttccactgtgatggtagccgaatttcgggtataacatatatatattgattatccaataataacaaaaagtttatttttttaccgatctatagtatttttgttgtatttttaaaaaaaattaatatatttttttacaaaaatatgaaaggttattttttgattattttcaaaataacataaatttttacgttgctcctataaaaaagcaatatgaaaataatttttattttttcaaaaagaaaacaagtgaaaaatttgtaagaaatagaattcgtaaagtataaaaaaaaataacttgtaaaaaatttcaattttatgtattttgtgtaaattttttaaaattattttctaaaaactatcaaacacccccgatttgtgttcaaaactaattttacttttcaaaaataattttttttctcaattattgttcttattacccagtttttgttttttgaaaactaccaaaaaaaataaacaaagtaaataaataaaaaattaccaaacaagtcctaattttctttgaaagcttttaccacatttatttcctctcatatttcattcctaattaggaatgtcaatcgggtcgggcccagcccaagcagc

SEQ ID NO: 9574 - DNA, 853 bp, Cannabis sativa
atcttcacttggtatcagagccaatttccaggcctctgtagatgtcgacgaatcaaagccaaaccggtcaggctacaccagaaaatgctggtggtggaaacactcaaggaagctccatggcacatgtcagttcatcaatggctgctgcaccattcaccctggcgactccattcagcaatacattgagtcagccattcactatcaaacttgacaggaacaactttcctttatggaaaacaatgatctacactataatccgaggacaccgacttgaagggtacctcaatgggcagaagccatgtccaccggagtttatctcagtggagaaatctggtgaaaatgaagaaatcaccacagaacttcaaataaatcctgctcttgaagcatggattgtccatgaccaactcttaatgggttggttgtatggatctatgtccaaagctattgcctccgaagttatggggtgcaagtctgctgcagctctttggacagccctcgaagaactgtatggagcacattctcgagccaatatggacgatttacgcaccaaactccagactacacgcaaaggagctcagtccatgacagattacttgaagatgaaacggatgtgggccgattctctggccctagctggagatccatatcctgaacgacatttaatagctaatgtgttatctggtcttgatatggaatatctgtcgattgtcttgttgcttgaacacaggttggatttatcttggcaagaattgcaggggtctttgctcagttttgacagcaaattagagagacttggtgctgtctctcctaccaacaagggtttgaacagtccctcagccaacatggctcaaag

SEQ ID NO: 9575 - DNA, 521 bp, Cannabis sativa
atataatatttgaatattatcaatgggacatcacaaaaatcttactttattgattttactactttttacttcgtacaacagcatctgcttttatatattttttttccagcacatcatttgaatattatatttttaatgtattttattattttaaaaaataattggatgtactaatagttttatattacacatatatattgtgaaatataatgatttaagctataaataacctgtcactatgtgtaggccaactaagtaattaaggtaaaaaaaaaaaaaggaattttttctattttaaactaaaattactcaaaataaacttttatactacaagaataaaaaataaatatttataggatttaatatttactaaaatattattttttaaattttttatttacaaaaatataatagagaaaaaaaattaaaaatgatagttattaggcaggcgcgtgaaagacacgcgtgacttaagaaaacactcaaacaaattaatagatgcaagttattaatcgacacat

SEQ ID NO: 9576 - DNA, 804 bp, Cannabis sativa
agaggggattcgattttgaacttcaatcaaaagacgttacagggcctggagtttaaattgacaatgcccgaaaacttctttgttccatttactgagggccttggcagtggagagaagtctgcggctcagcatgaaactatcgagccccactatagcaatgttccaagcttcctcaattattttccgacatccagggtcacggctccaggcatcaaggtagcgaaaaggcgtcttcaccacttctctgtccatacgagtgtctaaaataatggcgccatggtccgaatgtctaacagcaagatttctaacccctgcttttttaaaataagaaatccaggcagcagacacaaccacacgatccaacttctcccgaattaatcttttccagttttggccattggaccaagtaaagatagccccaacaccctccaagtcgatccctcccaatttgaacatgaaatcacaaagaccatggccttctgctctggttacgggacagccaccacatttttcttcagccgagagaatggaattgagatcccccataacaatccaagggcaagaataattactcatagtcacagataactcttcccagaaatccaaacgcaaagcacgacagggaggagcataagtaaaacagctaatccactccggggcattcctatcttcactaaaacgaacaatgatcttatgaaaatccgcagagaggatttgaagattccacccacgcctccagaataaagccaggccaccagaatttctaacaacagacacagaaacgccttccaagaaacccaatct

SEQ ID NO: 9577 - DNA, 1012 bp, Cannabis sativa
agggcataaaacccaacagaatagtgtgcaaacgtgagacgtgtgggtttagtggtctttggtgtgtggatctgtgtgttttattcctcattttggcctcttctcttgttggtatctttgactttggtgcagtaatggaagtagttattgctaacaaacccactactaagggtaaatgctactcttgctctgaagcaactgtcactctatctcctagtgcttcttcactcaaagctttaactattttttgcctttttggtaaagttgtggcccctatgagtgtggatgttgccactgttaatgattttgtggaaaaaacatggcataaccatatgtccattgtggcaatccctggtgaggcattaaactctaattattttgaacttggttttaatgatgaggaggatcgtacttgggctttggagatggatccgtggtgcgttagtgggtacaccttcattttgcaagcttggtccccgcgggaagaaggaacgctacactttaaccacctgaaactttgtattcagatacataaccttccccatgagtatttttctgtggataatggtaagctcttgggtagcctggattgtgaagttattcaagtggaattagacaaagacaaaccggtttcgtggagtgactttctcagagttagggtggtaattgatattgccaaacctttacattcgggctgtttctttgagttgagttcaggggttaagaaatggattcagttcaagtttgaaaggattggtattttctgctacaactgtggatgcctgggtcatcaacggcgagggtacgccctctctacccctgtcacagtggagaaaggaaatggtattccctttcctctttttggtccatggctctcaacctcttcaacatatctagatgtgttctctaagggctaactcgttcgtgccaaatcgtgcatcttcggtgatcccctctcctagtcggtttcccggtggtgctcctacgaaggggactggtggtgggctcgcgg

SEQ ID NO: 9578 - DNA, 577 bp, Cannabis sativa
caaactccttcagcaaagaacaaacgaatcattaagtatattagtgcagttataatatttgattaagtgaactaagccaatgttgaaaaatttctagcttagccaaagttttactacgttttaagcaaatttacatgtttccttattaatatccatcaggcgcataaggcttcaatcatgctcttaaacttttctgaccgttaaaatttttctgtgaactattgagattgtttaatttaaagaaatttgtccaatttcatttaattttactgattcagtgattgcttatgtactaaatcatgctcttcagatttgatgtctgccaaatcatacccttcaaacttaaacatgtaccaaaccatattccctaaactttcatcaatattagactttctttattaaaattggacaaagatctataaatctaacaatctcaatagttcaaagaagaatttttaacgaccttaaaagttcaaagagcatgatttagtacatgtcaaagttcaagggataaaaatcttaattagccatagaaatatattacctttggaacattgtctgaagtggagctcgttcc

SEQ ID NO: 9579 - DNA, 882 bp, Cannabis sativa
ggcctccttcatctctgattacagcagcaatgccatatcccgcctggccatgcctgacagcagcatcacaatttagcatatatgttccttcatgaggagctacccacctgtccctcttcttcattgtcttcatgtttttgcttttggtacccccctgcagtatgttagaaatgtaatcaagagcccaaggagtccaattttccattggagtattcttgttttgaaatattctttgattccttcggttccaaaccatccaactcaaccccaggaatatctcaaattcctctttagagctgttttttctcatgtaaatgaggaattcaaccatgtccgtcatcaacccgagatctttaggaaataggtgccagaattcggtttctctccacacacttttcaaccttggacagttccaaatagcgtacccaatggtctcaacgtggttctaacaccccgtacaaattctatccattttgattcctctcttcaccagctcactttttgtagggatccagttgtgacaaactcgccacacaaagttcttcacctttggagttaacttcgagtgccaaactgccttccaccaacttctctctatctctttgtttgacgtttctgctttctgtttctcaagttgagttagtacatatccgctagctaccgtgtactcaccattgattgtgtaatgccaaagaagatcgtcctccccacactctcttcgggtttggatccccaaaatccaagggatgtcatcttcatgtatcttttcttcaagagcctctatattccaatccccattgtcattcatgagcgaattcacataggtattgggggggcacctttgccggggctcgaagaagaaaaggagctcctctaggaatc

SEQ ID NO: 9580 - DNA, 854 bp, Cannabis sativa
caaacgatacaaagatttctgaagcctacacattgtgcctggatcagaagtttcaaaaccaggaggaagtttcatatacacctcctcgtgaaggtcaccatgcaaaaaggcattgtgaacatccatttgatgcagttcccaattttttgaggcagcaatggacaagaaagctcggacagttaccatctttgctacaggagcaaaagtttcattgtaatcaattcctccaatctgatgattgccaaagacaactaaccttgccttcaatctctcaatggtaccatcagagtggtacttgattttgtaaacccatttactgccaagagccttttttccaggaggaagagaagtcatagtccatgtaccgttatcttccaaagcgcggatctccatttgcatagcatgacgccagcctgcatctttcacagcctccttgaaagactgtggttccaccccggcagtaacagctgcaagaaaatttcggtgttttgcagaaaagttgtcacaatttacataatgtgctataggaaaaggcgtacctgagggaggagaggaagcaggtgaggagggagatggacctttcttaatcactgtatgtgtcacaaaatccttcaatttggaggaaggaattttagttctcatacctctacccatagttgaaacatgagagtcagcagaagcagaaggagagtcgtgcaaagcattagtataggggatagcttcctccacggagataaaaggtgactgtgttggcaatggcgatgatgaattgggctcactagaagcatcgattatttttcccggtaccccaccctcatcgacataatgaaaatcaggtagaaagggttcagtat

SEQ ID NO: 9581 - DNA, 1193 bp, Cannabis sativa
cttactcggtatttcccctttgcggacatcgagcttcaaactgacctgtcatatgaagtacaactagttcagatcctggacaggatggaaaatgtgttgtgaaacaagactttttgctagttaaagtgttgtggcagaactacaaggttgaagaagtgacttgggaattagagtcacagatgcgggagcagtatcccgagttgttcaggtaaattttggggacaaaatttctataagtaggggataattgtaatatcccgaaaaataatatggtatttaattagacatattttcttaaatatgtaattattttgataatggagtaagattatgatcttacttaggttaaatggtgtgaatttagtgaatgattaaataaagtgtaatttattaattacggagattttactagattatgtgggtatcgtggataccatttttgaagtaaaatatttcaggcccggcaaccgtgggaacttgacagtgtggtcaaagatatcacgataataaagtatggattgaattggatttaattttgaactagtttagagtgttaggttgtcgatttgggtagattacttagaattactaaaatacccctgcgcttgatttcttttaagttagggttatgaggggcattatggtcatttttaggacagaaatctattttgtcctatatggttggctgaaatgatattaattacataagttattatttatttacttttatttatcactaagttatgaaaattaagaaccgaaacctaggaaactaagaaccattccatatatctttctctcccctctaatggaccctagaaggaactaaagcaagctcagcccagatttgtgcttaaactcctattaggtgttcttgaggtaagtctccctcctagtctatggtgatttatcattgtttataatgggttttggttagaaacatggtgatttcagggttgtttggggtagcttagattttgagcttatttctaagttattttagggtttgtatgatgtttgtggtgtgctgtatgactgattaaatgtaaaaatagcaattttcatttatttaagaacttggttttgagcctagtatggtgaaattgataattggttgaattgttgtaaattggtgcttgaaatatgttgtatttgtgtaattacactgtactggaaagtttgattaggtttgg

SEQ ID NO: 9582 - DNA, 596 bp, Cannabis sativa
aatattaagaaattaaaataacttcagaaaaaaaataagtaaattttccattaaaaaattaaaaatctcctacaaaaataactaaaatattaataaaaatctcctacaaaaataactaaaatattaattaaaaaaaaaaagcagtttcatatgaaaacatgaaaaatgtgtgtattgacatgattttttgtcagattaattgtaaaaaattagacgattccaataaaatattttggcaaaataaaaccgcgaaaaataaaggtgacactaggatttatatagtagttcatctaggtttacatcatcttttattaatttaatctgatatactaaagttattttctcaagagtgtgtatacaataatacaattagagatttctagacaaaatctgtatccaagtttatgaacaaaaggctcatgggagaacaaatactcataaacttgatcgcaatagtagtggtgatcaatgttcttatgaacagtgaaccaaaagagccaagaataaagagtgacccttcttcttggtagaataatatttgaagagtcaatggtgaatgtatgatgaagatgatgtcgttaaagtatgaagaactc

SEQ ID NO: 9583 - DNA, 549 bp, Cannabis sativa
tctggtatataaacttcagtcaagtcatcaacatcttgagtttccactgctggtgtgggacattgtgatgcagagattgatggggccatattagtggtctgcgaaccagttgaaagggtggtatgattatgtagcaaagcaagtgtaaacataacctttgtggtttatgtcgaattaaatgtggcgttattaggaacattcctcgtggacaaagcaggctcaggtgatgtagcagcaatcctaaccacgtcgatggggtcatatgtttttggtactgaactagagtgaagtgtcttagaattggtattttattgatgatgagatgattctcctggtaatggtggccaaggatgaggtgcttgtctattggagaggtttgggatcgcaatagtaaagaattttcgagccaaacgcgttaatagaggccaagcatctccttttgaaaaatcggttctgtacctgtcataaccattgtttggtagagcagcccctttcaatttcggtccatatagtagatcaggttctattccattatcaattttttccatc

SEQ ID NO: 9584 - DNA, 618 bp, Cannabis sativa
tcttcagcgtttagaaaaggtaagctttggttatgatttcacttgtcgcatgctgttttattgggtcattatagtcaaattataaccgcataccattaacgaactacatggatggtgatgatcattcacattttcccattcctacatgctctctattatgactttgatcacaagccatgacaaatggaggccttgaccttatgatgtgttgcagaaaggaggcagtggctttgtttcctttgtgtttgtgtcagaaaaaatatggggaggcaattttatttggttcattgtcattcaattgttggaattattgtagtttgaatagaaaacctaatcatactgtgatggtcagtccatgccattttattgagtttttatctggagtaatctttatagcatataaggagaattttgaggatggacatttttctagtatgcaaatgaagattgataacgatcggttttggacatttttattgaacaggaggagcttcttataatttttagcagatgtttttgctttgtctgttttgctcttttactgtattacatattatgtctgtttgaaattaggcacaaatcttgagaattttaagtattttcaggaagacaagacaa

SEQ ID NO: 9585 - DNA, 924 bp, Cannabis sativa
gcttgacaacaccaattggggatcccctcatggacttcgggggaggattaatctttgtggggaggttctcaaggagtggaacaaggataagaaggcggatcttagggctagaacaaaacgacttaaagaggaattgaaaaatctttctgcttcaagtggggttacggactggaaactacaaaggaatatagaaagagatctgaatgttgcggaggaaaaggaagagattctatggaaacaaagaagtagggctctctggcttgctcacggggaccgcaatactaagtatttccatcataaggcctcccaacggaaaaagaaaaatgcgataagtgggttatttgatgagcaaaggagatggtgcaaaaaggacagcaagattgaagccattttgattcgttattattcagatctatttacctcgtcaggacataaggagcacttgactgatactctaacccggtgtgtgccaaaccggttgtctcaacaggataatgataggcttttggaggagttcacggaagaggaggtcaaagaagctatcgaacagattcaccctctcaaagccccggggagagatgggctgcctggtttgttttatcagaatcattggaaggaggtgggtaaagaggtcataaatacttgcttggagatcttaaataaaggtagggactgtagctgcctgaacgatactcttctatgtcttatccccaaggtgaagaacccgaccatggtaggagacttcagacctttgagtttatgtaatgtcacatataaggtgatttccaaatgtcttgccaatagaatgaaagtacacatggacaaagtgatttctgagaatcaaagtgcattcatcaaagggagacaaattcaagacaacgccattcttggtttcgagagtctccattgcttaaagaagggtcg

SEQ ID NO: 9586 - DNA, 647 bp, Cannabis sativa
tgctcgttttatttttgtttagatctcaagtgtctttatgctatttgaattttgtttttgttcgaatttcaagcgtctttgcaccatttgaatcttgtgggattaactaactatttggataggtgtggatcgaaatcccctagagaaatgattctaataccatgttaagaaatatgagattctatctcaaaatcaattggtaataagtagagtagctcatatttttataaatagttcaatatatttacatttaatctatgtgagataatattctccaataagtattgagatattttcctttagtcccgctaagcgtaagcctcgagacgaattgaggtgtgcacctcagcaataagaataaaaacttcataaaataggcttacacctcaaaaataagaagaaaaccttcataaaataatagaaaattcataacaaacaacacataattcataacaaagttataaaattcatgaaaagtactagttaagcgtaaaaatgataaactaaattcatataaggttcaattactaagttctaaacatatataaaaatatattcatcattccaactcaaatgttaaagtcatgatgatcgtctttatcttcttttgaaaagtaaaatttcataacttgactattgtctatata

SEQ ID NO: 9587 - DNA, 1117 bp, Cannabis sativa
tcatatttatgctaattaattatatggacagatttacgcaaacaaattctcttaatctcttctctgtgctatatagtattaagtcaatgataggtaaatccggcccatgattatttggtgaattaagccaaatcaacggtgtgtgtatccatgcatgagactcatatagatgaacttggtattaaccaaaaaaaaaaactttctaaatgctgaaatataaataggaagtgtattgatagaccccttctaggaggtgcattgtagaagcaccttttcttttagtatgtaacttttgttttaaaatggggtacctatttaagctagctatttaattttgaataaaagggagcattatggtatttttcaacatttgagtttttagttattattattaaaaatggtaaatagcgatataagtacacaaaattttaagtttgtaagcagcatatattcaatgttcatctttagcggtataagtactcaatgtttgtgaaactgtgattttcctctaatttcgtcagttcaaattctcttttgaatttgttaaaagaacattattagaaataactgatactacatgtttctgtctatacccaataattaaaaatttagatcttatatgtgtcatatctaaaataataacagagtctttacccattatttatagctctatttaccttaataataatattattgtccactcacaagacaaattaataagtgaatgtacaataaattaaaaagaagcaagagtttttttatattattatttattttagaaagtttggtggagagttacaaataaaatataaatggagatttgctctaattatacaatcgatggcacttcattataacatcatggagagttatatatatttcttaattaatagcttaaattaaactacaaataattaaatcccttgtaatacataagatcttgatcgtatacgtacgtaggtttcttcaaaccctacgaaattcacacatgcaacaatcaaaacaaaacaaaattaaattaattaatgatataattaaacataacaatatatattaaacttcaaagttattattatattaattattagcaaagttacttactgagtgaacttgatgt

SEQ ID NO: 9588 - DNA, 1109 bp, Cannabis sativa
  modified_base (108)..(111): a, c, t, g, unknown or other
tttattatatattattagaaattaaacaggtggcgtttagtttggagatataaaaatataagaataaaaatgataatgggaattggaataggaatggaatggaataannnntaaaatacataaaaaaaattattaaaatttttcaaatcttgcattgaaataatctttccttatatttcaaaatggaatagtcattccaccaaaatagtagaaaggtcattctattgaaatgatattctaatattttaaattgtaagcaaacaaaggaatggaataaaaatggtttcctttccatttcattaaattataaaacaaacataaaatgatgaaacaatttaatatactctattaaattattaaaataaaattgtcataactaaagttattttgacaaaaaaaaaaaaaaaaaagcatagggttcatttcgctaatatttgtaaaatttgtaagaaataattttcagataccttaaaattaatcttgccaacttgcatacgttaaagaactttcattttcaatccaaaaaataaaacatagttaaataaaataaaaatgccaaagttcgatatttggtgagagaagcacaaagtccctttctttcactcaagtttagcttttgagaaattaatgcctcttaatttgtctcacatatttatacaataatatttatttattttaattagatataattatataatatatttaattatatgggttttattcatgggtttgactttttgttttgggaaattcttattatttaaatatgatataatcactccaactaaaaacactaacactaccacaaaatagagcaaaatataattaaatagagggaaagctttgcgtgtgtagttcaaatcttactacaacttggattggaacctctaataattaattatggtatcaaatttgttagataattactaattaaaaatgtcttaatcacaactgttattttcaacttaatatttaaggtttttataccataacatatataaatattttgaaattttgtatatttactatttgttttggtatttagaaaattgtttatgtctgttttttttttcataattaggtacgttattaaagattacttgaataat

SEQ ID NO: 9589 - DNA, 1050 bp, Cannabis sativa
tttgaatccttcaattgaactataaaatgatggtccccatacatcagtatgcacaagttgaaaacaagaagtagttttgggaatagaactactaaaatgcatactatgtaatttgccatattgacatgcttgacaaaatggaagagtattacattttattgatgaatgtatactacataggacatttttgactattcttgtggaggcatggcccaaccggtgatgccaaatttgagcttctgagaaggcagtgggagaattgtcttgactgcaattataagcagcaggagatggaagcagtctcttgtaatggtgagtgtatttgacatcaggttgagagagattcaactgataaaggccatgcttaagatggccccgaagaagtacttggcccgaaatcttgtccttgattatacatgcattagaatcaaaaagaaaaattatgttattatctgttgtaagctttgatatgcttaacagatttttggtaatggtaggagcaagtagtacatctttgagaactaattgtttcttttcatgacaagtaggaaatttagtttggcctatatgagaaattgagagtttagaaccattaccaacggttatcttggctttgcctttgtaatcttgagctgtattgagattttgagcatctgaagtcatgtggtgggtggctccactatccacataccagccattatcctctgctgggcaatttgaatcagaaatgagtgcctgtggtgtatgactttggggctgtgaattatttgaactggtttgaggttcattatcatagcgatgataacacttgtaagcaagatggccaatcttgccacatatttgacaaacaggtcgagaaccacgaccacggccagtagaaccaccacgattgttatactgagaatccctgctggacatatgaccacggccatgtggttgtcctctgccagaattggggtttcgattggacgcttgattatttttgttgtattgagcataatttgcttgtactggatcgagattggtcatagttgtttgttcgatcctcat

SEQ ID NO: 9590 - DNA, 817 bp, Cannabis sativa
tgtgtggcgaataggttcaaggtaagtaaaatgtataaaaaaaattgaagaatgaagctcatgtattgtttgtgaggactgtttgatgtaatctatcagctccaaaatattgtttggtgcaagcctttcatggtcattttctcataggagacaatcttattaaaagacaaatgtctattgatacacccttttattcggtatatgagcttgaattggagagtcattcctatctatttttctcttgtccttactcttggcaagttatgcaactcatagggaattagcttaatagtaaactatggccatgtgattagaggattggattcaatggatgaatagcaggaagcccaagagctttttgaccgatatgttttgtgtggctatggccaatgctatgtatagaaattagttgaatcgaaacttgtgtgtgtttgagcaaaagtgtgtgcctcctcattgtattgatactctagttaaagaaagtcttaaaactagagttttctttattaatgaaaagaaaatatctagcttagataaggacgctttaaagtttgtcaagagcttataggaatggtatgagttgaaaggggtatgcccagatgaagttgattaattgattaatgacgttctttccggtaaaaaaaaaaaagaaattttagttacattaaaaagtttcttgtgaattttagtaatattgagattcgagatatcattaatttaaatttagtacaacacgtattgaaactaaaaataaatttagtcacacagatttacaaattattttatacatggcattgccacttagtaatgtgaatag

SEQ ID NO: 9591 - DNA, 581 bp, Cannabis sativa
acagatataaaattaagataattaattaattaaactgatgctgtatatatgtatccaaaccttttctgacgccatgatcttctaagccgctgaaatttactgtagatatacctatacgtgtgttaatatacacacgtgtgtatacatatagatatacataaatattaattatgctgatcaaaacaattgaactaactaagaattgatatatagcactgcactgtacagtcccgtggaccggacgccaacctatctcggaagctaacttgaccataaatccaaaataatccaccgccggccagaaacaagagctgatagagatttgatgctaataatataaatagttctatgattatgtgtgtatatatatgaagaaattttccgttgtattaattaagtcctcttttaggaagtacagtttctataatgcagtacaatatgcatccgcagtacacacatgactacgtactttaattacttatacctaatatatttttatggagagtatttacctaatattaatattgttaacttaccttgagatttggttaattagaatattgggattttttttattttta

SEQ ID NO: 9592 - DNA, 516 bp, Cannabis sativa
gaaaaaggacttgggataaatgttacctagaatttttttaaaaaaaaatacgtggcagctcaggaacaagccaggtggcaatagaaaccacactacaggacacaccatcttaatcactcccagagtttatcagttcaaaggaataatacagattggtcatctccgggagggtctaactagacaatcggtatatcttcatgtctcttcttctccacgagtgaattcgacctggaggaggatacagagacagtagcacactgcttgaggctaaatcactaaatacacatttaattcgacatggaaaagagcattcgacaccttacgctgaacaaatgtgctcaaagatttaaactcataattctttgatttcacgataccttatacatcaattaacaactacataatgaactgtcaaatcataaacgagagataagtctaatctcaccaaatacctatagacaaccaaatatatcatgaaaagtaggtaaacatgccctaagatcaaattgggaaatt

SEQ ID NO: 9593 - DNA, 716 bp, Cannabis sativa
gaatgagaacgagataggagattattaaatcaaaaatttagaagttaatttctaaaaatttagtttagaaattaattctattctttatcatttctttctatttttaattttattcatgtacatttattaactttcgtcattaattaatgatgcttagatgagtttgaacatcttaagtatttatctgtagtaaagtaggttgtattgtggtcgaatgtggtaaattttgtattgctagatgttattgtgattgtttaatatatattgttttgaattatgttttattgttattaataacttttttttgaggaaaatatttaattatgaactagttactacttagtaatttagttactatttagtaatttagagtattagttaatatagttagttacaatgttagtaattagtagtgtaataattaggataaatattatattgttatactgtgagtgataaggaatgatactattgagtgctaaggatagatatagtagactaaaaaaaagagttattgagatttgaacctgtgataaaaaaagttatattgttaagtacttaccaccatgccaaaagactcttattgtataaattagctaccatgattttatttaaatattagaacagataaaaaatgaaattagtattacacatttcattgtagtagaattaacaaacacaacaacatatcccctaattagcggcgtgtgatccgc

SEQ ID NO: 9594 - DNA, 772 bp, Cannabis sativa
agtcaactccttacatttttgtagcttcagtcataaacctgctaacataagctctaagattttctcttggcattttctttacttcgaccaggtcttcaagatgcatgggaagttgacgagaggaagaaaattgtgcatggaactctgataagaaagcattccattaattaaccttcatggaggtaatttcaagtaccattattcggcagcctctacgagtgtggctggaatgattctgcaccgtacaacaccccttaccccctgcaagtccatctgcatctcaaaatacttcagatttgataaaggatcttcttttcttgtatacattttctagattggcattttgaacattaggggtaattcaaggacttcaatttcatggaagaagggtgatcctcttgcccggtgaagttcgaatcagtgagtttcgggccaaccaggccttgtaccatctttttaagttgatctagttgtgcttgcacagatggataaactttttcatcttgttgatcgacctgtgtcacattgggatctctttgaaatggatctaggatacggatacatagttggacagttggtgggacgtgtagttcttctaggcaccttctttgattttggtcaatcttgaggtcatgtgcagcacccaacctatcaagcaccgaggtaccaggtggccttggtgtatgacttgtttggtcgataggttggcctaaaattttcgcaagggtgaatttggtgtttataactcctcccaaacgacggtctggcagga

SEQ ID NO: 9595 - DNA, 646 bp, Cannabis sativa
gacaaaatttcctccaccaatgatgctaattcacaaaatctcatttcggccccctatacagctgctgctgtatatgatgcactaaaaactatgagtgatgacaaaagtccaagaattgatggcatgtcggtgatgttcttcacaaactattatgacattgttggttcacttgtaactgctgctgcattagatgttctgaatcatggtgtcgatccaagtacctttaatacaaccttgatcatactcattcctaaagtgaaaaagccaagccacattacacaatataggcctataagtctttgcaatgacctctacaagcttgtttccaaagcaattgttatgagactaaagccttttctcccacaagtcatttccgaataccaaagtgcattcctatcttagagactcataacggataatatacttgtggctttcgaattactgcactcacttaagaataggaaacgaggctcaaagggttatgcgacaatcatacttgacatgagcaaagtatttgatcgagtggaatggttttttgttgctcaaaccatgatcaaaatggggttttgaacaacaattattgatctcatccttcgctgtttgaaatcattcacatactctattttattgaatggttctattcaag

SEQ ID NO: 9596 - DNA, 848 bp, Cannabis sativa
  modified_base (253)..(272): a, c, t, g, unknown or other
tatagatatatatgatctgtatgagagagagagtgagagagtattttatatataaatatatatttgattttgatattgtgtagagaaaggcatcattgtccattgaggcattatctgtcagaactacttgctcccttaaacatagcccataaaaaatagcattgtaatttggtagatgtaaaatggctataaggttaaaaaaaatagctaggagttagaagaaaagataaaaaaaaaaaaacacttttaatannnnnnnnnnnnnnnnnnnnaaattagatgagttaaaatagtaagaattattttatttttagtgtttagctataattttttttattattttgataatgtattttaattaattataagtgtaaaaataaataaattatttaaatagtttagagaaaattataaagaagttaatgtatggtataatgtaaatgtgtgagataaaataaaaaaaataaatttcagtgagagaattgtaattaaaatacataaaattcaataattaattgtactaatagtaatattattaaacaccattaatattttttagattttttttgttaaggtttttcattggttattgagtcttccatggcttttttttaattggtcaaacctaatttttaaagtttttttttttttttactttagattgggaaaaaaaaaagagagaaaaaaattattaaacaatggaaaatgatgtatcaaaggagggatgaggaaaaaggaaaagaaaaaaagaaagtgcttttatcaattctgtcatggattaggtgctttaactaaatatcattaattgccaaatttggaaatttagttgcaaaatgaatgaaaagaga

SEQ ID NO: 9597 - DNA, 880 bp, Cannabis sativa
tatatgtgtcatcgaattatgaagttattattattatgatgaaccttttcatatttaatctatgacacctactttatttaatttttttatatattgttattatatgtgcccatgtagcttgatttgtacttgcaattaatatctttgatttaactattagatctggtgaataaaaaaccattaagacttcacttacaatttcatttggaggacctaattttatatatgtaattaaataaacatatctatctttgaaacataaatatgatcaattcacacataatttctcatgtttaatctgaccctattaaattaatatacattataaatgtttttatatatatatatatattagaatattagttgtaaaaattaagataaattgagtttaattatttcttatttgtatttagtagtttcccatttattctcctaattttgtatataaatatatactattctatgaaatacaatacacaattttatccaccatttgctacatggtatcagagccataattgtgattcgaaattcgaaattagaattcataaaaaaaaaataataataataaataagattaaggtttgagtttagggtccttttttcaaaaatcccagttggagtgcaagttttttctcactgcccacatagacggatagcccaggcgcatggggctcacgtgcatgccacttgaagcttctacgcacatgtgatggggcgtggaagcgtgtgtgacgacatctttgacagcgttcttttgccagttcttttacttgtttcttctaagctcactcgcatctgtctctggttgtaatttggtatttttttttttttgcctttttcatgtttgggtgttcgttctttggtgttctcttttttc

SEQ ID NO: 9598 - DNA, 879 bp, Cannabis sativa
ctcataaattgttgttgtttttggacaagacactcataaatttagtacaattaagtgtatttttaataagtattacacataaatagtattattaagaaaatttaaatttttatatttacttttattttgttatttatattaaccttgaaaattaacaagcctatgttctgagattaatcaagtaaaatacttgtatgaaagcaagcatttcatcaagcttgtttacttgtaagtgttaatttcgaacattaacacttttaatcctcaggatttgcccaggctaatttgagagaatgatgaagctcactccatgaagtgtccatggtaggatcgttcgacaacatgtccagtcgttgaggccactcgcatgccccatgcatctcgaaagcatcatgcctcccgcaagcagcatgtccctcgtagagagctggcctctcgcaagcaataggcagcatgccttttgcatgcagtgggcaactcacagcagtatgcctctcgcagacagcacaagaagcatgcctctctcaggcagcatgccattcacacaccttgagcctcgaggaggtctcggtctctcgatgcatgcataacttaattatgagagttacatattttaaatatttaaaatagatcaaaagtagattcaacttgtgaaatgagccataaaattagaagagtaattttagactcaaaattaagtaaatcatggtaaatttaaaaatgtgaaaagattataaaattggagaagagattttgaattttaaataatcaaagcagtgaataaaattaatttaaattttgttagctttgataatattgtgaactaatctaatgaggagatgatgttaaagttgaagaagcaatttgaaattaaagttt

SEQ ID NO: 9599 - DNA, 585 bp, Cannabis sativa
cttggtagcgcgtttgttttgggtgcaaaatgtcacagattcaaatcctgtcatccctacttattacttatcttatgagcggttgcaaggaatcaattgagattgattaaaattggatatacctaagcaatagagaataaaattctctaagatagtatgtacataagttacaaagttattcttgtaataataattaagattattaaggtactcttagttcagtttggtagaacacgggtctccaaaacccgatgttgtaggttcaagtcctgcagagcgtgcttcgattctttttatttgttaggtcgaaaataatacaaaaataatcgaacaacagtctgaatttgagattaaaacaagtaggaggtcaatcaaaagagatgttaataaaagggtcagctgaacttgatgtgcttaccattagagttttgtcctatctatcatttgttttctcatgtttaatttttcggtcatgattacccgttttcttttggactttatgcaatgtaagaatgttactaattcagctggaatgataaaggaaaaacttgttaccatggggccatttattgcgttgaagatttc

SEQ ID NO: 9600 - DNA, 574 bp, Cannabis sativa
tctatatatatacacgagcaatatataataaaatcatatgtatagacagtacatctcatcatcaacaaatcattaaactctcttgcaaatatgtatatggtgccactgcaaaacattttacatttaattaagagaacacacaatacaaattacctctggatctatagctaggttttgtcatgaaaaaatataaaaagtaaaacattttcgccataaaaatgccatattattggcgaaaaaaaaaaaacaccaaaattctctctctctctctctctatatatatatataaagcaaatctttgacaaatgaccagcacacaccactcttttcctttattatggtatacataaatgatcatagcaagttagtctctttctctcttaacatacataaaagttatattgttcaagaatataatcatttatgtggtcatgacataaagattgtatgtatattgttgattgctggtcctcactcattttagagcgaggggagagagagagctaattaaagaaagagaaatgtggaaataaatatataaatacaatggaaagagatatgatatatataatat

SEQ ID NO: 9601 - DNA, 887 bp, Cannabis sativa
gggtcacaaattgaccacacttaactgatgagaattatgaagataatagatcaagtgagatgtggtagaacagaggcctttttggggtctctctttttcttcactacaagcctatttgtgggatactttatggaaacgaagccttggccagattaaattacccacgtttttatgtacactattttggaaaattgcaaccccttttagtggcccaatcaattttgttctctttatctctctcttttggtataattttttataaggtaacttggctttgatgacaagttcaattgacatgttgaaaaactatgtaaaactcactgagagacgggtaattaaaaatgagagccaatgacataatctataaaagaaaaatagaaatacaaggcaagcattatagacaaacatgtcctatctatatattattatcaccaaacttttctcttcaatcaacttcaacatcattatcattatcaccattaccattgtttctttttctcccttcttgatcttagaataatatctatccaaaatggctctttacaaagaataaaataacggcacatagtgcgttctcactactcattccgagcatatgggctttttattacataaaggatattaatggagggatgctttgttggtgaagcacttcccaaatttaacataatgtctctgttcatgtgtatcactcactactttcttcttccatttaagtagtgattgattatagagcttagccaccaaaataagaaaacgatagggttgatagtgaacatgaatgatagattcggttaatacagaatcactatttctttatgtcaatgatgaggaggtgttttgaattaatttcttctatatgttagagcaaaattatataaaagtaa

SEQ ID NO: 9602 - DNA, 554 bp, Cannabis sativa
ttataaaattttaacgttctaaaatcataattcaaacagtttattgtatgtgtatttttattgtttttattttatacgtgtgaaaaataaactttttaaattctttttttttattataaattattttaagcaaattagggtttttgtttcttgacatgttttaaactatgctttttgaacttttacaattgttaaaaatctctcgaactattgatattgttggatttgagtattttcgtccaattttagtaaaaaaagtctaacatgaataaaagttcagagagcataatttgatacatgtcaaagttcgagtggtatgatttaatagatatgaggagcataatttaattactaaattagtaaaattaaatgaatttgaacaaaaaaattttaatttaacaatcttaataatttaaagagaatatttgaggacttgagaaaataagatttggtatagaccaaaatttacaaaatgtgttttttaagtttaaacaatgacactaagagataatgtgagataatgttgcgaaaagaatgatgtcgttttggagaaa

SEQ ID NO: 9603 - DNA, 806 bp, Cannabis sativa
taaatattaaaattgatatattattatgtgtattattaattatgtgagagttccattaattctcttcacctcatcttattccctaatagttaaaatttattcactaataatactatacaatgtatacacttgacaattatatatgtactatagttaaagataatagtttattttatgttttatttgtttcaacttttctataaatatatatttattattattttttaactttctatttatttagaggaaattacatgatactcattttactttctttatttaaattgttatctttattttttatttttttaagatatgtccacttttatatagatgatgttcctattataccctttaaagaaaagtgaaaggtgaggatatattaaacaacctactcataaaagtgggtacattttaataaaatttaatataaaaatatttttgattaatagatgaaaaaagaagcatttattaatttatctcatttatttatccaaatatatgatatttttctatttttaatgataaaatgaacattcattttatgatttaggaatatgagacaagaggataagataagtcattattgttatccattctcaagaaaatagataatatatatctaaaaaaaatcaaaatcaattaacaatcaatatttgttttcaaagaatgagatattttttttaccaaataatgcacttgataactacattaataatcttctctaccaaaatacgaaagagccaatgaattatgaaagtacaattaatcaatagctttcaaagaaatagtaaaatgatatttat

SEQ ID NO: 9604 - DNA, 682 bp, Cannabis sativa
tttcttggtcgaacccgaagaaaccgtgcgtgtgaagatcacgaaggacttcactcatctgaaaaaacaacaagaaatctagcatttagcctccacatcaaaccctaagtcaaaaatggggaatgggggtcccctaactgttggaaagagggcccctatggatggctgtcaaaaggaatacaacgattcacaaagacagacatcgggtgcaaaatatccaagcaacaaaggaaaggaaaggaaaggaaatatgcgagtatgaaaaccgattcagaccaccaaaaaagggcgtacaaaaaaaccctcattctcaaccctcgtcccagaaaaaaaagaaaaacaatgcatacacaacgaaaccagcaaataaaataaaatatatggcaacaaaaagatacaagtcaacggacgcccgtcgaagggggcatcacactagtagcgaccatggccgtcatttcgaaaaaagccaagcaaatcatattaatacacactttattatcactacttgccctagcagatgaaagaaatgtataaacagaaaacttacacaaagacagcaaggcaggggccgaagacttttggtggtggtaatacttcgcctgacaacgatagaggaagagcagaagaaaatcaggggcgtctgaaatttgtcgaatgggtttgaaattttgaaactaaaggg

SEQ ID NO: 9605 - DNA, 698 bp, Cannabis sativa
gactgagatttgattttatgtttacacttctgcctatcgtgtttttgtttggtaatgttgtgtgttcatatgtatttacgagctcaaatcacaacactttcgtataaattcaactgttcaagctagacatgttgttatctatcacattgatttgtagaaatatacgttgtttttccatcaatttacgaaaaaaatcctattccttttgtattcttcaagtgtaatgcattaaatcttgtttgtctacaaattgtagcagaatatttcatcttgtttgataatatttcacaagcgataatatggatgtatatatcaattgctgaaaggagcatgattatgttctattattgtctatactctaattaacaccttgtaattcctcagattgatgtggacatagcaactcacataagcatcagagatgacggcccaaaacgaaggtagtctttcccaatccttttattggtatgatgggggctcttgcaaccctacaccgtttcacaagacatcaataatgggtgtaatcttatttctaaatcataatacaccgatatcgcttcttataatataacgtcggtatctctgcagtttgctttacgtggagacagctgatcggcccggtctactggtggaccttgtaaggataataactgacatcaatgtttccgttgaatctggagaattcgacactgaggttc

SEQ ID NO: 9606 - DNA, 1085 bp, Cannabis sativa
attgtagtctttaaataactccaaccacaacctctgtctcacattcaaacttttctgactgaagaaacatttgacgcttttgtgatcggtatagatttcacacttttctccgtagagatagtgtcacaaaatcttcaaaacaaagaccattgtgacaagttctaagtcatgatttgggtatctctgctcgtactcctttaactggcgagaagcataagcaataaccctatcagcgtgcatcagaacacacccaagacattgtctggatgcatcaaagtaaaccatgaacttttcttgttttgcggtagggctaacacaagagttgtgatcaatcgctgcttcaacttttaaaaacttatttcacacttgtctgtccatataaattgctaattcttcttacttaactctattaagggcattgaaatcttggaaagcccttctacaaatcaacggtagtacctagttaaactcagaaaacttctaacttcaatgactgtctttggccttggctaatccttgacggattcaacctttcttaggtaaaccatgatcccataattactaacaatgtgcgctaggaaggacacttgcggtgaccaaaactaatattttttaaatttttcataaagtttatgttcccgtaatcacttcaaaaccatccgtagatgttgcacatgctccacttgtgattaagagtacacaaggacatcatccataaatactatgatgcatatatcgaggaaattcgtgaataccctattcaacagttccataaaagatgctggagcattggtcagtcaaaaagacataaccaaaaactcatattcgccatacttggtatgaaaggaaatcttttgaatgtcctcctctcaaattctcaattcatgataggtcgagcgaagatcaatcttagagaaaattgtctttccctgaagttgaaagaacaaaaaattgatcctaggtagagggtaatattctggattgctaacttattcaattcttggtaataaatacacatacatatatagccatccatctttcttcttaatagaaaacatcagagttgtatctttaattccttgagt

SEQ ID NO: 9607 - DNA, 1223 bp, Cannabis sativa
ttctagagaagaccctatctaggtaattaaagctccatctcggatgcagaccaccattcacggggtcaattaggcagagttcgacaccttagctgctttagtgaaggggatcatggctaattcagagaggttatgagcctcgcttcactacctactccattctctgtgctccaagagaggagatatatacgaccactcagttaatggtgttgtatcgcaaacttcttcctttcaaagaatcaggaaagagggacatgaataagttctgtcgttaccacaacaactatggtcatgaaaccaatgagtgtaactagttgcgggacgagataaaatttctcattagacataaacatgctactctttagcggtatgtatgacctgaagatacaactggtggcaatgcttcactccagcctgcaccagttgcaggtaggttggagattgtgattggaggccctcactcaactgcgaattcaaggagagccttagaaaggtatactagagcactctgacatgaaccaagagccaaagtcctagaggtagcagagagacctccaaagtctcaacaatacaaaagtgaattaatcacatttggagaattagactcttattatcatagctaccctcacaacaatccactagttgtcgaggtccaaatagctaatattatggtggctagggtaatgatcgacgacagagcatcatcaaacatcctattcaagcaagccctactcaggatgagcttaactttagaagacttggaatcatgtgaataactcatgtatggtttcaatggagctgacatcccaccatgtggcaagatcaagttggccactcatagtcggcactgccccaaggtagaccaccatcatggtcgcgttcatagtgttggacgtgaagtctccgtacaatgtgatgcttggaagactttccctttataacctttaagccatctcctcattgtaccacctatccgtcaagctaccaatagtggctagtatcggttttctccttggcaatcaaggaacttcccgcaagtgctacaacacattattgtcactcaccaagaagacctcctctgctgctacaactccagaagaaatgagcaagacattccctactattataacaccaagggtgacgagcaaggcctctcctgtgaaagatggagagacgatgaaaacctctagagaaggcaaagacgacacctaaagccacttgaa

SEQ ID NO: 9608 - DNA, 634 bp, Cannabis sativa
gtgaaatatttatcagtttattttgaattctaggtagatttttgttgttggttcatcaaattctttttctatgtttttgtttttgcattgacccatatataaatcctaaataaaaaaggattgatcttaagcaaaatgtaggaagctcctaaacaatgaaatgtgttctagctccattattttcgtaggcaactatgataaaagatcataatcatttacttttgtagaaaccattagattgctagacatcatttttttcgtaagattgctacacaatatcattagatatacattctttggtatcagttgttcttgtctaatgtatgcatccccacaaaacaaaaatatagaaaaagtatgcatttgaagatttagagaaccaataataaaaatgcgaatagaattaaatctttataaactaaaaaaacaaagtttaaacaaaatacttattaccaatagaattaagaagaagaaaactagtaagtagaagaaaggcaaaaacttgagcttgattttaactcagaaagatactctcaccaaaagtagcaaagtagagacactgctgttgtttacttatatattggatggtcttagttttgggatcataaaagtagagaatatgctcatgtttctc

SEQ ID NO: 9609 - DNA, 805 bp, Cannabis sativa
gtattatcgaatttgattgtctgacattggaacaagctgttagaaatttgaatattttatcatccacttttgatggtgtcgttgatgattgtaaacatcttttattttcttttagtgatgtatctttatgttttatcaaacgatctgccaattgggttgctcaccttatggttaaagcatttcatttatattttttcaaagtctaaactctcttttaatattgctaatattattgaggtcgagtcggtctagttgaataaaatttatagtttttttttaataaattctctattctttccttctaattttctttctcttctattttctgtcattcataccaaacatagtgttagtttgagggggcttttagtaaaaaggattagctagagttagttataggaattagtttgtgttgtattgttagttgaatgtaactaaatttctattccaagctaactctttagtctgtatatataaaggctaatctgtttatgaatgtaattaattgttcaatcaataacaaaaattagactgtcctctacattttctttcaagcttacagtagcagtgaattttaatggccatggccatggcctgcaatattattcatcttcttcattttcatccgaccccttatcgtgcttttgctcgcacaactcttacgacggcgtttcgaatcccctctccttttcaaaattccttacccaaacccatttctcctcctcgctcattatcaaccactgctaccttcacctgggacgacgtccttcgactttcacaaccccaaagtatttcggattcggac

SEQ ID NO: 9610 - DNA, 536 bp, Cannabis sativa
tctagtgaagttgttttgataagtagggatctaaactgagcttttgttttgccttttcttcaccaagatatagaaaacgggacagatattttcaactaaataaggctataaaagagtttaaatcttttcgccctgtgatagaagttttaataccatctcaaataccttttcaatttccgtgttgttgttttacatctgacccaagtgtaggcttatatgacagaagacttatatcggtagaatcattcaatcactaggatttgtttagttatactcagtttgatttacctctgagagaccttaactccatctctgtcaactataatgagacataaggatttggtgtgtgatatctatatcctatatggtcatcatcgatgatatgtaacatcaaatcaacgacgtaaactccatccccgtttcattagtctttggactttttcaatttgagtacaattcaagtcttttgtctacccttacattctttttgtttcctattcatgcatgattgtcatttagaacccttcaaaagacaa

SEQ ID NO: 9611 - DNA, 872 bp, Cannabis sativa
tatttttgcccttatatgcttgataatggggatttggctctaagggcaatgtggtaattatgcattttagcttttgagtcattaaatgagaaatattaggccaaatggaattttgatttctgcattatttcagtcctaggagccgaaccccattccccctccctaaaactcattttgatagctttaattttgtggtgaattacttgaggaagtaagcttagttttgaagatttggggctttgttcttgcttggatttgaggtagcgtttcttactttctatttgaatttgttgctgaaatttctgggtttctctttcttcaaaaccgaaccaccttttcttcttaagctatttctttctttgattgaatgtgtgagttgttgcttagatcaaagcttgatttggtaatctttgtgcttgtattgaggtatccattttagtaagtttaatctgaattttagctgctgaaaaaggattggaaatatgttttatatgtggttatgttcatctttgcatgtgtaatgaaattaaggggataatcttgttgtttttatcatgtatgtgttgcaaaggtatagaattgttcctaatgattttaaaggattttacttgagttatattgataataaatttgcgtaaagatgctaattttatggttgtgcaagctcttgaattgggttttttgctctagttaaagcttgttcaaagttgatgattattgatgcatatttaggtgttgttggagagtgaattaggtgtaatgactctctaattatttgatttatgctaggtgaaagtttaatatgattgtgggctggtttagcatgaaaaatggtatttttggaagcatttttcgtggctggaaactgagtt

SEQ ID NO: 9612 - DNA, 830 bp, Cannabis sativa
tgatgatggtagctataccgagttgctagccctatggcagaaagcagctgatcataaggccaaactggccactcaaaaagagcaaaatagaaggatataagaaataatggtcgacatgcaaaaggccatggagacagctgaaattaatgtgcatcccaaagttgtgcctcaaggactagaagaaacacaagaagagtcctcgccaagcacctagaagcccaaaactaggcagccaagtcccatacaatattcttccaaggggaaccctaagaaaaagcctacttcaatccctggaagaaataaaaaggcccaggatctgcggaaggtctactctgatttcctaaaagggaaaggtccgcagaggggcaagctctctcaagagtcttagccctcaagatcgagaggaccgaaagagcgtgtcagtgtattaggaacccagggaaagagggagaaaaagtcgaaaacatccaccggttgacttgaggtaaaatattaatgaaaaacatggtgacttgagaaagtacatggaaaagaagaagcagatgatataggtgtcgggagacgccttcaacgagggaatattggccgagttggcaatcctctgcaaagacatcgctagagtctctcagagacaaaagggagatgacaaagtctaattgcaaggactgaaagccctatgccaggaacatggaggcagaactccccaaaaatttcaaaatgcctgaaatggaaatgtacacaggggactcagaccccagtgaccatctatcccgattcaatagggtaataactgtcatgagggttaacaatgatgcaaagtgtctatgctt

SEQ ID NO: 9613 - DNA, 942 bp, Cannabis sativa
agttaagtgttaaaaattttaaagatccggtgatttagcaatcaatatcagaaaaaatatatattttttaaaattattttttttgctgattttttaattttttaaatattaataattatttttaaaattaatattaagtgggccataaaaattggctcgtgtgcagtccactgtgtatttttggacggagcatacagcaaaatggagctagtgagtgaggaggtggtttgatatttttggcggctgtggctgcagatactattacgttccaacttaccaagttttcattttcagagttcaagtttcacacttcaatggaccctctctctcctattgatccgatctctactctcctcgctccaccttcatctctccaagctcaggtattattcactactctatacacactcacttgtatcgaacgcccaaatggtttgaaatttctttctttctctctgttttaattcaggagtatttcgacgagcttatatccaagaggcgaaaccccggtatcaaagtgaagcaaaatgaagcatttggcaaaggttaatttttctgtttttcttctttctcttagtcgtcttattgaatttggttctaacccactttcagtatatgttattgttatttcattataaaggtgtgtatgccgagactgaattcaaagaaggggagcttatattaaaggaccaaatggttgtgggtgctcaacattcctcaaataaggtcttcaacgatttcaaatatcatttctttttctgttttgtctccacttaaattctgtctaatctactgtttgttatgtgtagatggattgtttggtctgcagcttctgttttcgctttattggctcagttgaaattcaaattggaagaaaactttatctgcaacagttgggagtttcagtaaaccacagtgaatgtgatatggaggacatgtatt

SEQ ID NO: 9614 - DNA, 743 bp, Cannabis sativa
  modified_base (570)..(576): a, c, t, g, unknown or other
ttctctcccaggattcatagagcatgaggcaaccccaaaaaaaaaagactagttgaattatattcctctattctgtagtctcacacttagaaagacctcaaagaaacacaaaagcaaatgagatttcaacattagattcacccttttgagggagtctactttagattttagaaaatttacacaatacatctaaaattaaacttttgttttttatatctttaccgactttttttatttagacttttacatatatacaaatatatttataggtttttatttatttatcttttgaagaaaaatgctgctttcttatatcagcaacgctacaaaaaaaattgttctgaaataagagagaaaataacaatgtatttttgtaaaaaacaaaaaaaaacaataaatccgtaaaaatacaaaaaatttaccagaaaaaattctcgacttctccaataaatatgtgattaagaaaacaagcaaaaagtcactcgaggctagttcaagtggtcataggagggtgcgtgtgttggaggtttcgagtcccaaattatgcatgattgtaatatataaacgctnnnnnnnaaaaaataaaaaataaaaaacaagcagaagtgctagaaaaaatagagttctttttcatatttgctactttttattttttggagtatactaattttttctattcctctattttctttttcacgtctctctcctttttttcgcccttccacccatagtcgccattaaat

SEQ ID NO: 9615 - DNA, 689 bp, Cannabis sativa
agtagaaccaatttttaaggaagtgcatttaaattgaaaataaataactatcaattactcttctcaataagtcacgcaagtaagaaaacatcattgagtcccaataacaattttgtccagaatgaatacaccaaatgagggaagaagcagccaatttaaaagtttaaaatgaatacttctcatcttgaaaatatgtaatctttaagcccacacgatatgtaatgttctgtacaagctcctacttttgacatgtatctaaaccaaaattttgatagaacgctaaaggtagtatttcctgccagctaatacttttagtatgaatgtaaaataaaataagaacactacatgtggaaatttatgtcagctcctgcgtttggtataagtgttaaagcaaatttgaaagaggattgactaaactcagacaagttccataagattctcttatggcaatcaaaacccagagggtaattcattatgaaatcatggggaaaagaattattctaatcggcacatttcatcaagaagacatcttcacaactaaagttaaatgcacacattgcacagtggaaggcctctaaaactaaatacgcgagactaccacatagaaatacgattctccacttcttctatcacctgattccactaaactaaacaatgaaacttatgatcatgcaacgcaagtaaaaccc

SEQ ID NO: 9616 - DNA, 900 bp, Cannabis sativa
attatgttctcaaagatttattttccatatagaataagaaaattatactatttctaatgatgaatatacattgaaaaaatattaacaactagcaaaattttgaacaattgactataaataagatttcattaattaaacactaataattaaatgtatgtaaataaatcaaaatagagataaaatttgctctgataccaactgtaagaaaaaaatagaacacatgaatgtgtatattaaatgtaaaattaaacgaatatgtacacgatataactaaatgatcgaaatacctccagttattaattctttgagcttcaattccacacaagctttagatctgcaaaagaaaagaaaattaattagtgtgtgtaatcgaacgtccaaactttctctgctctctttagatagatttactattttcacaaaatgagtagtgagcttgaggaccgagaccctattttagtatattttataagtaagacattctatcaaaatttctgataaatttaattgtcaatgatcatatttaaaatatttactcttatcacattttaatttgtgatgatagagtcagtgaaataaaataaaatcgatttaaatgatttggtaccaatattaaaaatattctaatatccacttcctattttaataaggcaaactaatattcttcttttatctatatgatagaggattataaaataatttatattctgattaagatatataaaatctaaattatgtgagagacataacacatataataagcattaagaaatagttcaaaagttacaatagccacaaaaaatatttttattttgtgtggaaacttatgttgggtgtataaaaattaaggaggacttgcatgtagagaaggatggttatgcaaaagaaggcatttttgta

SEQ ID NO: 9617 - DNA, 547 bp, Cannabis sativa
ttcaccaaaattttaaaagtttctttctacatttggtaacagtcattgatttacattttttattattcaacaactttataataaaatttaaaaaataattttttctaatagatttaaatcacacatatactgaactcataccaaagtttaataatgtatcatacaccttgtgaatatttattatttataatatatttaattttacttaaataaaaatttaacaagacattttatttttattgtttttcattttgacctctagaaaatgtgggtcctaaatcttaaatatgtagaatcataactattaatagaatctttaaaaaagaaaaaactatctatagaatctgtattaaaaaaataattatgttaattttacattaaaatgttgtatttaattaaaaatatatagtttaaagatgtatgatgattaacaaaaataataacaacaagaagaattgactaaactgaatcaaaaaaatcataatggtggaagcaggtaaactcgagctgtcatgactcatgtgccactttttaattaattcttttt

SEQ ID NO: 9618 - DNA, 581 bp, Cannabis sativa
tctcatttatggagatagttaatgttgctagtgttgctaaaggcaatgttgtctcgtgtgtggatgcaactatctctctcaatccgagtgcctcttctcttaaggctttgacttctttgtgtttggttgggagagtggtggctccaatggctgtagatgtggatgacgtcaaggaatttgttaccaagagctggcttaagagggtggctgtctttgacatggctgaggtttcgacagtaccgaactgcttcaaactggggttcgatcgtgaggaggacaggcaatgggctttagatcaaagtccttggtcttttaaaggatacacatttgctctttctgcttggaagtcaggtggtgaaggctataacccagttgataagatctgtttgtgggttcaaattcataacttaccacatgaatacttctcggtggacaatggtaagatcctggggggattaattggcaaggttcttagagtggatcttgaggaagataaaccgagtttgtggaatctctttttcagagtccttgtggagttaaacatagaaaacccacttacttcgggttgctatttcgatctt

SEQ ID NO: 9619 - DNA, 542 bp, Cannabis sativa
ctaatcaagaaaattaaaactaacaagttctttatgtgtaacattaatttacctattttttagcttttgtttatttattattaattactaaaaatttcggtaaacactattggcttgccgaaaaatatgccttacagacacattagaaaaattaaataaatatcagacaagcaagacctttctttaaaattataattaattatacccactaacattttcgaatttatttcaacttcatcagttgatatcctggtggctatacacaaaagtaaaaaaaaaaaaaaaaattaagaaccaaacttcagtctgtgtagaattacacaaaccagtaatagaaatagagagcgcgaccatttaagaccattccaatctttaactatcacaccgaagctaagcttccccaatccttgtctattgttccatctaaattatgtttaaaaaatcaaggaggaggtggtttccataaatccttgaggatgtgctctcttttcttttggttgttatgatgatgttttcaataaaattgaataacaaattgtgta

SEQ ID NO: 9620 - DNA, 515 bp, Cannabis sativa
ttttttcatataatatgttttagctcaaacaagttaatacaccaatatatattatatatatttcttgtaaacttatatactatatagcacaaagttaagaagaaataataagattgataaaatctaattgtctttctctcctaacaaataaaaaggtagttcatgttaataaatcatactaatgcagcatgctactaaattcaaatacaatacataaacatataatattaaacatatatataaatatattaaatttatcaaactatttaaaattgaatttatttataaaagtattgcttcaagaaaattgtatattaaaaacaaagaaaaaaaatatgaatttaaaatcaatcaataaagataataaaatataaatttgagaaagacaataaacctaaaaataataaatgaagttacttatgtggtggatgagatgaataaaagaattatggaaataaatatatctaaataaagagtaatatttacgtaacatttaataatattttataatttat

SEQ ID NO: 9621 - DNA, 645 bp, Cannabis sativa
aatcaattggttaggttttggtggagttttgaggagttgaaactcaaattttttcatccctgcgacgaaacaattaaccgtttcttgggtttttttttttgagagaatcaaaaatcgtattttggccataacttttcacccagttattcatttcagatgttctatatatcgtttcgaagcttgagacaagcaataaaatatggtatatgttttagagcgaaagtataattttttagggtgtttatactacaaggtttgatagaacaccctaaattgttttatgtgaatattaggcaatgttttgggatacatacttatcgatttaatattctccactcgagttggccgacatgcatgaatacgggttaaaggtaacaaatgtattttgtactacatagcaagttatgttaggatacaattattatcgttgtgaattgatttatatcgagattgaaatacagatattattgtcatttgataaaaatggttgttttattagataatgatgaaaattttatcttatttgacaatgataaaaatgttgtcttattagacaatgataaaaatgttcttttattagacaatgatatttgaatatcgaagggttataggtatcaaaagtcatgactacaaacaaaaatcatt

SEQ ID NO: 9622 - DNA, 807 bp, Cannabis sativa
gacaaccctcatccctatgggaaaaattagggtcccggttaccttgtgtcctaacaccctcgaagcacgttcaagtattgcacctttgtagtggtggactgtcccactgcctacaacgccattcttggtaggccggccttggtcgacttttgagcaattacatccatctgacacatgtgcctcaagtttcctacccaggaggcaagagtagggacagtgagggggaatcaaggagaagcaagacagtgttataacaccgcattacatttgtcagtcctgacgatacaggggatgtgaccaattttggcagaagaacaggatgagttggaccctcatattagttatgaagcagcgttagaacacatggaggatattgaggaagtgagggtgtgtgacctcaacccatgtaaagttgttcgtctagggaaaagcctagaaccggaggagcggagtaaaatcatggacaccataaaggcatctacggacgtattttcttagtgccatggggacatgaccagaaaaagtccccacgtgatcacccatgtcctaaatgtcaacccagatatgcctctggttcaacaaaagagacgtccactagacccagtaaaggttgacgcactggaaaaggaggtggacaaattattatcaaatatttttgtcaggaatgtatactacccagaatggctggccaatccggttctggtacctaaaccaaacggaacatggcaagtctacatagacttcactgatctcaacaaagcttgcctaaggattacttctcgttgcctagaattgatcaaatggtag

SEQ ID NO: 9623 - DNA, 614 bp, Cannabis sativa
aaaagtttcatgccaaaaagttttgaacatgcttgaaaaattagaaattttttagatttaacaagaaggtggtaatgctagtgaagttattacatacccgtgagttcaaagatgtgctaacaactctaaagagtaaatgagtatgctggattactttacataaatactttttgaataatagttattagtaagtatttattgtattgttgttaaagttaaaaaatttgggtgttaggattcttttttgtaccaataccttcaaccttttatttagaattagatttgcttggtcccaatgtttttttatgcaaagattttactgtatatatttctagttcatttacagtgttgtctaggcttgtgaatgaaatccacttttgcaaactttattacttactagtgctttatagtgattatgcaagcttttcctggcagtgttgcattacattctgattaatgatttcatctagtagttttatgtaattaattgcagttgttttttaagcctttcttgtgattttagcttttaggtttgatttcattctgactcccttgtgtattatctatataatgtaagttgtgcataaaagcaaattttcttgaaacattcctca

SEQ ID NO: 9624 - DNA, 637 bp, Cannabis sativa
ttggcccaaatgaccttttcaaagcccactttcagtgatccatatataccatgtattgtgctttgaatcacttttgatgtagtcataggatgagaattgacaactgcagcagaagagatatcttgaacagaagctagaaaagtagagacaccagctgcaatttcagttgcagtagagatatcttgagtggaagaaacatctattaaaacagtttcaacttgatctgcttttacgatgctagcagggggagtagcaacaaattatgcattattgaaaacctcattagactgagggctggttgagatgatacactaggaacaagctgcaagggatgagcaaaaacaggtgggggaaatgggaactcatgataagtgtggagaagaaactgaagagggagtggaattatgagcaacttcaagataaaatatggaaaaataataactcatcaaaaaggacatcacaagatatgtaaactctctcattccaagaaaggcacttataatctttatgagctaggttatacccaataaatgtgcagagttgagacctatattgaaatttgattctgttgtaaggtcttaaatttgggtaacacaaacacccaaacacctcaagcatggagtaatttggtttgaca

SEQ ID NO: 9625 - DNA, 534 bp, Cannabis sativa
tgtcttcggttcttaacatactaactaactattacaacaaccattaaaaagaaaacagtttggcaaaacacaatcaattgagtatctcatcaagtggttagatatgtaaattttctagaaacttctgcaaagatttctcttttcattgcatataattgaatttgaaatagtttgtgaatattaacaaaatagaaggagaaaaacaataaagatataaacacaatactaaaataaattaataatcaaaagcaaaagagcaacactaccaaaaatttattggccaacatcgagtttctctatgagtttaaaaattctattagagttatggaatgaaatgaatccatactgccaccttattactttaactctcacactagtatgatattagccgttttgggcctaagctctcacggttttatttttgagtaccttctcaaaatatctcatactaatagagttggtgaaacacttatattcaagacaactcttgtttattcttctgatatatgggacttgggttaacaccccaacaat

SEQ ID NO: 9626 - DNA, 743 bp, Cannabis sativa
agagagagagagagagttggtgctttttgaattgttttacagaaagagagagagaaaagtaaagagagaaaaaaaaaatgttaaggctcagtaattgtaatagtaatagtaagagagaaggtaatgtagatgtggaaatggtggaattcgagatgcgagccgattccggtagaaagggaaccttctccgtactcttcctttttctccttttcattctcattcttcatcctctttgatttttattattaatattatcagtattttctgtttggagagagaaagagagaaagtttcttcaattttataaacagatactcactaaataattataataatctttaaacaaaacataattcttattcccttcccccttgcactgttgcttgttacgcacttcttctcttttgtttttgtttttaaagtttctgatttatatttatagagtcggttccgcgcttccttcgaattttctctttatgtttaatctttgcggatttggattgtgtggatcatcagcggtttggggattagggttttatgatccttcttgttttctttgtcagctgttggatttgaatcgttctgatgctcgaatctgtcattcgatgcacagttgaggaatctgggattggttagggtttttcatttagaaagtttctacctgcgtttcttgatcttggttagtgtttcttactgtgtttgtaccttcgttttttttttttttttttttttttttttaaaaa

SEQ ID NO: 9627 - DNA, 621 bp, Cannabis sativa
aaatcacctttttgggttaggctcagtggtattccccggttttagtggaacaaaacaaatttgaaagatcttgtagtaaaagtatctccaaactataagctcccgagatacatcgattttgagcgtggatctttcagtatgggaactgtccggttttgagcaacaatcgacattgataagcccctattttcagtcttctttatgaagagagaggccattaaagacctgttgatacaatataaatatgaaaagctccccaagatgcgtctcaaatgtggaatcatctcacatgaccataagttctgtttaaaaccacctacgattattaaagatcagtctggtgctttctttcctatgtttggcatttggatgaagcacgaggagactgccaaagggccttttgcccctaaccttcctaaatggtgtcaggcctggatcatccagaagatgcttactgtggataaaacttttaaacaacaatggaaaattagtaactctataaaggtggttgacgattagggtgcaagggaatcacggaggcaacttccagggaagaggcagatggttgaacaagtggtggaggatttgccggccacaggggaggagaaagtgtgccatttt

SEQ ID NO: 9628 - DNA, 513 bp, Cannabis sativa
gaataatgtgatttgtcaattattgccacgtcttttttaatatgttgggttacaaatgtgttatagtctaaatttttgcgcaaaaatacaaattacagcctctaagaaattaacacatgaactcagttcttaatgaaaagaatatgttaataataaaatctctcctagaaccaatctcgagtaatttcaatttgcaggatgatacaaccgagacagagtttagttacaagctgtataatcaaaagataagcatgaccaagaaaagttaatactaatcgcgtatatctattatctgtgacgagcatgtatgtctttcctacaacaagtaaaaatcgtctttttacatatttggtccaaataattagtgtgtgatgactcgtaatgaatttgcatgttttaagttgtcaacaaaggatgtccaaatattcgtagacatttcttaagtcaaataggcccaaaggcttattgtgcaattccaactacagagccttctagctcgcgtgtttagaatat

SEQ ID NO: 9629 - DNA, 506 bp, Cannabis sativa
ccttcatacagttctatctagggcattctaaaatgcttcgacaatggtgaatcaataattctcttcacacaaggttttgtatcttcttccatagagtcagatacaacaccactttattttctagagatcttttatgtcatcttcctcaactccttgaccttacgttctaggcattaagtcttatcacttgaggattctcttccgcgaatgtaatcgtttatgtggtttctcaaactgtttccgcgaggtcttgctttttcatctttggttctttccttcttggtgttcaatcttcttcggagatcatttgtgcaaaggcttttgccactgtcaactggtactggatgtatcatggttactggaatcacttagaggaagctttttgcttcgagactctagcttccaaactctggcctctgtcttgtttttctatgtgactctgcctctagaattggtttggtcaccgttccacgagtaagtattattcaataatatttagcttgaaa

SEQ ID NO: 9630 - DNA, 821 bp, Cannabis sativa
atgtaaaagacatatacccgagctggagaatcagcccactgccaattatcttcttgataatcagccatactgtattcggctgaacctatggcaccatgtagagcagcaacctcatcttctgttaaacaccttccccataagaacacatccataatatgcatcttagattcagctccttcactatctgatctcccgaatgcatccatatcgataggtggtctaacaccgagccaaacttctgtcccttgttcccaaatactatcaccaatctgtaaaggtaatgcattttggtagccatcaaaaccaccatctaagtagcaagttgcctcgcctgattccgcatcaactgtcattgtcaccatatgccacctgaaatgtaaattaaaagaactaagtgaacaagaactagaatgtataaatagtataattaataggaaaaatgttcttaagaaggtaaaatgtaagaaccttccgtcggcaatacttgtggcactaatgctccattccttagcaactgtagtctgtctatcacctttggtgatcaaccgaagtccaacttgtccagcttcgataccttgctcggaaccagccactaagatttcccaacaaattttcttctgaaattcagtgcctagaaggcaaacaggtccagattcgggttgaatcatcacagcaattgaaaagctaacttttttagtttgacatatgctgggatcaatagggccgtaatgtcttccacttatggtcggttcatcatcaagaacacaaacagcatccgcaatacccgtctgtcaataattacaattaactctcagtagttg

SEQ ID NO: 9631 - DNA, 621 bp, Cannabis sativa
ctgctactctccactttagcaaagtaattttccacagcgactccgtgaacgcaatcactgccattcgaattgcaaataacaagatccaggctctgcatcataacgtacaagacgtggtttgaatgttcaaaagatcgtctgctgctttgagtctttgggaagctctttggattccaagaagactcaatggtgttgcccactgtgtggctagatgggcgattaattcccaacagtttggatgtattaatctcaccgattttgacggttccctgctaaatggctgagcggatggccgtatttactgttagttgtttctattgttgttgttctaagtactctttttttagtgttgttttttttactctctggtttctactgctgtagtctttgtttgttcaggggaattcccccttccagccttgataaggttggtttgttctttgttgttctcttttggtcctctcttgaggcaccagtaatcaaaaaaagaaaaaaaaaaaacatgtaggtagaacaaaattgaaatttgctaaagtctctctatcaattgattaaagtgaaatgctttattgattagattgaaaaataataaaaagcaataaatatatactactctttccc

SEQ ID NO: 9632 - DNA, 633 bp, Cannabis sativa
aatctcaaattccataaaagtatctaaagaagccccaggaaggcacccggggagcacccagcgcccaggttgacacctgacctggtgcgtcgggttctgcttatcagaattctattttgttttgagcgttcaactattttttcacagtaaaccagagatataacttgtgacaggtcaaattcatgctttgatatttcaccgtttcaacaatgtggaatatcagcacaattggggagttttgaggctttctaatttcacaaaaaagctacatcttcgagaactggtgaacaacttcactaaaatgttgaatctgactaagtgatgtcaacacatcacttaggcataaaaaaaaaattcaagtcttggatgttttttcaccaacctgacatccaggttgaccaggttgacatcctaacggttagggtgtcaacctggtcgttgttaacatggggattgggtatcaacctggccgcagggtgcgaaacaaccttcaattaaatagccataactctctcaatattgattctatggacgtgattcaacttttattttgaagatatttaaaagatatatcaagtcatatctaacacccatattgtaagtttgaagattttaaatccaaaatttgtcctc

SEQ ID NO: 9633 - DNA, 580 bp, Cannabis sativa
tcttataaagttattaactctcccttcttttatcaatgtggacacccacatgtgttgttgggaaggctatgctttaatagcattcaaacaaagcagcattcacactaatcttgatactatttttcaaaggtaaaatccaacactcatcaccatcactattttgttaattttctatttcaatgagcattatattaacaacaataataaacacaatcaatgctaatgattaatatccatgatcaaataaaagacataaactcttattattggagattatgaccagttgcgtctagatgtccaatttgagagaattaattatcttgacctaataagctagtcaaagacgttttagagtatgtctatgaacttcaagtatgttagtgtattatgtccatctcattataattcgatggtaatatcatacaatattaattatatagttatatttatatgctaatacaacgcttaattatattaaaaatattctaacatatttagctttaaaaccttcgttttgttaaaaaattattagtgtgtatttagcattacattttcaattcttgttttatttatttattta

SEQ ID NO: 9634 - DNA, 1163 bp, Cannabis sativa
agaaaataagagaacctataaatgctacattgggatatgctacaattaataatgtatttgtctcgcgctatattataatattgctgtcaaataaaagtgataaaattataaatacaataattagtgagataacaacatcataaacgactaaggggtatgaaccaaagacgattcatctcgaaatgctcataaacgacgtgagatgatttgccataaggagcaaaaaatatacaatcctaagaactatcttaagacttgtcttataccacaaaaacgaagaaaatacctcaactagtatctcgcaaaataggcctagtcattcccaaagttattgaagaatgtgaggccaatttatttatttatttatcctacatattgtaaatattaaacatatagaattgttcacatttcgtacacagtaattcagataatacccaaaaagaataattatcatgattcctaaaaattctataaataaaaagatacaatatagaagggagccaatttttttctctaaaagatcaatctgaaagaataaatgaagaaacccaatatttcttatatttattattgaatattttatatttagtaaagattgagaactcaaaaataatatgaactcgtaaactatatagatttagctacaaaatcacgattattttatcttatttattattattatttattctataaaagtagttccttcgatctcatttaatttcattttaaagaatctcattattattaatgaaatttctgtgttagcaatataatattggatttcagtatctaaaagaattttttagtctaattttttttatgaatgggtacgttatagttatttaggactatcggtaaattttcaaaattttttgagtaatttataatatctaaaataaggtataaatatttgttacacgagcgactaatttttcttatacgtataggtaagtaacaatttaaaacttattttcaacattgtaaaactatttcaatttttttgaaaaattacaattagatctataaataatctaccatatatgtgattataaaaaatttctataatattaattgtattaccaaatactgtttcctacttacgtcgaccataccattattacataattaaatataattccttaagttttattatatacaaatta

SEQ ID NO: 9635 - DNA, 1051 bp, Cannabis sativa
agcattagtagcaatttttttttttaatctaggatgaaaaaaatctgatgatggaaaattttgttttaaattatttttacagttttaaaataattttgaaaactaaaactatgaaaataaataaaaagttataaaaaataataaaattatttggatcaataaaaaatgttacctatatatatgtgtacatattcacaatcttaactggcatttaactttaaaatttagaggggtttagccctaattttttttttaattattatttgataatatatagggcatttttttggtgtggtgtacgaaatagcctcaccagtgtggcttttttgtgtgttctgattggtcaaaattagtggagtcattttattgtgtaaggaagaatgcaggggattatttctctaaatttctcattttattctcattcattttccatgacagcatgaaaatcaattgaaccgaacctgtatacaatgataaaaaaaaatctaatgatagataaaaaaaatcaaatcaaacaatcactttacatgaaatacttgataaacaacaaattaaatgataaattaaaaaaaaaacaaaacaaattatccaataatacattaaatggtaaacataattaactaacgaaaaacctaataaaaataaagtaatatattttaaaggtctctgacacactaataaaacgatcttcttgatagaataccactccaataccagttgccccagtagtgatccgtcaacaaacaccttaatgccaatacttgaagaaagttctcgaagagaaacgatcagggccttagatgtggtatcataataataataatatatttgtcaaaaagcattgctattgagtaccagtagtgcccagcactacaatgcttggacgcagggcacgagatttgatcctatgtcaaaaaaaagcaaaatcgttacttggtgacctgacttgtattaaagtaaatatccgtgacatttctgggcggccaacgtctgcattaagccctttaagtacatgtctgatttcgcctctgcacattttaagaaggagaat

SEQ ID NO: 9636 - DNA, 959 bp, Cannabis sativa
ctccactaagcggaccatcatcggccaacatcttcaacacattctcgacggtcttggaatgtccgagtcttatgtctttctgaactctgttcacatcatcggtctctccataaatcttcttccatctctgaaacccagaattgttgaagtactctctcacaacctccttgtcgccacctccgacctcctcggcctggagcttgcgccgccgctcggggtcggtcagggagagcgcggcggctaaggcagcgacggagccaccgcctatgacagcaatggtggtgccgtctacgtcggcagcgagaggaggaatggcggccggcggtggggcgaggagtctgaggggccttgaggtagtggtagtgggggtgcgcttgggagagaatctagggtttgaagtgggatgaaagcaaatggaggaagagagacaggcggagagcgccattgttgggattctccggcgatggagtgagtggggagttgggaagagtaagaagcagaggaggaagaagaatgggtgttgttatgtggaattcttatcggatagggaataggatagataagttggatttctgagcttcttcgattctcgtgggtccccacccgctttctattttacccgggaaatgttctgttacgggtttggtagttatagaactctcaatctcagccgaccacgtacacaatttgtgtgttttaaatatattaatttttttatttaaaaatttatttatctcaaacttaaatatttacattgtaaattacttaaataaaattaaaaaaaataaaacatattttaaaaaagtgatgtattatttgttttatttacttttatatttttttattataattttatgattttggtttgtttgtttttctcattgtgctagaacatgttgttgtctttacccttgccaaatatgcattgccggatgctactagtaaaatttgatggtttg

SEQ ID NO: 9637 - DNA, 741 bp, Cannabis sativa
gtattaacttagtacacattaatactcgggattcagtacttctttttgttggaacatattgtttgaagaaaaagaaaaagaattttgtaaatatttctcgattaaaatggaagtaaatatcagagtactttttttttttaaacaatatatcagtgtacattaaataccgaatttgtctattttttttcttttcttttttcttttgagagcatatatgtatgaaataaataatagttggggagcgtacccataaaattaattaatgcacttcaatattatataaaataaattttaaaaaattactcttaatttagttatttttttcacattattttgtattaattttaataatgacctaaatttgtttacacaaatatattttttattttaatttcatataatttttttgttttaattattttgtgttaatattaaaatatattttatttttattttatatatgtattttaaaaaatgtgaaaggggagttaaatagtataaattaaaaataaatataaaattaaattaataaaatagagtatttttttaaaaaaaaaaaatgagtgtaaatcaaacttttacacaaatatcatttttatataactaaatgtatttaattaagatgttctattattttactctttggcttacttttagaatttgcaaaatgatatttgtgtaaaaattcaatccgctcttaaacgtattgacttcatatttgaattttttaactagcagtaa

SEQ ID NO: 9638 - DNA, 649 bp, Cannabis sativa
aatgtgaaatggacagaatctctacctgttcctacggttaatcaccttgattttttctcctctgaccatcgtgcgttgaaggttgtcattgcttagcctaacagattacaacaacactttaagtcaaggttcaggtttgaaaaattatggctcaaagaagatgaatgttctagtcttatctcccgttactggaaccaatcctgtggtggtgaaccaatatctacagctcttggtaacatcaatgcttgtgcttctcaccttcaaaagtggcacatgagtaagtttggggacttgcctaaaaaaaatcaagctttcacatgaaaaagttgctggtctccataatgtgaataacactagtcctgagcactttgacgaattacaatctagtgaatgaactttggatgaactattgtctcaagaaaaggattattggcatcaacgttctcgggtttcatggctacaatctggtgactcaaacactagatattttcaccaaagagcttctggtcgaaaggctgcgaacaaaataaccaaacttcaggatattaatggtgtggaacaaacctctactgctgctattgcagaaataattcagcaacatttcaatagcagtttcgcatcagatggtgttaacattgctgccattcga

SEQ ID NO: 9639 - DNA, 887 bp, Cannabis sativa
ttataactaaaacaactaaaacaacctcttaaccatattaactaacatcctaatcttaataatatgagaacaaaagtagtgctcttatctaagaaatatcctatatatatgtacttttttttatatgctaattttttggtaaataatttcttgtacttattattagtactttaaggtgttcaatactttaccgatctgacactcaataattggttagtaactttttattttaaatttttgtgttttatttttatttttattttttatgaatgatatttgtactattttttttaagtaaatgattttttatattatcattgatatgtagcaccttaaggtgctcaatagcataccgattcacatacacaataattgtttagcagttttctaaatcatattaaattaaaatttgtgagaactgatgttaaaatgtaccaataacgatatattaccatttgtggtgcttgacaccttaatgtgtcatttacattttcgttattaatatatatatatatatctttattaatttcgattagaattttaattttttttattactacatatatatttgcaagaacatctctaatggaatatgtaaaaattgtactatatttgtcaaaaaaatgacttgtgatatatttgcattaatttttagcattatgcactaatgcataattgcaaaacttgatgtaaatttttttttcttcttttttttgttatgaatgattgttaatttttatttttacaatttttttacaacaatttctctagatttttttatgtatattttttgtacaatattctttttctggtaattttattattattaatagaacattagcatttgatacctaagatgcccaacactatacatatatatgagactt

SEQ ID NO: 9640 - DNA, 692 bp, Cannabis sativa
tgttatacttgatttttgaaaaataaaaaaatgtcaacatggcgactttgaccaaggcttataaatatcaaataagttaagaacccttcttgagggccacatggtacctttaagggactcaaaatcattgaccaaccatttggtaccgggattcacacacccaagtgtgcccaactagggtttatgggcccgtgcgagcgttttcaccctagaatcctcaatccaataaggaaaccaacaaggacttaactcatttacgcataaaaaggcttaggcttgaacataaactcaaaactgaacaagaatcccatgcaataggccctatgaaaccactgccatacgaagatggcagtgctctccaatttttggagaacattttcacaaggagagggagtgcttgccactcattaagaccaaatagaatttgtccatatgtgttcccttaacacccatgagtgcaacacaagtgaaagaaaccatttctcaccaaaggacaagcctaggcgaccattgtcatctttgtggcacaaagagttgcagtggtcgaccacatagaatggggacaaatttttttgccaaaagttcttttttatcaataacatgtcaaaaccaagtgagaaaagttgccaagtaatatggaaaccacttggtcgaccactgtcacatttttggcagaaatggtggcagtggtc

SEQ ID NO: 9641 - DNA, 559 bp, Cannabis sativa
aatagagatgttgacatacaacttacgcatagtatcaagaaagctatggtcgtacttccaagtgcacccaataatgttgcacaccgactagccattgtagaaggttttgtgaagatctaaagaatctagctgactaatcaagtgggctattgaactaagccatttggatatcacaaatcaactgagagttgccataaaatgccaagcccttacagactttgtcactgaatgtacaagtatatctcttgaaatctctcaatatttgggagaaaagcgagatccagagaagaagcgagagtaagagcagcaataagaatctaaagaattaagatgcaacgcttaccaattgtatggtctaagcattgccctcattacaccatgggcaacaactgcacagagaaatcatgttcggattcaaagcccctaacactgaggctgaatatgaagccttaattgttggcctcaagttgggatacaaagtgcaggatgaccacatggacatatacagcgactctcagctagtcataaatgaagtcttgggtgcattcataagttaagt

SEQ ID NO: 9642 - DNA, 507 bp, Cannabis sativa
ggatcgagaggtgtaaccatggatattattcaagccatagctattattctagttattatggtttacaaaaatgtacaataaataaatgttttattctcttgtgctaagaaatgcatgcatgcatgcatgcttaaaaagtttgatgctttaaatatttctatccatatctatatatttatctgtattatatgtctatgtttgaggcatattctgtgttttctttaattcaacttatctattttgtgagagtacttttatgttaataaatcacacatatttgtattaatattattattaatgcttttatttatgtttttaattattattattatttttttttgttaaattcagtgatcattttatttctgaaagataatatgtaaaaatatattactacaagaattttttttttattgatcttttttttctttttgataaatttattaattgatgggcactaattaaagtagctaatagcaatactcttagagtttttttttttttttt

SEQ ID NO: 9643 - DNA, 1081 bp, Cannabis sativa
agagatggatttccaattttggcttttacctcttgattttttttttttttttttaaatcttctacctcttgatttttttcttttgaaatcttttagctcttgattgaaactacaacatagttctagacttttaattaaagtatatccttaataaacatgtgaaattaccaaagtacccctccacatcaaaagctacataaattttgggtaagggcaaaagggtaaattttctaataacccaacatagtctcataatttctaaatgcccacaaaaaattatagtacctctaaaatactaaattataccaatgtgatatctttgactaatctgtcaagtttccaaacacaaaagtaataattcacaaataatgcatatataatacatatataatttaataaaatatacatagagaaattatattatatttacctattttttaataaagtctaatatatttttctaatattgcacacattattttataatcaactaattaattattaataacttattaattgttcactaagttttatatttaatcatgcactcattacaaataatatatatatatatatatgaataagaatgctcgactatctctcacatatatccacaatttttttatgagaacctataaattatcattctcacattttttaaagcaattctcacaattttactgcgtatcgttttaatcctttatataagagaaatgttactctctaattaggtttcatatactttaatataataaattttatgaagtatcattaaccaatcacaagatctcatctctaggtagtgctacacaccattaatacctaatagcaatcttctctatataatataatgtgatgacagggccagctctaagcataagtaaactaggcttgtgctatgacccatactttacaggagaacaaaataaaaaaatgaaaagtttcattatacttttatttaagtaaaattaagtatatcataaacaacaaatattcacagtttgattagtgtggtgcataacacattattaggtttgagttctattacactctatttcaatatttttttatatgtttctga

SEQ ID NO: 9644 - DNA, 596 bp, Cannabis sativa
gtgttttatatttctctgattgttgtcctgaacatctattgatctggtctgtttttgatgttatatatagatgttgtaattttctcctttatatatgttgtagtggaatacaagagagctagttataaagttttaacaaactttataaactaacttaataacctatctaggtaaatagaggcctgaggccacataagaatttttactgcctttgtaaactctttgtaaaaaatctggttttacagtgaatggttaatatggggtttacttcaacagttatgatatgaaaactttaataagatttttttttgtattgttaaaactttatagattgatttttaaatttttactataatgctcgataataatgatagtgtaaagcgcttaaactgcaccgcaccatactgtatttttgcaggatagattttgcggttttaagatcacgcggtgcgattgcggtttgagaaattaaaaaaaccgcatatgcaatttgatttttttaaaaaaaattacaaaccgcactaccccaccgcaaacacagttttcgttgctatattgcctagatattaatatcatatagtgaatcacattcaagt

SEQ ID NO: 9645 - DNA, 1264 bp, Cannabis sativa
gagagaatccatatcctttttgcatctctctgcaatgctactatgcaaaagtgtatatatatatatatatatatatatatatcttcatgactaggaaaactctagagtttgtaacaaaaccaaacaaggaatgaacaagtccacatgtctaattcatcctcctttaaacaaaaagttgttgttgatgtgtgtacaaagggaattttttttattatggtgatgttttcttgttctcatgcccaaacacataggaaaggaataaaaattattatacttagaaaaaaggaaaaaagaaaagcaaaagtggtaaaatataaaatataaaagagaaagcatgcatgtggtctcatgcctatgcttacttatcatctatgaattggtataacatataggtttttaatagcttaattagctagagagtagagaccccatgtgcatctccaataaatatatttacataaaaatataaatattgccccaaaagaactctaccaatatttagagatctttaaaatagtgagaactaccaaaagtgtgaaataaagactatttctttagattctttaactctatctctctttcttgtatggtaattttcctttattagaatgagacttttacaagtgtcattgattcatattgttagcttaagattgtagcaaacttccattacttaattggagagtgattctaaattgtaatcatttcatttcaagctctttctctaaatttgaaagaaatgttagtattaggaatatccagcacaacaaatgagatattacattgttactgatgtatataaatattaaagttattacattaaattatatatgatctgatacttaattgtaccaatagtaatatgacacttacgagaatgctaaacaccagtaatataccttttaagacatttctctaaaaaaaattactaataatttagaatacatttactttatattattattcgattagtgtttaatagcaatgctcgttcaaaagtattgggtgggcccacttgttagtttagttttttattttttttttaattaaaaaggtttaatatttaattaagtgatgagatgaggtgcttgaattgagttgagtgtccccaaacacctcccaaaagacacatgttaataccccaataaaagccaaataaggtatacctggtttggaaaacattgacttgtttaatatttagattaagaaaaggacacccattaacacatatactaattctttcacatttttgggattaggaaaa

SEQ ID NO: 9646 - DNA, 536 bp, Cannabis sativa
gcaatagaaggtaaaagttggagaaaaagagaatagggacaaaaatgaatgaaaattgagtaccaaaacttatgtagggaaaataacaaaactctgaatgtgtaactttattgtatttcatttttttttctctaacttatctaccaaacttttatatgtgtattttttttttctcttttgataatgaagatgtctaatattttttaaaattattcttagtacactttttaaaaacctatctgtttaaccatttatgagaatttttaagtttgtcattttataattgtgtatgtataattacttaggtctaactaaaagaattttaaaaattttgaataatttatactgtcaaaaaaattaaaatattttattgcatatttttgaaaacagatagaaagtgtactataaattttgtctcattcactcctataattttttttttctctcttctgttttcaatcctccttttcaaatttaattctatcaaacatggtgttaattctggtttgtattcttgagcaatatctcacaatgga

SEQ ID NO: 9647 - DNA, 530 bp, Cannabis sativa
aataacaatactttatctataatattactcaaaattatgacaattaattacccaaatgatttaatttaatgagttagctttcgacaaacgaaatcctacgtccaaaaagagagtaacaataaatcaaataaagacaaacaatataaacatatgtctaagaaacacatgtaaatcaaataattaaataaaatatataattaacaataaaaaggacaggcttagaagtttataatcatccaaaacattgactaattaattaaataaattaaaattgataaattggaaaaattggaacaaagatacaaattccttgaaaaagagtaataccaactaaagtgagcggcaccccaaattaatgacaagctgtccccaagttttaaaattgatcatgatagaacaaataaaaattgaattttaaattacttggcaccatataaaatttgatagggttaatttgcatgtgcatcacttatttaatttcttttcccacacaattattaatacttgaaactgctggcatcttaagctaa

SEQ ID NO: 9648 - DNA, 805 bp, Cannabis sativa
cgggccgaggtctttgagagcaaagagagtgttcaatttgtctgtaaagttcttgagtgttgcagctttgttacctgttacaatgatatcgtcaacatagatcaacaccattagaataacaccaggacttttgtagaaaaacaatgaagaatctgccttagagttggtgaacttccagcccaataatgttgtctgtagcctttcataccaggccctcggggcctgctttaaaccatagagagacttagttagtttgcatacagcattaggttgagtttgatcttcaaagccctgaggttgtgacatgtaaacatcttcctgtagtgtgccatttaagaaagcattgttgacatctagctgtttaatctcccagttctttgatacagcaatggacaaaatgattctcagtgttgaagctttgataactgggctgtaagtctccccaaaatcaacaccaggtctttgattgaaacccttcgcaactagccgtgccttgagcctttggaggctgccatctgcatttcttttctccctgaatatccatttattcccgatgatattcatacctggaagtttcggcaccagcaaccaggttttattcttcttcaaagctgtcatctcttcactcatggctgagttccaaccaggatgacttaaagcttcttcgactgtagcaggagtatcatttttccagcaccattgtgcttgaccgagatagaccttaggcttgaaaatccctgctttggatcgagtaaccatggggtgagatggttcaagagtagctggtttatgttgaaaagtctga

SEQ ID NO: 9649 - DNA, 632 bp, Cannabis sativa
ctctttatttaaagggtccactttcttttttttttggcttattttaattctcatgaacaaattggattatgtattaattgctgagattttttttggcagttaaatgtttcaaattttaaatttgtaattaaactcttaaccttgccattttgtgcataataaaaataaaaatgataggaggcacctttgaacttttggggagctaaagtgtaaaataaaattaaagggggccattataaaattttgaaagaaaattaatgaaaattgtaaaagaatatgctacaatgctgttattatcgaaaaaattgagaacatatgttcttggttgtaacatcaaattatatgtatttatattttttaagaatattactattaagtattagtgattaaatttttttataagcgacgtcttaacgatatgacatcgagaaaatgttagccatcaatatcttttagaattttttttttaaaaaaaaatattttaaacattgttttgtagatattaaagtttgattgtaaaatcaaactcattaagaatgaaagctttgggttataatacttaataaggatttttctttttgacaaagctttttttttttttaaaggataacaaagttttgtttaatcacata

SEQ ID NO: 9650 - DNA, 808 bp, Cannabis sativa
cttacatccactccaaccttcaattggcatcttattctggacaactttcgttggacatctgttcagcaagtagataacagtgcttaccgcctctgcccaaagtctttttgtgagacccttctctagaagcgtatttttttcctctcaaatacaccattttgatcttgtgcatatggaaaaccttggaaagatacattggttggctatgaatttttaagtacttaagagggactacaaatgttagacttgtctttagatagtcataaaattaaactttggtggaagggttttgtgattcaaactatgtaggggacaaagagatacaagcttacatttgattggagataattgtgtgagctgaaaagtccaactataactagtaggagcctatcaacctctgaagaagagaatatctcaacaacaaaagcgataaaagaagtagtttggattaaaggagtactaaaagagttaaacttgctaagtagtgtgcctataatatactctgataatctgctaagtagtgtgccataaatatagtatgataatcagagttgtgttcacctttacaaaaataatgtcttccatggcaggactaagcacgttgagattaaataccacttcatcagagaaaaagtgacataaggtgaggaaaatttcccgctgaacataaccctgcaaacatgggcaccctattggtaaccctagctaagttcaaacattgcatgaagacaaagggagctgacgctagtgttcattcaagctaagaccctcatcatcatcattgattatataagagaatttgcatgga

SEQ ID NO: 9651 - DNA, 707 bp, Cannabis sativa
tgctacaaccttgccttaaccaaggaaaaaaaggaagaaccagtcaaccaaggatcgaaggccgagtagagtttgagtaaatagagatccacccaaggcgaggatgaatacatggatactcgctttggggacccaagtacaagcatcaagctggtggaggaattagaagaagtagagatcgatccgactatgctgacctagaagctcaagattggatggggtttgttgttcgaaataaaatgtgctttgatcaaatctctaaaagcaaaccttgacaatttttcctggtcacacgaggacatggttgggattgatccatctataatttctcacgcccttaacattgatcccaatttctatctagtacaacaaaaacgaagactgttcgacaaagaatgctcacatacacttaaagaggaagtagaacgggtaaacaagttcattgtcgaagctttctaccccgcatgggtagccaatattgtcttaatgcccaagccttacaagaagtggcatgtatgcatcaatttcaactacctcaataaggcatgtccaagaagtgtttcccaattccaaggatcgaccagcttgtaaacactactgtaggacaagatatcttaagctttatggatgcatgttcgaggcataattagataaagatgcatctacctgaccaagaataaacaagcttccagaatatgttggcttgt

SEQ ID NO: 9652 - DNA, 844 bp, Cannabis sativa
atttatattactcactctcacactctatcatcggttaaactcagcgacagtgcttcctccgacgaaggtattgtttctttctcaaattctcactaaaaccctaaaacctctatcttctgccactccagttgggtctccagccaccggcctcttactccatcgctacaggtatctcatgttagttactcattatttttcctttctattcattttatgataagaatttttagaaatgtagtagccagtgtagattcttgtaatgaaaaatgaaatccttcatacctagcattatctataggaaaattgaagtcagtctttttggcacagttgattcgcaatagtaattgataagattatctattatgactcaaatttgttattaaatcaataattcttgtcgcacggacccttcggttggtgaaatggtgactcttgcttcttctgctgctctggcagctgctacaaataatctgtccaatatcatttttccaaagtgactttttttggaggctgtacaagctatcaatttcttgcgttaacatccgatggttctttgaagcggtggccaaactgaagaacctctgggaaatccaatggattcctcggccctgcacatgggtcataatgttgctcaatgggacaaattttgtgagactattggagaagtgatagtcactgatattgatgcatccattctcactgattctatagcaggggaatggacaattttctaattagttagttctttgtttcggtttcctgctggtttagtctttctgtttgttttgttgcaccttgtctgctgaagtagccatacggcttcttttgtaaggactggtttttt

SEQ ID NO: 9653 - DNA, 881 bp, Cannabis sativa
ccccgccgctataagggacatgcgtcagccaatgcgtgcctttatagcgttggttattacaaaataaccgatgccatatgtagtgttattaaaaatttaacaccctatagtgttggttattttgtaatatttgatactgttggatatttttattcaaattttatttagtcatactctatggcatcaattgtttattactaagctgaaaaaaaatgcttctaagtgcaaaatttttatactttttttgtctctttttttttcctgcaactacagcaaagaaatataaatatataactaaagaaaaatgtcaagggtcccccaaccccatgtagatccaccagtagctacacaaaagtgttcaagaacaaaactctacaaaactcacaattcaatagaaaagcaactatatatagtagcctaaatctaaaatatgaaaagtttagacacagtacaacaaactatacaacgtttatttactccacaaatttggagttatatcatggctaaaactttttgtttaattcattgattcatgtaggtcagttactatacaagaaaagttcaaaactcgacaaagcttataattcaatgaaaaaaaaaaaactagttatgtaagtttaaaatatttaagtttagacaacactacaactaagctacataaaatgttttaattcatttatttatagagaagacatgactcaaacttttatttaatttattatttatagagaagacgtgaataattagttttaagtattttgctatgagatccaaccgtccaggatgctagaatacaagttaaaatacgtaaaatactgttgccctagaaattataaatgtagatggaatcacgtggctgctaggtcagagtgtctgtacta

SEQ ID NO: 9654 - DNA, 549 bp, Cannabis sativa
atcaatcaaacatgtattatgtaccttatcatttttgatccatcagatggtgtcaacagttaatgaagcgtaaaggaaatcctcattggaattgatgcctttgtttttaaggtcccagataaacttgacccaatcctatatccggatgccaaagatgcctcaaggagaggatctccacacgtggaaagccacattacaagataaagaaaaaatgttcaattgattcattctttgtcccacatagagggcacaaaacctcctcaataggaaattttttgtagatctgagaccgaactaggagagcccttgccaggatacaccaccagaggttcttcagcctttcagaaattttactattccacagtctgttccaaatagatggggcaacctcacaatgaggcactctgtcaagagcttgggtgagataggccgatttgcacgagaaccgcccgttactttccaaagtccaaatccatttatcattgcccagaccagacgaattaccccatttcaagatagctaaaatagtatccttgtcgaaaaggcaga

SEQ ID NO: 9655 - DNA, 761 bp, Cannabis sativa
caaaagatcgataacaatgaaaacaaagacgtgaattcactttcataaagtactatttaattattaattaagtttaatatgaggatcaacctcaactctagcaacaccttctctatcctcaaccactttaggcacctcaacttctccgatcacaatcccagcaacctcatccacctcacctctcacaatcctctcctccgccacctcgtccacataattcgggtccctttcgtcgatagccgccgggataggagaaagctcgctctccgcaatctcgtcgggtccttcccacgtgtacttgcctccgtggccggacttgggtggccctcgaccgattccgatgccgttggcggggtggcgttccaacctctgaacccctttgtcggcgagcttcttttccacgtactttagggtgtctgggtcgtgagttttgagctcagccttctccactctcttgcgcccttcctcatcgcggctcaccgctttaatcgtcaccttgtcgtcgtttataggcttcatgatgtcgtttggagggttttgatgtcgttttagagtgttttaaatgtattgtgttttaagattgatgagaaagggtttgttttatattatatatataagtgttagagttggttctggatattactagaaaaaggttttgatttacaaatgatgagtctaccgaagttgcgggatgtttctgccacgtgttttgttgtgtctttttctagtaagtttgagaaatttggggtttaactgagtgt

SEQ ID NO: 9656 - DNA, 580 bp, Cannabis sativa
agaagattccactagcttccttgaacggtgacgccctctatgaatgtgtctttcacaatacttttgatgaggaagagcttctttgctacatctccattttttcccatctgttcttctacatctccatggttcattttccatccctttccttggatccaaacacaatattggcccaactattcctagtcctgtaaccaaacaaaaaaaaccaagaaccattaatactactaattagagagcatagacatattaggaaggaaaaactaatgtgagagagctaatgaacccaccattattgttgagaccagtactagaaaaactttgccaaatgggctgaacaagatgataaggcacagctaatcctgcctctatgtacttgtatattaaagcttgaagctgaagctcatgtagttgaagtatggtaaatccatgatatgatgatgaacatgatcccttgttctgaaatgctcctcttccaagctcaagatttagccctatttgagatgacccttcttctagtccaaatcctataacaaaataacaaaaaagcacattattattctaacacaaatataacaaa

SEQ ID NO: 9657 - DNA, 1806 bp, Cannabis sativa
ttttagttggatgggatacagaggttgacctcttgagtttttgggttggtcaggttgggttgcagcgaaagagcaggatccaatccaggggttcaacaccaccatcttggcagttgtgatatacaatctttgactcaatagaaatagatgtatttttaatggttactcaaagtaagtttttggggttgtaaatgatgcaaagaacattgtaaagtatagatacaaattgtaaacaatagaaagatgtctattcaggagagtaactatttgcttagattacaaagcagatagctttgcttgttagggtcttttgctgctagttggagatcggggtgaggttgttagtgttttattggtgtttgtatttactttatcaattaatgaagtcatttttttataaaaaaaaagaaaaaacaattgtgtataaagaaattaattttattttcttataaataagaatgaactatatacttaatttattaagttgtgaaatatatttttgttatatgtattagcttttaaaattattattttttatatttaaatattaattgtatatctatatatttttaaaatatatgtaaatttgtgtaatgtattgaattgattacttttacttgtcaattaatatctaattcgcacaagtatcgatatcctcattttgcagattgaattgaattagatattttataaacacccctctaatctcattctcatttattattcttattcctttacttttcattccccaacaaaagttagagcatctccaatggagagctataaatatagtgtattgctattttttaaaatattttgctaaaatttaattgcaatgatgatgtaaaatgtatcctaaatttggcctaagctaaaaattgtaccaaatttggcacaaaaaatagcatgggccaaattttaggccacaataaatataacattttttaattacttcttcagttctttgtcacttattaatactattcattgactttgaataagatatatttataagatatgaaaataatataaataaaattaattattttgtatattttgaatgagtattaatgataatattgcaccttgtgcattggagcactaatataaaaaatgggccaaatataactttatggtatattttagaccaaatttaacccaaaatatgcagagaaaattactctacatacttcttttaacttgatgtctttaatttttaccctcccgtttaaaaaattttatgtttacctttttttttcaaccattctatcaattttactcctatcacttcacgatagttttcattcttctctaattaaaattttgctccatctttttcacaaacctactattatgcttaaaattatatcttagttatgtgagtgtgaggataatttggatataatactcaaaaaaaagaggtatatttaaattaaattttatttgaaaataaatttagttaatgtataaaaatattcttcaacttttctcaaatataccccatccattagaaataatcttacccatataaaaacagagattatgctaatttcctcatgatttgatatgatttactaaatctctaatgaatatatcaaattcccctgccaaattcagtctatgaatactaaaaagaactctcacaaaaccataaaatattcctaataaaaagaccgtgacatgtctaacaacttaagctagtctcaattttcaatatgtcaaactaatttttagaaagtaataattcgtcaattgttcatatactgaaagtgaaactgccgtgtatgaacaaaaacttcacatata

SEQ ID NO: 9658 - DNA, 743 bp, Cannabis sativa
atcgaaataatacaaaaaatgattctctacaaatttatcctaaattttaaaattaagttaataaatgtttgtttttgtttttttaaaataataataaaatagttacacatactaaatcatttaataaaaattataaaaatatgtttattacatattatttttttaaaaaaatatataataagtaaattaagttatataatattttcaagtttcaaaaggcagatcaatcactcttcattagagctatatctcagtcatgtgtctgcattttagtttatgtagaagatgtacttatcatggggaatgatgataatcttgttgagcaactaattcaagagttgagctctaccttttttcttaaagatcttgatttagttgattattttttgggaattcaggtttctagaactgtagatggtaatttacttacacaaaccaaatattttcaagatttgctaacaaagggtgatataaagaatgtaaacacccaaaacactctcatgaatagtggtctcaaactttctacttatggtagtgagtctgtcaaagataccactttgtataggtctattgttggcaatctgcaatatgccaccataactaaacctaaatttactttttaggttaataaagtgtatcaatttatgcaaaatcctttgcatacacacaagactgtagtaaaacgaatcttgagatacattgtaggcaccttaaatcacggtcttctacttcgactagtttca

SEQ ID NO: 9659 - DNA, 525 bp, Cannabis sativa
ggtcaatgaaacttatatatatggataaataacagtataaacatttaaagttttaagtttgtaagtggtatgaatttgatgtttatttttaatggcataaatgcttaatgtttgtagaattgtaattttttttttttttaattttgtcagtataaagtctgttatttttcttaaacaaggcacatattaaactcaaattttagatcattgaatcaagacagaaacatgtatcagtgacaattacttttaaacttttttttaataaatttaaaatgaaaaatgaagtatgtattaaagaaactaaaagaaaattataattttacaaacattgattatttatgtcattaaaaataaacattaaatttataccgcttacaaacataagaatttggtatttatatcgctatatataatatataaaaatatgcatgaattgataatagagattaaaaccaactttgagagattagttttggcaaaatggagttatatataccaatctttttttttttgagaaaatatata

SEQ ID NO: 9660 - DNA, 2078 bp, Cannabis sativa
tgggtcattttcgcgggtcgggccgggcccccagcctgacggggcgactttggcccgattattttggatttttatcgagctcgaggcttggcccggcccgacccaacacatattatttcgggcccggcccagtttcaaatattaaaaaaaaaaaactctaaattcctaaaataaatcattcctaatttcttccgttctctacttctgtcccgtttgagcctattaaatcaatcttacgatcgaaatttcctgctacctgtgtgattaatcggccatctcactaatccacagcattattcaacattcaaaagaatatttgtatatgatacattattaatcaaaacatttatatatatatcacctcaaaaaaaacatttatatatagtttatatgagaaaacgagagaatagcattgaactctactactcactaacatatatatatggaacattttttaatgggtactacattagtaaagatatattagttatataagcctatggttatcttgaatgttttgtgctaaggaaagtctttatacacatagattacatgtatatagaattagtagaattgacaaatacacatttttatttaatatacaatattggaagttaagtttatataggttgaaattctagtcccttatttgaaaggcatattgaataatggaaagagagtttgtattttgagataaattacttttggtctaagtttcttgatttacatccaataattgacttgttagtttttgtttctttttagtttttagttttagtttgatctttttttcatttagggtgttagattatagaacataatcaaacatacatattagcaaatctagatcctgtaaaataagttccaacaattagcctcagagccatagtaatgattactttttatgaaatatggatttaaaatgataatttggttgatttggatgtgttcatgctggtttatgtgcataattgatgattaaatgttcattacaaattttctacaaaaaatatttttattttcgttctagaagtattttttttggaaagttagtgaaaaattaatcaatttagcttttacagaacacaatttggattaaaattgaattagttatgattttttgaagctggaaaatatctaggctagggtttttgtgctggtgcacgcggatttgaggtgaagctcagtcgaacaaggcttcaaacaagcactgtctgagttttctaggacaaggggctgtccaaagttgcacttgaccgagatatgggcctcacggaccctacatgcagcctacccactcagctgatgtccccatttcgcgtgcggggtagtgtgtaatgcatactcctctcattttcccaattttgccatttttcagcttttgaaaattatttttcagtgaaataaaattcaaattttactagaatttggtgtagaatcttaactttcaaataaaattctaattatcaaattaaaatcaatttttattaattttattataagtttaaattaattttagatattagcaggttttaaatttgaaaaattaatttctcaacaaacttgctactatggttattttgaaattttattatttttatttgatttattaagtttaattataacatcaaatatttacatatttaattgataaaatatgaaacgatcttactttactttgacaataaaatattaataaagtttaaagataatttagataaatttcaaattactaactcgatcaatttttaaaaatttattatttttaatatattttattaatttaaattataaaattagatcaatattaattatttgatattttatcttattaaattttattttattaaaatttgtattttttttttgtttgaatagatattttaggattttctaaccataaaattttcaaaatttaggatattttattttatttattttttttgataaaattataatatcctaaccatatattctattttcaaatttttttattttattgaatttaatatgttaaaatatgaaatttggagccagtttagtatagctgtgcaaaactggctttaaatcgactcact

SEQ ID NO: 9661 - DNA, 666 bp, Cannabis sativa
tttgttcaaaaaaaaaaaaacattgtaatcgtattaattgtatttggtttggtgagagaataatgtaatggaataagagatgttgtaatatcccctttcttgaaaggtaattaattttctttagatttttagtttattttgtttggcaattgaggtaattaatttagtggagtgtgagatttattttttttagtaacaataaaatttttgttattttattttttgttctattttgatgctagataaataattaaattatgagagataatttaatatttaattaattgtaaatattattataggtatattaataataataataatattaaatatattatatacacacttggaagcatcttattattattatattatttggcattgcatatggggcggactcacatgtaagcgacgcgggatagctgtccctggataaaaaattcagaaaaaaaatacatgcaattttgttagttacaacatatatttataataaaatataatatttatagacataatattaaatttaatgtaatagttaaattagattatgtagaacattatttttttcatttttaagtttacttttgccctctctaccttaaaaaaaaaaaaaaaattatgcctctttcactttaaatcttgagtcgccatgtaattattaaacac

SEQ ID NO: 9662 - DNA, 695 bp, Cannabis sativa
cgtgatattcggagctccctgaataaaactttggcaagcaaagcgatttattggaaacaacgggcaagaatctcttggctcaaggaaggtgataagtgttttaaattctttctccttttggctgctattaaaggaagaagaaatgccattgagagtatattggataggaataatgtctggattactagacgagagttaattggtcgggaattcattaatttcttcacaaggatttttttggggtctcattatggataggagattaattgcagtcagttgttccaagagaggatctctcaagcggactaggaagagattatcatgaccccttcacgtgatgaaattagaagaacactctttgctatgaacaatcataaggcgccagggctagatgggatgttagtacttttcttcaagcattattgggagtctgttggtgatgatttctgtgaagcagtttttgatttttgtgtgaatggcaatatgcataaggtcataaacgctacaaatgttgttcttatccttaagatccaaaatccaaaaaaacctaaccatttaggcctatatctctgtgtaatgtgttggacaaggtcatatccaaaattgtagcgaatagaattaaacctatcttacccatcctcatatgtcccactcaagctgcatttgtcccaggtaggaatatacaagataataat

SEQ ID NO: 9663 - DNA, 781 bp, Cannabis sativa
ctcttcgggtcttcaccatttttcttctttgcaaaaattgaaacttcaaaatactcacacacgatttttagaaagaaaacacagtgaagaagaagttaaaattgtgtggacaaaagagagtagatgtgatatatttaagagacaagacttaccctttttgacataaaaccaccataaagtagttttctttttcaatttcaaccaaaaaggaaaccaaaaccaacaccaccaatacacacgttcagccaagaagttactccttttttatttagaatggatttgcaaataataagggaaacaaacattttttttaaaagaaattttttttcaaaaaaatgcaataaagaaactacaaaaatagggtccattaaaccctacacgatcagcccaagacactttccctttttttctttttttagttaaaaaaaccaagataaaaatagcaacaaggacaactaaatgataacaaatatcaaacataccatataaagataagttgacaaaaataaagacttgatgaccaagaatattttagaacaaataaacaaaatgctaattttcaccacatgcttcaattaattcggtctactttgaaaaccatgattttttattatttctttttaaaataacaagaatgaaaaaaatacctatgatcaatgtgcatttcttgaaatagacataagacaagtcaaataaaaatagatgtcagtgtatgatagagatgaaaaatacttgtgatttttaaaaaatagagaggattttcgagagaaacaagcacaat

SEQ ID NO: 9664 - DNA, 1430 bp, Cannabis sativa
caaaatatagggtcgaaaatattatttagcctaaagaaagttaaacttaccaagtttggacacacaacaactacttgtttttccagtaatacaccagtgagcaatgacaagacctggaagaagcactattttatcaaactccaaatccctataaaaatccaaaggtacttgatgaagcacatttcagtgctgaaatttcaatattagcacagccaaaactgtagtagccgagttactcttacgttttcaagggatagagcacgacaaattgtagcggtggtccataatgatagcgccaaagcttcttcaaatgcagccagcttaaaattgacctttacacaagatcaaattgtattgagaaaacgcaagtcacatcgagcatagcctggtaactattaagaaacagaagaaaatacctcagaaggtgccaatgaagccgaatatttttggtgaaaaccaagggaaggaactggaggtcgcctgtattcaatagactgcaaatgttcaagaggttgaaaaactagtttacctccccttggaggaagaggaagagcatgatatccacaaataatctgtagcaagtcatttttattttcctaccacataaatcacacaacaaggaaagatcaactagtaatcaaaacaagatctgtatcagatagatgtatggacaataaaaaatcaactaaccttagcccattccattattaagtcatccctatgatctttatcgaagttggcaaagagttcatcgtcgtcatcctctgatgtcatgcttctagctgggctgccaagaataacaatatattaattaccagactatacattgaaaactgcaaattcctaatgtatgtaccacctgaataagaattcagaactctcaaggtgctccaacgtgcgaaatctagaggagaaaggtgctctaatatctggtgaagaatggccttcatagcttccatacaatctctccaaagtatctgatcgtgtttctgaggcttcagaagcattatcatcaaaatattgcaagttctttctaccatctttgtctatctcccttgcttgactgatttcggaagattcactagcagtaatactttcaggagagttaggctcccatatccttagtgaggactgtggaacgatgttatcgggtataattccagcagcagcagcagtcatagctactgcactgtcgacgggtattgcagaattcatccaaccagttaaaggctctctctcaggcgattccacattctgatgcatttgatcattagtagaagggacataatcatagagagacatttcggtgacaaattctgttatccgattcagacgttgctgggcaattatactgcagccaggagagtaaaacttcagtcacaagtaatggacatacaaaaacaagattgagaggtgaaatttacctattt

SEQ ID NO: 9665 - DNA, 1208 bp, Cannabis sativa
aattaaatattgatattattgtgttaatttgtggttataactaatttgaatttattatgttttacataaaagagaatgaattttctttatggaagttatttaatatagtttatatttggttataattgattggaatcaatccttgtttaatatcttcggtgttgacttcgtttttagtcaacgacgcataatcaataaaatgataatttaagtatttgagattataaaaaactgtaaacgacatacaaaatttatagaagttcgattcctttcagcgataatagcctactctcctttttattgtattactttcacgaaaatatataaagatcacaaggtccgctcaggtgagtgtctcaatatctctcaacaaggttacaaatatgtcagtgttctcaccaagaaagtctccttgaatagtgaattgacctcactatttatagggaagattgaatacataagtcacctaaaaaataggatatgaatggaaaaaggtttaaatgtgaatcccactattctctcattcttatacatcaaatcaaattccatgaaaatagggatattaattggctattattgcgaaatcggttaaggaaagtatctctaaagatattttagcgaattcctctagtcgtccattcacgcttagtggctcacatcgctcagcgcgaggtgaggtcttgagcccatccagaggttttggtattagttagcctggtcaatacaaattggtgcccaggggcattctcccttccacgtgttagcctgccagatgccatgtcatcagtgaaaattttgggataacgtttgtccctaagtccgcgtggaaacttctagttgtacgggggctttctatgcctcacatgttgcacgactaggtggcaggcgtttatgcccacgtacttgcactgatatgtcatcaatcttgcttgaagcgtgtgaatcattccttgtctcttcaaatctctggattaattgtgttgtcttagaaactgcatcttagagatcgtgcactaacagttactcaaacttgcaaatattcccgccaaacttcaataaaattcttcggatctgcctccacaaaaacccccaacatagttccctattgctttaagcattgtgtcaaacataaagcttgggacaaaacaccatgaacctgcacccacatgtacaatcggttaagattacgggaattatctccttcatta

SEQ ID NO: 9666 - DNA, 607 bp, Cannabis sativa
actacttttaacagaatggagcatcacataactttcatttatcagctccatccgaaaaggaaggccatttcgtattattagaggagaaattggcctatacatattgcattttcttttacattcttaccaaacgaactttcaataaatggaccatcataacaattgtttactatttataatggaatatataggtgtttttttcatttcgtacactctacagaaggtgcttactatttatattttttcatgctatgcactgttagtagttacgctactatatttaattaatcaattgttttttaatctacatgggaatgaaatttataaagaacaaaaaattgtcatgtttttatgtaggaatgtaattttttttaagcaacttcattgttagctgaacgaaccaagttcagaaattaacattctacaatcattaataataatgccatggagaaagcatcagctttgaatttcaaatttcattaactaagcagataatgaatccaccgcttgatggtggtcatcttttctccttaacccaatttagtgcttcttttatttccaacgcctccaccaagattggagtcacttttccatctacaacgctgaa

SEQ ID NO: 9667 - DNA, 692 bp, Cannabis sativa
tcttcttcttttttacataaagattttctgtttaaatatagaacttgaaatgttattttgagatacagagttctttttgagaggttgaatcttatcttcaaatgcaaagattttttggagagagtggaatatgtccttcaagtacacacctttttttttttattgtttagagaggcggagaggtgaaagtgctactgctatatggttgttgttgaaaaataagagtacataattcattgctttcttatacgttaagttaagatactttccaaagactttaaaagaaaagaatttacaattgagtaaagacacttggatgcaatgtttatatatacttactgaagaaaacaaaaaaattaaggaaaaaaaggtacttgacatctcacgaatacgtaccaactttgtatcacatattgttgtttatcaatttcaacaatctaattcttgttagttaaaaaaaataatctaatttttctcaatatgaattaatattagtaagatataacgtacaatacatactttaattaaaagaaaaagtacaataaataaaataaaaatacaagatactcaaaaggactacacttgaaatgatggatattgattcttctttatatctaaataaccattatattttacttttgtggctggtcatcgaccaataatttatccacaaatatatacatagagtaact

SEQ ID NO: 9668 - DNA, 621 bp, Cannabis sativa
aaaattaagcgtgattttgtctctttaattccaagtagacttgaaagtgaaattcctaatgaattgcgtcagaaaaagtcactgcttcaaaaacagatcgaaaaagttgagagtgatcttcataaatgtaaggagtattctagtagtagttcttttggagtacaacgtttgagactcgataacaagtaacaactactactcttacggggataatggggtctcaaaattgatgctgggtatcaaatggaataattatgtgtgtatgtgtgtgtgtttattaatttcttttgttcaatgagattgtgattgtgtaagtgtgttgtattgaatttggaataaaaataaagacaaaaagttgttataaaagttctacgccggggaacaaatgagaacaaggcaagaacacactatataatataatggataaatagcggtataagtacttaaagttttatttttagcagcataagtactcaatatttgtaaaactgtaattttctttcaatttcgtcaatacaaactctgttttgaatttattgaaaaaaacatttcgaagtaattgatattacatatttttatctagacccatgatgaagaattaacaaaattagagaaaaatta

SEQ ID NO: 9669 - DNA, 506 bp, Cannabis sativa
gctttcctcttacggttcctcccactcttcattgcgataacatgagcactcttcatcttgcttcaaacctggttcttcatgctcgcacaaacgatgtcaaaattgattatcactttgttcgggaaagagtcaagcgtgggctgctccaactccgcttcactccttcggaagaccaagttgctgaatgcttgactaaatctcttgttacatctcagttttagctcattcgctccaaactcacggtccttccaagccccgttcatttgcggggggatgttaaacaatagaaataacaattactattctcttttattattgtattgacaagtgtcctaaatacaattgttactctctctttgaagtactataaatacccttgtaccttatacagtttttcttgaggaatataaatacaatttcttttccttatgtcaatatctatacttttaatatcttatacttctagaaatacctatacattaaaaaaaaaaaaaaaaaaactcctt

SEQ ID NO: 9670 - DNA, 556 bp, Cannabis sativa
tatataaatttaaataattatttacagattaattcctaaaaatgtccattaaaaaaaaaagtgcatataactttcgattctcacttaacataatcgacactaaatgagtcttaagtgtcgattcaaaactgacacttaagattcctttagtgttaattatgaagttttggttatgaactaacacttatactcaatttttataaatattaatttttttttatttttttggtgtcagtttactaatcgacaccttcgagaaattataagtttctgtttagaatcaagacttaagagttagagtagttttaagtatcaattttatatatatatatatatatgtatgtatatatttagtgacattttaaatgatatcaaaagttcattttgtagtagtgagaaatcttgtgaaagaacacaacaaaagaataaacaaatcaacaattgtgtcctgagctgaggcagagttcgacgtcagagtcgttgaagaagagttcaccatgattagagacaaaaagaagagaatcgaccaagaaaattaaaatttcatattttaata

SEQ ID NO: 9671 - DNA, 830 bp, Cannabis sativa
tcgcgggtcctgacagcaggatcgatcataaccttctttcccttgtcctgggtagccttgtgctgcttcttcgatgaattagccacctgcgtaggaacaacgtcgcttttcctcttctgcaaaatgactggagaagtcgtcgcagtaccaaccttaagctttcggttgaaagtttgagcttgctttagaaaagttaattctgcgagaagattatagataagaacttattctcaacataaaagaaagtgtatgccaagcgtgttacctaatgttggcctcgaagtctgtttggaaagacgcttgtctattctttctttttttttagaaggctccttgtatcctggttctcgctgaaggctggcgttctcagggatgagcttgtgttcgcgcaattttgcggtagtacacagtagtcgccagtcgcgatcttgaacaggaaggccacctaaaacttcagcgatctccctacaggcaaggtccagtacaggtcgagccagtctatctgtgattaataaaaatagacattagcaactatacaaggtaataaaaatatatgctaagtgtcaagatatgcgacttactaggtcgtcgattgaagtcagttctaactcttagcactttaaacgcgtagaacgttcatagtgtctacatcaagaaccaagattcgtggagcaattctacttcagtacaatctagttggtactggaagaagatggtagccctcaaagaccatatcagaattttaaccgatcataacgtatttcagagggaaaaatattctattttagcatgttacaagctgctctaaccctctccaagtaagttgaaat

SEQ ID NO: 9672 - DNA, 728 bp, Cannabis sativa
ttgtgtggagaaaataaaacattcaaaggagacgaatgccgagaagaatacaaaaggaaaataacgtaagaaaattttctgtatattaacaatagacttttaaaaagtgtcctaattgtagatttatatttacttaggatgcatttatttgcacttaataagggaatgaatcttattgggtcaaatttatattcattaagagcatttgtgttttattttgttgaaccactttttagcacttaatgcctcttagagaatcagacatgaaatgatctcttaaaacttttaatacttatatatgttactttttattttatttttctctttgctctacctcagtgtaacatcttatcaaatcaaattaattttttttctcatctctgacgttcacttttgtatattttaacatttatattatatataaactatataatgattgtttaaaaaaaaatgtaaaaagaaacgctcttctttttttacacaaaatatatttttttaattcatttaaattaattattattattatatatgagaaagcttatcttcaaaaaatttcatcttcgtaaattgtaatttttctcaaaatttaataaatatttgactttttttaaaaaaataaaaaataaacgatagcttaataaatttattaataatattatataatttgtaaggaataatattataaaattaaaaacactaaaaatcaaaaaaaaaaaaaaaaaaaaaaa

SEQ ID NO: 9673 - DNA, 543 bp, Cannabis sativa
ttttttttttgaaggaagtaaactacacaaaggttaaacggcatatcttttttcttaagaaaattaaattaattactatttttttaaatgaaattatttgctaatatgtataattcttttttttttaaaaaaaaaaaattacattttgattctactaatattttaaaatgtcattaaacttataattttgtctcatttctgcaaaggtgattatgtacgtattttagtgatattttaaaaactactataaattagtgacattttatatcaaatgtactaaaacatataaatctaacacttttaaggaaatgttactgtcatttactctttataaagtgatactttcaaccaaatgccactaaaatactcttattgacgttgttttaaaaatgttataaaatcagctttcaaaaaaaaaaaaatgttataaaatcaaatatcacttcatccaaattttgtagtgaatgaagtggtgatggagaatttaaccgtagttgtctatgctcgtggtaccattagctaacaggcccagcctaataaatt

SEQ ID NO: 9674 - DNA, 509 bp, Cannabis sativa
ttagagtaaaatataatatttttccatattaataaaacaaattgtaattttaaaagagaaatttttattgaaaacctaaattatgtgggtcttaacaaaaataactaataagaacctaaataaataacaataggaacacaataaatctcatttaaaaaaatttaagatcaaaaagtgaggaaattaaatatgaaacaagaataaaaaaactatgaataatcaggccaaatagaaacatcataaattgaattccactccacgaacgaataggcttgcatgagcttataccaaactccccaaacgacgccgttttattcatcgacttctcaaattccacttttaccctttcacaaaccgtttcaaaactagctttattcggccaaacgagaaaatcgtagtaactaacctttccgcgaaactcaaactacaattccgaaaccccaaaaacgacaacggtagtgttgtcgttttctaaatcccaatgactaataggcaacgtcatgttgctg

SEQ ID NO: 9675 - DNA, 654 bp, Cannabis sativa
cccattttttgagcccaagttcaaagtcacagcctcaacttcagtatccacattgccacatgtcatctcctcatcttcagtattcatccccataggtaattctccactatgtgacaatcttctcctctttatttctgtaattgtaagtccttcttcattgatttcaataatatctgtagcagtgaaagcaatattctctccccccacattagcagctggtgtatcaatcacctttaatggttgtttatgatggatgttgtgaatattgtgaatggcagctgtagacatatctccttgattaatgggattggtatcagattgaatggacttactatgatctggtatgccaccaattacggcctcagcatccctaccagtacgatttccggttgactggttatgaccaccggactgtggctgcatagggcgttccgcttcaagtcttttatcaaactctgtatctcccagttcagtacgcagccattttgctccgattaactttgtctgtcttctcagtggtgctttcatgaaagtgccataaggtttggtgattttttctgcaggagtatcgaatagtcacatacagaagcgatttgaatgacccaacagaccacaaataaaacagaaaagagggacattttcatatttaaaagt

SEQ ID NO: 9676 - DNA, 749 bp, Cannabis sativa
ttaataattaggttcacacaactatctcgttaataatctatttaaaattttaaaaattcataaatatattaaatatattgtctaaaataaaattttaaattaatgtatttaaacaatatttatttatagaaaaaattacaagatcgaattatgtaaatctgtttataaacagtatcaagagagtagacaacttagaaggttaggaattaactgttagaagtcgttaaacttgtaattaattattttcagttagttttatattattgcttttacttttacacttacttgtatataaagttgtgtaacaactcattcattcaataacataaatgcattctctttccttttcactctctctcaaaaatttaacatggtatcagagctataacagttcacagttatggagcaccaatcgaccttcaatgggggagcctcaagattgaactaggctcaaggacaaactcttctcccaaaatcgtatcctgtgtcgtttacacattctttatcgatcaaactagataaacataactttctaccatcgaaacaccaagttcttgcttcgatcaaaggaagtcgacttcaaaaatttctagatccaactcaaactctcacgcgcttcctcactactgcagatgaagaacataacatattcaatctagagttcgaagattggaaacacaggacaatcttcttatttcttggctcttatcgtctatgtccgagaaaataactaattgcatgataggatg

SEQ ID NO: 9677 - DNA, 563 bp, Cannabis sativa
ccaaaaaaacataatctaatttgcggaggctaagaaagctttgaaagaaaacaagaaagatgaaatagtgaagaatgaaatgagcttagctaataagcttaagctaagactggtcgtatttataatatctgatagagaagatagttacaactaattaatagacaaaacagaattagaaataggcagggttaacacaaatttacatatttcagcattatcttaaactttgttaaaaagggttctccatttggtcaataatactctgcaatccagacctgtaacttggatagagaagctttactccgagttccttcttcatacgagcattggaaactcgcttctccccaaatgaactttctttcttaacagtgactaaaccttcttcttgctcagcagaccatttgatctgaccaggccatttcttctcaatcaagtactttgcatatgcaaatacttcttccctggcagctgggtcatcatcaacgatgttgagcactttcctgtgtcaatggaaagaacaaaagaaaagaaatggatatgaatgaaagtaaaaaagatgaaaa

SEQ ID NO: 9678 - DNA, 689 bp, Cannabis sativa
aataataaaatatttaactcttatcggtattataactttttcaatcgtatctaacctatccgtataatatatgcatagttggatatgctttcaaaatagatcatgatacaatggcttcggagagtggtgtggcttaaagatttcaaatttgataatgaaagtaaggagataagatatactgagtgcttataatttattctcttctaattttttgaatggattaattatttgtgcatgatattaatatttattataatggtgatatatatagactcaatgtgtaaagtccattatcacactcaattctagcaaagctttatttaccaactcaatgattttatttaaagtaactataaatatctatatatatagataatcttattcaaagaaaataattttgtttatattgggtggtttttaatcatgtcatttgtaatttattaatttttggttagataacaaagggttaggccaaaacataattcttataatttaatttctgtcaggtttatacaccttcttcttacttactttaatttattgatcatgtatatcaccaatttattaaaaatcatatttctctttcgaaattcttctttgtatttcaagaattcatcatgaattttttttacaatattaatgtatttatttaagtaagaaaaataaaaattgaataaaatagttacttt

SEQ ID NO: 9679 - DNA, 607 bp, Cannabis sativa
aagttaggcatagtgtaagtaaaatacgttattttagatttacctacggaaagatatactgtattgattatgtgcctttatttgtaataagtagttcccgttgattcaataaattcattatcatttcttcctcctctcttcttctctctttctatctttatccaaatttaattttagagaaaatgctaaacgatactagtggtgtctagcaccctcctatcaatatcgctattagtctaattaagtatcgggtgccatataatttaatataataacttatggagtatcgctagcctatcggaacgcgacatgtcaagaaggtgctaggcaccactggtgcctaatagtaatgctcttaattttaagaaagaagaatgcgaaagataagtagcgattaaaaataaatttggagaaccactatcggctatctgttctcctattccctgccgaaaattctacattgaggcgcaggacccaaagagactgtcgtacccgcacccaaaatcagtcgagggtccctatagtcggtcttccgaagacgccgtaatagttttgtccattgtcattagcacgcccacaatctcacaattccgataagtctatgttt

SEQ ID NO: 9680 - DNA, 1016 bp, Cannabis sativa
atagagtaacattgcatgattaaagactggttgattcaccgttgttctatgtacaatattacagatgcaaaaaaaactagtggtggtggaattctttttctgctaaactcgatcatttcaagcggtccaaagagcccaacaaactgttggcacctcaaacttcttagtagtggtacaacttgtcaggaccttctcaaaccagtcgccaaatttagttgttgaataaataagtctgtctacaagaacacactgccaacactcaaatactagcgaaagaaaaaaaaaattatagtgatttattttaaattaatagaatcgcggttagttagcacggaaagaaaaaagaattatagtgatttattttttttccactacaaaagagacaatttttgccagtttaaaaattgatttttttaaaaaaaactgacagtattgaaaatgtgtgaacatttaaaccgacgttattagaccctcaatagcgtcagttataaacaatctttaagaaataccaattattaatgaacatacatttgaattttaaaaataaaaataacttattgtcgtctgtgggtcccaattaatcggttatactataaccgatgattttaaatggtcaggtatacaatagttttctatttaaaatcgacaactatagtgtaggtatataaaaaccccctgatataataattttcattttgtcttcaatcaaactctctctcgctccttgctctctcttgtcctccacaaacctaatgagccacccacccctcacagcctcgacgagcaacccctcctcccccttccttctccttaatctctccggccacccacccttccttctccttaatctctcattccctctcctttattcgtctctctttcaccctcctcctcctgagcccatgaaaccctaaacccagcaccgagcccattgagccactaagatcgatgggtttgcccgtctcatctctgtccctttcgactctctccaggagattcgaggggtcatccaccat

SEQ ID NO: 9681 - DNA, 715 bp, Cannabis sativa
aagtatgagatcttgatctttaacaaaaatccagcaacaacaagagaattaacaagattctaaactagcttgtcaacatagtcgaagatggagagattaccttttctgatattggaaactggcccttaagctgtagaagatacgaacgagattggcttgagaatttatgctcctaagctcgctataccgagaaagaagtggtgaagatcacaacataagcaagaactccctctgacattgacgatcgtaaccaagagagaagtagttggtctttccgtttccattggccatacacgggtttgggttcattgttgagaagagtgagagggggagggacacctatgaagaggatgttgtcgagttcatggtcaatcacagtaggaacaacttgtgattttcatattagaaaattcatgcgatcaagtttgatggtgagagatggtatgttaaagggagctataaaaagggttccatagtgaggtggcctgagttggagtagcaactggaattggagtggcttggaggtcatggaatcaattgaggaagatttcattaacgtaagtcaataacaactgataccatgtaaagattaaaggaaagaagagctctaagtttcaatgaaatatgtttagataatattgaatcaaaaacttattcaatacgagttaagactctttttatttataaaaaaatgtagagtacaaattaatcaaga

SEQ ID NO: 9682 - DNA, 524 bp, Cannabis sativa
ccttagaatgattacacctatattgtttgatagtataaattaattttccacctcatagctcagatatccaatgtatttaattaggaaagtgctaagttaaaaactacaagagttggtgaatatttatggtgtattttaatattgagttacacattattttaatttaatgaatatgtaaagaaccgtactaaccaattacaacgtaacacatcatattaatgtattgttgaacactttagaatatctaatagcatactcgtattctaataatttaaaaatacatataatatatatgctaaattacagacctgattataaacactaatacgtgctcgttttcatgcggtatattttgatgtgatgtatacactgtaattgttctactgtcaaaaaatgataaattggtttaaatatattgatttcgaggtggaatggtgttagttaagagtaaacaagctttaggttattaatcaatgacttaccacatgtgttaaatttttaaatcgtgtacgtaatgccaactt

SEQ ID NO: 9683 - DNA, 752 bp, Cannabis sativa
ttaatttaattaaattttagggttgacatctaataactctaattaaattagatttaaattagattggatatccactcctagttattacaaatacattataatgttgttattaaaataaaatagaattgaagtgtcacctctatttgatttttaaggggccttttatatttttatggtattttattttatttattttaatttttttttataagcttaaatttgccatataattgtaaatgtctttttaaatatcatatttaatattttaaagtttatctctatttgtgcaaagcataaaccgataaaaatcaaatgtatcatattccaaaaattgatttttcatcaataaactaattccttcatcaagaaatcatgaaactgattttttgatcaaaaattggttttgattatataaaaataaaatttatatatataagttttttttattctaatctatgataatttcatcaagaaattaacttctatcaaacaattagttttaattatataaaagtaaaatttatatgagtttttaaattttttatgatattctttttatctatgatgatttatctcatattcttaatttttttttataaaaaaatatctgtaatcaaatttacatgacatatatatttaaacttttattttttttcatatatttttgtaaatagcctttaaatctattattgaattatttttccaataaatttcatttatggcaacacattaatgatcacaatgtcgttcac

SEQ ID NO: 9684 - DNA, 559 bp, Cannabis sativa
gaggcctggctccaggtcctgggtctggggttcgattcaagttcggtgttcggctccagggtcggtgtctaggtccaagtttgagtttggatccagattcgagtttaggcttggctagggtttgggtctgggttcggggtttgagagtctgggtcttggttcaagtcctagtccggggttcaagtcttagtccgaggttcgagtccaggtcttggtctatgtttgggtttgggtctgggtctggagttcgagttcgggtctgggccagggtccaggtctaggttggggccgaggtcgggatttgggtccaagtttggagtccgtgtctaggttggggtctgaggtcagggttcggtttcgggatctagttttaggccgaggtccacggtatgtaagcaaaaatataaaatataatatgttagacaaaaaaaattatttttgaaaatagaaaacaacattttgatgttttctattttctaattttttaaaactcaacgttttaacaaactgtttttaaaaattttaactaaatggctcatattagttttttttttttttt

SEQ ID NO: 9685 - DNA, 732 bp, Cannabis sativa
aattatgttaaaggcctttatagacttttagagacttttcttgtcactgtaacagctggacaagctactgggtactaaaagtccgtttaaaggatgggtagtatttgattaggtataagttccagtatgcatcatttttataataattataattaatttgggaactagttgagatgtttctatgattgctattctgttgaattttttcactttgtatcttgatgttgatttctttttgcatttaatgtttttgcttgtgaatttagcttttttaatataatacttttatttggttttttgtaccaggggaaatcttaatctcacggtattgccaacatctgatttacgcctttcttttgttggtgatgatggtcacaccgagagactagttgtcttgagtagccaatcccactgttccacaataacaatagagggtattgcgacagacagttctggcagatctttccttataaaagtcccagagagccaaagtttttacttttggtgctcagagaagtcaaagctcttgggtaacgagttgctatcaaaggtatattttattatggtaactaacatgcaagtctgagaggattaacaccaattgactatttgattgtgtgcataagattcataatcttggctggatttttctttgttatttttggtttggtcttttgatttgcgtgggattaattaatttgatagtcaaggatattctaattgttccactta

SEQ ID NO: 9686 - DNA, 547 bp, Cannabis sativa
aaaaagatacagacaacagttatccccaagttctaacttgcagttttttaagtttttaagttgggacttgttattgcatgcccctttcagctctctcccggacgggttattccacgatgtcacggttatataaaagtacaactattcgcgcatttacaccacatgttttttattgagtggctcgtgggcctgcttgcttttccctccttagttttggcaatgccgattcattctctgaaaaaaaaaaatatcccaagatatgcaataaatgtagggccaacagttggatactcgagtactctaaatgtcccctcataaatgtatttcttcatgtcttcctccaaccattggatcataatgtgctaataagtgtttgaaggggtcgtaagatcaaaagtacctagatcgagggttgaaggctataaataccatctaccttctacctttttataattttattttctttaccatttttgttgagagtacaacctggaaaaatatttgagctcaccaaattttctttcgttgtttctgttgggttttgtgc

SEQ ID NO: 9687 - DNA, 1488 bp, Cannabis sativa
  modified_base (1377)..(1377): a, c, t, g, unknown or other
gctacgtgttacggcgtacgttaacaaaacgacttgtcgttttgtttttgcttgattatatacacgacatgtcgttttgttattctatcaatgaaccccctttttatataactattgaaaggggatcaagtagcggccattctatcctcactccttcggtttaatagcattcaatgagagcttatacattatccctaagatgattctcagtcgagattctcttacgcagagataccatgacttactcaatagggcgaacaaatatatgttacatctaaaagagctctacttttaaggcctaggataagtgctactatggatagacgaattccgtgggcaactaaatgagaaatttagcgtaaagtcatttaaccaattacatcacacattcggagtatcatttaacattattactctaactttgactaaaaaaaaataaaaaaataacatataaaaaaactaaaggaacattttgcttcaagaacatacgattagcacaagtacgagaaagactaacacaaatatttataatttaattagcaaatcgtttaacataatgaaccacatcattactaatgattccaataacactttacaataactaacaacagttgcaaaggtataaattaaaatagttagctcaaatagcttgtaccacccaaggccgaccctgatttttttcgacaattgttatttttaccttgtaattaactcataaaataaagaaggaaatagataaataaaaataattacagtaaattaggttaattaaatatgtaaattctacaatttatatacaacaatgcatttgtttagttctcagagacaattatttagtttaatttttttgatggctatgtatgttgtaattatttaagacatcttttaaaattttaagaaatttaatttaattcaacacaccaaaaataaggttcacagaatatattgtatacgtgactcttttattttatgcgtgtgtgaacgagaatatttgaacactactttctatgttgtaaattattctgaattttgtcaaataaaaaattctcataaatactgaaacagatagaggtgtatcagtgcaatccttttatggagtgcactgtgaaagtaccaaattttttatgtgaaaaatattgagtgcttctaaaatacacaccctaaaatagatgcatcgatacacattttatctgtttcggtatccagaataaaaaattagtttaatttgttttatagtcatgtacaatataattatttaagatatcttgctaaatttcgataaatttataataatttacaataaatttcgataaatttataataatttacaataaatttcgataaatttattttcggcatgttaaatttttttgaatnttttaaaattttgtaggatgtcttaaaagtacacgaccatgaaatttaaactaaaaaggtctcttgaataccgaaacagataagggtgtattgattgacattttacaatat

SEQ ID NO: 9688 - DNA, 861 bp, Cannabis sativa
taatgatttgcaaaaggtgtaaacaaatcaatgaaaatctctgttcatcaacattttctttaaggatgtaccgaacagattgagcaaaagctttgatgtggctatctcggaaagcttcttcgacggtggcagtcttacaagaatttgaggatcgatcgtgactcagcaattacctattaaagaagcattgttatgagttttttaactgtattgtgatattggggcagttttggtgacacttggatcgagaatgacactagcaggaatgagtgataatgtcaactaactttacattttgtttgctttgactgaattgaactgcgttgtttttcaggttcaaaagatcaaccttctgtatgactagttctttggaaaggcagccccatggaaagttctactatatataccctttaattacaagaaagtatatattttttgtggccggatttagtttgtgttcaagtcttttagaaaaaaattaaaatttctttccagaatgtgttggtattcttccaattgaatctttctagtttattagactttgagtagtagataaattattttagaacctcacttcatagtcgtattaattaaacaaaagagaaaatgtgttctatttgtaaatatactccattagaagggtgttgctgattatggtggggctagtagaatagcttggaatgagctttataaagaaaataaggaaggaggattgggatttcaggacattgtttcgtggaacatagcaactttgagaaagtatttttaggttgtgggaacaaaacaagacactcttcggataaaatgagtcaacaatgtgtatatgaaaaactagtcatggtgcaactcttctccctcagt

SEQ ID NO: 9689 - DNA, 1059 bp, Cannabis sativa
tagaggtcaaaatattaaaaataacattttaatccattaactatgtatgtaacaaaaaaataatgtattaatctagactcttcgttctctctctctcccatgcagcagaacaaagcttcgagcaccaattttgtgttttcacactcgtctccaaaccgtttccacattgtgaaacccatgaccaagcccagatcttgcgatctccgtggctccggctcctcctcaaacgagacccaaggaagttcgactcacccaagccgacccagaagtacggcgcgaagtcgacccaaccactcctgtcccgtcaacattaactccggcaatcccttcggatctccgcccagtacgaatattaatggcaaacccacaggtactcaatctcctcttctctcctttctgatcagtgtcaaatcgcatctgcaaaatcaagttcaaaaatgcttttttcgatttaagtttggtatacccattaaattaatccctcaccaaacaccacttttcacattttggagtaatgagaactctgtttgttctctgctcaaccgagaatataatatatgtatcaaaaagaatttgctgcttacatttaatagtgcctgtactgaagttattctgcctggcacaaagggtcttgtctctctgcagaacgttctcttccccttaaatgctataactcttgtttgctctagctcatgcatagttatcctatttaagagcagaagtaatggttccccaaacatccttagtttatccatctttaggtgcttagtcatattaggaaacaagcctctcatctattcacctccgacacctccccttttcggcattaaactgcttccccaaaattcttaccatatactgcaaatttactttctatatcatctttttctaattttaggattatactacatctggcttatatataatatacctatattctgcacacacagtctctccacaatggatgacttaaccaattcactttctattgcactcaatctcacagagacagaaagcactatccaaaccttgcaagagccaatcctccctaacttaaga

SEQ ID NO: 9690 - DNA, 665 bp, Cannabis sativa
aaaagtaaagatagatgaagaaaacacaagatagagtcgtccaatggtgttctccacttccaactgtcacttcttgcttagaatttctctccaaagtcaaatagaagccaaaatctagtctccaatcattattaagtcgaaataggaaacttgccaaaattagtcaagcgcagcaactttgcttcaaaagtcgcatctcttaacatctctccaaaaactgctttctctaaagattggagagttgcgaccttgggtgaaaggttgcgacctttgatgctgaatcttaaaaattagaatttttaaatcctctaaaattcaccaagtcaagaaattcaatcatgaggttcctttttgcaaaagttgatcatttcatcaccaagaaactcgagaaacatcatattttcatcaaaaaagtgaacctctcttcatctcaaacatcaaactaatgtaaaaacaaaaacaaacgtaaaatcgaataatgaaacttaaaaaacattaaaaataagcctgaaactagactaaaacaacctaaaaatagacctaacaacaaggcttgcagcgcttttttgattcatcaggtctacatgtaaataaactaaatccactgtttattatagtgcgatggaggctaaggaaatttcaagattgttagattactctggcta

SEQ ID NO: 9691 - DNA, 823 bp, Cannabis sativa
aataggtgaaaaatattcttcattagtccaagaatgttgaatttgaaaagaactaaacaaaaaattctccacttaattataaatcaacttttttacatttttttaccttacataatttaaatattttatttatatctaacgaaaaaataataataaaagctaaaatgaaattagggaatgaatacaattaattaggtaaatctatttgttatttatttatttattataaagtagttgatggaaaggtattttaaaatttttgagctaaattttacattattagctatcataatttatatgttgtgagtgcttttacttagtacccaatgccaaataatatacatgtatggatgttctaggctcttgaacaaaaaattggttttgattataacagcctgttagttttgatttcattatggtcagattaaatagagttaaatttgggaccattttattaagtcagcacaagataaaagagaatttatagaaaatagttgagaattctgtaatcatcatgatcaattatgtttatagacatccaacaactatatgtttttcaaaaaataataaaagaaaaatccaagtaaagttatatttaaaggaatattattattattaagtatcaatggtatttagactagcattacttagagataatgccttataaatatctaccgatattttataataattatattaaattaaattatgtatgcaattcgaaatttagactaatagcaatgcaccaataatactttttaacatttctcctatataaagttttattaaattaggtgtcaatttcaatttaatgaaaaattag

SEQ ID NO: 9692 - DNA, 983 bp, Cannabis sativa
gccgcactaataatagtggacactgtaaactaccatatttttttttttaactttttaataattaaatagtatcttttgggttagaattagaaaaaaaaaattgtgctaaaataattaaataatataatagtgaggaaatattttttagtataacttatactgttgtagttggaattgaaagaaaatttagtgctaaaatagtactctattggtgttgaattagtaccaaatttaggtttcactgttggaattgccctaaggtcatctccaaccaaacgacaaaatgttatataaaatgtgactttttctaccaccgaactccaaaacttatccttattttatgagagtctacagtgtcccactaataatagtgggcactgtagaccacaacatttctgtctttttttttaactttttaataattaaataacattttttgggttagaattaaaattaaaaaaaaaaaatagtgctagtaaaataaaataatataataataaaaaatattttttagtgtaatttatagtgttgtggttggaattgaaaaaaaaaaattattgctaaaatagtactcttttggtgttgaattaacacccaatttaagtttcatcatttgagttgccctaaatggtacattgttgcatttctccttaaagtatacatctagtaatttttttatgaaaagtgtttaccgagattttttaaaattaattaaataagagagttaggaaagtaaataatgattaataaataagatggaagatttttacgtattttgggcgtcaattatccccagtccacgagtcggtgtattgaccttttaggctttaaaatatattataaatgagttttataaccaagaaccctaacccttgttctgaggtggttttctaggtttctcttggaaaaccagattgtttaaagtgaaaccagcagagcctcggctaaaaatctccaaccccccccccccttgcatgaaggaa

SEQ ID NO: 9693 - DNA, 511 bp, Cannabis sativa
tcaaacttggctcaataatggtgattttcgtttctgtggttgtatgttgctgttattgcttgaattctattatttggtgatattataagtattctagaaagtttggtggagtttgggtttgatttgagtatatatgaagtttttggggtttttttgctatgaatcggttaaccagttctgcttgaactgtagaaccggttaaccgtttcacttagtaggaccctaaaaattagttatcgatttggggaatatggtttaccgattttggcagtgtttagggccatagttttaatatttccacaatatttatggtatttccatgctttttatcgatagagaaacttttagttttgattttaggtccccaaaaagagttttagcaagttgtttacccatttacgtgaatgtggcatagggcatccattcagcgcttgatttaccattcaagtcggctgggacacttaaaattgaattgaggtaagactagaatataatatatatatatttttga

SEQ ID NO: 9694 - DNA, 1771 bp, Cannabis sativa
gaagtgcttgaaggcttttgtgataaccatgccaaggggccaaacctatccaaaaagatactctgacagtggtacttttcgccaacaatgattaaagactcaagtaccagtagtttccaaaacttttaagagctccacttaatgagctcacgatgatgcagcctccttggcctttcatagtttgggggatagacataattagtcaactcccaaagggaaaaggaggggtacaattcattataatcgcagtagaatacttcaccaagtcggccgaagctaaagccctagcaacaatcacctcgaaaaaaatccttcacattgttgtcaagaacatcatatgtcgatttgaacatccatagaagattttttttgtcagacaatcaaaagtagtttgacagtgacaagttcactaatttctacaatagacatgacatcatcaaaatcttctctttcgtggcacatccttaagataatgggcaggtagaaactttaaacaaaacctcaaggacaccatgaattgctccgaaaggtgatatggtcacataggactactgagaagacggccactgggcaaactccaatcgctcgtagagctagtgctaccttctcataggagcactacctatgacaaggagacaaaccacctcatgctgagaaaatcccttgaaaaaataggtgaaagaagagatcaagccaacgtaaagctgcatgcctaccagccaaaggtaggaaggcattttaacaagcaagtcaagggcaagaaattcttcataggagacctggtgttccgaagagttttccagaacacaaaagatccagcagtaggagtgtttggacccaattgggaaaacgcctatgaagttacatagataactagtgagggagcctacaagctaggaaggtacaacgaggacatggagctcgttctcctaccaagacactagaatgaaaagaacctttgcaaatactatcagtaaccagcttacggaaaactactctactatagcagttctaccaagtcaacatagagttaaaaagagcaagtacccacggctttttggccatggcctcccactattcttcaatgttggcctctgctatgcaagttaaataggcaatgccatttgatatctagaagaaaaactttgttatgtaagcttgtagattcaaattttgtaatgtgcacattaacaaaaaccaattaatgaatcaaaacaatttttatgtttaaattattgtgtctaaaccacttcctaacaagattcacttcttaaagttactctttttcaaaaccacatggttacacaggtagcaccccaagaaaattcataggcaaggtctaagaaacatggtgaattgcaagtgaccaagagattgtaagtctgtgtgatcactttggggcacccatgctgtaaaatgaattgaactagcacatagaagttatgaaaataaattttgatgcttagaataagctattaaatctacctctaaattaggtgcaggcatacttcgacttggcataatgaaatgtaattctaaatacttacatgtcaaggccatatgaagatagccaagattagagaccgcctggtcggtcacacaatccatgataaaatcaacatggctaaacaatagtagtgttcaaaaataaagtgcctataggccaagagtacaaatatgaaagccctgaggctgaaaataagtactgtccaaaagtaaaaggcccataggccatataaaatgtgaaaacactttctatactacaaaacca

SEQ ID NO: 9695 - DNA, 1090 bp, Cannabis sativa
aggatgacttattcagagatgattcaatgccgatattctggtttattgtaatgcagcgtggtggagatcctatcatcctctgtttcgttgattttgtaaatccagcatgtgctgcaactgccatgagtgccttacaaggttatatgctcttttcattgcttataattacgaatgttatgactacctaatgtgatagctgtagcatggagtatctcattgctacttgtttttagaaatgctgatctgatttttgggtggtcaggttacaaattggatgaacacaatccagaatcgagttttttgaggctgcagttttcccggttccctggtccaagatctggtggcactgcatcgcggggtaagaacgtcaggtgaacaaacttttaggtactgagactgagagaccactactgaccactggtttcacacacaatttttttttttttttttcaatgtattcctcatttttcggaagtttcatacaacacattgtacccaaacccaaacttagagcaaaatcattcgtgcaggccttgattggtgacacacaacacttttgaaaatgcattttgtaactagggcttacagtttacaagagtttcaattatttaatatagcacacaaatcactttatgactattttcctgttttgccaaatttattgagaattattgctgtattattatttttacaagagtagattgttgccaaaatgttatcactttatcttgaatattaagttttactcaagtcttgtgcattttcatacattatttgacctattaggcaccatgggaccaacacctccacgagctcgcattcaataagtggaacttaatattgaattgtatcagtaataatatgacatcttatagttatagtagtactaagcaccattaatatcctcgttaaaattagtgggaatagattccttaatgaccataaagagaatcttggtttgcttaccattaccaccactactagtggactttgtttgtatattttgtttttgtgttcactgatagttatattgttcacaccactaagtatatgtattctgtttttttactgaaaacaaattaataatcaa

SEQ ID NO: 9696 - DNA, 958 bp, Cannabis sativa
attaggccaatttttatctattccgcctctcttgctctcttctcggaccggagaactaccaccaaccttacccctaacatcaaacatttcggactctctcaccaacccacaaccatcacgacatctcgaactctctctccaattcacgaccactgtagccaaacaatcgcaatgttaaaagattttgggccctctctttttcatttcatttcattgtacttttgagttaaaatgtatgaatttagtgatttaggatgaaaatgtacgatgaatctctgtgatctgtgagtttacgtaagacttaggattgagtttggttggatctgtattttgggcaaaaaactagtttttacgccaggtttgatgcctttctattgttgaaatgggtaaaagttgaagatttcggtccgatgtaggcccgatgtaggttcgatagtagcctgatggtactcattttttatgtacaggctacccattttttatttttatgttattgtacataaaaaatgagtaccatcgggccactatcgaacctatgtcttcaaccttttctcatttcaacaacagaatgatattgggcctacattagaccatatcctacatttatgggtaacatcgggccaccatcaaacatatgtcttcaacatttgttcatttcaacaatagaaaggcatcgggcctccatcagaccaccatcgaacattcatccctaacatctagattacactactatcgtacccaccattggaccactttcatacccccatcgaaccatatacaaaaaaatcacaaaaaaatgcaaatttcatcaacactcaattttctaccaaacaataaataaaaaaaatcacatatcacttgtctgttcgttcaacactggtggttgtgggtcgtgggttgtgggttatcgaacacgcaccagatagaaccagagagaggaggggggggggggcggggg

SEQ ID NO: 9697 - DNA, 767 bp, Cannabis sativa
gagcagcaagtaaagtgatccatcaacattatatatatatagactttattattttttttttctatatattaaccatatattcattttttttttcttatttttaagaaaaagtaatgatatatatacgtttagagtaacatgatatcatcaatatataataaattacaatttctatgtctttatattataagtgtgtaagacattattaaaaatttaagagagtctctaatgttttagagtaggagacattatgtttttattattaatattatttatttttaactagtttggtaagacatgataaatattagaaggcgtagaaatgagacaattaaaataaatttagacgtatcacttggcagacatctctaatggatagatgtgccgtgttatgtggcatctacctataagagacgtttatactctttctccgagggagaatgtgtgaggaaagggaggtcatgaattcctttgtcaccttccttttcgatatccctttgtcacctatctttcctcacacattctcttttgcatcacttggatgacctatttctaatcaccacttgccctaatggattccataatcgaagtcctcagccctaaaaaaccctcaaatctcaagctttgttgtctttccgtctccttctgtcactcgcactactcccctcaccaaaatctatggcgaaccaccattgttgagtcacctccttattataccaataatggaactacatatgcgtattaatttacattttattatggtttaa

SEQ ID NO: 9698 - DNA, 1122 bp, Cannabis sativa
aagaaaagtatagtaagaaaagtatgaaagcttattataggtgttgagaaagacaataataattgtaataatttcaataatacctaacaagaataaaatgttacaaaaagaatttataaaacaactaaaaaaataataaattatttttactgaaaatatatttttataaataaaaaaaattaaaaagaaaaactgaaaatttgtcagtaccaacatatattttttaaatttttagtctattaaataaaattttcttctacaaaaagaagatatatagaactggagtacatatatatatataacacaagagaaaagaaaatcttatgctacataatacatcattattattattattattattattattattagtgtaattattattaatggaagtactgaagaagaataattacttgtggtgctgcctctttttgatggtgttatggccattaatatcatcagtagcagcaggtcttactatggtaaactcccccaattgtccgaacaaatgtggagatgttgaggtcccatacccctttggaatccacgaccaaaactgcgccattaggaagaacttcttgctcaaatgcaagacttctagtactggttctcctaaactaatacttggtgaaaacttagaagttagcaacattgatgtggaaaaagccacgatgagtgttaagcatttctactccttcgactgttaccgtaagaatggtagcttaattaatcgaaacagaacatctataagtttgagtaagtcgttcacgctctcagattctgagaacaagctctttgctttcggttgcgacacccttgccttcatgaactcttcagaaaataatttcgggcgtggctgcatctccatctgcaatgaaaatgtaaacatgtcggcccaaacctcgtgttcgggttcaggctgttgccagacctctgttcccaagcatatcaattatttatcagtcagaacacgtagcttaaataaccacaccgatgtttactcgtttaacccttgtgggtatgcgttcttggctgatcagaatagttttaacatatccaaaatgcgtcttgattttatgcccgaacaaatgaagaagtctatagttctgctggattgggttg

SEQ ID NO: 9699 - DNA, 636 bp, Cannabis sativa
gacttggcatttttagataatgagaatctgtgtggacaaccacgtgcaaattttgtctggatgatttcagctgaaggtgtaaacttgacagttttaagtaaaaagttctctagtcgtgccattcagggaaaattacccgtccagacttcccgatgttctctatgtgtcaccatactagatgccacatcatcttgggtagaatttgggataagacaactaaaagaggagtatgctctccttttttaaatgaaaaagtttcccaaatctaaaagaagattttttgttacaggaccgaacctccataaattctgtgttcttattgcttattattattattttattagtaattgatcattcaactcaattattttaaaaaattagtgttgttggctaaatgtaaggtcaataataatatttaaataattaaaaatatgtgtacctcaaaagctgtgtacaattgtataccaagtcatctattcaagttggcatttaacataatttttggatagaaatgtaaaaattaaaatagaatggtagttttaaggttttactactaaacaatcaaattatgaggctaaatgtcattaatcgtatagttcaaacaatattattgacaataaacttatatatatatat

SEQ ID NO: 9700 - DNA, 734 bp, Cannabis sativa
ggtgccatatacctattacacacattcacatcccaattcaaattcaacattaaaaaaaacactgacccagttgattggaacctcatgttgaatcaaatttgtttctttaattacccaaatgttcccataactcgagtagatacatgagtgtgagtgtcatttgatggcttggctaggccaaaatcagcaacctgtacaaaaatcaattcttttttttagtatatatattagaatttagaattttaagatgtataggattttatctcaaaatcaattaacacaacagtagtagttcattatcttatatgtagtattatatttctatacatttactaaatctaatacattctcctcacgttggacctagaaaatgtgagtataaaaaacaacttttaaaaaactacagtgtcgacgtgatatttgaaataatcccataacgccaaattaggaaatttgtagggtgaatttgtggctttatgaaacaggtcaaagacctcaacactttaaacagccgaaaaatctcaaatagaagttaaaaagagataaatgacatttttaatttcactctaatatcatgttaaggtgtgattctagatgcatagaattctatcattagagatcttaaaggagatttgccatattaatttgcaccaaccaacagtagtatgtccccttaaataaatagtattgaacaattaaaagactccatattaaaacttgcctgtgcctcaaaa

SEQ ID NO: 9701 - DNA, 1046 bp, Cannabis sativa
tgagagcaactcgactgctagtgataatcatgcgattctccctcaattatccacggctcaataccagcagctgcttaacttgcttgcttcacaacagagtggtatgaacattaatgaacctagtacttccacgggaaatttaggtatcatactatcacattgttctagttctcctatacataattcttggattgtggatacaggagccactaggcacatttgttctaatataaaacttttttaatatatgtgtaagataccctcaattaaactcatactgcctaaccatgattgtttgattgtgaaccaaagtggatatgtcaaactagaaaatgaaatggtcctaactgatgtattgtatgctcccacattcaaatacaatatcatatccgtaagctatctcactaataagtctgccaattctgttctttttacctctgatgagttcactatgcaggaaaagggcagcatgaagatgattggaagcggcagtaatgtcaaagatctatacattcttgacaatacaccaaactccagtcaaattctatctatagatgctgagacttggcactctcatcttgggcatttatctcacaaacaattgaatctcctcaaagacattttgaattgtaaaatttctgatttacataaagaaatgccatgttatgtttgtcctattgctaaacagagaaaacttccctttcaaaagagtattactgtttctaataaagcttttgatattgttcactgtgatatttgggaaccataccacattatttcacacacaaatcacaaatatttccttactttagtagatgatttttctagattcacatggatatttcttttacagcataattcggatgttagctttgttatacctcaatttttgagttacatacaaactcagttcaatcaaagttgcaaggtatttcgttcagataatgcaccagaacttgcctttaaggagctgttttcgaagcacggaattctgcatgaatattcatgcgttgaaacgccagagcccaatgctaattaacccaaat

SEQ ID NO: 9702 - DNA, 587 bp, Cannabis sativa
cggatgtcatttgatacttctgaggttttaaaactttaggattgggtatcctacactttttttgaacattttggagacaattctcaaagaagaattggcatttggattatcaaaaccagtgcactagcttgattgtcaacttgggcgttgggccaaacattaggtcaacctggacgatgggcttagttttcatgcccttgggattgtggtattatccacaagttttcttccatctttgttatttctacgaaaaaaaatgcccaaaatactctttggaaaactaactaaaaatggctcaggttgacaatatgtaaacctaggtgctaggccctatgtcaggtatcaacctaggcaatgggtccagtttcaggtcacctagaagttctgtttggtccctggatatagttgaatattaatctttcatgaaaatagaaaatatgcccagaagacttctagaacattgcctaggttgacatttttgtcaacctgggcgctgggttcttgttttggcacccatgatgggttgttcctttcccaaaagaacttgtttccttgtttttaggagagacaaagaagatgcacaagta

SEQ ID NO: 9703 - DNA, 545 bp, Cannabis sativa
aacattgaatcaactttgccactcttagcacacgtagatatcagagtagtgtaaagtttacaatctgctttcaatccagactcatggacaagtcgcagaacctgaaaggctcctaaagaacagagcacaaacatcattacgttattctattaccaaaaaaacaattatggggcagggaattcatcatttacaaacagaagtctgatgaactaccctccgaatcttgtgaagtcgcacagacagacataagcatgttatatgcactcaatgttggggtagggatcagtttgaggaaacgaaaagcttctttaacagcctttttgaatttgcaggttttaaagaaccttgcatggtagacctgaaagcaggggatccaataaatttgggtattctacataaaggaaagataattaacagctataatgcctcaccttgttcatgtccaacaaaccccttttttccatatcttcaagcatttctaaggcattggataacctaagaaacccacaacaattaaatttttttgttcttacttaaaaaaaaaa

SEQ ID NO: 9704 - DNA, 1227 bp, Cannabis sativa
atttggaaaaaatttaggaagacaaccggatcccttaactaattgcaacaaaccaaaccaagttagaaacaaatcaccagacatcaactagtaaaataatttatcaaactatcagccttactcgtattaaaagcaagcaccacacacattcattcgtatcattaaaacatagtattaccactaaccttctccgtgaaacttaactggagagggccagacacaggagagtctagacattctgaaaagagaaaaagagcaacaaaaccagcttaaaggtcaatcaaacaacacacaaaagttattttgctatatttcgagtagctgatgttaaagattcaaaactaggggtgttcctggtgcaggtggttcggtttttgactattttttcaaaccaacccgcacatgtggtttttccaatttcttaaaccgcacccacaccgcaaaactaaaaaatcgtgaaaaccgcaccgtaaaaaatggtacggtgcggtgcgacttttgcggttcggactatcaccaataattaaactattacaaatacaacaaagcttgagcaacacttgtcaaaaataccataataaatatataaaaaaaattaagtttcaataacacaaataattagtgggctttgggttggacattcacatattggacctaactaaatataaaaattagtatttttataatgtgcggtgctgtgaggtttgaacagctaacgctaattggtacttttttagcttcagttatcctgtgaagcacaaaatctctgcttattttttgtatgggtcaactattttggtgagacacgttgactgatgctaatgagacattttggtgagacacgttgattgatgctaatgagacacgttatccatacactcatcctattgggctgatcaacttatgattttaccaaagtacattcttggaaaaattaataatatttgtaggagcttcttagggaagggtgtttcatactcctcttgtccggggcaagttgcttggcataatgtttgtcaataaaaaaataaagggggtcttggccttagaaatattgatgtttggaatatgggagctattagcaagtatgtgtggaatatttccatcggaaatgataatatttgggttcgttgggttcattcagtctatcaaagagcaagttcgtggggttataatgctctgtaaagttccaattggtacagtaggaaaatagttatgattaaggag

SEQ ID NO: 9705 - DNA, 759 bp, Cannabis sativa
ttttcattgttacgttcatcacttctgtatttttctaggtatttataaaaaatgacaggaaaagaaaaaaatatacaaagaagcactatgaataattttttcaagcattataaattagtattattaccgctaaaaattaaaattaaatatttatttataattaaaaattaaacttaaatattactctttaaaatataagtatcccatatgacttaactaaaaaaatcataatgaataatgagatcccatgaataatatttacaaaattaatatttatagaaaaaaaaaataaaaaataaaacaaaaggacaaaaatgagcctcttatatatataactgtcaaatcaattaagggtaccgacaaacgacaaatattaaactgaggtcacgaaaaaataatttaacaatagtattaattataattttttattacaatttttaattaatttttatgtctaaaatcaaatgataaaatatttttttaaaaaaattatagcaatatttattataattaaaatattattcttaaaattttaaataattttcattgttaaaaataaatttttttaatattttaatcttttaagtatgtttagaaaattttaaatttatttttaacattataaattatttgagcatttttttaaatttacatgatattaaaactacaacgaacaatgccataaattttatttttaataattttttaattaaaatataaatttatgtaattaaatatataaaattacttaaatataat

SEQ ID NO: 9706 - DNA, 624 bp, Cannabis sativa
attattattgaaatttgagctacctattatttttatggtggtgtatatgttgtatttaatgttatgtaaattttttcaaattttataaaaaatcttaaataagtatatatataagcgtgtacataattatagaaaaaaatagattaaaaaacatcgtcaacactctattttaaaagctgcattgtagaaacacttaaaaatttcgcacaaaactcggtatcttttgggaccaaattcaaataacaaagttgcactctatatatacctttgtaaataaaaattcatatttcacgtaaaattctttttacttcacacactgtagaagactcttatattttgttaaagtattcatcgaagttctaacaatgactatacataaaacctgagaacaagaaatatttatattaaattcggctagggcattattttttattattcaacaaaaacaaggttaaaatacatatatatatatattatatgttatgtatatatataaaaaataggtcgatattattatatatgtggtagaattaaacttaaacatatatgagcgtagagaaaatcttgaccataataatatattaacatgagataattcaaagaagaagaagaccttttttgaaa

SEQ ID NO: 9707 - DNA, 1383 bp, Cannabis sativa
cgtcacagccaaacagtaggtcgctgcttcctcacataaagcattaaaaaaattcaaccgagacgtttgaacctgaatcaccctactaagatgactccttgccacaactgcagaatacatgctttcaaggcctactttaacaccgcaattccgcttgatccagtcttaaggaggaggattcctgacttccgtcaagcactgagcaggataagggaacaaagaagcacgtaattctgcaaatgaagtacaaatagagtcaatacacttcttcacatttacagttgagttattgtgtaccttgtcaatgcgagtccaccagatggtttcaacaacaatctatgcataaagaaaaacgtcctcaacaaggatacccccgtgttttaggtcctagatgaatttaacccaatcccacatgcgaataccccagggagacgattgccaaaaatgaaaagccacatcacaggaaagaaacaagtgttccacagattcctccatcgaaccacaaagagggcagctcatatcctcaatatgaaatctttttctgatcactgatcggacagggagaacattggacaggatacaccaccagagtaccttatgacgctctacgattttactattctaaagtttattccagagcgacggagcaacctcacagtgaggagctcttttcatggcttgcgtaaggtaggaagatttacacgagaaactaccattactttacagagtccaaactgtcatggacaaactgactgcaattaagagcctgtccatcatcagacccagagaaaattcctttaaagaaatcaatgaattcatacctaattgactctcaattaataacccatacattatctttgttcaagatactctcaatggcatttctccttcctctaatagcagccgagagaaagaaaaacttagaacatttactcccttccttatgccaagagattctggctcgttgtttccagtataacgcttttctttctaaagtttcattcagtgactgctggatgctacatttagtatcccaatcacaggatccaccaagtaagctatgaattaagttaagttgttgcttcagctctttaatgactgtgtcgagcttaccatattgagatctattccaatgaagaaaagcaacccgagtagctcctacttttttaaatacgcgggcgggagcccaagagtgaccaactgaatcccaggcatgggcaaccaccaatttacttctgtcatcccgcgcccaaccttctttgaatttaaaacatctttcaaactttgcctccatcctagcagtaataaggcatataggtctatgatcagagttactcgtctaggacgagtaaataacaactctcggaaataatctgagtcaga

SEQ ID NO: 9708 - DNA, 593 bp, Cannabis sativa
ttaactacttttttagcttaaattatacactatctattggagatgataaaaaaaatactaaggaaagtgctaaataccaaaaatggtagcataggttattgatgtataatatcgaaccttataattttaatttagtgaataatataaaaaactattaaccaattattaaatcatatctttataatgttgaatattttaatgtatcaaataataatattctattaataataataaaaaataacttaccaaaaaaaaatatattgttcaaaatattatacctcaaaaaatccatttaaaaaaataaaaacaaataagaccatttaaaaagccctacaaaaattgtaaaaaaattgtcaattataaaaaaaaaaaaaaaattaagaatatttaaaaaaaaaattactggtaaaaaaattatagcgaaaaaattaataaaacaaataataaaaaaaacaaaaattgtaaaaaaataaacaaaatgaaaaaaaaaaatatattttttgtctttttgtactttttttttttgtaaagatgtgattaatagagtaaatagtagtaaaaatatctaaaatttttagtttgtcagtagtata

SEQ ID NO: 9709 - DNA, 511 bp, Cannabis sativa
  modified_base (320)..(320): a, c, t, g, unknown or other
actttttcctttcgaaataaactaatgggagttcacagtcacggctattattttgcgtgttttatataagggtaaatgctattttgaaccctctattttacaaaagttaccaattgaaataaaatggaccctgtattttttaaaatagtacatataggaccttgaattgattttttgtcaaaataaaatttaattataattcgatctaaaagtactataacaaaactgtctacatttattgtagctattcgtattaagcattgtcttcaagttggttgtattaaaagaaaaattgttaaaaattaagcttagggtcctanttttactattttagaaaatatagagttcattttatcatttaacaaaatacagggttcaatctgtaacttttgcaaaacactgagtccaaaataatatttaccttttatataatttccgttgcacagaaatctgtcacgtcactgtttaaaaaaagaaaaatttccgtaaagtgggtctcatgttatcgtcg

SEQ ID NO: 9710 - DNA, 639 bp, Cannabis sativa
atatatatatgagtgaaacagagttttttttaataatttattcgattaaaaaaaaagcgtggaagagagtttttttaataatttattcgattcaaaaaacatggttaaaagtactattagttagtgcctagcatttttttttggtatcataccactatttatgtaattaaatattgagtcacatataacttactgaaatagcttttagaaaatattactaaccaatcgtggaaccccatttatagaaggtacactaagcactactggtgtctggtgcacagtaacaatgctaaaaaaagtaaagaaatgttaaaaggcatcaatcaattagcacgccgatatttgtggtgcctgttgtttgttttagacacaaacctattggcacgacaataaaagcacgacaagtcgtgccaaaataactatggacactaaaatctacatctgttggcactaattttatcgtgcgtatatctcttttttcttgtagtatatttataaacatattaatgatgttttgtttttcaatttaattttaattatattggaaagtcgttcttcccctattatctagacattgtagtattcttacctcttgaatacgtatagaatctattgatttattgttttcatggtaagtag

SEQ ID NO: 9711 - DNA, 1973 bp, Cannabis sativa
tcgttgcgccacttattattttatcgtagattttctttaagtcaatatatcttgtattattgtgtgggagaaatgttaaagggtacttgtaccttcttatgtattaggattattattggtttaattaagtatcaggtactatatagtttaatataataatttttagagagcattgttagttaattgcaacgtgacatgtcgataacgtactagacactactagtgtctaatagcaatgctcattgtattgtattgggttctaaacaaatttgtttttctttctcttaccctatatttggtataaggaaggaaaataggagagaaaggaaataggaatgaaaaaaaaattaaaaagaatatatatttctttagaattatttcataaatatacaaaaataataattttgttacatttttaagtatttaatgttttttcttttacaaaaatactaagttattttttttgttaattttcgaaatattattattttaacgttgattctattacgtgaaaacaacataggtattttttgtcctgtttaaccattgaatgaattcctccacctccaaaaaagaataataaaaaaaaacaagaaaatgtaattttctttgagtccttttcttttctttttctattattttctttcttgtcattttctatttattttcttaaaagaagagtctttttctctcactctcattttgctactaaaataaaaagtgggatcattaaaccatttgtcataagtgacaaattctatgggcttgagcttccaagttaattttggggtctttttctttgttttctctaactacatttccatgttattcaaaattcaaatgtccactctggattattttataaatatctaaaaattacaaaaagattatatttttaggaatttatattttttttacggattattattttttttttttataaaaatacagatcattattttttttattgttataaaaaacattattttttacattgcaatattttactatgtttttacaacttaaaaacatagtaaatatctaactacatttccatgttattcaaaattcaaatgcccactctggattattttataaatatctaaaaattacaaaaagattatatttttaggaatttatatttttttttacggattattatttttttttataaaaatacagatcattattttttttattgttataaaaaacattattttttacattgcaatattttactatgttcttacaacttaaaaacaacgttgttttccaaaaaatatatttaaaacaacagtccgtaaaaatatgtacaaaaaaatcttcgattttaggtattttgtataaattttctttttatgcgtttagtttaaatttaatttagatggttaattagtatattacactatatttttatgttttacttgtatgtgaacaagtccttaaaccaaaattcttatatgtccttaatcaaaaggacttttcaaatatacccaaaattcgattagaaaaatgcataaaacattttcatggtttattcttttttcttcaaattttatgaaaaaattattagaattagtctaacattgttaatatatgaaaataaaatatcatatttaagatgaatgaattactcaatttcattgtcaattagttttaagataaaatcctgcatattttataaattctaatatgaggcatgaaaaactttcgctatcatcccctttgatgttttactttcccaagtaaaatagagttaatgttctagtaatttttttataaaaaaagaagaaattgataaaaataaaaagaataattatataagacactaatttttgtaaaaaattatatttttacttctaaagaattttttttttatatttttatgattttttatagttacaacacgaaaactacataaaagtaatatggaaataacatcaaaccaataacaaaaaaaagatacatataac

SEQ ID NO: 9712 - DNA, 1191 bp, Cannabis sativa
gatcttgccccaaagcatcgcacaatttgccttcttctcaatctaatttaaatcctagagttgttcacactaaacccattgctgaatcaatcccagttgtatatgactcaaatgatcttcctattgctcttagaaaaggaacccatgcttgtacaaggtatcctatcgccaaacacatgtcatacaaccatctatctaaaacatttaaagcatttactactaatatttcagaacttgtcgggcttaacaacatacaggaagcactgggtgaaccaagttggaaccaagcattgtttgaggaaatgaatgctttaaggaaaaatgaaacttgggagattgttaagttattgaaagggataaaaataattggttgtaaatgagtgtttacaataaaaagcaaaactaatggaagtattgaaagatacaaagctaggcttgtggcaagaggtttcactcaaacatatgggatagactataaagaaacatttcttcctatagcaaaaatcaactctattcggctattgttgtctttagcagtcaattctaattggcctttataccaactagatggggagaatacattcttcaatggagatcttgaagaagaagtgtacatgagtcctccattgaggtttgaaaaacactttggatttgggaacatttgcaaactaccaaattccttgtgtggccttaagcagtcccctaaagcatggtttgaaaggttgggtacggtgttgaaacttcaaggatacattcaaagtcatactgatgacactatgttctacaaacattcgaaggatggaaaggtagttattctaatcgtgtatgtagaaaatattgtgctaactggtgatgatgtttgtgaatttgaaaagatgaaagttaagcttggtgaagaattcgaaattaaaacctaggagttcttaaatattttcttggggtggaatttccaagatccaaagcaggtatttttgcgagtcaacgaatgtgctagatttgttgagtgaaacatgtatgttgggttgtaaacttgttgaaactcctactgaatccaatgtcaagctaaaacctacagatttggtccatggtaaagatcaggagcgatatcaaagattagttggaagacttatttatccctctcatacacaccctgatattgcgtttttagtgagtatggtgattaagtttatg

SEQ ID NO: 9713 - DNA, 742 bp, Cannabis sativa
gaaataatactaaggagagactgtcggtaatagatttggtattttttatggacaaaagttttggtatttgatttcatatatgatattgaacatcagaatcaaaatattatatatacatgcatacacatcacaaatatatacataaatatatattatatctcgatgaaagaaaattgtttataaatatacatagagtttttatagctaaccgcgaaactaaaattgaaaagaaaaataacagatttttttaacttatatatatatgtcgttttgagacttgtttgtagctgagaaaagacggaaaaaagatagagtaacccagaattataaaaatcaaagataaaattagaagttatactgttaattaaaaaattccattgaaggcaggcacatggctatactttatgcttatatctatttcaatttaatattaattttctttatgtgcaaaaacaacaaagtaaacggctacggcgccataaagaaggatacggaaatcgaaaccccatcttatttctactctcttccttcaaaaggtaaaaaaaatgtttctttctcatggagttgactggaaaatgaaaactccgagtatataatattgaagatgtaagacgaaaaagtctagcgttttgcaccaatcaacattttttggtagaggttaaaattattgcgaggaatgaagatattaatatatatatattattgcatcttaatacatatacctgaagattattgttggaga

SEQ ID NO: 9714 - DNA, 844 bp, Cannabis sativa
gacatgagatcactagacaaaagattgtacaggaccgtatctcttacttgaccttgtataatttctaaggacaacatcattttgaaacccaagcttttccaagaccctttgagaagctctgttctctattttcaaccaaagcttgcattcagatcaaatctggaaactctctaaaaccattagaaatagccctctttagagctgtagttgttataccttggcaccagtgctcagcagcccagacatagccaacttcagccctaaacttgtcatcgccatctcggggcatgatgatcatgaatccgattgaacattcattgatgcatatggatttgcaataagggtggggaatacaggtgttgatgtagaaaagtgcttctttattggaagtgaaactgttccatatagtgaaccttgtcaccctatcgtcaccaccataaatattgaggaagtcatcaacatctgaggtcctataaggacgattattgatctccaaataattggttaccatattcaattgatattgttgattggcatcggggcaaaatattgaatttcaataaaaacagtatacatataaaataagatactaatattgtttgattactgaaataaaagccaatcaatttggttttagtatcaaaatctagcataggtatatggatctcttatagatctcaccatttaataatactgacaatttttatcaaatggataataattgatttggtcaaatgtgtcggaatgtattttctgtatgaaagaaaatgcataatgtatatttaagaaataagtatgcacatacataatgacttaatcaatagaaaacatatcatttatccaa

SEQ ID NO: 9715 - DNA, 603 bp, Cannabis sativa
ggtgaacatctggtggacagtgagggtctgtgacaggttttatagttggtgtaggtggtgtggggttctagaggataacaggtcgaatttctggtgtatggtgagtgggtctgtcaggtatggttctgagagaagagccattttggttcaattcattgttgacattttctccatgagcagatatgtcacctgttggagagacaatatttgtatttgtcttggtgccaggagttggcatggtaccaataacaccagaattagtgacagaagaattgaaagaggtgtgaaatatagcagtaagaataacattagaagtagaaggtacctggttttttgaagatgtagggaaaactcctggatagtaaccttcattgaacaccacatttcttgaaatatagagaccctgccttgagcattttcacagagataacccttgtggtatgaagaatacccaagaaaaagacattgttcagacctaaagttcattttgtgagaatgatatggtctgagatgtgggaaacaaacacaaccaaagggtttcataacggcatagttaggtaattgaccaaacaaactctcaaaaggacttttgttattaattaa

SEQ ID NO: 9716 - DNA, 800 bp, Cannabis sativa
taagagtactagccttcgcgagtactcatttgcatcacattcagtaacaaagtgaggactctttccttgcctgtgtgaacccttctcattgcttcaaatggctgacaatagtttaagccatctcttcaaggatacagttcaagtttctactgatgatttaactcataggctagacccaggtgagattgatgcccaagaaccgctagggaaaatccttctggggaaagtaataagcaacggtaagctgggccgcaatactatcgccggagccctcaaaagagcgtgggcttccttcaaaggctggagctggaaggaagatgacgagggcatcctccacttctcctttgccactaaagaagatgcttggaacatgctgaatcagcgaccatggatcatatgtggtgccctgctagtagttatgccatggccttcgtggttagccccgtccgaggtccagtttgatcgttcccctttttgggtcagacttagtggcatccctcctttctattggaacaaaacaaatatagaggaacttgctgcaaaagtctcgccaatctttaaactgcccagatatattgactttgaaagaggctcttttggtatgggaacagtaagatttcgagccactattgacatagataaagctttgttttcaggttttttcatgaagaggaagcctcttaaggacctctggatccaatataaatatgagaaattacctaaactctgtctcaaatgtggcatcatctctcatgatcaaaagttttgcttcaagcctcctacagttattaacagggccg

SEQ ID NO: 9717 - DNA, 590 bp, Cannabis sativa
  modified_base (146)..(155): a, c, t, g, unknown or other
tttttttttttttatgtataataggtttttaatttattttatttttataattgtgtgcatttatagttatttagggtaattttaaaattttttatattttggaataatttataggggaattactctatatactattttttaatttnnnnnnnnnntttacggtttgggttgctccggtgatttctatgtgagttgctatgtgaattttagttgcgatttaagttgttccattggttacattgtgggttgctatgtaaatttccgtaaaaaatataaaaaataaattgttttaaagtgtaaaaataaaaaaactcataatttaaaaaataagatttaaatattttattagaaatttttttagatgtgtgattgtttttttatattttataactgaagaaaatttaaaatgcactattttttttttttttttgtaaattaaaattaatgcactataacaataataataaaattaatattggcttaattaaaagctaaataaaaatacccaataaaaattcccaagatctattgtataatttgtattaagaaaactacaattttttagccaaataataataatagtaataata

SEQ ID NO: 9718 - DNA, 1124 bp, Cannabis sativa
gatatatatatttttttaaacccctgtaaaatatatatttgataaatatacattcattgtataataaaaaacaaaggtagagagaaataaaaaaaaaaagttagataaaataattttaaaatttatataaattttattaaatgtatgtactccccctccacattattattcattgatattttatcatacaaatattaactacacatttaattaaagacacctaaagttaaaatagaaaattgagaaaattataataaaatttataataatacatattttttttcatttaatttacaataagatgttactattttattgacttttatttaataataattttcctatgtttttaaaagtaatttttttggttactaagagtaggggtggtggacaacatccaatctaattcaattgaactgaattgatccaattacaattagattggattggattgaatgctaaaagttatattttgattagattgaatcagttattggatgtcaatttcaaaatctaattgaaaaccgatccaattcaattcattacatttatatatgttaaaaattatttatatttatttatataataaaaaatattaaaaaatataatatgtattaattagatttttattagatttttttgtgttgaatttgtaacacttaattgttttatgtaattattttcatgatgttttgttctattttattaattaaaaatgttattattttaattatttgaaacttttagttgtattatacttgtaacaatgatatgtttatggtgtattaaacttaaataaagggtgatacttaatttttatgttttttttttttttttacatttttaagttaatattaaaatttaagtgtgtaattggatatccaattaagaaactaatcaaattcaattagtaattagattagattttgaggtctaattagatttgatcgaatgatgatttttttaaattcaattactaattaaattggatcgaatgaggagaaaatattaaattggatcggatgcccaaccctaatattaaattggatcggatgcccaaccctaactaagagcatctctaatgagggttatgcattgaagtggtcttgccacatatgtaatat

SEQ ID NO: 9719 - DNA, 512 bp, Cannabis sativa
accaggccagccaacatagtgatggtgaggctagcctagactctaaagatctcgacttggtggctccagatttagctccttataccccttcatagatgtagataaattttttattagtactcagcatcatgtttgtattgtatagattgtattttcatgttctggatatcctgtggcatcatagcttaggaacattactcactttgtgttccacgtggcctctggcattttttaaactatgtatcctatgtggtctggagcctttttagaacattattttcatgtcctatgtggcttgaggcctttttagaaccttactttatttttcagccccaggatcttcatgttcgtatctttggccataagccctatgtttttgaacactactagcatttgatcatgttgttttttttttttatcattgactgtgtgactgaccaggtagtctttaatcctgtctatcttcttagggacttgaaaataagggttcggatttcctttcccaagccgaa

SEQ ID NO: 9720 - DNA, 672 bp, Cannabis sativa
caagcatttgatgcatcaatcccactagtagcaagtaagattcctttacagtatcctttcaaaaagcacccatccaaccctctaagtggcctacatccttatttaaccctcttttcaagcatgtagacacgcataacagctttgaaagattctattgccaccttgtatcttacatttaatattagcagtactacttggattggtctccaaaagttacttgaagtagtcctctagcatagcatattgctcaatgactgagtcttctagttcctctttgacttaggctttttctctgcaaaactgccaagtactcacttttgaatattttttgtcctttgtgatttctagaaatgcattgtaattcatgattggatgtaatctgagctcgtctttgaagtgagttgcaagccactatgcattgaaatgcttgttatccaggacaataccacaattttcatatttaggcttatatttgtttaccctgaatgttgtcccaccttatttcacatgtgcatagagcatccaagggcattcttttaccttacatttcaccctaaacttctacttgtcattagccagtagaatgtactccttgttgttgtgaataaagtgttccataatagtcttttacatcaagtcaattgttacaaattctatgtatggtttgaactc

SEQ ID NO: 9721 - DNA, 774 bp, Cannabis sativa
accttgaaaaagagtacgaggttgtgggttggtgagtgtgtttagacgagggatagttgaagtaactgtggttcgagcaagacgtgttaagagcggccaagcattccccttggcaaagtcaatacggtatttttcatatcccgtagttggaagtttggcccctatggcccaaaagggaaatcatcatcattagtccattctttccatgaaggcaatacattttttgaaagggtgaccgagcaaaccacattcaaaacaaaactccggtagtcgttcatatcgaaagtcaatccaaaactcatccttaaccttaggtagactaatcatttggccacagggtagaggtttgttaatattgatattgattcagatacgaagaaagggaccccaaccttcgtcaagggagtcctcatggacatctttgaactcaccaatgagattccctagagcaatagccaaatgtttagacttgcttaagaaaggcaaacgataaatttgaacccaaaaaggtacaaaagctaaatccttctttgagacattttgcagagcagatggagtgtacatcactattaagtgattttggaagtgccaaggctccttgttcagaactctaatcttatccccagcacattgaaagatgactttaaataaatcgtctccgtaatctgaaatttccactgggaatcgacccttccagtggccggacatttggttgatgaaagtaggcttatgtatgtatgcatcagaaatgacagtggcaaacataaaatgaag

SEQ ID NO: 9722 - DNA, 933 bp, Cannabis sativa
tttttattttttttgagtggagtgttgagtttaccgtgggttactcctgcctttataatactgagggaaagttaacatcaagctcgacgctgaggtcagtataattgaatatttgttgtaataattgaatctttcaaattctttcggctaatttctacttgttgcattgcaatcttaagttttttggtgacttgtgacatgatttattaacagtcttgtctgaaacgcaaaatgcaccattcttggagaaacagcatgttgatgtgtcttacttatgaatgcatgtccgattattaatattgtttgtctaacctggctgcttattgtacttgatttctttcatcagaatatagatagatgtgtatatattcactgatttttgtaagaccagtgtatgtgtatttttgaactctttaaactgactagttgcaaagggttggggtgtatccctctttgtgcatctgctgttattgctgcagatttgtattaacttgatctttgagtttttagcaatatagaaatggtgcaagaagtgtaatattcgataatagcagatttgtattactaactcgtgtatgtaattatattttatatgttttcaatatatagttattgagaccccttttcaaattgtaagctttagtttagcttaataaactgtacttataagattgtttcatcattttcagtagaatgaactcaagcatcataaaaagtactttttttgaatgagtattgatgaaaattgcctattttgtttagattagagaaagaccccttttgtcttctttctactctgtttataaaacatgtttttactataactaatttaatgatttttggtataaagtaggacaaaccctcagtaaattatgttcaccttttttggagtccttgctgtaaaggaggactacttctactactgccattgtt

SEQ ID NO: 9723 - DNA, 632 bp, Cannabis sativa
atgtcagcctaaacaaagaggtggcctgagattctggcgtttccaagatatcaaccaggctttgctttccaaattagcttggcagttggcaaacaaagtggataggccttggtgccatatctttaaaggaaagtactacccgagagactccttttggagtgttaaagagaaaaattctgacagttttatctgaaaagggattctgaatgctagaaacaccattcaagcatgggcctgttcgatcattgcctcaggtgaagacattgacatctagtggcagtcgtggataccctggcttgagtatgaccaattccgtgatatgatggagagcattagaccaaaagctcctagccttagatgtgtggccgacttgatgtaccggagaagtagatgttggaacattggatatttgtgttttctatttggtgatgagttaggcaataagatagctgagatccagattgccaagaactctgttagtgatacccttatttggaaggactccactactggaaaattcagtgttaaaggattattgggtggattaaaagagtcgttttggagctatcgaccctttgtgaaaatggatttgggattcaaaaattcacccgcgtgtgagcatgatgatttgg

SEQ ID NO: 9724 - DNA, 546 bp, Cannabis sativa
ttacctggggcttgaattgggtaatggcctctttgtttgagaagatcaaagtgatagaacactgaaaacatagaagcagagagtggccagaaggaagccactggaatattcctcctgttaccaacatggatgggccaagccatgatgctatcagctatgataaccttcactggaggctcatgaaggccatcaagaagctcctcaaagggagcttccaacttggtcgagacggcctcaagaaagccactcaagtcttctgcacgaacatgctcggagggcacaacattgggtatggtggcaaattgaatgttatcaggttttggatcagacctgagcaatccaaaccactcttgggtgacgacgaaggtgatgaggatgtcgtatttgacacgagcagatagctgcttacacaagttcatcaccgcgttgatatgacttcttccaggatagggcattgccaccacatggcaggtcatcgtggccatggttggctgatcattcacaagggatatttgcataagaaaataagtttgtgtaacaaaagat

SEQ ID NO: 9725 - DNA, 721 bp, Cannabis sativa
ctaaccactaccagcttcactttttagttgaatggggaattatctgcttctctacttccaactaatgggtcttagacaaggttgtcctctctatctgtaattgtttctcatatgttcagaagggttatcgaggctgcttcaaaatgaagagagaataggtttatcacacgacttctctctcacccgtcatggccctccaacctcgcatccactctttgtggatgacagtttgcttttctgtcgtgtaaacgagccctcttatctcgcaataaaaaaggtgttggatatttatcatcgagctttggaacaagttctcaatccaaataaatgtgtaatgtctttttctcctaccactactttggcggcacaaattttctttcatagacatcttttgatgccaattatcgagtgccatgagaagtattagggtttaccttcatacactggtagaaataaaaagtagcttttagtggtgtaaaagagaagatttggcgattaatgaacaattggaatgagaaaatttttttggcaggtggaaaggaagtacttttaaaagcagcggtgcaatccatcccaacttatgttatgagttattttcggcttccaatcaccttttacaagcaacttgaatcattaatggccaatttctggtggggttcaaatgctaaggattcgaaaaatacattagcaaaattggaatttgctttgtaaaacaaaagaa

SEQ ID NO: 9726 - DNA, 843 bp, Cannabis sativa
taatttttatccgttcaatataaagattgtgagggttatatttttgtgagattttttaataattttttgacgaattatctcaatttaatttgtacacggtttgcaaaaattaatgtataatccattaatattgataatgggtattttatagaatttgcaatatattaataaaaaatatagatgttagcaatgaaaatatttaagttgcatttaaggatattgacgtgtattataatatgccaaacaataataagatatttaaactttatatttttggtgttttttaaaatatgaaccgtatcgtatcaggtcataaaacatataaatcgtattatgttatactataaaaaaaatgggtcgtactgtaaaaaaatatgggctgtatcgtgtcatgccataaaaaaaatatgggacgtgtcgtgtaacaattttatagggtagacccgacatgatccacaagtctgataatttcgtactatgctcggatttgtgtagtgttttattcgggccgacctgtttttcttaaatagaccaacctattttttatacgggcataaattcatgctctatatttttgcatttttcactataagaaatgtcacttttaccagcacagttcttacttttaccagcgcatttcgcaaactacgctggcaaagaggtcaaagttttattagagtacatttgcagtggctaaaatctaacttttactagcgcatttacatgctgagaaaagtcatctttgccagcgcttttcattttatgctggaaaaagttctaataccaacattgatttgccaacccccttttgtcaacgcttcacaagtaaattttattttacca

SEQ ID NO: 9727 - DNA, 591 bp, Cannabis sativa
atagttcatttgttaaggaattgggaacctgcatacaagccttctactatctcaaatcaccaaaccttcagcgaatgtattatcacggctttgaataccatcatcaacattaatcacaaagcttccagttattggtgctcaccatttagcttcacacccctttggcccttctccttgttcctatcattagccttctggaactcagtcaaaaactttttgcaccattccactacatcactcaccctcgaagtatatcctttatggttaatagagttcctaatgttccatatatgccaagatattacaaggaaaaatcaaaagttttagctggccatatctttttaaaattgttaaataacgaaatagcatcaattgttctcagttgatggattcgacgccataaactacttttttttttttttccatattttaatacttttttgacaatctcataagagatgaaacacatcttcatttttctgtacaacacagcaatgacatttcagttccacctccaccccacttttggccaatatatcattagttggtaaccaagaataacacacatttcatgtaaaatgtttaactttt

SEQ ID NO: 9728 - DNA, 671 bp, Cannabis sativa
atttttttatgttgttttcttttatatactagggatagctaggcacgtgtatctattttttctatgcaacaactatttgtgagtgcttttatgtaatttagctttgacatgtcaactatagtgcaaaaaaaaaataaataaataaataactattacatttggctatataaaaggagggatatgattttgttccgtgatgtacttttacagaatatattctgtggtacattagatggtctcagactctcaaggtacattaaatgattgtcagtttctactttttaaccctaattatccctagatcaatttcagccgtaagatcaaataactctctcatctgacggctgccgtacatcacggattacaatccgtgatagtacaataacgggacaaaataaaaagatattcaaaaactaaaacttttaaaatagtattttagtgagatatatacagttcatcaatattgaattcatttttttattggcccattcatttgagagaatattagctataattttcttctttatttagtggatagaatttaaattctatatatctatttatttatatttatattaaggaataaattcgcaattcgtgtgattttataactattttgaaattgtattaaaaaaaattaacttattatatgctaataaaatttttacttt

SEQ ID NO: 9729 - DNA, 696 bp, Cannabis sativa
gagttcggggtcctagatctgggtctagggtcctagatttgcgtcgggggtcttgatctcaggtcaggttgggttctggcttcgcgtctagggtccgggatttggggtttggggtctagggtccagggtccagtctaggcgaggtctggtctgggacctggtccgtgtttgaggtttggtaagtttaagtccggggcctggagttcaggtatggggtccggtttgggacgggtccctagtctgggtcgagtcccgagtttgggtctagattggagattggggttgaccttagatcctttgtaaatattttaatacaagataatatagaccatttattatatattaaataatataaattttgtattaaaatttttggtcgtaataataaatgcaatatattactttatcaaacatagtattattatcaactgattatccatttccaagaagtaatgtgaggaaattccactattattgctggtgttgttcttacttgaaatcactattcaagcattgtcatcctcggtagagaagtagatcgttgatggaaaagttttagagttggatgattcaaactttgatttcaccattgccgccttcgattgtgtgttggtcaacttctacgctccctggtttgagtcagtttcttggttaagttctcattatcctctcgatgatgaggtggtgtggttggtt

SEQ ID NO: 9730 - DNA, 1059 bp, Cannabis sativa
  modified_base (559)..(560): a, c, t, g, unknown or other
tatatatatatcattatataattttgtagagataattcaatacaataatttggttaatgtatatgttatgacgttaaaagtttaataagattttttttggtattgtttaaactttacaaaattaaattttaagtttttattataatgttcgataatgaaaatagtgtaaattgtctaaattgcactacatttttacagtttagttttcacggttttaaggttttgtagtgtggttacggtttgagaaattataaaaactgcatatatagtttggttttataaaaatggccaagacccacactacttgcactgcaaaaaccccaacaaaatattaccttgatctagagttattatgacaagtatgtctattttctttatctaaatttattaaaaattatcttcaagttcaagttatattattatataaaaaaaatgataaaaaattaagctcaaaatactattttatatcgtttttaaaaaaatacacgatccaattataaaataaaagatttaagtgccgtttggtaacatttttgttttataattttttaatcacaanntaaaagtaaaatttttatttttaatttttttttgaaaagtaaaaatgcgttatgtaatcacttttatttttcaatcttaaaaatagaaaacaaaatatgttctctaaagttcattttcattttcatttcttaattttatttaagtcaggtgtaggtctggagtaagatttaggttcggatcaaaggccgggttcaatactagggccgtgggggatttggatccagatctagttggagtctaaaatattaattaaaaaaaaaactgttaaaaaaatattgaaagttactttcttttttattattttaagaaatttaattcttaattaaaaaattaaaaaataaaattagtttacagaatatatttttaaaaaatattatcattattttaattttaaaattaaaaaactgattaaaattttcttaccaaacaccagcatgattaataatttttgttttttttacgtgttctgtccgtttttatatatttgattttctttta

SEQ ID NO: 9731 - DNA, 580 bp, Cannabis sativa
gagttaattctttttttttttttattcttgtatgcatagctttgcgaaagaggattaagcccagaaagttgactgttcatttttcagtttgaacaatgaaaggaactaaaacaaatatacaggcttaaaatgagaaccaaaagaggggacaccatttactccaacagcttctgaaactatatttttcactacaactaatttaacttgagtaacttgttagttggatattatcgttaaatactaattatattatcatattagttttaaaattttatttttatgcatacaaagatgtacatcgtctaattgatatttaacgataatatttaattgatgtctcaaatttgtaaagaaaagtaaatataaagaagttttgctaccaaaaaaataaaataaagaaaatttcaccgctagttacttctaaaagataataataagttttgttttttattttttattttatgtatataaatttcaatcacacatatagtatttattaaattactaaaatttagcaatgtggtaatatggtaataagataataacatgacaaatcaagtttagctaagttgaggatgat

SEQ ID NO: 9732 - DNA, 519 bp, Cannabis sativa
acaaaaaaatagagatctaataaaaaaaaattaatcaataaatctatataaaagattatcttataatttcataaccgttattatatacggcatgtcactttagttttcaatatatttaaagttaatatcatcactgtatcttacttatagtgattattatcattctcaataagtttgttatgtataaaataaattaatcaaataataaattaaatactcacttttatacaaatattataaatagaaattgaagaattcttttaatatatatatagatctaataaaaagataattgagcaatctatataaaactcattctatgattttataattgatgtcttcacatatgtctgtagtaccactaaatttaaagtcgatattatcacgtaactataatacctaagtgaatctataattttttttaagaaaaaaaaacactcacacttaaagattagtataataattctgaaagtacttttaatattaaataatgttgaatctacaaattaaataataaaa

SEQ ID NO: 9733 - DNA, 1710 bp, Cannabis sativa
taatctattaggactatctaattgtccttgttccatatgtcttgagctattccatttattgtgtggttttctagccttaaaaatttgaatatttgtcattcttatgttgattaaaaattaataaaaaaacaaatttaaggatttcattaattaaaatttatgctaaatcatgaataaactattagatatctaattcaaaagagaactcaaaaaataatactaaaaaaatcatatatcatatatttctatattagttttttttattatttacaaataatacaaaaaaaataaaatacactaaacaaatatattataaaataacataatatacagaataaaaaattaaattatgtatatgagaagaaaaataaaaaaaaggactaaattatattacataattattatattaattaaataattaaaattctttttagtatgtaattatacaatataattacactcattctcatggaggtatgagaataggagagagtgattgagacctctcaattatctctcgttatgattaattagtgtgtcaaatttttgtagaatgtaatattatttaggtatgtttttagggaaaattacaagtaccattttttgtaaaaaaattataatttacgtttaaaggttttattttttatatttttacgattttttatagaaacaacacgaaaacgataagaaaactgtataaaagtaataggaaaataacatataactaacattaaaataacaacaacaaaagataacttacagataataaaaaatcaacaataaattaataagagtacaatataaaaatattatattttctgtaaataaaatcataaaaattgtaaaattatttaaaattctatacaactatatttttataattttttttttgttatttttatgtatttgtaaaataatccttacgttttaagtatatatattattatttgatttaaaatattataatagttcttttaaattaatataaatctttcaaccgtgcgttgcaccgtgtatatgcacattttccccatgagaatggtgccccgcggggacccgaccctaatggggcggggattcctcgtttaaatggggaacgagaaggggacgggatcaaattttgtacctgaacgttaaacggagcggggacggggatgacactccccgccctgacggggacctgtttaatttattaatattttatattttaaaatgcgtttgtattttttttttttagtatattaatatcatttttacaattttttaaagttgtatttatgtataataattagtatatcgaataataaataatatgtaatattttattttttatgtaatttaataattttatatatttaattttttaaaataaatttcccgtcgcgttcccaataaaaaataagagggaatagagggaaaatgagaattaaaatccttaacggaatggggactgagagagcactcccagctaatagttgcacatccgtactagtgtatatatataataaagggtttatggacaggtaagatttattgttaccaaaacaacagaaaggcgcgcgttttttgtattcgtttctttgaggtaccaaacatttccatttcagactttgattcattgtttctatttctctgattcattcacatttatgccattttaatttatggttctgagatttctatttctttcatgtactgtgtgggaataag

SEQ ID NO: 9734 - DNA, 843 bp, Cannabis sativa
acaaaatgtcgtttggagcgtattttataacaacctgacctcaccacctgacaagtagtggctatagagacctgtataaggaaatcattcaataggaccatcaagtactccgacaaccacacccctgcaaccactactctgacatttgggtgttagcaggtgtacctcctatttggggaccacgagaatcaacttgtgacatgaggccaataaagcctcaatataaatagcattctcctccatttggaggaaggagaaaaattcgaatatgtaacaagagataaaggaataaaatcactatttttacttacggagcatttctcaaaagcttttggagttgtattatttttcttaacataaattataatatttattttccaacttaaacatcattaacaaattccaacagtcaatatttttttgcaccgtctgtgggatgaacaagttccaagataagttcttctcaaagaatcacatctcttcaagaatgcccagacgctcccagtgtttgtagtatgttgagattcgtttggacaacaaccaactagtggtggcaaggagggaccctccaccacatgctgcaggagatgcccaagaggaaaaccaggagacctttgccacagtgaaccaaacgccttgtatttatgtagggggaaccacacaaatgtgtcgagtggacatcccttataaaaagacaaggagacattgtctgtcacttcgtcagttaacggaggcccaccacctcagacatgagtatctccactaagcagcatcccccactactcgttccacaggatttgagagtccctcaccattgacctggagaagaaaaacaagtctact

SEQ ID NO: 9735 - DNA, 674 bp, Cannabis sativa
aaaaaaaaaaaaaaaaaaaaacaaagaaaagattctttagtttccagaaattccattgaattggtctagaaatcattgaattgatttggtctatagaaagaccttatttgttgctacatgccttatatatatatgattatattatattatataaatcacatatacctttatactagtatgattgttattggtctaaaattcaagattttgactaactaatatattaattaagtaatattattccatgtatatatataaatgttaggagtgttatatgatatgtatatatactttattaaaagagaaaaaaggaaagtatatattaagaaagagagaataataatgagaaagaagaagaataattatagagttggttttcttgggttaataataagtatgttattaatgttaataagatgtagtagtattagtgatgataataagaataatatagtgattaatattggtgggattatagatgagagtagtcgagttgggaaggaagaaagaatagccataacaatggcagccaaggaatatagccatcattatcatcatcatcatcatcatcacatctcatctcttcacataacaacctctcaaagagatcccatcaaagctgccctagctggtacctaattatatattattcatctcatgctaattaataatat

SEQ ID NO: 9736 - DNA, 760 bp, Cannabis sativa
tgatgctatgcaacaccttttggcctcactatggcaacctggaaaaggtatgtttgtaaaggaatccggagacaaaccgatttttatttccgttttatcacgaaattgatattcaaagtgtcatcgaacttagtccgtggacattcaataaattccttctggttttttcgaggctgaaaccaggggagaatcccagattggttgagttgaatgaggtaaatttgtgggttcaattgcatgacttacggtgaggatttagaactgctattgtggctgaagatgtagcaaattacattagtaaatttgtcgagtctgatgagaataattttatgggcctctggagggactttcttcgagttagagtcactatgaatgttactaagcccttcaaaagacgtatgagacttcggaatactgttggaattgagttttggacaaacttcgaatatgaacatcttcccacattttgctttatatgtgggattatgggacactctgataaattctgtcctcggaggttcgatgttacaaatggtatgatgtttaaaccgtatggtgactggatgagagtctagcctaggcgtaccagtcaacgattgggaagaaatggctaaaaaaattcagggtggcaacggatgagtgtcagatgcaggaagaccaaccagattcaggcatgataccaaaagaactttgacgggacaattaatgtcaccagctatttcgaatcaaattactgtgatgaaggagaaaattgggggtc

SEQ ID NO: 9737 - DNA, 816 bp, Cannabis sativa
ttaggctatttatatgttgtgtttgagtgtgttggttcagttatgtacatcattagaagaagttttatatatttataagaagaaaaaataaaccaacattttgtacatagtgaccacaaactaaagttcccctcccaaaatttttggaagccagatgtatgtggttgtgtatttataaagataaagaaggaaattatgatataacatggtgtattcgttaagaaaattggacaaagtctattacatgaagatatagttcgtaaagcaaataaataataatagagttattaaactgtttacaatagaaaagaacaaaatcttaacaacaacttcaagtaagagtctaataaattaccagcagtcaaacataaaagaaaaagtgtaaaatatattagatttctaaactagtaaacatctataagaatccacctaccagtagctatgaattattgattttccaataaaaattaaaaaataacaatcccattattcaaatagtaaataagaaaaattactcattctgtttgctttaatttatttattttaagttggggttagtttttaaacttgaaaaaaaatcatattttacaagtatttggataaaaaataaaagtcgaccgacctaaaaattttgtaagttaatgggtagaacattactattaatcaccaataatgtacaatcacgaagtaacaccttaaaaatagctaataatattctaaaagaagaatgaatacattaaatcatgtgaagttagatactctattactataagtgatgttttttagtatttcttgaatgagaattttgagtttgtt

SEQ ID NO: 9738 - DNA, 929 bp, Cannabis sativa
ataacatgcatactatttctctcaagaaagaagaactattatctgtcaccatttgccctagtgaacaaagagaaaatatatatatttagaaagagagaagaacttacacgatgaaagcaaggcagaggcagaggatgtcgtacgacggtagtacttcgcttggcaacggtggaggaaaagtaggaggaaattggaggagtctagaatttcgctaagaagtttgaaagcctgaaagtcgaaaaacaatgaaagtgagccagtcgtaagaggtactggtttttataggactaacagggtgttagatatcaacgaatgagtaccatcgaacggtagggttcacaatggttcaaatcccatcaaactaacggttaggatgaaaatgcgtgatgaagagaaatggcagttgaaatgtttgaatatctctctgacatctgcattaatgaggaggtttgtcaatgggcgggaaacaaatccctgcctgctaagagacaaggaagaatgattacgatcattaaaatgacccacgcgcgtggaatacgtgccacgtcactccttgagaccggaagtagtatacaagtctagtttttttttatctatattttggactcctacccaacctacaccttagaacccgaacctcggctcagacctggacccgaattcaaaccttagccccggcttcaaacactacttaaataaaatcaacaaataaaaatgaaaataaaataataaaacacagttttatttttgtttttaaaattaaaaaacaaaaatggttatagagcacattttttatttttcaaaaataaaattttaaaaataagaattttacttttatttttatgattcaaaaattcaaaaacaaaagtgttaccaaatgccatctatgcttagcgcttccgttgtgtcacatattacatcaaggcatg

SEQ ID NO: 9739 - DNA, 1061 bp, Cannabis sativa
ttttaaaattattttaatatttctattctttattaggacttttgattactacaacgcttccaataagagacagctaaaaaagtttgacattacatcaaaatttataaaagttagttataagataaaattacattaatatattacaatatagtaattatttttcaaatttttaattatctatgtgtttttatttcataaatatgtgcagtgtcttctacatatatcgaattttgagtgtggatcatattatataatgagatacatgcgtgacttttgcaacttttgcatgaattctagacttatcaattggctaaccactcaagtaagctatatatatttggggtatatatactataataaaatatttttctatcctattacaattactactatatatatgtacaaatacttatctatcattgcagtgcaatgggaaaaaaacttatacaaaacaagaaattaatgaaattcgtgtagaatgggctgactaatttttagaagaaattgcagaagatggaatgctttaattgagttatcaaaatgaaagaaactttgttatatagtgctatgcaaatatttcatttttgaaagttgttttagaagtatttgtgctcctacttttttttaattttattttataattttttatagctaattattaatttgttttcagatagtaagtgctcttttttttttcctaagaagcttttatctattggtttgtttggttttgtttactcacgaggcttactactactagagaggatccatgtagtatctttgtttcaacaaagttatatgtatcctatatgagttgtttattatattattttctttcaaatttttatggcatttataatttttttaatttagtttatcttattcatttattataaatttaattatttctttttacctttatttaatattaaaacaaaatataacttatatacatattgttttttttaagaaaatatagattagttttttttttgttggagcaagtaattatgtttttatgtttattattcttattgtattatattatattttgcatttat

SEQ ID NO: 9740 - DNA, 784 bp, Cannabis sativa
attttaaatttttgttgtaacaatttcaatgtatatattaaaaaatgtgttaaatttagcaatattaatatattaatgataattaataaattaaatctatttttttgaaaataatagtaattttatgattaaaaaattatatcggagtaacttattaatgttaaatggtaataatatagataaaaaatatgcattaattgtgtgtgtgttttacgtaaagctatactttgagttaaatttaatctaataatttaagtatgtgctaaatttagtataagttttagcacattattgaagaagaaaattttataaaaatatcaaaatatagcattataccatttatttagcactctattacaaatatatggtataatttataagtggtttaaaataattagaattacaggattatgaaaaaagaaatatgtgtacttaaataatctttagtatagatttggaagattatgtaatagatcacttaaagggtcagattttgtatttttttgacattcaatttttttttttaatttaatttattttttatgatggtgaatattgtaattattaaggattagttataaatatttaaaaaatttaaataatttacaatattaaaaataaaatttatatacccgtataaaaagtatgtaaatttttatttttaatattataaactactcgaatttttttttaaatttacagtaatttttttttaaaatttctttttgagtgccaaaaaataagggtctatcgaaatacttccactatcttatagatttttctt

SEQ ID NO: 9741 - DNA, 700 bp, Cannabis sativa
taaaatattttttattaattttatgatataattattatatataaaaataaaaattatctaaatattttatataaaaaattttaaatttaatatttttaaaatattattgatatgtttagagagaattccgcacaattcaccacaatatcttatttaagttttattgtacatataaaatacatatatctatataataatattcattggcacaataatgtagttacaatagctaaaaagattgtcaataattaacatctcaaattccatttaaaaaattaaaataatctacctattaaaaaataaaacatacaaacatttaatatcacttaattaaacttaattagaaagaaaactaatagtattgcacgtaacattaatctaatatataagtacattcttgtattatttataattaggcattaggtgataaatttgattttatatgtttaattttgttatttaattaaaaaaaaatcatttttgcattatatggttgaaattggttaataaggccaaaaatttttttaaaaagaaagcatcaacattgaagaggtcctggtgcaattttattgtaatttgtgcctccattattaatgatcggcccacgtattaataacagtactggcaattacttttacaatagtttcaatttccaaaattaactaacaatttacttaactaatcaaattaagtatctatt

SEQ ID NO: 9742 - DNA, 501 bp, Cannabis sativa
tcaagtctagatatataacacctctggccctgtgtggctagttggtctcatgtttccgttccttgtcgcttacaaaagttttcaactttccaaatttcatgtgttatgtaattgatagttacagaaaatattatgaaaggtattagtgattgacaatgacattgttgatcactgaactcaaatagtcaattccatatcttgtttttaatctcttgtacaaagccatgtaaagattttcctttctaattttctttctggcacattctttcccttcagctgattgggttgcaaattaagatgatatatagatctacccttatcaaacatgaatggagaaagatagtttttgctcttaaagatgaaagagaaaaggttgaaaatttcttttagaattcacaataaatatctcaagtcatcaaatgtttatggtataaaacatatctatacacgaatttatatattatataagcacagagaaaattaaaatttggaatccactca

SEQ ID NO: 9743 - DNA, 892 bp, Cannabis sativa
atttatttttttataattatttgttagaaacactcatatccatcattttttttttgatatgatctgagaagagagacatatatataaaaaaaaaaaaaattccattattttttaacttcgccattaaagaatttctgaatctcaacgtctatttttcttttaaaaaaataatcaaaacttttagttttggttatagtttatgttctttgataaataatttttaagaactttagagagaaagacggaggagaaaaaaagagaagtgaatgctaattttttttaaaggaaataataatatttttaacaaataattatatatgtaaaaaaaataaataaagaaataatatttaatggacataaaataaaataataacgtgatataaaataatatagaatagatgagaagaaagaagaagaaagaaagagaaagtgaatgagaatttttcagttatttattccaatagggtgaacccgtatttatacaaatacaagagttaataagaaaagggaaactaagaaaaaagaaaagttgattacaattaatggtaataaataaaaaatttggacatccacacgattattaatatttataacaataataacacatattaaaaaaaaaatcctacataaaatgatttttaatacttctattgaagcattatcttatgttttaaattaaaacacacactaaataaatgtaaactggaatttttaaaatataaaatattcaacaccaattagtctatacatgacatgtcttcttttctttgaacttaattttgattttcttttagttagcaaaaaataatttgattttcttttgtttgggatcactatttgctttcttaattcttaaaattttaacaaaaatgtctaacacattattttcatc

SEQ ID NO: 9744 - DNA, 925 bp, Cannabis sativa
attatattagaaaattatttttatcaattatattttattaattattacaatatcataaaaattaattgaaaaaaatactgatattaagttaaaacttaaattaaaattaaaataaattaaatttatttaaggatgtcaactggtagggtataattaagtagggtatgcttatttcacgatcctaccctatatataaaacacaaattctacccactcatacccaaccctattatcctatgaatttttgcaagtagtatgaatattgccctaactggtatagggtactcacagcctaccctaataaattttaaaaagattaaaataattaataaaattatgctataaaaaaataaaagaaagaacaaactaaatgacataaaaattatcgatatatatgtaattatttgaataataagtaataattttacttatgtttgtaaaattaattaattttttttttgtatggattataaaatataattagttaataattaaaacaataataaagcattatagataataagtaattattttttaaattttatatttttatactaataaataaaaaagtaactttttctttcatgtatttttcaaatatgattgaaatgcatagtattaatatttgtaattatttatccgtatagcgtgatactattactattactatatattcaaataataaatctgataaattataataaaaatataaaataattaatatatattatttattgcctataactataatgaatacatcaaacatgtttgtgtaataaatattaccgtatatagtttgtatagaaaattaatattatatttgataaaatataaataaattattatgtgatttattaaagaataatattatgtaatattaaaaattcgcaattattttttttaggtggcgccacttttattccaa

SEQ ID NO: 9745 - DNA, 579 bp, Cannabis sativa
aaattggacgaaagtccttaaatcaaataacttcaataattctggaaaatttttaacgacttgagaaattctaaaggcacaatttgatatatgttaaagttcagaagacaaaaatcttaattgaacttagaaaaatttagaaccttgtaaatttttgaaaaaattaaaaaatttaacgcgctaaaaataaggttcgaacattcagttaaatgcatgtctactttattttatatgtatgtgaaacttgttgaatattgcttcgtatattgtaacaattatcccaaatttttaaaaaatttgcaagataataactacattatacaaaatcatgtttaaaaataaaattataattataattatttaaatattaaaaatacgaaaaaatatgtatcggtgcgcacctaaaattgtagaagcacctatatatatatatataaaaaaattcatatctatataaaagtataagaaatttatataattttttatatataaataaaagtgagggtagctagtgtgccctccatgatttatgtgggtctgcgagtatttacgatatttggtaaaatttagtatgctaat

SEQ ID NO: 9746 - DNA, 1035 bp, Cannabis sativa
atttgatgatgaacttatgctaaattctttgatatcatttagtatgtatcgctctacttgttcaaaatatatattatgattttgtatgtatatgtagacttagtttgatttggttaatattcagataatactataactttattattaatttgttgaaacgaaatcctaaattttggttgtggagagatatgattaaggcaaattttgttgaatcatttgagtcaaaaagctaagcttgattcattaacttttgttgtcctattttgaacctaattttttctaattttattctttgttaaaaaatatatatttatctttgattatgagctatagacttaaacacttatccttaccttaatttacaccataaacatagattgtttttgtaatgaataaacaatatgatccaatagggatgataaatttttatgagaattatttttgaaaagtaaatatgcgctattaattcaagaaaatatgtgtttatagagttatactttatgttcatagagtgatgttgaaaaaagttcttttattataaaaaaaaaaaaaacttcaaaaaaaaattcatatttaaaaaatattaataacaagagatatatagagattataactttattgtgcgaaaaagaagcattaaatattgaaagaaaaaggatttataatgaaagttttgtatttttgattatttattttgtaagtttatgatatgaaattagcttaaatgatattttcatccaccatttacctaaacataaacattacattcctatatataaagtccttttaatttatatgattttagtttacattaataaagatgaattgattatgcaagtctatggttatcttgaatgatttattaatacaaatgaatcatatgtatgtggcatttatagaatttacatatgcatattttactaaaaaatatataatattggaaattaagtttggtgggttgaaattctagtcctttatttaaagtgtatgttgaataattgaaagatattttggtatttttagatacattatctt

SEQ ID NO: 9747 - DNA, 501 bp, Cannabis sativa
gtcctcttcttgttgaagcaaaggcgagaggggatgaccttggatccaaccaatccgctcctccgcttctttaatgagcttatcacagtcactgaaagactctattttccacctttggagagtagttctcgtatcgcctaaacgcgagctaagactgctacccctctgccccttagtcaagcattcttgatagtttccccacaagaattatcccttgcccaagcttcaaagaaacggaaaggtttgatccctctttgctgcctaccagatgtatctaggaggataaacccatgatctgacaccgtgatcggagcattcaacacttcagtcgcaggaaaggaagtcacccactcacccgaagctacagcccgatccaatctctcccttgttaaaccccccaagaacctattattttgccaagtaaacttgcaccctcggaaccccaagtcgatccccccagaattctgaaaaaaaaaattcaaaagaattcctgtatccctt

SEQ ID NO: 9748 - DNA, 610 bp, Cannabis sativa
ggcgggaacttctacttaattgatattgatgttattaaacaatttttattgaaaattacaaactaaatctaaaatactcaaaattataatataaaaatgaatcgcaataataaaatataatctcaacaaagcagcacttttgccaagagaaagtcaggcaagcttagtcggagaaaaaaaataacctcctgtaactataaatttacggacaacaaactctaattttattttttcaatgtatacaaattcataactaagattagtacatctatatagtatggttagtaacctttgtatttgtatagtataatgttgatggttgaatttgaatgggaagtacaaggagtaattgagttttgtatcaaaatgggagacttctagtttatagaaatgggtaaatgaactttattgatttggttcttggttacacaatttggaactattggtggggtatttgtaattactcaacccttacactgattataattatttttctaaatcattcctttacaaaaatgtaccttctagagttaaatttaactagtataatctagttaatctaatctagaaatcactgaagtttttgaagaattttttcaacaaatgccta

SEQ ID NO: 9749 - DNA, 928 bp, Cannabis sativa
aaagaacaaaccttagatgtaagttatttttagcaatctagaaggcactctcaatttcttcattgatcttctactgaggattagagcacaagagttcccacattgttaaccccttgtgatcatgagttttacgttagaggaagaaggtgtaaatttagatattgtcgcagatgtcaacttgttgatcaccctaacctcctgtctctgtgaaaggtgcgatcaacttcccaacccaaacccaacgacggtcaacttcattcacctctagatcatatgttttgggtttatgaattattttgcatgtttggtttgggatgcaatttttgtttttgattgtgtgactgtcatcgctagaatattttggaaccacaaatcatgctatttcttgaatttagggttatgtggaattgagcattttgcagcagttatgctggaaaaattttccccttgcccaaaatccttctagttttgggttctctattaatctccgtcatgtttctctttgtgtcattcctgactttttatctcgaatgaatgactcatggaagtcctcgtttctagatagttaatctagttggcacctctccaagcagttaattggggaggacccccaactccctttctacgttaggtagttagggtggctgactgcctgggtttttgttcttttatataaagaccatgcctagacaaacttgttaagaggaagctgacttagaggaggagattatggagcaggagagcgctccaaaattggtcctgaatgacagtccatgggagatggacaaaaatgtaaactaattcaagaactaaaataacttgaggaattacgagacccaatagtcgctcaaaagtgttctagagctgttttagaacaagctctccgttacgggtagaggcctagcaagtgtgtggaaggaagcttttg

SEQ ID NO: 9750 - DNA, 1154 bp, Cannabis sativa
tttgtcctttttccctcaggttttcgttacccatgtaaaacgttttgctaatgaagcagcacatggtttagctaaatttgttttaggattggatgatgacattagttggataggagaaatttcctatcatatattctctgttgttgtaaatgattcttagtttataataacagtgaattttcttaaaaaaaaaaattagagccgacttaataatatagtgaatcgtaaattgtgaaccattagaattatacaatgtgaagaaattaaaactaaatttctattctaaataaacatgtgactataatcactcctatcaataaattatttaaaaaaatttaataaaaattaaggagaaacaccctatattcaaactaaaataaattaagaaaaatatgacaacccatatattcacaattttcaatattaaatattgatgaatcaaaaaatataatatcaaaaagccaattctattaccaataaaaactataaatatgccaaaccaaatatggttctaaaagcattttcaatagagttgcttatggagtgatttgtatcacatgtacaatataatcaacattttaaatatattttatcaatattattgtccaaaatgagtcaccatcatgtgatattatttactttttaaaaaaaaaaaaaaattactttatcaattttttgttttttctgtttttataatgtggcatgtggaagtgagattatagtagacaatttttgaagtacttatcaattattagagtaatttttgtttaaaaaatatagtaaatcttatatgagagagaaaataaaaaaaaataatatgttagaataatatgtatttattattttatttttttttatcaagataatatgtattttttttgtaactataagtatttattattattttttttgtttaaaaatgctctaacactactatgattttttttttttttttgagtaaaataacactactatgaattggttatattgattgactatgtatgagtgattaaaagataattaactagtgtcgtataagaaaataatttttaaataagtaattatgagacacgaattctgtgtatcaattttcaaacacgtattaatactatcccttcttttcttctttcttttgggcgacacaatccgttttt

SEQ ID NO: 9751 - DNA, 682 bp, Cannabis sativa
ataattactaaataaattacattgtttttctcaagaattatgttggtagggagtttgggttgctctacacacttggttgtcaatggtgctccgccaaatgaagaattcggtaaaggtgtatgtgtgtgggtgagtttgtagagatagaaagagtcaaagagagtgaagggaatgagaggaaaatggattaaattttaattttgttatttgaagggtaattttttttgtttgatgaatcaggaatttcattacaccaaacaaacatttacaaactaaaagcacctttatcaaggcctttgtgtatactatacaagtgtgtatatatagctattgtattaaagattttcaaactaaactttatctttctctgttactttttgtggcattacacatgatactctatgttttaggatccattttgtttgctgtagcatttggctgggagtatcaagctttgaattccgaagctggtcgttcctaattagccaaattgaatacactagggctgcaattacaacacaataaacatgttttttgaattttgagtacttgcccctctcaattcttcgaataataccctacaagctactctattttatcctccagtcaagccagaatttcacctgctgcagagcttcttgggagaacctgcagtcaaagaacaagtgctctaatgtttctg

SEQ ID NO: 9752 - DNA, 642 bp, Cannabis sativa
ttagtccacccaaattttcccagaaaagtaggaaaaagtggaagaacaattcatatatctaaactaaagtatttaagtatctgttgtattgtatgcagcatcagctgaagaggtgtcaatgtcattcaaacccaactcctcattttgctcccaagacctctcataatcctcaactattaatcacaacaaacaataaacacattatacaaattacaaaaaattcaatcaatttggacatgttattctttcttacgacagagtggtaaaaagtatttcgtgaattaatttgtattagtttaatctaaaataagtgaatatgtaagattaaatgtttaatatttttgtgacaaagttgatgagaatagtttcaattttatgtttattgataatttgtagtatttttcttttggatgttttaacacattttgaaaattcttgataagtatttataattgcttgctagtcttcacgcttttatggctcatattgtatggtctggatcctttcaaatataagattgaatccataaaatccgcacttaatgcagattagatacactatgagcaaaatagtggggatcgaataggatgaataccctgtagtttttttttttgtttttggatgtggaaaagttgcgttccg

SEQ ID NO: 9753 - DNA, 957 bp, Cannabis sativa
attctttatagtcaccctactaaatactaattaaatagctccattatatatcatacgttcaattatgtccacatatatatacttccaatatgcctatgcataaccaacaaaatgaaaggctgcaagaaaaagcttataaaaaccatcatataatgaagatataaatattatttatattgataagtgccataataaaatttagtcaacttgagcatttttgtcatgctttaatataaacagtcagttttcttcacgtgagatacaagggacattagtttttctatccttaataatactccaaattaggaaaatttgaatttgtatgctttgttttttttaaatcaaaatccatttatcaacaaaattataaaggattaggcaagtttcgctctaaagcaaagcttacacaagagagattaaccccaatccacatagctcgaattttatttgccaaaatataattgggtaactcataagtgaccctattagctttcctaaatacaaaagaaatatcagccacattgtcaaataataatagataacgaatatgatctagtataccatcaacatctctagagctagccctcttcatttcattggattaattaattggatagcttcaagacaatctgactcaatactaaatagccatagacaacacttgattctttctactaaaccaacttgtattgccaaaagttccacttaaacaggttggagttcctactaaagtattgcagcagaagtgtacaccacccacccagcactatcacaaaccacacactccaatcccaaacctttgcttcccttttcgacactagcatcaatattcattttcaacatcccaacggttggaggagcccagtccctcacatcccacaacctccccttgtctccactctccctcgcagttctaaattgatgaacaaattgggcacaccattcaacaacatctgc

SEQ ID NO: 9754 - DNA, 715 bp, Cannabis sativa
tgttcaggtgggatataagctgcagtgatcaactccctgattacatgaaatattgttacgaggcactgttaaaattatacgatgaaattgaggaggagttggccatgcaaggcagaacttatcggatggcctatgcaaaggagacagtaagtaatctatatacacagcggcaggtcccgtgattaaagttgaggctgcatgcatagagaggagcttatatatatatatatatatatatatatataaatattttgtctagatcatataacttatatatatacatatatttttataatattaaatataagtttaaagtaaaaataaaataatgaaatagttggcttaaaaattaagtactaactacaagtcttatttatagaggttggaaaagtaaattttaaatattaaaaataataagagtattgttatgggataccaaaaggacgtcttataattttttagtggttttatataacttttattaaattaaaataagtatattaaattgcaataataataatattacatttcataagtgtgctaggcattatgcatgcctttagcatttctcaaatgagcattactattgggcattcagtggtgtctagcaacttcaaggcgtgtcgttttgtgattggttagcgataatggataaaagctatttctctttatatgtattatattatctaacaggtaattaatattaatttacgca

SEQ ID NO: 9755 - DNA, 1017 bp, Cannabis sativa
catgtcaaacacaaatttcaggttctatatctcttttgtagatgattatagcagatacaccttgttgtatcccttaaacaccaaagccgatgccctctctgcctttgtttagttcaaaaagtttgctgagaaccagttcagtaggaaaattaaaaggttgcaaactgattggggaggagagtaccaagccttctctaatcttgtcactgaaagtggcattgagtttactcactcttgtccccatacctcagctcaaaatggtagagctgagagaaaacacagacatattgtggaaatggggctgactttacttgctcaagcaagcatgccacttaaatattggtgtgatgctttcatgacagcagtctatttgataaatagacttcctacacctgtgttgaataacatttcacctttcgagatgttacagaaaagaaaacctgactataaatttttaaaaacatttggtgtagcttgttatccttgtcttagagcctgccaatcccacaagtttcaatatcactcaaccaagtgtgttaacttaggttatagtgaaagctttaagggttacaagtgcttgagtagcacaggcagaatatacatttcgagaaatgtaatttttaatgaagccgagtttccctttaaagctggttttctaaacactcatcaagctgaacaaagtgtcaatgttcaagtgcctttctggtcaacttttattaacacttcatctggtttttcccatgatcagtcacagcaaaataccaacattcaaactgatacagatcctgaattgagaccacctggagcatcatcatctacttctaagtctgcaactatttatacagatcagaattttgagcatgatttcgatcatgatgaaattaatgtcaacactgagcagtatgaagaacaagtagcagaaagtaataaagttgcagagacttcatctggtgcagcagtcgacaatcaacaaccacctcaaattgttcctactcatcctatgataacaaggtcaaa

SEQ ID NO: 9756 - DNA, 829 bp, Cannabis sativa
ttttcatcttgtgcatttgacttacgtcagagattcaatgctaaacctcttagctcttctagttttatattatgatcttttttttttcaatagatttgttcttagccaagtcccctcctatatatagttctgtgtttttgtgcaattttagggctatagaattttaatttaagtatttatctaaccatcttgacatttaattattcatgaaatgatgaacatctttttcaaagtacttattttggtgatagtatgtttcatttccatattctctgttttagttttcatgaaatgataaagatttttttcaaagtagttattttggtgggtgtatgtttttttatgtatatagaaattaccattacacaaacaatctaccacttattctaatttctaattttctatgcaatgcaactatatgtgtttagacaatatttcccctctttgattgttgttggcatatcaaaaatgggctataaaggatgttttaaacatcctaataggactccacttctgactcaaattgaatagaaactccaataaccacttgaggtttaggtgggtgtgtgagtgttagagattctggattcgagtctcaagtaaaacatggttgtaatatataaacgctaaaaaaaaaaataaataaataaaaaaaaaacctccaacctactaatgaagataaaaagaaacacaaaactaatgacgaagattctgatgaagatgaatagaaacacaagtctactaatgaagatcaaatgtagtagaaaagtttttttttttttttgataagtgtagtagaaaagttagtctatacaaatattacaattta

SEQ ID NO: 9757 - DNA, 966 bp, Cannabis sativa
tcggggacaactctcgaaacactagcaaccacttcatgacaattgctattagaggcagtgaacaaggttgaaaaataatcgtctattaaaccagataaaccattctcccaatccacccaattattctgagaatctttcaatttgataatctggttatggcattttcgcttagtagcagataagtgaaaaaacttactatttttatctccacctttgagccaaaaatgtttagctctctacttccaaaaagcctctctctgttcaaggacctcaaataattcttttttagcttcatcataaagttgtaaggatgccgagtcacggttgcctttgagtaaacgtaattgatccttgcaaagctttattcggcctttgaaattcccagtaatttcctttccccactggtccaacgtagaagcacacaactccagtttattcatgataccaccgcttgtagtttcctcccaacaactttgtacaatctagtagcacataggttcccttagccaagcattttcgaagcggaatcgatgaaaagttgagaatctaggctgtgccacaggttctagaaaaataggacagtggtccgatgaagatgtaccgaggttaacaagcttagaagctggaaaaatagctgcccacctactgttgtataatactctgtctaaccgaatttccacccaaaaatcagtacctctgcttctttcctaggtgaacgggtagccaagcatctccatatcctcttaaccacaatcgacaaggcaattgttgaagccttctaacaatcgtctcgggtagggatgaccgcccctttgatcttcttggctgaggatgttattgacatctccgatgacgcaccaagggagggtatcatcttctgctaactccttcaacaatctccatgtattctcccttcggctccgattaggctcaccgtacagccctgtgagtctccaaagaacacca

SEQ ID NO: 9758 - DNA, 926 bp, Cannabis sativa
ataatttactgagagatgttgaagtaaaaaaatgcgtggtcgggacgagcccattttcagtcgcgatcacaatactttcggctggggagagggactacagaaactagtttttttacttttctaaagtcgtcgcggtgaggctattttaatgaaaaggggtcgcgaattttagaggggatagacataatggaaccttaaaaacacaagaagaagaagaagcttggagatccgtgacaatactccgtctaattttcttctcttctcttgatttcttatgtttttatttatgtctagtttaattatgaatttgattatgaactaaactccctatttaggaatgtgatggatattgtttaagattatttcatgagttaatattacttagttattctttcttcattgattatgtgatttattcatctttgtgtttattggatgtttaagcttgatcaccttatgtatgatttatgatccaaatgtgaaatttgaaaagtgaatgttaggaatgctttaaatgaataaacataggctttgatgtgaaacgaaagtatttcaatattgtgacttttagattattgcttaatgcaaattgaatgttgttctatctcagagatcagtagttggcatgaaatttaggatcctcatgttcagaaaacagtttagattttaatttataatatatcatacataggaggaagaagagtggttaattagtattaacaactgggtaatcaaagtaattgaagtcatatccctaatttcacatccattgttaaaccttttatttgtttgttttatttaattttgcttagtttatttagtttcaaaatttatctatctgattatcaaataaaaataagaattcatttgattggtacttaggtacagtcctcgtgaaaacaatctcacttacctaagtattactt

SEQ ID NO: 9759 - DNA, 1151 bp, Cannabis sativa
ttttaacttttagttcttctttccgcgagtcttatgttcatggttgatgaaaacactgttatttacacaacacctattgcccaaatccccatttccaaagccttgtttaccaagcaggcacaatatgacaagattcctgacgacattttacaagtagatgatctcatcacctccgagctacttcaaaagtaaggcctgataatgaagtctttgagcgtagaccatatcagaaattgagatctctgtcgtgatcctccaaaggttaaggaggaaatttttgccatgttaacgagggaaatgacagaagccattaaggaggataagcacataatggcagattgggcaagacgtcatctgggtcccatcaatgaggagcaagagctggtggataggtttgctactgttacgcctgatgaaggtgccccggaagctagcacttctggtagaggtataatacatttttgcttaattcacgcttcatattcggatcaaatggctcggctagaccaatattttatgaacatttatctcaataggtatctagtagaggaatattataataggatagacaagatcataaggagcccaaagtattttgagccattacctcaaaccactaggatagctcccttccttttaatgctcttcctagacttcgaagagcatggtagtctcctgaaccgggaggatataactttatttgctcaagggaacccaagttgtaaaataattgatggttgtcttcacatctgtgctttgcttatgtttctaactagctataagtcaaacactcttttgatttgcactcgttattaataatttcttttattttgcatagaacttgaagtcacctgaaatggggctgttgaataagctcatgggaaacatcgactagaaaattaaccagatcaaggtcaatattggagctaagctgctttctagaatagccaaaggcaaaggcaagagcaaggcaaagagggcctctaagacaaaggctcccactgctacttttttagctgccactccaatttcttcacgtgccaaaggaggctccatgagtcttgagaaaacatctgcaagtgttgagaagacatctgcaagtgttgagaaaacttctgtaggtgttgagaagacatctacgggtcagggag

SEQ ID NO: 9760 - DNA, 601 bp, Cannabis sativa
agtaataataaataaataaactagagagagacacccatctgtggtgggctttgacgaggcgagagagagacaaggtggtaggtggtctttgacgagaggaagagagagatgagacaagagggagaaggtggagaggttgtcgacgaggcgtcggtggcataaaggtcgtgttagggtttatgccctaaaagcaagttattattccaaatctacacaaggtgacatgacatctatctggatgatgcatagagagaatcctgcaacctgaacagacaatttcactcgtaatgagccgtgtagggagatttgatactttaagtcataacaaaaactgcaacatcattaaaatataatatgtcagaaacaatataacttttcccgctccttctctctctttcggtgcctcaccggagctatggcaaaaagggcaaaaatggccgggaaagggaaatctaaggggaaaagaactggtccttcatcctcgaatagagtcataaagactagatctatggatgcaatgctaggaatttaggaaccggcgattgaggaagaggtggattcaatggaacagtgtcgcgatgatgaactctatgctgagaga

SEQ ID NO: 9761 - DNA, 952 bp, Cannabis sativa
ttcaaatactgattctacacctttgcacattacacatcatatgtttgattttgttatttggcacaatagggttggtcatccttctggaaaggttgtaaagtctgtgctccatgattgtaatgttcaaaatgcaaataaaaattccaattctatgtgttcagcttgttgtttatgcaaaacccataaatttccattcccaaaagcctctcaaacaacatacacaacgccactagaattggttgtttctgacttatggggaccctcttatatcccctctataaatggctataaatattacattcacttttgctgatacatactctaggtttacatgaatttacatgcttaaaaccaaagatgaggcactaaaaacattccaacattttaaagctcaatccgaattgcaactttgcccaaaaataaaggttcttcaaacagattggggtggggagtataggtgatcatttaccaatacactaaaagaagcagggataatccatagacatccatgtccaactacacatgaacaaaatggattagatgaacgtaaacacagacatataattgaaaatggtcttacattgcttgcctaagcctccatgcctttaaggttttgggatgaagcttttaggacagctctgtacatccataataggctccctacacctgtccttaaacataaatcacctattgaaactctttttaatatctcacaagattacactagtttcaaaacctttggctgctcttgttatcctaatataagaccttacaataagcataagcttcagtttagatccactccttttacttttattgcatatagtctaaatcataaagggtataaatgcatggatcaatctagtatagtctatatttcttgagatgttatatttgatgagtacatgttctctcatgctccacaaaaccatcctcccgtcactgttgattt

SEQ ID NO: 9762 - DNA, 536 bp, Cannabis sativa
aaaaaataaggtggtgtttggtaatatattgtttaaaaaatttttaatcacaaaagtaaaagtgatatttttgtttttgaaaaatagaaaataaaagtttgttttttaaattttatttttatttttatttgttgatttaatttaagtagagtctagagtcagggtctaagtctgaggctgggtttggataggggttagggattggggtcggagtctatattgagattcgggtccgagtctcaaggtttgatttgggatcggaatttaaaatattgattaagaaaaacaaattgtttaaaaatagaattgaaagtaatttttattttttctaaaaagttttataagatatgtttttgaaaaatatttttacttttttaaattaaaaaatattacataatgcatcctaaattattatgaataccatcaaaaaaaatataatagtatttttataaagttgtggctctcgtcttaattaaatattctgcgtgtaatattttgatgcatactttgtatatagacataatacttagtactta

SEQ ID NO: 9763 - DNA, 601 bp, Cannabis sativa
gggatctaatttgtagttttatgttatatttcgttagttgaattgaataattagttgttggacacatttttattaattgtattgatctaatcataatgttttattaattgtcagatcattataataatgttggattagtacaagcactcaaattagcagtatcgccaatttaaacacttgaattggcgtctgcattagcaaagagtgccagcggctgcgagcactggcacctgcattagaacaagcaattgcaactgtgcacgcacagaagctcgtgcacgtgcacgagagcgagaacgaacacacccgaaccaacattaggattagtagtagtacctcaacaacaccaatatcattatcaaagaacagaacagctactactacaacagcaacaaaatcaatatcatcttcaactccaattcaatcatcaaagaccaccagcaccattaccaccagatgatgataatatcacagattgggattgggatctttactttcgttattaagatttttaccattgcaaattttcaatcattagaccaacactaagaccatattaactattttgttagctgtagctggtcttgtatgttttgttact

SEQ ID NO: 9764 - DNA, 1278 bp, Cannabis sativa
tttggagtttcttaagggaaattcttaggttttatagtcagctcttgaggaatcaaagcgaacccataaaaaaccaaagcctttatagatatgccctcacctaggaaacacaaagatgtctagaagttgattggaagaatagcagcacttagcagattcatctcttaatcaacggataaatgcgtaccattcttcaacatacttcgaggaaatcacaaattgaaatggatagtaaaatgttagatagccttcaagtagttgaaagaacatctggtgaaggccccaatactgtaaaaagtagttgagagagaaccgttgttttcgtaccttgcagtatctgatcatgccataagtgcttcactagtgcaagaagaaggaaaagtaaaacttctagtatattacgtaagcaacagactactggccgcagagtctagatttcctatgactgaagtaatgcttttacttactaattgcttcacaaaagttaagaccatactttcaagcccacgccataagggtactaactaaccaccctctccatcatgtgttggagaaactagaatcgtcaagatgacacctgaaatgggcaatggaattaactcacttcaacatacaatatcagcccagggttttgattaattgtcagccctttaatgacttaattttagaatgcaccaggataaatgatgatcctgaaacgtcaatcctggaaagagaagtatggagaatatatgttgaaggagtgtcaaatgagaaaggttctgaaccttgaatcatactaaaatctctgcaacaggtttagctttagatttcactttgatttaagtttgaggccttctgggcacgaagccatgattactggtttgcaactgacaaaggaagtcggcgctcagtacataaaactctatagtgactcacagctcgtggtcgagcaagtgtttagagagtactagacaagaggggagaagatggctagttacgtagctaaaactcaagagctattgtagcatttcaagcattattctataaagcaaatctctagggataagaatgctttcacagatatgctggaaaaattagcaatagatctagaaaaagaaaatacagactagtccccatcagagatataataacttcaagcacagaaacactgggggtctctgccatcgaccattcaaattcctggatggctccaatactccaatacctagaaataggaacactccttaaggatagaactacatcaagtgaagtccagtatcaggccccagatcggaa

SEQ ID NO: 9765 - DNA, 901 bp, Cannabis sativa
ggttcacgagcaaacgacttgttttttttacgtggtgatcgaaattacatatgattaacgatgcagcaatttataatcggtgacagcacctcctcgaagcacgatagctcacgtctaattgaagggcaccatgctttgccagaccatgagctgcaaaaaacttatcacgagctacatgcgacaaaactgccttcaaaaatttagacaataaaattatgatatcctcacactgtacctccaactcattaaaccttcctttgttgatagcaaaagagccaaagtttcgacttgtaatactgaaatactatctgaaaaataaacaacaggaagaaacaacaggtatcagaagagacaattcttgaatgaaactaatcgacaaagtctctgtaatcgtaaaccctccacaaaaccgatctacaaaacaacaacaaataaagttttattactacataatttaataaaaaaaaaaataatatacttcaatagtattctaaaaaatgtgtcaaatttaacatatgctaaaatttatgccaaatttaacacaagatataatcctatgctaaattttattcacaataaatgttcactttttaattactatagtgtcactaattattatgattcattaatttttataaaactttacattctttatttgtcatgttagtattatttaagaaaaaaaaataatcattattttatttattctcaataaaatattgaaagtccatcaataatagtttttttttacttattttacaccttgtgtattggaaaacaattgtaaatagtatgtcaaatatagcacaaatttatgttttatgccaaatttaacacaaattttacatctttcattggagttcgtctcattgttcaataatattgtgtaatgagacaaagg

SEQ ID NO: 9766 - DNA, 633 bp, Cannabis sativa
gctacgtaatatgcagagagcctataaccgtaaaaaaaaatcaatctctatctctttctttcagcctaaagcacaatttttttaaagaagacacttacaaaaattttatagcctacaagctattcatcttgttatctatcaaatagttattgttttcttcttatttcattctctttgccaaacaccactcatgcttctcatcaacatgggattgagatcatcataattgagattcaagatctagaactttattaagaagtttcatcaagatgtaagaggatttcttccacttattggtgtcaaattttaggctaaatcattgaaatctcattttcattttttctaaaaattattgtcttactaaatagtcacatctctctcaatatttatccaattcatgtaaccttagtgtctatattcttcataatttttatgaagaaatatttactaattcgaaatttttatgtatcaaaactagaatatctattatgttagtcgtaaatcattttctcatatttcctataaaagttgtctccactaaattagaatctctttctaaatactgatctgttttcaaagatctttgtatagttagaaagcttattagaattttcataagttttatgaagaaac

SEQ ID NO: 9767 - DNA, 719 bp, Cannabis sativa
acgtatatttcttcttaaaggtacccattaagaaatatcgacttcacatcgagttgaaaaatcttctatttcttctgtgcagctagagctattaattcccttattgtgtcgaggtgtgcaatcggagcagatattttgttgtagtcaactccatattattgtgagtacccttttggaactaatcttgatttgtgcttttggataaagccatatgcgtttagttttaacttgtagacccacttgactcctatagtttctttgtcttgtgattgatctacaagctcaaagtctcaagatgtttatagagaatattcaacaaagtgctcttagtgcgagattatgatttcaaacactttctcctatgaattcattcactatatataggagaaaagttgttgcaattagcttcttaaaaggagtaaccaaaaagtaaatatctttatattctagggtgcagttacgatttgttgaagctcctacaatctcgggtagaatagttggattcgcatttgtaggatacaattagagatatttttggaagttgttgaaggaaaaatcaaggcttgtttagctttatctgacattcctggtgtcgtttttcttggccaacatattcactacccgaccagaccctttttgagacttgtctttcttgtgggattacttgtgaaatatttttgcaaggtgagttaatatccccttctctggccgacatgttg

SEQ ID NO: 9768 - DNA, 1085 bp, Cannabis sativa
agtcgcctccaggaagcttagaccaaactttcaagcccacaccatcaaggtactaacgaatcatcctcctcacaaagtactttaaaagccaaaggcattcggtaggttgttgaagtgggcattggaactaaagtttggcatcgagtatcagccaaggatgtccatcaaaggtcaagtcctatctaactttgtggtagaatgttccggattaaatgaccccctggatgatccagtctcagagtcaccaacctggatagtctatgttgacagagcatctaatgaaaagggagttagagcaagaatcatactgatctctctgcaatgacatcagctccaaagtgctctctgcttcaaagatgaacacgaagccatgctagtgggattgtgattgggtaagtgagttagagcccagtgtattgaagtgcacagtgactcccatttagtggtaaatcaactattaggggaatattagaccaaaaggtgaaaggatggctacctatgttttatcctatttttgcactatgacatggcatttagctagatgacacgtgtcttgcattttccaccttgggcggatggttctacccctagcagtccacaaggattaatatgaatgtccaaattgtacatacatggcaggatgttcagacagagtcatcaaaggtcatttgaccagtttgatcatgttatcaacttgcatgcaccggtcaggaaatgtgaggtggaaatttcaacagtgatcgacgatatctccaagcttgcatgacacgaagcaatccttatttttatgggattgattcgtaccttcagagaataaaggcaattagcctagacttgcccaattcatctattgtaattatggaaatatattaatgccttattttatttcttatatattaagggaaaccattcctacgtaatgagcccttataaaatggtggcctcaactcaccattgggggatgtgaataaaatcaaagagaacacttaagagacaaatagtgatctaagagagaattactcagagatccattgtaagagctttagagagagaataatttattttttgtctcataagtcaataca

SEQ ID NO: 9769 - DNA, 659 bp, Cannabis sativa
gtgtgggaagcatgtgcaattaagtagtgtagtttgagggttcccacattgtaagtgatcctgatcctgaagggtaacttataaaagacaggaggttgttattggtagcaccagcattttgcccttgtacagctgaagccctagaaatcgcaggaggaaggaaggtactggtttgatgatgatgagaactcattgccactattcttacttgttgctctaacctctctttctcttcccttagcctctgtctctccacgcgaagctcattcttctcatcctggaaattattatataaatattcagtatatatataactagttagttaatacagaaattaaacaaatatatatcaatcaatgaagtaatcttccataccttgagttcttttatcttgtcttgtagatcgtcaattgtttgtttcaactgacgagactcgctgcgcaattgagtcattattcgaacagcatcactcagtatggcagccttgtctgttttaggcagcctcccgagctccatcacagcaaccaattctaggaacctacataaatagtattcatgagaaatcccaggagaacaattaagtacaaaatttaacaattatgcaaaatattattggaaggatttatattattttgtatacatatatacctctcatttag

SEQ ID NO: 9770 - DNA, 717 bp, Cannabis sativa
agatttttggatatagatgaaacaagtaacatgttgttaagtaaaaaaggatgatcaagatgagggaaagataataaagagttaccaacttgtttgattgacagacttgttccatctctaacataaaatttgtcagggtcattgaatttagtttctatcatgatgttttgagaatctagtgagcaattattggtggttcttgagtctagataccactttggatcccattcagagtttgaggtagcaatgttaggctgtgtttgaaatggagatcccgagttacctgtgttggtttgagctgaaccactaaaagttttgtcaaaccaatagaaataatccaatgcagtatgtccaagcctgaagaacacttgacaatgaggtcgattaattatgctatagaatctccctcctctagagtttcttgaacctccacaactattgtaatttccaattgattttggagagaagttagacccttcatatcgactaaaaccccctctaggatgccctggattgtttccatattgagtgtattgagaatgacaaccatattgaggatgtcgtggaccattgtggatgaatcgaggacaacctcctaactagattttttgtttgtatttgcaagatttgcttcaagaaaatttggttcaatgacaactacttaagcacttattttagcttcttgatcgactatctcaattcaagaggcaagaagta

SEQ ID NO: 9771 - DNA, 1341 bp, Cannabis sativa
ggaaaattaaagaaaaaataatttttgaaaaagaaaacactaaacaataactaattaaaaactaactttcaagtgcaatcaccacataaatgtggttaaaattttcaaaagcaaaagaaaaaaaaatgaagaaaaaattgaaacaataataataaaaaaatgacagtaaggtattggataatattgttccacatgaatcaaatgtaaaaatactaagccacatataataacatgggttactgcatttattattaattagttttgaaatggaaataaccctatgaatattttacagtataattataaataataacgtgtgacaatattaaagaaagaaatttttaatatataatgtaaatttctcttttgttaaatgatcttttgagtttgggtggagagacttggcttgagcctctatttcattcttggtctagttctaaaaatataacttaaatattattagtgttaaaaatcaaaattaaatatttatctgcaattaaaaattaaatttaaatatttacatcataaattattttattgaagaatgaaatatgtttactataaattattgagttactcgtaatattttaaatgtatgcaatagtaaacttgtgatttatatatttctaacaaataagacattgcaaatggttattatctaaaatcaatcattgcatacaattttgtgttatattctcttggcactaatatataatcagccaaatcaagttcaaattaatcttattaataaaaaataatgacatgtataatataatttaacttttgttgtttagttcgtactaatgaagaactatcagggaggctaactgtgattgcacgtgggttatgggcataacattaacataaatagtacttactaagtttgtataaataattaaagagtaattttattttattttaaagcattgttggcgaaatttattatgttataagtgacgtttcacaattagttagcgatattttttaaaaattatttattatgttacgtgggatttgatacttaatgaaaaattgtagaaagcactactaatcgagatctgtaacttaaaaaaatattttttaaaaaaatattattaatcaatcataaagaactgcctataaaaaatattaagcatcgataatacattttaacaattctacggtaagaaattaaagagtaattataagcattcatgaaaaatatgttgtagctcaagtggccatagatgggtgtgtgagtgttggaggtcctgggttcgagtctcaagtaaaatatgttgtaatatataaacgcttaaatcaaaaaaagaaacctgaaaattggaaacccaagaatgacac

SEQ ID NO: 9772 - DNA, 1308 bp, Cannabis sativa
  modified_base (881)..(892): a, c, t, g, unknown or other
tgatttggtttataaagcaacacgaaagtttatgaccaaaaaataactttttagcttttgtacttttttttggtgaactaaacgtggttaggcagtgatgagtagtaatgattaatgaagcatttttaggtagtttcgaaatagtatttattggtcatacccccacaaaaatttgatgccaatattcttatttagttgattaaaaagcaaaagtggaatagaaagggaagcgagacaaactcatgaacctctaaatcagttgtgaatatttattccaaaagtttttaacagattcattcacaataccatgcaaagcatatatttaattcccactgagtatgagaaagaagtggcagaactaaatcatctcaaaagaaatgaaattatttctaatcataatttcactttgctcttttctcacagaaaacttataaatcataaattttgcttctctggatacgtaatgatgctatgtatagttagctgacacattttggtgcttcggttaacatttattgcaagttttaacacagtgcaattgggtataattaggggtatttataaaatagttgatctaatctaatctacacaattcaatctaattcaattcacaaactgtgaatatccactgtgtattagattgaaaaatttaaaatctgcacttatacaaattaaatgttgattgacatgtaaaaatgacagatcgaatccaatctacccatatttataaaaaaattaaaaaattatatatacaattaacatttaaatgtaaaaaaaaaatagtaatttaaaaatctaatgcatatagtacaattatttttcaaaatttaatacatcaaatatatattttattcttatatataatttttttttctacatannnnnnnnnnnnaaattaaatatttttttatacatacatttttttttcttcttttaaatttattatttgttattttatttattttaatttattattggagacataaaataaaaattatttattttattttgttggtagttatgtaaaaaaaaaatatacttttttttttcataaatattaaataattgaataataaaaaataaaaaataaccaatccaaaataatcgattgaattggattagatttgaaatattgagcggattgaattggattcaaaatatgaaattcgtacttagtgtagatcgaatgtactatgagtaaaatagtgtagattgaatttgatgaatactaaaatttttctttttacagttacagtgatagaatccacagccatgctaagtgacatctagaaaaacttcacctactgg

SEQ ID NO: 9773 - DNA, 526 bp, Cannabis sativa
ataaaatggtataaatttattaggggttattttttgtaatagagttttttaaggaataataaattaaatttccttttcttaaaatgatgcgtcataacccttttatctattttgatatttaagagaattttttcatctaatttttttacgtaattttgtacgtagtagttatttaggatcacatacaaattttcaaaaagatagttatttaagatcacatataaattttcaaaaagatctttattagtttaccatgtcaaaaataaagtttaactatgtacttactacttgtataaaaaacagtcacatatgcaacaacatatttgaaacttattttcaatattataaattattattttcaatattataaattatttaaaaaaatttaaaaatttacaagtactaaattactaaaacgtaaacgatcataaaaaaaaaatatttattgaacgataaaatatctaccaaaataccctcttaaaaatgtttactatggactttccccatactatacactttgtgctac

SEQ ID NO: 9774 - DNA, 854 bp, Cannabis sativa
tcaagattcgcctccatagccacctaatgtttttgtctatccaagaagatggtcatgtatatgcactccatatctttccaagatggcatgaattagagtggatccccatgaacgagttccaagatgaactcattccaaacaaagcctatgtagtcaatattttccttccaagcgtcccttccacccttcaacaatgaagaaaaccaagatggcatgatagtacacttatgtgggtacaactgttggaagaagtgttactgcctcttcatcatatggaaagctgtatccaaatgctgcacatttcatacaaataaatcagcacgagcacattagaacattaaaaaaataaaacaaataacaacagtaaacaatagaaaataatacttagttaagaaacttacatcattagaaagccattcctttttagtaagtagcttttagaaccaagccacaccatgtacactagtgaagacaaccctcggatacttgtttccaatggttcccactaaccaattttggaaactatgtagtaggttctgatcaatgggcagaagtgggtcaacattcacatgagctatcaatggcttcatcttcttcttcattttggtgtactcgtcaaaccacctcggtctcttcattggtctcttatccaccagtgttggaacggtctctaaaacatgtacctctgaatctttcatatctccaatggacgtgatcgacatgttctgaggtgtatggagtacatcttccacatcatcgggtctctaatcattgggaagaatgaactcatctcctagagaaatggggtctggctgtggctcttcctctttattgggccttctcggatctcccat

SEQ ID NO: 9775 - DNA, 643 bp, Cannabis sativa
ccccccagtcagcttggacactcttaataggtaagttaaattttttctcaactaagcttttaaacttgataaagacctcaaaggcttgactctttacagtgagaggatacatccaacaatatcgactataatcgtcgagaaaatgcacatagtatttgaatccctctttagaggtaatgtgggatggaccccagaggtctgtatgaatgagagccaagggttgagagactctactgttggaattagggaagggcagcttgtgactcttgcctagatgacaggctttacaaaattgcaagtgtttcagggaaccagtatgtggaagatgaggcaagagtttggctaatgtagtgtttgctgggtgacccagcttgcagtgccatgtgtttatgtcattagatttaatagtattaaaaacttgatgagacaaaggagacaaaggaaaactattgtcatctttattcatttcttgagtggtacaagaagttacagatttattcaaatgacatgtacaagaacaattacaatcaactgacgagttcttgggagaagtagtaagatgacactgaattgaggagtttgatttatcaccaagcttgtacaagccgcctttagctttccctttaagcagcactgtccccgt

SEQ ID NO: 9776 - DNA, 763 bp, Cannabis sativa
tctcaaattcaccaatttttctcaacccaagaatcttcaacaattccaccaaatttccattcaaaccacccaaaccaaaattattaccctgctaccacacttaaatcacaaaataacttccaattatgcaattcacaacatatttgcagtccactacagctaccaattatgcactacaacccaaaataactttcaaattaatttacccaatcaaaacttagcttgaaccggtttcttgactcgggttgatgtaagtgccgactgagatggctcggctgggttgcttcgaagtcaggtggatctgttgaatgtgagctggttcgtgcgagctgctggagtcgtgatgttgttgggtcgacttgtgtgcacggaggggcagtgggtttgagttggtgcacctggttggctactgggtgagtatcgagtgagggtggaagtttggttgaatgaagaggaaatgctgggtgcgagattatggtgagtcgatttgggtgcggctgggtggtggcgtcgggttgaaaatggtgaggatgaacaggtggaggtcgactggggcttggctcgggcagtgtgatggtgcggttcaatgggcttggagctgggtgatttgaatggtgtgcgatgtaaggggatggctgatggtgaaatcgaaggctgggttggcttcgtggtcagctgctgagtccgacgtggttgaacggaggtggaagaagggctggtggaaagatgagtgatggtggaactgtgaaatgatgaaggcggt

SEQ ID NO: 9777 - DNA, 569 bp, Cannabis sativa
actcgcctgcatataaatatatatttttcttatatattaatattacagcaaaataaataaagtgtaaataacaattggacagttaaataataaaatacatcatatttttttttttcgaaatttacttcctatatttttttttttttaatttacagtttagatttcttcgataatttttatgggattgttatgtggattttggttaggataatttagattggtccattagttgttggatgaatttctaaaaatgtaaaaaaattgttttaaaaaatgtataaatgaaaaaattcttattttttaaaatgacaaaaatgagacactgacctcctcaatagttttcgaaaactcttatttatattattttgaaaaatatagagtcaaatcgataatttttacaaacacgagatccaaattagtatttactcataaataaataaatttatataattaaatgaagaaaaaaaatgtgacctgtggatggttgagctgatgattggacccctagttgggaggtcaagatggtggaatgagtactgttggggagctttgactcagatattgtcttg

SEQ ID NO: 9778 - DNA, 546 bp, Cannabis sativa
tagaaacaaaatcttgtatttcttttttaatgattaatcatatagttagaattataagatatataggattttatgtcaaagttaattaagaggagttcataaatttaaattttatatattttattttttctacacattagcaatgtgagatttttattttttctcaaggtggtagttattttatttacttactatcttagataactcgatcataagcgattttttttttctcactatatctcttatcacaagtgatttttttactctactttttggatttttgatggcttgttttttggctcactatctttgaagtacatgtgacatttttgggctctactttttttaggatcgagtttttgggatttggtgttttcttttattttttgggtcagttgggataagatgtatgagattttatctcaaaattaattgactatgagagtgttagctcatagatcttatatattctattatctttctacacattaataatataagattgtctaacacaaatttaccaatattattatgtgatacaattac

SEQ ID NO: 9779 - DNA, 705 bp, Cannabis sativa
gtgttcttcttcattccagaatatattcaacaaaagtttcaaagtaactcatctcttcaccaaatttcattaaatcaaagataaatctcattaagcataacctatactacaaagcccaagcatcaaaaactccaatttcatcaagaaaataagaaactctaatgattatatgccattttcggccatggcaaaaactaccaagaagaagttttaaaaacacaaatctaaaatttcaagcaagaaaaatacaatgaaagttatgggaaagttacccattatgaagatgaagacctcaaagctttcaagaaccattatgttgctataaataatttatttatttctctttaaaaatatttagattgtttctcttgtaaataatttatttttctttataatttattcctgcttgtaaagggaaacttactatggggatgatgatgccaaaatacgaaaaagtgggagaattattttttgagtttggaatgtaaattactcatacaggcatggacatcctgacacaacaccactaagtcatcaacaacaagattgaagcacagactgcacaggaaaaattcttccgtaaagccatacagctaaaaatttaggggttaaatatttacccaaattttgacgataatgacgtgtcaaggatgatggcacgtggtatgatgatatttggactaatttaatgaagaatgcatgaag

SEQ ID NO: 9780 - DNA, 517 bp, Cannabis sativa
cacctttcgaactactccccatgtcattccgaagtggtaaatgcaccaccaaagctctatgatccgattcccaccaatcaagaaccttcgcatccgccccctcaaatagttttaaccactcctcattgcacaaccccctatctaatcgctccataacccccatatctctatgcccattacaccaagtgagctcagttttacaagtacaaaaatcaattagttggcacacatcaattacctcccggaattcttccatcgccctagcactcttcattctacctccaactttctccgataagcctacaatctcattaaagtccccaacacatagccacggtccactagtctctccagcaatattttgtaataactcccatgaaaacttcctctgttgtttatccggatgcccataaaagcatgttaagttccatggatcaaagtcagcccctgtaaccacaccaccaatatgtcctggcgaactagaatcaactctaatttccaactcatccttccacat

SEQ ID NO: 9781 - DNA, 559 bp, Cannabis sativa
cttccagaaggtgtatttgcctcggtcaagcttaagggttaaaggggcaagactttgaaaaatggatatggcaccagcaggttgttgtgctggtggaaccggagcagcaagagttgcagaacctcctgtggtagcagtggagttagcaagagcagccatgaagaatttgctctgataccaagataaaaggagagactaaatgcaaaaaggcagaaagggattaaaggaagcagagtaataaaacagagaaactttgctttgctgcaatatattttatatttgctcaacggatagattttacagtattgtgtacacatatttatagtacaaaaagtgaagattctagagaggaataatcagggaatattcacaatataaaatctccaaaatatttggagaatcctaacagaaagtgtactatatgacagataatgattggttgtcatcaattgcaatcttcatccaattcagtgatggtattttcattattttcaacagagagagagaagaagaagaagaaggcacacggaagagacgaagaaagagatagaggggattc

SEQ ID NO: 9782 - DNA, 650 bp, Cannabis sativa
accaataaaagttcttgatatttccaataatctgttaagtggaagccttcctgattgccaatggaatatgaaggaattgatttttttgaaattagataacaataatttgtctggaatgattccaagatcaatcggtctgctaaatggaattcaatttttgcttttggggcataataatttctcaagaaatcttccttcatctttaaagaactgtacacaacttcaagttcttgatgtcgaatataataatttacaaggaaatataccatcttggattggggaaggactcacaaatttgatttttctacgaataagatcaaatcatttttatggaaatataccaccaagtatgtgtcatcttcaatttcttcaaatatttgacatttccataaatgccatagcaggatttattccttcatgcataaaaaaatttcacctctatggtaaatgaaagacaagagagccaaattgatatttcggcagcagttgccatcgaagagaatccactccatttatatcaaaagtatgaaattgttacatcagttgtatggaaaggtgtttatcgcgagtatagcaacactcttggattattaagagtgattgatctctcaagtaacaatttgacaggaaaaattcctcaagagttgaca

SEQ ID NO: 9783 - DNA, 634 bp, Cannabis sativa
agttggctagaattctgacttgttgagttttataatttgttagactttttgctctatttctattttgtatataagttgatactgtactccattttcaatctaggaaatacaaattattctttcatctctttcttatttcgttctttctcgttctctatctttcttaagttttaacatggaatcagagcttccacgttcttcaaactcaggtgctaactttcaactataattacctttgcctatacactttcgatcaagcttaatgaacataatttcttgtcgtggagacaccaagtcttagcttcgattaaaggtagccgactttagaaatttctcaatccagatcgtgctccaccaaagtttaacacagctgaagatgatgctgaaaacagagtgagtgtagagtatgaagactgagagcagcaagataaaattcttgtctcgtggttgctttcttcaatctcttagaataccacaatcgagctatctaactgagtattacactgcaaacaatcgagctaaaataagtcggtgtaaaactcagttgagaaatactaaaatgacttgaaatcttgatgattatttgctaaaaataaaagttccagttgatgttcttgctacgattggtcacaaa

SEQ ID NO: 9784 - DNA, 597 bp, Cannabis sativa
actaactttaaatacgaacatatcctaactttttgctttatttgttgaatcatgggtcattttgaaagtttttgtccaaagttgtttgttattccaaaagaccggatagtaaaactatatgggagttggatgagagctttaccacatcgttgtactcacttgattggctctcaatagttgcagacgtttcaagatgttatcgggaagatggtggtggaatggctgccagtggcagtactcattcttcaatgaaggtcattaatgttgttaatcacattcctatgatcgtggatggtaatgaaggctgaacatatgggatcaggaaattgatgtgaatcatgccagttatcgggtggagttaatggagggttgactcttactttttagggtcagattaatgagggcatgttaaaaggtcaacaagaatctctcctagattaatatttttattttttttttttgaccctaaaaggaagcatataaatatgggaaaggataaaaattcctttatctctcttaatgcttgtgtgggctagaataaggttggtattgagacctattctaacagggtggaggttgtcacgtgcgtggatggtg

SEQ ID NO: 9785 - DNA, 1454 bp, Cannabis sativa
aaatgcaaaatgttaagaccctggattaataaagtgtggtcgattgtagcaaataaaaagagtatagagtcaatgtattggggtggttattgggtggggaattggttagtatatcgaggtgagtaagaggatagttgtgggtacgcaagaattgagaatgttctctgcatcattggtctgatagggtatagagtcattgtattggggtggttactgttgctacttgctaatgatttcctatcaattctagttcactccttcattttctgcattatttcactaaatctattgtgctggttctagtttgttgctctattggcgtttttctactgtttgattggtttgggtcttatcaaaaaataaatgtgatgtctacgtaattagttctggtatgacaaaaagtaggtttcagaattgtagtagttcctaattaagagacaataaactatgaatgaaaactgataagacacacccatgcaaaatgcaatataaagaatctcaccatgacgagacaaaatatatgatggaccaagctcgatcactaccaggggccaaaggtctcccaaaacacatgcacttagtcacacccataagcagagattcacttgaaagaagaaacaagaagcccccaactccataaccagtagcaacatctgagttatacgcacaataggttgaattcgtccgttcatcattaactatgtgaccctgtcaattaaaaaagggtatggaataagtgagtagagcataaagtagtgctaaataagtaccacatgttaactacactttagactcttcctggatagtagcaaaacaaacattagcatgaaaacaatggtatattctagaccagattcgagattcaataaccaactgagttttgcattttattaatggaagacaaattaagttgatactatcgctaataaaaacaatgacactgcctttgaagtttttgcttatgtgtcaacttgacacagtaacctatcaaattgaggcacagcaaaaccagcaaaaactcaatttcaaagttatttcaaatacactatgcttcatgtgtacaaaaatcaattatgtaatcccgtacataataaatagaaacacattgcaagaaactggcttggactgaaacctggagcaagaccttccaaaacccaaaaacacacaaataagtcttgcttaggattcgccctattcattgcttatttacggtctgtctcctaagataatgatagtgacacaagcttgaaaagaaaaaaagatgtccaatcacaatgggagcttaatgtaaatttcatcacatggagccaacaaattgcagattaacaaaaataacaaactgtcgaccgagaattctttctaaacagattacagagtaaagcaacacatccacaacttcacaaggagaagcaaatccaaatccaatctattccattccttacattactttcaag

SEQ ID NO: 9786 - DNA, 522 bp, Cannabis sativa
cattagtttctcagccaaaccagtttcatttgcatcagagggccagggaaagtaagtgggctcaggatgcatatgaggttgccttgatttacaaaggtttacatgtgtgccttcaatgatctgttcataagtaggcccaatgttggccattatagtggttaggatcccgttgtctctagggttgggacaaggacgtgatgagattttttttaaaatttctttttcacgctcagcatcagtttttctccgatttagactatggagagccccaggagagactgaccttgcttgtttatcctgaaatggcttctgaaaaggcgaaggaacggtcttattcttccccaggtcaaagcccataggttcagaagaaacagcgtccacaacttacaaatttttccttgaattggtccctggtgaattgctctgaaccctgacgactttcttcattggcttcccaaagggattttgcctcgaaacctctattggattacaagagattggggccttacccttgccggagac

SEQ ID NO: 9787 - DNA, 620 bp, Cannabis sativa
  modified_base (484)..(489): a, c, t, g, unknown or other
atatttttctcacttccacttataagattgtacaaaaatttcgtatattttaatttaataattattattaaaaaaaatactaaaaaaaacacacatagtgtctaacatctttataagtgtaatatcactattggtaaaatttaatattgaatttcgcttattttattttaataaatgttataaaaaacttcttactatttatagagctttacctcacagtgatactagatacttttagcaatactcataaaaaaaaccactaattatttataaaacatcatttatttaagagtaatttacggcataaatacttaagtttaactcttagttgcaaatatttactcatatttaattttttacggtaataatatataaattatatttttcaaaaattttataaatacttaacccttaatgtcaagtcaataatcatttccttattcacatattattttcttatcgatatatttaaattaatttttannnnnnaataaaaatttaatgatttgaactaatctaaaactgtcatataactattgacttaaaacttaacatttaagtacttatagaagttttgaaagtataacttaaatataattatcattaaaaattaaacttaa

SEQ ID NO: 9788 - DNA, 579 bp, Cannabis sativa
tataacacgtgtcatttaatgagggataatttaatcctcctttatttgaagtcctttgatattactctgtcacgaagaggccctgaaactgggaattatctaggacagaaagacacacataagcctactcatacctgtttacttccctgataaggaaggtgaaatacttctcctagacctggaagggtataaaaagagaagctcactaagacgatattttgatgggcactcgaaaggtttagcatggacatcaaccatcatgcgaatgttgacattttatacatgtcaggtcaccaaagtgatagttatactttttctgacaaagatcagatcatgtcttctacatccaagcatggtagtgcgcataccaccaccaccttttggccaggaagatattacaaactcctgctcgtaaaggaacaagctttgaccacatgtggccccaacttttaagggttgaaactttgagtgacacgtgtccatgtgggacaaaatggtctccattatctagctcctgcatgcatgggcatactatttcccacgcgggtcatgggtttgcccatccctgccacttagcct

SEQ ID NO: 9789 - DNA, 599 bp, Cannabis sativa
ttagtacaggtagttaacaggtagttaaagtctgttacaaagttagttagtgagctgtgggtttaggtaagagttgtcactcttgcacagctcattcataacagaattttgttatctctgtattgcttgttctatataaataaagtatacaagagcctgtaatgtttttgcagctcatattcatcaatctcaactgtttttaactgagtgctctaaccaaatctggttcatgttaatttttttataattctgatttttgatgatattgtatggcactatagattagtctagtgtgtagtgaagttgtaagttagttagatctattagagtgagagttgttagttacttctggtgtattttctgtaactaattagttactctcttcagttgtcttagtctatacatagctcatacacattgtaattcattcattcttgataaatgagaatcactcatctgtttctcaacttctacttctatgtagctaaaactcttgaaaatcaaaagtagtcaaactctaattcccaatttcacattagaatcattagctatgaatattctcgtacgacaagaacaagaacccacaaaacgacacatat

SEQ ID NO: 9790 - DNA, 707 bp, Cannabis sativa
cccaagcatcattcattgttgttgtagtagtctccacccatttagtaacatagtctactgccaataaaatacaaagatttcaaaataaaggtgggaatggtcccataaaatctatcccccacacattaaaaatttcaacttccataacattagtgagaggcagttcatgtctttctaaaatattttctattctttgacatcgatcacaattattcacatattcatgacaatctaaatgtaaaataggccaaaagaaaccactctcaggtaccttcgcatcaatcctactcctctaaaatgcccatgggggattgatgacaatgcaaaaaaatctcacctacttcctcttctggtacacatattggaatcacaagattgtcacatttcttgaactcatcccaaatgtagtgctttaaatcattgaataatttcttcttttattgagattgtaaccccagtggaaaaaccttgcttactaaatatttgagaaaatcatcatgccaaggtatttttattaccatcgcaaatggttgctcattcagaaatgcttctagaatagatgaaccacttttttcaatattttctccatcaaggcaaggaaaaaggtcaaccactacattctcactaccttgtttatctctaatctccaaatcaaactcttggagcaatagtacccatctaatcaagtgaggcttagcatcattctt

SEQ ID NO: 9791 - DNA, 526 bp, Cannabis sativa
acaaataacaaactaactgaaaatgcaacagattattggttccccccaaacgaaaagggattgcagccattttaagtttgcctttaagttacataaaccgatcagtagacagagctttggtgagagaatcagcaacctgatctactgctagaacatatctaacagaaagctcctttgccaaaatttgatctataacaaaatggagatcaatctcaatatgtttggacctagcatggaagataggattagctgcaagagcagcaactccctgattatcaacctaaataattggagaatgagtaggtgagatatgtagttcagacaaccaatggataagctattttatttcagcaacaatattggctgaacttcgaaactcactctcaatactcgatctagcaacaacatgctactttttggctgaccaggagacaaggttccctcgaagaaaaacaacataaccacctattgatttcctgtcatcaacagcactggcccaatttgtatcagagtaggcacaaatgtc

SEQ ID NO: 9792 - DNA, 678 bp, Cannabis sativa
tttcaattagttcttgtgggcataacactgtcattttggatcatgtttagagtgttgccctgagcagaacagatcaaatgcaacaacacctttgacttttaagaagattttatatgataaaactaaatcacttcacaatcataatacatatataccacaatattagctggaataatattaagattcttataaagcaatcctcatcttgcttttacttgacatatcaaattttaagaagaataaatatgatttgtcccccttgacactagtagagttttgtctcgtaaattattttctattacaaattttttcccaaactataaaatttgttacaaatagcttttattgcttatttttttatttaatactaacacggggttaatttagtttaattgaagagtcgagataaaaaaatatataaataatagtctaataataatttatgagaatatgtatgtattcttaaaattaatgtttgtatatttaatgttaatatactaaatttcagatattgaaaattgttaaatagatcattgtactataattatacttgtaacaatttgtgtaattctaaaaaaaaaattgtaacaaaacaaagttcagggaacaaaactctaaaaaaaggacattgtcattttgattcaagtttacaagtgttgtccatgaatagatcaaatg

SEQ ID NO: 9793 - DNA, 644 bp, Cannabis sativa
taatcgaacttagttactaggcattttagaacttacataattttttttatggttattaggacattctgtaaaattttaaaaaatttaatacacgcaacagactgtttgaacctgttttcggcatgttaaatttttttgaatctcttaaaattttgtaaaatatcttaaataactataatatagaaaaccatgaaaaaaaataaactaaaaaattatctcaaatgttgaaagagtactaaggtgcataacactactatgaagtgacaccctataattagttagcaattctggataatcttttgacccaatttttgaattatactaataaaaatattacacccaggtaaaaatgctgggtgccagcatttctcttaacttatacccatttactttttaccgtgcatgttgtcattataccccttccatcatacaccaacaccacatgttacaacacgtgatcccatccccgactacaaaagcttgatgatgctctgcttctggtaattatcagtgtggttgtgatgctttcttctgctgtatttcctactcaatccttgcatttccagaatctcaagaaattcttcaatctcaaactttcgtttcttttctactgtgcttgagagagaaattgaggaagatgaaaa

SEQ ID NO: 9794 - DNA, 711 bp, Cannabis sativa
aggaagatgcaaccctcaaatatattatccgcgttcaactaaacttatttagttttttattttattttatttataaaaattaatttcaagtttcatttcattatttcgtaaatatctaaataatataatgatcagaattataaaatagataatttagaattattaaaaatttaatatacttagaaattagaatgtgtttgaaagtaaatatgtaattattagatggtgtaattactaaggtagtaattacactacattaaactacgtttcgatatgagatgttaatttttataagggcatgagaattggagagtataattaaaaaccctcaattactctaattacacagttacagagtacttacataatcaaataaacatattaaatattgtaattatcttagattagttataaatgtaattacattgtaatttttcaaagacgctcttaaaatactaaagtgtgtaatttttacaagcaaaaggtactaattaattattatttgaaatagaaagtatgaaatttgtattgtacgaaatagccatttctccttattataattagggaaatttgaaaaaacatgcataaaatatcttaatattttatgcctaaactaatacttttcaacattgaaaacatatgaccactttttcaaaactccaaaaatacctctctcaaaaacccaacccctttctctctccttccctcaaa

SEQ ID NO: 9795 - DNA, 538 bp, Cannabis sativa
tagtgagctcttcaacctcgctcatctcttttggaaacttgctcctccattcagccaaccactgtttgtcagctttcatagcctttaaggcctcctcaacaaaaatggccgcaatggcctctttcatgtcatcaggatctccctaaagaaattcttggatgttctccttcaccgacatcgtgtcgatactttggtggggagaaatttcagagactttcggtggttacaaggtgagccacctacaactttttgggtgacaaggaattataaaaagtaaggttttcctccaactctggattcagaggtgattggaaaatgaaatctagaaagaataaaatagacatctgaacatgaagatttgtaaagacgagaagtaaaataaggacaaagatcgaatacttactgaatatgctaaagtccaagctgagtgttagaactctcctcaatgggaagtcaagagtatagaactaatagtctcaaaaatcgtgagtatacttcacgtaactgattgggtaggccacttttttggagtatcttt

SEQ ID NO: 9796 - DNA, 571 bp, Cannabis sativa
agtcaagttgagtatggccacgaaccacccaatgtggcattggaaaatattatggaatttgcctatccatgcatgtctaaagctgctgggatggcagattctaatgcactccccatgagagaaaagcttgctcagtctttccctatctcgtcacattgctgtcctatttgtgatgaggatgtggaatcaacgctacatctgttctaggagtgtgccttcgcaaaagctttatggtttggaagcctttggggaattaaaacggatacaattcagtgcgatgactggattagttggctgcagtggtttcactgtaacaacattcggcccccaaatattgatttcaacactttctttataagggccctatgcatctttgatgtcgtttggagtacgcgcaacaacgtggtttatggctctcgtctcactctggcttcggaggctatcagacttgtgtgccaccaatttcaggatcattcctctcatcgaactcctcatatcgatgaagatgttgtttgagtaccccctctgcctgactagtttgtttgctgccttaatgcttctatttgtgcaa

SEQ ID NO: 9797 - DNA, 552 bp, Cannabis sativa
  modified_base (246)..(272): a, c, t, g, unknown or other
atatattctcataaatgtctaaatgttataaaaactaatattagctctcttttgactatgtaactttaacaacactataataccatatatggtagaaaacaggaatataacatgatacatattttatggttaagacttagcccttatattgggccgccactatgagccataaccttctcaaaattatccataacctattaacatactcaatgataaacttgcatgacattattattattattattnnnnnnnnnnnnnnnnnnnnnnnnnnnattattattattattataactatagaaagttaaagaattgaaaagaaaagattgagaaaatataaatgcaaacaaataaacttgacaaagtcaaacttattcgttttttatacaagttaattctattcaatcaaaatgggcgatgaattaaagaattcaaaagagaacagaaagtaaagaattcagtccttatcttgttaatttgtttcccattttcctactaataaattatcttatcttgttgctacgctccttccttgacggagttagaattgacagg

SEQ ID NO: 9798 - DNA, 996 bp, Cannabis sativa
tttttttttttttgttaagtttattctgtataacctaaaagaaacttgtaagatttttcctttttaaacatttaataaattcgagtgattaaaaagtgtatatgtataataaatagaatcattcaataaatataagaacttgttattctattaatattacatgagtactgttgtggctgttttctacaattacataattgtacactagcagcttgtaaaggacaaaggaagaggcaagagtttaaatgagagaactagtggagtgtcagtcaacgggactctaaaaatcaagttagcacgataacaatcgaataatgagaacgataaatatataaaataatgatgataaagaggtaattagatggttggatggatgaacgaatcgaagaaagaagagaaatattaaaaggtactaggagtgtttagcatccgttaatattattattagttcaataaaatattaaattctatataatttaatgttataacttttcgttagctaattacaagatgacacgtctagaaggtgttagggaccactggtgcctaatagcaatgctcaaaaaagaaggtggtggagtaaggtggaggtcatatgactggttcgagtgactagagtattcgatatcaagtgcccggacggttccctctctcttattcactccatttagtgtcgttacttcttctctttgatcgcatgtctaacttgctcatcagagttattccatgaataactctttaatcacatgtcgttacattccttccaactaattaattaatgtacttgatattcataaaccaacaataaaatatactaatagtcttgtcttttgacatgcttttctagttttctctctctcgtttttagtctttcttgctagtctattttggtctttgttttcagagtcttggttgttgttctggagcgattatggaagagggtataggcgtgcaaattttgcttgaagaggaggaggcagctattttatcttacga

SEQ ID NO: 9799 - DNA, 522 bp, Cannabis sativa
caaaaccacttttccctactcacttcaaagatattctgttcaagttgggtgttcgaaacttctatgctctaacttgaaggggcctgttaagagttagttagtgataagttagttattttttctatattgtctggttttttagttatttcaattaccaagcttttgttgacttttgcctatatatgtattttccctttgtacaaatcacaagacacaattcaataaaacttttcttctctaaagtgctctgttcctaataatccgcactccatttaggactagaggatagaaaattgtccttatttccgttccattccctatttaggcgggtacatgcgagtccccgacagattaaatttccatccttattgtaccgtcgttattccacatcaatttcttaatatgtgactaaattatataatcatgatttataaataattagcgtaattaggactagctaattaattaattaaaacttaaacttttgccatatatattttgtttcagtttattatcctgtat

SEQ ID NO: 9800 - DNA, 876 bp, Cannabis sativa
tgtttcagtgaaatttgatagtgacagataaaatgtgtgttttgagtggcccattgttaatgggcactagtggtgcttacaccaccacctaaaggcatcaatagtacctagcatattttattgcacgtgtggctatttttttgtacgtatggtaaataattgtttaaatgttatatttgttactataaactatttaaatttttttaaaaatttataagttatctcaaatagttactatgcaattataaaaaaaaaaataaacttaaaagatttcttagatgccgaaacaaatgaggaatttaccagaacgattctcttaaagggatttactacataaatttctcttattacatatattatactagttgaatatactttgtacttttgttgggtgtgtgttgatatttatagcttcatacgagtacatgtaacatgttgtagttaggagtggcaaattgtgtctccagatagtattcgtgctgtgtcgagactcatgtataataagtacatacttattttaaacacaaactgtttaatagtcgtgtcacaaaataaactcgaattgactcgtttataaacgagttaacacgaaatgatatgtgtaaccccttttataagtatgtttggtttaaatatgtcaatgatatatttaatacgtttgtgacttttaaagtagtaaaataattttaaatagatcattaacgagttagttttgtatgagtcgtgtcaaatcgaatatgatttgtttattaaatgggttagacgagttaatacaaatacaattcaaacctatttaaattaaatttaaatccgttaattttagtaccgattttaagttgtgttattgtgtttggtgtgttttgtcagtattaatta

SEQ ID NO: 9801 - DNA, 669 bp, Cannabis sativa
aattttatatttagttcttgagttgttattcatcataacaagttatagtgaagcaatgcaaattgtatcagagaaaaggtgaattgagaagagtttttcaggaatcgcattcaaccaattaagaaacaaactcgaacaatcaagaacaagaataaaatggtaacaatatagtttgaggtggacaaattcattggatcaaatgatttcagtctatagagaataaagataaaagcattcccattttaccaagggatctatgagggtcttgatgaagtagccatgaaattgatcaaagataagaagaggaaaattgagattgaggccaaagcaaatagtgccattcttctcagttttggtgatgaggtgttaagagaaatctctgataaaaaaaaggctttaggattttggaacaaactggcctcaatttacatgaagaaatctctagttaataaaatgtatcttaagaagaagctatatacacttcgaatggatgagtaaaaggaactaaggaagcatcttgatgattacaataaaatcattcttgatttgaattatcttggagtgaatataaattatgaaagactaggccgccataatcttgttgagttgccatgacagaggtgaaggttgcattgagttcaaaaaaaattcaaaagaaaggagatgaga

SEQ ID NO: 9802 - DNA, 795 bp, Cannabis sativa
cctctatagccattactgttgtggcggccgcgaccacctctttctccgactacactttctccatcttggcttgcacctgcaccactagttatactgcgagagacaccaacaccaacaccaacaccgaggcctacggcatggtgatcggttaaagcaccgttaagagcttcctcagtatgaaagagagatctagaggcgtaagtaccaatcaccaaacccaaaaaaactaacaaaacaacacttattgtaactctatgtatacccattttgtttggaaatgaatagttgttatttatggttaacatgcaagaaatggcacctataaatagggaaagaaaagtacggtaaattaatacttataatatgtagtagtctttaataaatatataatcaagagattatgatggtttaattacttgatgataaaatatatttaataaaacaagagtacatgaaaaacaatatataagacacataggatttgttataattatatatattttcagtaacttgccattcacaataagttgatggctccttttatattattattaattacttttattttttatatatatatatacacacacataaaacattatttatatcagttgttaatggtatttatcttgaaatgacttgatcaaccccttccccatacaactttcaataatcacttatatgatctttatcacgaaacttctaaaaaaaaaactatatttaattaattaattgaatatgtttggtgattaattaccacacatacggatttttattaatatctaacattttttt

SEQ ID NO: 9803 - DNA, 569 bp, Cannabis sativa
gttttatggttatttttctatcacttagaacctagtttttgaaaacatccataaacgtatttgaatttatttaacatgttttcaaccttcttgtgtaacattttatcccattaaataataattaaaatgttgataacaatgaacaaaaaaaaaaattaatagacatctatgtataagctagaaaactctctaagcttatctatttctaaaagcatttccatattttctctaagtgtttggtagtaagagaaataaggtttttgaacaaagatgtataatccttgttctagctattattaatgatccccctttaatacttatgtaattgctcttcttctttgataatattatattatatatactatatcatatatttactacagtcttcatataatatagtattatacatatactattataatatatttataatttactatacattgcttttatatatatttacatgtatttcatgcattcagttgtatttctagtcttccacatattttactcgttctattttatttgtattttgtgtttttagagttgtaacattttatttaatcttt

SEQ ID NO: 9804 - DNA, 666 bp, Cannabis sativa
tataattatccctaatattatatatattctcctaaactaatttattcaaaatcgttctatttctcgatcatgcatctcaaattctcaattgtgtgaataagggttgtgaaggtaataaatatatgactattaaggatttttcgactcaaattaattctctttgaagtttttcgtgaaacaaaacatgtcttgaattattcatagtgctcaaaatattgaactagatatttggtggttgatgtgatgtgtaaatgtgtaatttaaaataaaaattttaaaaaatataaactaaatgttgttctgataataaaatatcgccagaggtctctatcggcatcttctacatttcttaagaggcgtgcaacgaagtttttctctctttcatggtgaagaagaaaaaaaactccttaaaagccagctcaaagatcggtgttgaatctcatgagcttaaggtcgatgttagttagtattgatcaaagcaagtgatactaattcactactaaaaaaaattttatgtttggacttttataatgtatatatgatatattgatcaaatggatgttataatgtttggtgaaagattaaagttttgtattttcgtggtggatatagctaatgtggtttttccaaaggattaactaaatcctctctaatagtttgggtctc

SEQ ID NO: 9805 - DNA, 640 bp, Cannabis sativa
  modified_base (420)..(424): a, c, t, g, unknown or other
ttgtaagttattactgttatatacccaaacataattaatagtgggtaaaatacttaaaatctccttggtaggatacgtatagcagaagagaagctctttatacaaaatatgagattaataaaacctccacggtgaattcttaggttcggtatggaggattttttctttatatcactgccttaattaataataataataatatcgttgtatcttattatatatagtgtttttctttttaaaaaataattgaattatggtagatattttgatggattatttattaaaataatagtaaaatactaatttatagatttatgctctaataaaatattaaaaatgagagaattaaggatatttgagaaaaatagctttagaaaaattttagagtgccacattaccgcctcatacttctcctttatnnnnntatagatatatagatatatatatagacttgtcgtaaatacatttttttaaatattaatatttattgtatgctaaattaatattaccagagattcctagatgcatatcgttagaaaaacttaatgtggcacgaaatagataggaccatctattctccctggccaagtttggcattctcacaagatacaaagataggggagattggacacaagtattt

SEQ ID NO: 9806 - DNA, 650 bp, Cannabis sativa
ctctccctctctctctcttttgttatctatatatggcaagtttaagatcaaaatcattcaacattttcaaccaaagttacagcttctttagtagtcccacagttggccatgtcagcagttggagtttggaagtgaaaaggaataatgatcaaagattcatggtaatgatcagtttggtgattaatgagctgcaaaagggaaagaaaagcaaagggtctccggtgatcggaggagggcggcggaggtgggtggtggtgggatctagtaataataataatagtaataatgggtatggggtacttggtgatcatgaagaaggcaatgataatagtaataagaggtttgtggaagctttgcgtgaagctcagccgtacatatttgcgcacatgggtcgcacattcgtcctagtcttgtctgcggaggttgtggcctctccatgcttggattccatactcaaggtcatcctttcctttcccaaatctcatcctttactctctttttattttgttttgttttgctaatcacgtttagttttttatttatgtaataattaacttattatttatttatagaaaaatttaggaagacgaaaaagaaaagaagaaaaaagatcatttatatcctcaccattttcccagaagaaatataca

SEQ ID NO: 9807 - DNA, 508 bp, Cannabis sativa
atcaaatgattcagtagccttctccaatgtagaatacttgaaattcaagctactatcattcaatgttctcactaacttgttagcctcgtttgaacctgaaataccaaaaatttacacaaaaaccaaaattatcaactaaggttaattttgaattttgcctctcaactttaacatgtacgaaatcatgcctctttaacttttcaggtcgttaaaaattcctttcgaattattgagattattagatttaaggacttttgttcaattttacttaagaaagcctaacgtgaatgaaaatttgaggacacaattttatacacgttaaagttaaagagacatgatttaatatatattaaagttcggagaacatgatttaaattatagataatcgtcacactagtaaaattaaatgaaattagacacaagtttttaaatttaacaatatctatagtttggaaaaaatttgtaacgaattgaaaagttatactctcttctactaaccttttcgttt

SEQ ID NO: 9808 - DNA, 587 bp, Cannabis sativa
tataacttgagctacttcatacgactgatttttttttttaataataaaagcgtatatattaagttaaaagagttagacttaatggttattacaaaataagttatcaattatacgtgttgatcatacttgttacattccgtgcaaaagtttatttgaccacattatggacctcaaagttgtaaattttaagaataaacaaaaaattacaactaatcaaaagtcttgagagatgttgacaatgaagcacatagctatcaataccaaacaggaacaagttccctttagcgtattgattatcgtctcagaatcactctcattaattacaaaagaatgtttccaactgatagataatcccaaagttaacaagcatgtcgtcgcttctctaatgagcagatcagataattgttgagaatgttgctagccacccacaaaattgattctttatgatatctagccagggccaccacatatattgagtcgctaccaactctaaagccagagttgatcttgacccaatcgtctaaagggagtgaccaggtaggagtcgtaatcatcaccttcgtaggaaacaaacaggaaccaaaatt

SEQ ID NO: 9809 - DNA, 647 bp, Cannabis sativa
taaaagtgaaaggaaaaaagaaaagttgagcagcccattatactcaggttataaattttagtcacaattcaagtatatggtacattaaaataaaaacttttcacttattagttaatgttagaactttcactgattgagaccatctctaactattgcaatattttggtgtatagtttacactaatttagtgcataatctagtatttttagttgtaacaacagattttaattattaacaccaaataaaaaaaattgtttaaaaaatctgatgcatgtattatattattcacattaataacccataataattaatttatgtcataattataaatattgtctcaataaatatttaagattatttgtaaaacaaattaaataaagaaggattagaattaatgtaaacaaaaaaggttatactaacagaaaagaataaataggttcaacctatgattttgagatgatatttactttttgggaatctacattatctcattgagttgtaagaaaagggtaatgctaacctgtcttgctcttcttgaattgtgcgggcctccctctcagtgaagttaatcctgtattcaacattacctcctgaaaggaaaacaaaaacaaaaaaatcattagtccaccaattctatctcctaatat

SEQ ID NO: 9810 - DNA, 579 bp, Cannabis sativa
tattacattgtttaattatgataaggatacatatatacactatagttttcaaccatgcaaatgatattgacatatataaatttatgaactcttaactcttagatggcgtttaattggagggaatgaaatagaatagaaagaaaatatgaaacaatttttattctattcttttgtttggttttattttaaaatattaaaatgtcattcttattctagctatgctttcattcctttttaccaaacatcacctaatagggtgtttgttatgtgtgtttgagttggagagagtaaaattgaaagaaatagaccttgagaaaatatgaaacctatgcgtttgagtggattaatattattacttttataattaaaaaaaaaaatctacttagaaacacaaatcccttgtcattcaaatttaatttaaattttacattttcattccaatcaatatctaaatctcgtattaaacgcgcacgcgcgcaacgccccattaaatagttttattagttattatatagataatagtagtcactcatcatataccacatgcattaataagtgtgagagagatgttttaacgaa

SEQ ID NO: 9811 - DNA, 817 bp, Cannabis sativa
ctactgggacacaaccccgaacccgaacccacacccaaacttaggacccggcccaagacccgagacctgagacccgaattggaacaagatcgagatccaagatctagatcccaatttggacctaaggcttcaacctgacccgtagttagggtttgaatccaggacctggagtctgatccgtacccagaccggacccagatacaaatcgggatgcagacccgatcttggacctaaaatcggaatcagactaggtctaggatttgaacaatgacctgggacagtaacatgacccaaacctaaacccaaactcaaaccagaacccataccgagacttggacccagaccgagacctgtaactttagacctaaaccaagacggggatctggacccaggccaaggcctaaaaactagggccataccaaggacctcagaaccaaactaggacctgggacccgaaacttagacccgcactagaactgggactcgaacccagacctcaacccaaatcgagacctggactcagaccgggactcgagacccaaacctgaaccgaaacacgaacttggacacagactaagacctaggaccagaacgtagatgggggaccatgaacgtagatgggggacccaaaccctagaattgggcccctaaatcgacaccagaacttgggcctcgaaacttcaatcgggattcgggacccgaccttagacccaaatgttgacctaggacccacctcaagacctaagatttgggacacgatgcttggacccgacccgtagtctgtgtctgtttttgagacttagagcagaagctaaac

SEQ ID NO: 9812 - DNA, 562 bp, Cannabis sativa
ataaagagctaaatattttttttttaatctgaggatcgatcatgaagtagactctctactttaaatacttatttttagggtaatatcaaataaatacttatgtttgaaattcccttaatctcaatctgtcttaattaaattagtgaaacttttataccaaacactccattagaggttgaggttttgggtgaagagttaaaatttgacatttctaaaaaatatataatatatataagaatgatgcatataaaaaatattatgtagaagtctaatagtttatttttagtgtggtcataagtataagtatagtggtttcaaacatcttcaaacaaaaaaaatcccaagtttaaatctcatcttctaataatatcaacaacaacaacaacaaaaaatgtttatttttaattagtttagaagaaatatgaaaatattacacttaaacaactagataaaacttatatttatagcctagattgaacaattatttattagtttttaattttttttaaaaaaaatggagcatgtacaaacttttcacttttgtttaatggattttaaatcc

SEQ ID NO: 9813 - DNA, 1331 bp, Cannabis sativa
tggaggggggtaagtatctctccttgctgaactgggaggctctctgtaaacctaaggggtgtggagggatcggcattcagagttttcttgatatcaacacttgcctgattgccaagcttggttggcatcttgccacggggaaaaactctctctgggtccatctcctacttgacaagtattgccatgactctaatttttggactaatgacttgcccaaatacgcctccccggtggccaaaggaatctggaagtctcgaaggttcatcgcaaacaatagtgcttgggttgtgggtaacaactctcaagtgttgatatggtactgtaattggacttgtgtggatggtactgttttgggccctcaagatctaaatcctgggttggtgaacaagatgaaagtggccaatcttttgtccgtggatgggtgttcctgggatgccgatcttgtcctgagaactttcaggtctgaggctgctaagctcaatctttcaactaggatccaagaaactcccctggaagatcacttaatctggatgtctagtccgaaagggagtttcaccctcaaagccacgtatatggatctccacaaaagaacattcactaaagatgaaacatgttcccttctttggaattctcggatccatgaaagactgaaactcttcctttggaaaattgctaaaaactgcctcccttttggctctagattgggggaaatatttggtaatgttgcagggaattgcttcttatgtgacttggatgctggagacacggtctctcacttccttggccactgtcctatcacggttacgctctggcgcactagcaaatggggaattaacattgaaaattaccctctgtcctccggtgcagaggttgttaactggattcttaatcctcctggtgatgtctgcaataacccacattttgctaaaaccgaatttgctctttatgcggctgtcctgtaccattccctctggttctttcgaaacttccactaccacaatcaggggagatggagaattgaggatatgcaaaagaaaatttccaaggatttcgatagccattggaagactatcaatactatggccgagactcaacagggtaattatggggatagtctatccaactggatcaaccctcgacctggaagaatgaagatctatgtggattttgctaataaggatggcgttgggagtattggtgtggtggttcgtgatcctagcggaagcattcgtgctttatactctgaaaaatgcacattccattcagttcttcatggagagatgcaagcggcgctggtgggagtgcaagtaggccaccgcctgggagtccca

SEQ ID NO: 9814 - DNA, 519 bp, Cannabis sativa
ttgggtggaatagtgccttcaaattggttatcagtaattgagaaaatggttaaagatgatatgttgtaaagtgagagaggaatcataccagacatgttattaggccctattgaaaagagtttcaacctttccaactttccaaactcttgtggaacggtacctactagagtgttttgccctacataaaactgttctagtgatgaaatatttgccagggaaggtggaatttctcctgtgaggttgtccctctgaagattaatcagtgaaagcttagtcaaagagccaagttctgtgggaatgacccctgtgagtctgttatttccaagatttaactcccttagttcaaagcagtaactgaggttcaatactgataattcaccttttaacatgttgaaactgagagccaaattttgtaatcgagataaatgacaaacttggtgtgggatttcaccaaagaagttattgttcattaggttgaaggacctcaaaaatgtgaggtttctaatgtaaggtgatata

SEQ ID NO: 9815 - DNA, 588 bp, Cannabis sativa
acagattgattgatactgtgaaataatgcagataatatctttggaaaattctataatacacgtttacatctccatatgtctatatgttttaatatccaaaataattttttactcaatttttttttatagtcatataaattataattatttaataaatcctgtaaaattttaaaaaatttagaaaaatttaaaacactaaaaactgtgtttaaacagtgtgttgcacgtgtgactattttattttatacgcgtgtaaaatagactgtttaaacattattttttatattggaaatttttccaaatttctcaaaattttgtaggatatcttaaataactataacatacatgaatatgaaaaaaatttaaataaatttttctaaatacccaaacaaatagagggtgcatcaatacaccccttttaattttaagagagtgcatcgtagaatcacctaaatattttgggcatttaacaatgagagttgtaccttttagggtatattttcacaaagtgcaataaacttagcaaagaatgatatgttttatgagagaaccaaactaaagttacattttcttagagatattgtcact

SEQ ID NO: 9816 - DNA, 947 bp, Cannabis sativa
ttgattgatttgtttaaacgtttatatgaataagtgtgttgtgttaaaattttcaataaatcagaattaagtttgtgatccgcaagaagggaccaagatttatccaagataaatcgaaattcaaagatgagtacatcagcaaggtttgaactcgagaagttcaatgtaacaagagactttggtcttcgatgggaaatcttgaaatggattcttgcccactagaaagttgcaaaggcactcaagctaaaagaggaatcgactaataaattgaagaagggatagatggaggatatggaggaattgggttactacacaattattgcaatgacgacatattttaggcacggaaattagcagcgcattagtgatttaattacaatttatgttatatatgtgtgccttagtgtaaaataaaacctattgttagagatttgtgatataatttcttatttatggagattttatagtaattttagtgtgtcatgtatgttagatatgaattttgatgtttttcatattttatgctcggtaacagtgaaatgtgacaatttgatcattaatgtcacaattattttggttggtagcttagtagctaagaaaagagcattttgatgatttagcctcaagtttgattttagttttttagtgggatttctagaattgggtttacgtctttttatgttcaagctgaatattttggttactttctttgaagaagagtgactcaagttggtagttgaagaaactaatcaatattaaagattgaatcgataaggctaaggcaatggctccaaatagaaatttaagaacaaagaagtcctataacactgtgattaatgcaaatgctatttggcatagcatagattatgtgtctcgaagcatcacttcattgcttgacaaaccacgaacaaccagctccttccttactcgtgacaatcttggtagat

SEQ ID NO: 9817 - DNA, 952 bp, Cannabis sativa
caacttagttttatatttttatatataaaaatatgttatatatataaatttatatatattgtttttgatcaaatataaatttatgtattaataaaaaaaaaatagtgatgttaagtcaatctttttcttggaaaaatcaaactaacttattttttttttttgccactctataatcattcctaatagccatatttattctctctttaattatcttatttttttttattttttaataaatttaaaaatatttatctatttaaataaatatatcaataattaaattaaaaaatatatatataatttatttatttttctttttaatgtttgtttatttattttaattgtatatagttatactcgaaaattactttgagaatcgaaatatgtttagtaattcatcatcatgccaaaatacttagaaatatacaagtaaggaattttataataaaatcattcacttatgtataaaaagttattattagttaattaactcaagtatacgatttgttttatgtacagagcaaagttattttgatcaatagtgacaacttaaaataagatatgatgatgacagcgactttgaatgtagtgacgactacaagtgagatacgatgatgacatcggcttttgaaacagttttgaaattgtataatgaatttttaataagtttatcatttttttagatctttattttgtgtgaggattttccaacctctattcatttttattttactataacgtttgaaaatatctcttactttctacaatatttatttattttttgtataaaattatgaaaaaatttagtagaatagttactcatgctattaaaaaatatcaaatttaatatatttttataacttaatattaaaaaaaaaatataaccgcacgcgaagcgcggtttgtttcctagtatgaagaataaagtgatgacatggcagtctaaaattgc

SEQ ID NO: 9818 - DNA, 845 bp, Cannabis sativa
tttctttagtctgattttactagttttctctttctctttctcttactcatctttctttgtccaattgccattgctgcttcacagcccccactgccgattctaggtttttagctatacaaattgttgtgtttgtaattttttttaaaaaaattaattaaagttctatgaatttctgtaaaataataataaccattaaattcatgtatgttgtaagagatgccgccaacgactaaagatagctcttctttggacaaggagaagattttggacctctttctgcgtattcaattggatgaaaggactgcaaaaaacacccttgctaatgcaaaagtcactaccagtcttgttactgtcattcacgaggtctttatttatatatgtaaatctatagttatgtgtatggtatatagataacttcatactttcacttctcaagttccgttttctttttttttgttaattatttttgtggattcattttcaggctgatgtaactgagggatgtgatcggactactggcaatcttttgtacacggtaacactgtttataactacattagctttattacatttgtttttttaatgtaaactgaaacagttatgatgttattagggaaatgtctgatttatttcatttaagattgaaaagcagaaaacaaaagtgtattcaagcaagttgtaaagcacttaatatcttgtcaagttcactttgaatttatttatgaagtaggatgttatttgataatcataagaatttgtaacaggtttccaccaagtaccctgccaatgctcttgttcatcgcccgacatttttaaaatatgttgtttcatcaaaggtgggttca

SEQ ID NO: 9819 - DNA, 735 bp, Cannabis sativa
ttcctatcgagagtgaggaaagaaattctggtgaaaatagttattcaagccttaccaagctatgcaataagcatgtttttgctggcattggagattagtagaaacattgagcggatgatgactatattttggtggcaaatgtctaaggacatttaaaatgggatacattggatatcttggaataaacttaggaaacacaaaagagggggtagaatgagtttttgagatttgcaagattttaatcttgctctcttgagaaaacaagaatgaagacttctcaccaaacctgaatctttggcaacaaaaaatttcaaaagcaaggtatttttttatgggaattttctttctactcaacttggctcagaccaaaattttgtttggcgaagcatcttggaaactaaagagctggttcgggcaagaattaggtggtgtgaggggaattttctttcttctcagtgcttctgttgcaagtttaatgtctttatgtagttctagctgggatgaagagcttattggtgacatatttaaagaaagagaccaacgtttcattaagagcattcctttgcaagtcacgacaatcactaattatttgttttggccaaatgaagtgtctagtctttacacagtcaagaacgcttattctttgttgtaacaacagaaatataaatggtatgatgataatgatttgtccttttggagtaaactttcgagcttgaaattacccccaaaaaatat

SEQ ID NO: 9820 - DNA, 760 bp, Cannabis sativa
ttgtaatttgcagctaaatcctcttaggttttaaattttatacatttaatcttctaaattcttttttttttccggtgatactatcttaatatttctttcatttgtaaatttgaggtgtgatttaatgtttaatgtcaatggctacgtaaatttgactgttatcatatttaaataactaaattaattagaccaataaaaatttaccacaagtaagtatacacacaggaatggtcctaagggatatgggaccttaagtaaaattaaattttaggacccctataatgatggttctagtgtgtaatgataagagttttaaaaactctaaaaagctcaaagttcaatctttcataactacacattaacgtaactctttaccactacacaacaaatttttgttttattttcttcttatttaatattttatctatatattaataattttcttttacaatttcggggcctgaatagtcaggagctcgaggcgcacgtctaattagcctacctttaagaccggttctgtgtacacaagtagccattttagttggcaattgaacttatgtttcaaatttattaacacacaaaataaaaagatcaaaaagttaaatttataagaattgaaacataataaaaataatttttttttttttttttttgaaatcaaacataaaaagaatttgatgaccacaatatccttcataatttttgtgtgaaatttaacacaaattttttgtactatgacttaaaaaaaaaaagataaaaa

SEQ ID NO: 9821 - DNA, 926 bp, Cannabis sativa
aaaaattattcaaaattatgaaactttttaccatttatatgattattgaaaggaatttgatagaaaaaacagacaaacatattttgtaaacatatatatataaacacacatagtagatataatattttgatttacatgctcaaagaaacaagttcaaatgaacttgtatgtatacatacattgtaagaattcaaaaacataaaatcatataaaatattttttgaaaaacaaatctatagatgaaaaactacttcacataccaacaacagcatagtgtggttcggtttggagggagagagataaatcacgcttcaaaaatctcaaatttaacctacaaatataataataaaattatttccatctcaatttactgaatgaagaatttaaataaatctttcactcaaaaaaaaaaaaaaagaatttaaataaatcttaacaaggaattcatttaaaaaataaagtgaggaataaataaaaatttgtaccaattttttcatgtgaatctcatgaatttactacctagattgaaaaaaaacatatgaaacaaacaactctgaattcaattgaaaaaataattaaactaatgctgtatataaccaaagtgtaaaaaaaaatacaatttcatcataaatttaaatatattacccaaaagtatataaaaagttatatattattatatgggtgtacttttaatgggtattacccatgaatggataatattataaaattttgagtttttatgattaatttttctatttaattagaaaaaattcttatttttacattatatgggctcatattgggtccatcaactgaaaaaaaaaattaataaaataaacaagtttttagaaaaaaagtgataaaaaaaagttaaatttgacttaaatattttttcatatagacatatttttggtatagtgtacgaa

SEQ ID NO: 9822 - DNA, 733 bp, Cannabis sativa
aatataaatttgtagagttctgctacaatataattataatatattacattttttttagatttttaaacataatgtttttttggttgcactacatcatttttgtcatcaatatcactataaataaatgataatttaataatccatttgatttagtaaataccacaataagcagtcagtgtcgtgcttgtcctgaaatagtctttcaattaaactaaaaaaagatttatttaattaagtgtcttctttatgagtaatttttcaaataagcgtaccttatatttctctacatttcaatttacgtcctcttggacataaatattcatttatagccaatttattttgcacctctagtaatagaaaaaatactaaaattttattgttatatcaatttacaatccttatttatgacatcaatctgatttcgagaattggaaccttcatgacataagagttgattggataatctactatcattccatttattccactatatatgttctttcatggattttcttaatgggaatttaatttgtttaaaaaaaattaccttatctttaatgggaaattttttatattgttttatgaatgttctgattcacttctcgattaatggatggcttagaaacttaaacattgttaaaagtgatatttgaaattgagttaaataccaatttcttctcaagaacaatatctctaataatcttatttttctcccaaactcaacatcctcaaa

SEQ ID NO: 9823 - DNA, 587 bp, Cannabis sativa
caagttgtagacgcattagtgtcaaaagcttcaaaaaagaatagaacaaatgaacaataaaatttccataatttcttttgctttcccttttaattgtattccacaagcaaattaaagtaaaacatacaaaagataatgaacaataaaattttgaaaatagttagaaagacctttctatggaataagatgtacaaatttccaagagggtaaaaaacaaactacaaaaagcaatcatacaacttaaatcataggcttaatttcatcaacccctcaaactatgagatatcagaatcatgaaaacagtaggcagatgaaacgttcttcaaatgttaggtattatattgataatttgatgcagaaattggacttgtgtgtgtgttttgtcactcagatcacaaaagggtgcaaagtgatgtcgatagttttagtaattagaaaaaaagaatgtcaagcttggatgcaagaaaataaattccaaatggcatgacccaacaaataaatcctaatatctcatgcatgatataatgaccataaaattggatgattaagtagtgaaaacaatcaagatgcaaaatgacaatttcaca

SEQ ID NO: 9824 - DNA, 564 bp, Cannabis sativa
cactttttgtataaatacaaaagacacatttgaaataccaagagagaattaaaattgaatacaatacacaattttatatatttgactatgtaattacactgtaattatactaattaaaaagtctcaattataattttcacaactctccatggaacttgaattgaggtataattacattatataattattaaaaactttctattttgatataatgagactaaattaataaatttcgatggaataatattgtctattccttctaaatcagaaaaatgcaacaagcataatagttgaatctcaaacttttcaattctaatttttttctttagaaaaattctttcttttccttttaaatttgaaagtttgatctctaaacattgcccataatatttggactttaattcattttctgaggtagaataatttataaaatgataataaaaaaatatactaatattttgaaaattaagaagaaaatagacatctttatatttttgtagaagactaatatgacaatattttttccgtaaagcatggatctatattgaccatataaatttaaat

SEQ ID NO: 9825 - DNA, 653 bp, Cannabis sativa
ctatcttatttcctgttgcattcttttctcatcaatcacgtttagttagggatagtgtttataaaatactacatccaatctaatccacctaatttaatctaatcaaattaacaaagtctgggaatattacatttgtacatatggaaaaatctaaattcgctattagatgattcatatgaaaaataaccaattcaaattcattctaataaagaggtctatacgaataatagagagtgaaagagagagaaatgaaaatgttgaaaagttcactcaaaaaagataagcatatatagccacttatatattgatcaaagtaagggatgagtttgttacaagtagaacacagttgacaattagttagatataagaattaactaaaaatagaaataactaccttatccttaatattccccctcaagttacacttgggcacctaagtgttaacttgtcccttaagtaggtgaagtggttgattctcagaggcttagtaagaacatttgctatttgaaaatttgtgtctacatatcgaacatctagcttgtttcctaagaccttgtctctgaaaaaatgtagattaatttcgatatgtttagagcgagcatgatacactggattcaaagtaagagagccagcacttaaattgtcacaccaaa

SEQ ID NO: 9826 - DNA, 1888 bp, Cannabis sativa
aagagtgaaaaaagctttaaattattcaaaaaaacaaattagtagtaaaataataaataaaaatgtgacttagtgtgaacaaattaagttcatattatattttgtactaaatttaatacacattttgtattattatttgagtatctttttgtcaacatgtcctaaaaaatgagaatatactgcgtttatagtacttttattggagtactaactagttacgagaaccactatggaattgaaaatgttagtagccagttactaaattagaaaagtaacgaaaattcagtgtttttcagtaataaaagaatcatttagtactttttttttctttgaaatcaaccaattagtacttgaaaattagtaaccgcatactaaatttttttaaacaatgaaataatgtgcttaacgagcaaacctcaaaacaaactcctaggctactcaaaattcaaaacaaacaacccctaaatgttgtgcaatgagcaaaaatgaaaagaattaaaatgtgtgtatgtgttttgtaaaagttaccaattggaccttctgttttgttaaatgataatatggaccctgtattttttaaaattgtacaaataagactctgaactgcttttttgtaaaaataaaacttaataataatctaatctagagatgttatgacaaaactgcttatattttctgtatctgttcatattagaaattatcttaaacttagttttattaaaaaataaaattgttaaaaaatgagcttagggtcttatttttattattttgaaaaaatatagggtctattttgttattaacaaaatagaaaatccaattaataatttttgtaaaatataaataaagtctaaaataacatttagcctaatagatattagataatagaccaaaaatagagaagtataataaattatcaagtataatataactaaaaactatgagaagttagtaacattattgaccaacttgcttaatatatatccaatagggggtccttaaacttaaagaaattaatgatgaaaacatcatgagataataaagttaattaataagattcgaattaacatgttttttttttttcaataaaagatttcttttttttttctaaatatttttacaaatatgcttttgatataaaagtatgtttttttttttggaacttccattaaaaaattaaaattcaatgtttaattggtaaatttcaatatatatttcaaaacataattaagatataagagttgcaatacttaacagaatagtaaaacattataactacgagtgattgaaaaaaagtaatcaattaaaagccttgaatataattttaataataaaaataataataatatgagagggttaaaaaaaataaaggagacaaaaataaaaaataacacaaaaaataaaagtaataacacaagaagaagaaggtcacacaactatttgaactttgtttttgttgtattaaatttttttgaattttttaaaattttgcagaatattttaaataattataatgtacatgattacgagaaaaaaatttgactaaaaaattattacgcatactaaaacagatttggtgcaccggtggagtgcactgtaaaattttctaataattattatcattttgtaacgaatatttataataaatcttatctattaataatattttaaataaataaaattatcttcataagataaactcaagttttatttttattatattaacccaatttaattttttactttataagttgggttataactcggggtgttcatcaaaccgtgtacaactgcactaatcgcctgcatcacactatactctcaaaaaaaatatactttgaaatctttttgtagtgcaactgcaatttatattttaccaaactgaattgtg

SEQ ID NO: 9827 - DNA, 769 bp, Cannabis sativa
ggttccttctactctagtggatgccactatgatttccatcagtgatacacaatcttaggatgtgcaagagttggatggaccacctcctggagtagaattttttagggctaggagaaaatagaagtcagttctcttgaatgactacacataagggaagaagaaacaacgaacagcgccagttgaagtagatactttaaggccagtagacttacgactgtacaaattttttcaaaagtggattacttacttgagggactatagccatcctagggatgttcacactggcagtgccaatcaggcttggttcgtgaagttgatggtagaaagaaaatggattgatgatattgcaagttgtttcttaattggtcaaatttagtgttttaaacttttgagggacatatatttatatttatatttatatttatgtgacatgttcacgagtttttgaaatatctaacctatgcatttgcgatgtggtttgtaaaccacaaatacattgcttagacttgcataaataattgctaaatatgccaatgtttaatgtgtgtgacgtctgtgcaatttgtgtgcgattcctatacgatctacctctatataatttatttgatctttatgcgacatatgtgcgatgtttatgcgattgatatgcaattttacactttgataattagtttcgtgcgatctttgtgtgacctatgtacgacgtttgtgagacatttttctaactttgtttttatttgcaatgcagcaagttgatcccatgatgcac

SEQ ID NO: 9828 - DNA, 917 bp, Cannabis sativa
atgattgtttataaattattttaaattataattgcataacaatataaatttttatggtataaaaataaaataaaaattggccatactctttgtttataaattcttattcatcatgacaattttgtaagtgctcaaataaaaggtcatatataagatgaatagtttaatctttttattgagtattttttttttctttgataatttgagagataatttttaaaaggtttcaattaattaattagtttttctaatagttttttatttaatattttattttaaaaataatttaattattttaaacttaatatgagatggactagtaacaacataatatgtgtcatatagtatttatagggaaagtatcccttagttactaatattagtagtagaaaggtttgagtacaacgtacgatttataaaacacacaaaataaaaccatacttcagggatcatggtttaaactattctgtagataaaacaagaagaaagtaaagattaaattagacgtttctcacaagaaaactggtagttgtccatcaaacagagggtcagccataattttcacccttactccataaaattagcaccacatatatttattttgaacgtacaatattctcaagatttattatatttatagatgtaggtacacacagtctctcacggtggagtagtaacacctaaaaaaaattcatgcataggattagggagaataataaaacttcaaaatccaattataaatttggtagctaatagtttgattatcgtttcttaactaggagaaatgaattcacatggccgatattataattcatctaaattaattgatatatatgtaatataaggaaaagcatcatatatattataagataagagagtgagagatgaagagaactcactgccgcacttgaagttgc

SEQ ID NO: 9829 - DNA, 649 bp, Cannabis sativa
tggaagaaaattgtattgaatattaatatatattaattaaattgttatctgttattaatcattaattaattaatcttgcaattataattcttgtacatagtatgctagaatacttagctatatatattaataataagaaaataattattatattttttggaaaattaaaaagtgtattgcataaacaaaacttctcatcttttacaatctaacagcgccttgtataaggcctgaaattgggttctatacaagttcatattttacttacttttttaggctaaatcattaaaatttaattttttacactttcaacaatcttttttacataatcttgttagtttttagtgccacaaatttcattcctaactttccgtagatgataaattagaaaagctaaaaatgtcaaaaaagcaattacttctaaatttacttggctttgactgcacaatctacctcataagagatgtaacagaattataattagaacaagcagccaaagaaaatagctattatattacttattattaaagtgaaatgctaaaggagtgcttaacaccctcgtgagttataatatcgttacacaacaaaaaactactatttttagtgacaagtttttagtcatgacataatttttttataactaaatatg

SEQ ID NO: 9830 - DNA, 791 bp, Cannabis sativa
ttttttttttcattaaaattacttacctacttgtttagtgccttcaaaaaaggaaaaacaacacaaattccattattctgatattaatgattacaacactcaaagtattggaattttctttttaattgtggtagctaattttttaattatttattatttattttttttttctaaaaaggaagtgtgagatctctttacttaaccattttctgttaaaaatttattaaaagataataatattaaataatgtggttgaaagtaaggaatatcatagtattaaaccaatagtaatgagaggtatagtagataaaaataaaatcctcacaacaagtcacaagtactttattctttccattttaattttactaaacaagaatcatattattattaatgattttgattaagtcactcactgttttgaagaatagtttacttttttagtgttgtcactttctgtttaagacataccaaacaaacaaaaaaaaagtatgagagaagtaatgatatgatgataaataagcagtaatgcaggaggagggtattaatattaattatcaggtgttagaccagttaaacatgtttattatattattaaagaataataataataaaacaggtaattaaaaaaccaaaaggaccactagtgatgccacgtggctggttattacagtggctttagaatgaatgaattcaaatacttttagaaacctatttattttgactaaaagcttaatcaatcttggtttttgaaaataatattgttattagtagggatgtttatttgaccacat

SEQ ID NO: 9831 - DNA, 564 bp, Cannabis sativa
tttgtgggtaacggtttcttcttcggttctctagtaacataaagaaaaagaagtgaaaaagaagaaaagctgacctcatctcaccacaaaatactattaaataagagcctcaacatgcaatgtaagagtaggaaactgaaaccaaagctaataggaaagtgttaaattaacttacctattataaatcattgcttcatacaagttttttttatcatccaatccagtaaaggtaagcacaaaagtgtaaaaatatagcaaatatgcactaagtgtaagaacatccaatcatgaatgcaaagattataggactgaagtcccaatttccactgatttcacttcaaaataatttaaggtgcatgggatttgataaaaatacaggactgaatagaatgatttggatcgggataaacttaatattatcacgtgtttggtgtcatattagattaaattactatcaaaatatcacttaattttattagcagaaaaagctttgttgcatttatatactctaatccacaagtacatttaaccaccagaaattcctagtaacaaccaaaatagaga

SEQ ID NO: 9832 - DNA, 1010 bp, Cannabis sativa
gtttttcttcttcttttaaggaatttgacacttgataaatttatgaaagaagagattgtaaatttgattcattcagaaattcacttatttcaaatgcccacatattgatttctaaacttatcatttggactgaaaaatcctaactcaaattttagaccgggatattagagtctttgagacaaggattctaaaaaggaactaataacttttctttcttttccctttattattattagatttaggatttttcgtttatggagagactaatctgagtgtctaataggtttattattttaatctcttcctttaaaaggaataacatgcatattctatatatgttcatgtctaaaatagtatgatataaattaacctcttttacaatgcattttgttacataacttttatatgaattttcatctgtggtgaacattcacaccgcttctaatatattatacataaatttttagtgctactacgtacaacttgaacaacttgaagacaactcaaaatatctaaaaacattaatgttcgaagacgtagcagaaaaaacattattttgtactgcaatacaactaatgaaatactctgcgcggtatattttttacttatacatacatgcaaagtagtatgaagaagttatcaactaaaaaatagacaatacaattatataattatatgtcgattcaaaaaaaataaaaaagtgtaaaatacaaacattttatcattttatctattatacccataaaaagttaaaagattcttcataaatatttcctttactttttttttttaagttatatccttagtttaattgaaattattatatttatttttttatataccgtacaatcatttatattaatttttaaattttaaaataataaatcttttatttaataatatttaaagtttaagtaattataaaaactttatactaacattaataaacataataatttaatttaaatttatttttcaataagcattctacataaaacatcatttatttt

SEQ ID NO: 9833 - DNA, 711 bp, Cannabis sativa
ggtcgaattcgatgttcttcgccagcgaggcaataatataagacctcttaaggtttgtttatatactttcataaacgtatacactatactacgatatcatcatttcatatatatatataaaccaaatatgtaagagttctagcaaacttttgagtaatatttatgatattaaaagtaggcttcaaattaggggtgcataaattgatttaatataataataattgattaatttaattataattgatcgtttaatattagatatctaattgtaatctgattagtttagatgttatttttaaaatatatatctaattgaatcaaattaggggtgtttacatgttgtgtgcaaaaatttaatacattcaacatctactaaaattaattaatatttttatttagtttaatagtaattagatattatgttgttataagttaaaaaaaaaatagatgtgtatatgaaaattaatattaattttttttattggatcaattcatctaatagatggatggattggtgcagcacacctagttcaaacatttaatttttgtttttgaaacattaaattttttttgatttattgaaaatttgtgtaatttcttaaataattactatatgtataaattgaaattttaaaactatttaaatacaagattggtacacgtacacctatataatttgaagggtgcatttatatacatatattgtaatta

SEQ ID NO: 9834 - DNA, 739 bp, Cannabis sativa
ttttttttttttctaaatttttacagaattctacatggaaatacctattgcaactaacgaagcaacttaaattgcaaccaaaatccgtatagcaactcacatagaaaccggagaaaccactttagatacccaaaccgtaaatttgaaaaaaaaaagttcaaaaaatagtatatacggtaatttcccttaaaattattagtataattgtctttttcaacaccaattattgtctatctcatatgggtattcatcggatccaatttgcactattttacttattgtgcatttgatattctgcactaactgcaaattttatactttagatccaattaaatttgcatagtaaatcaaatccaatccaatacgaattaattgaatcgattattttggttggttacttttaatattaacttatttaatattattaaatatatttttacacataattatcaacaacataaaatattccaacaataaattaaaataaataaaacaaaaataacaaattcaattcaaaaaaattgtatgcataaaaaatgtttgttttgttttagattatattttctttataaataataataaaatatactggtggcattattcttctactatgtagagtagctggtattgaagacaaaaagtggatgtgaaacagttcctaacttatcgatactccatcaaacatgggtataaaatactgcttcttactaatgaaataaatatttgtggattagattgg

SEQ ID NO: 9835 - DNA, 546 bp, Cannabis sativa
agtgacatcttttggttgtgggccaacactgttgtatggcccccacctaaaccaacgcagtgggagttttgatttgatgctcccagtcgctttctggtcaattatacaccatctgattacattgtggtcacatcataacaaaataccatttttttttcttttcttattattctcagtggaagagaaggaaccctatgaagccaaggctcgccaagataaaaaacgctacaaggacgaaattagtggatacaagaacccacaaccaatgaaggtagactcagggaatgaatcagactcagaatagaatccaactctttaccttttcatcaagtgatatattccaaattgggtcggtccccctttttgggtttaaacaattgaattaaatgtatctacagaactattttgcggttaatatatgtattaaaaaagatcactaaaagctaattccctttcttcttttgcttatgacccatctttctcttacgaattgtattgttcaaagttaaaagcgtcacaggttgttttgtctgtttagtaatttgg

SEQ ID NO: 9836 - DNA, 1046 bp, Cannabis sativa
tccaagcccacatctcagtatacagggtcctcttgaaagggaaaaaagcaagaattgaaggatagtaattcattttctattcccttgatcaacctaatcaatagccaatatcacagcaactaatctacaatatacagtttaaccgattctagattttgtacttattacattttacagcatcaaatgttcatttaatttagtatagaaaaaatataaaaacaaagagaactaatccaaaagggctgacctgcaagagcaagctttaatcctgtctctatatctgggatacttggaaccagtacaccgggagtgtccaatacatatatgctcggctgatgagcaatctgtattaaaaaaaaaaagttttgaataaaaattaaaggaatagacatcttaccagttttcaaaaagaaaaattattatagtttacaatgtcgaaaatagagttcagaatagtcagttgcattgcatgcgtaaattttttttaaaaaaaaaaaaactaacacatgtacaactaattgttcgaatcttgttttgaacactataaatttttcagaattttttgaaaactagcgggatacatcttcatattagaaaaaattggatgataatttcttgacataccgaaaataaaaacgttccaaccaatagggacaaaagtgatgtctccactataacatagtcttgtcttaaatatcttaaaatgcacataaccaacatgaatcttaggagtagactataaagcatgattatgcacacccaactttgtttgacagtagaaaggaactcaaaaacacaaaagttagtccaccttaaaaccagcaatatcttgagtaacaccaggcagaggaccaacagttgctctcttattcttcccttgaactagtagtaaacaaacaaaactcaaaaacatcatttttttttttgaattcaaccaaaatatcagccctgaaaaaatcttaatcaccacatactcttacttaccaggaaaataagacgaggcaatttgatgtatggaatttatcaaagcagattttccaacatta

SEQ ID NO: 9837 - DNA, 773 bp, Cannabis sativa
tgaattggagtaagagaagcgtttagtgaaaacatgagatattgtaccttggtcattcctgaagatagcagccccagcagacatgttatccccaattgcgatatcagtgttgcaaaatgtccatccagggggggctgcaacaggcagtggttcattatgttctctggggtgtggaggttggacatctccatgagccttctgttagtatggaagagaacaacaaacataggagtatctgttgcattgcgaattctattatttcgttccctccatattttctcaaagatgattgcagcaccttctagaaaaggcattgtaattgattccacttggacgattagcatccatcttgaaccaagccaaccaagaatcccagtctaggaagcctggggtatcggttctcaaatgccagatacaaccaaaccacaaggcccttgcatagtgacagttccagaagagatgcaaagaatcttctaaaaccgaagaacacataggacattcggtgtcccgaatggggaacatggagcttagcttgcttcgtgtgaggagattgttggataggatcttccaccacaacatctttagtctactatgaatgttggccccccagataattctccatttagcatcattagtatcattagccttcacgtttttaactacccgataagcagatttgatagagaatttaccattgcgctccgggagccaaatccaggaatctggagaggggatactaggaagcgtggtgttaagaattcttttagcgtcat

SEQ ID NO: 9838 - DNA, 506 bp, Cannabis sativa
aataattggtttttcttttttgtactttccgcactttttctttcttacatttttctttccttactaaaatccaactttcaaacatattcttagtaatttttcaaaattaccatgtatttttgtaataagagttcaatatataatatttcttcggattatttcacaaatacacaaaaaaaaaaaattacaaaaatatagttgtctggaattttaaatatttttacgattttatttacagaaaacacagtttctaatgtattttttatgttgtactcttattagtttgttgttgatttttttattgtttagatgttatttttatatagcttttttattctttttcatattattttatagaacactataaaaatagattttttttttttaaaaaaaaaaataatacttttaggtaattatcccttatttcttttacctaaggccacctctaatgggccttcaaaacctcaaatacatctttcaaaaaaaaaaaaaaaaaaaacctcaaa

SEQ ID NO: 9839 - DNA, 608 bp, Cannabis sativa
tattattattattattttttgaatcaatctccctcaatctcacatttctcaggtatgtcctaactgtcataaacaatttttatgttataatagttatgacatcaactacctaatatgttcaagatctataagaggggactccttccaattcatgcagaagttcagaaactaataagtgtactatcaagaaatattgagaagagtgaaagagagactagaactaagtatcagagaaatgttctctacttgtagctgaagcatagcttcatttcgagggcttatgaactgttcatcacagttctttgatgtaattctggtgtactctttcaatcaataaagatcattgcccaaagggctgtttctggccgtggagtaggcacaataacaagttgttattgttattcgaaccacgtaatttttgtctccattttctatcttttatgcttgtttattttcactctaattgctatagcattggtaccgcattatctgtgtttaatcctatctctatttttgtgtattgtgtttggtttttggtcgagtttccttcaacaattggcatcagagcttcaggttcgggttactaagaaccacttcaagatcttgat

SEQ ID NO: 9840 - DNA, 577 bp, Cannabis sativa
tgcatacatttgtctgttaaatcataaacagattgacaatggtgtttgctattccctttcttccctgccaaaagctgtatagataattctctgaagaagatttaatgtcgagattgataatttcgtgtattttattatcagctatctttgcttgttgggagatgcaaattttaatcaaaaatgttcttacttatttatacaggcactcttctggcagcaagagaattattatggtgtgaatttaacagccttgcatggatcagcattccaaggatatttttcacaggtccatataaatcattgtttgaaaattaccatatattttctgttagagaagtgcttttcaaattactattactatttttatttaatattatatttattttttgcagtagttttgaaattatttgtagcttgatattcatctttattataatagagttcagccgtgtccctgcttgaaatttgtcggtttgtgtttatggtcattcctatctgttagtttgcattggatgttttttggatggtttcattttcatcagttgtgctgatccttgaattagattcttaaaatatt

SEQ ID NO: 9841 - DNA, 969 bp, Cannabis sativa
attctttcttaagtttatctctcaataagatgtgagaaatctgtgtcaaattttatttgggatttctttcctattaagcatacagtaaagatgttactgtaagaagaaactaataacaactagagctatgaatctgcagcgcctgaggagacatggagacatcatcaacagaactgttggaggctatttcattgtacaaggcagagctgatgacaccatgaaccttggaggcattaaggtatatggcgctcaataagctccttaaaaactctattgatcattgctaacatattaaattctattcttgatatgtagacaagttcttttgaactcgaacgtgtatgtgaccgagctgatgatagcatcttagagactgcagctgttagcgtgtctccaattggcggtggtccagaacaactagttatgtttgtggtattaaagaatgggtatgacgctgaagctgaaagtcttaggacaaagttctcaaaagccattcaaagtaatcttaatccattgttcaaggtttgaattttaactctcttatttttatttcagtgtaactgacactagagtacaaagtttcattacaccttaacaagcttacataatttacctcatcattggaaatgaattaacaggtgagtgctgtgaaaattgttcatgagtttcctcgaacaatgtcaaacaagttactaaggagagttttgagggatcaactgaaccgtgaattctcaattcagagtaaaatttagtgaaatggagttcactagctttttacatgggtggaaaagtgaaatatgtagttttttatttgaagaatagatgtatcaatcaatatattcaatatatattaataaaggaatgcataatagatgctggcagtttatattttgatttttttttactaattaagcgatataatataaaatataatattttcatgtctgtattataaatgaaataactctt

SEQ ID NO: 9842 - DNA, 656 bp, Cannabis sativa
aaataaaaacaaaaattatttttataaaaccaaaagcaaatgcgagtgtgttttgaaaacttcaaaaagtaatttttttttcttattttaaaaaaataatattttgagaagaaaaaactcaaactatccaaaaatactctaagtttgcatttggtaacaattatttaaatatttttctgttttttaatgaaaaaaaaattaatatacttgtttttttttaaaaaatcaaattgaaaaataaaggcaaattatttttaaaatttatctaaacattttttaatcataattaattttttttattaatatttacttcattttcacttttaccataccactatttctcaactcattttttttagtgtagcgtaatggtactttacaatcatatattagcttaatagcttaaaggtccttcgttcgaactcatgacttttccatttttcccatccctccctcaccactaagctaaccgtagtggcttttctcaactcactttcttctcaaaagcaaatattaccataggaatttttagagttaccaaacttatttttctttttcacaactcaaaaataaataaaaagaaattttaaattagtgcaattcaatctctgtttcaaaaatatatataaataataataataatacaattcaagtat

SEQ ID NO: 9843 - DNA, 510 bp, Cannabis sativa
acctataataattaataatttcatcagtagttagtattattaatttttgatttagtttgttggatttatttttattattttgttaattatgtttttatataaatgtataacaaatcaaatatactttctctttttttaatataattatttgtttcaaaattggagtttttttttaaaaaataaaataaactaaaatttgatttcataaaagattgaagaaggaaagagaaaaaatagataaataatttaaaattaattgtcatacaaaatttttgaattataaacttttattagtctacaataataaaataataaactaaactattggattatatgatccagtgtttagaaataacatcatgtaaattaaggaccctaaaataaaaatatatagttaataaaagataagattaaatttatagaattatacaagctataaagtaatattttcataaaaaagtcactttttctttccgcatcactatttcttcttcgcaaaaaaaaaaaaaa

SEQ ID NO: 9844 - DNA, 640 bp, Cannabis sativa
gattcttttagttttatacttatacgaagcctcataaaaacagtatgaaaataatttgtaaagagtatagtacaactataaaaacaaaatatgtgaaagaaaaaaatcttagcataagctgtggtgaaaataacggaaaaaacaaccacccgtatttttattaaagaaatccaaatcagtaaatatattaagaaaacggtagatctgtatttttttccctcttaatccgtaagttgcatacttaatgttttgttctttcactattttaaccatattattaattttttgatatcaaattaaagtgaatttagtaaatttttatatttttctcttatataaaattaaagaaaaaaaatccataaaatttcatggtaagaagaaccacaaatattcttctccactctttcaattttatcatctcatttctccctaaccaaacaaattttaaaattttacttaattttcttttatttttggtattgcttttctccaaaagttgtgtaccatatttgaaattcacacttttttatttttcaaagctaataaattttagctatgttttagtcaaatcaagaattgaaaacatagaacaatgaaaatcatacttaaaaatctttttgaaattaggcaattaaaatct

SEQ ID NO: 9845 - DNA, 555 bp, Cannabis sativa
aaaatataatttttaaaattttaagagatacgtgtggacgtgaaaattgtctaaacaatcacgtcaccattctatttatcacatgtgaaaacctaatagaagaaccattcctagtgtgaatagtttgggaattatttttaacgagctgaaaaattcaggagcacaataatagatatatcataatttagctggcaaaaattctaaatagtcataaaaaatgctctatttgactaagtttatgattttgattaaagcttgaaatacaaaataaataaaagttgcaccttattttgggtaactattctgtaactctttttttttttttttgtaatgaagttatttttaaagtgtttgaatattaattaaaaaaattgtaaataaaataaaaattattgaaattaaaatatagtttctaatatattctttacgtagtacaaatccatacatattatgtacatttttttttttgcttaacaaaaatatttcattaaaaaaagcaaaggccaaccaaaaagacaaagtcttaagtgaaaacaagaggttccacctcctcag

SEQ ID NO: 9846 - DNA, 599 bp, Cannabis sativa
ctctgtttactctgttttcgaacttggtatcagagcatcttttgcaccggtggtgcccttcttgtctcagctccatggcagaacatactccagctcgttcaggtgaacacagtgtctcgagcatcatggctcagtcgtctatcccttcagcaggtgctgcaggatctcaagttgtcacaaccttgaaccaaccctttgccctaaaactcgacagaaacaactatacgttgtggaaaacaatggtttctgccattgttcgcggtcatcgattggatggatacctaaaaggtaccaaagtgaaaccaatcgagtttcttcccacagactcgtcaacaggagaagaaagtgtcacagtaaacccagaatttgaaatctggattgtgaatgatcagttgctgcttggatggctttatggatcaatgacggagagtatcgctactgaagtgatgggttgtgagtcgtcttcaagcttgtggcaagccttggagacactatttggagctcattctcgtgtgaagatggacgactatcgcaccaaaatacaaacagccaggaaaggagcaatgtccatggctgaataccttcgacaaaaacgccaa

SEQ ID NO: 9847 - DNA, 894 bp, Cannabis sativa
gatgacgagaggtgttcgtcgtgtgtggatttcgtggacattgtggattttgaattgaaatgagtagcaatctccactctccactgtggcgctggaaattgaaaaccacagattatttgtttttcttaaataaataaataaagtgtaaatattaaagtcatgtaaaatattaattaattattcaaaaaaaaaatatatatatttaattaaataaaaagttagaaagatttttttttttacgaggagctaattacaatctcttattataattttttagtcaatctctacgttcgaaatcacatgtcggaatatttttttttaattttttttcataacgatattcgttatagttacagtatcatccttataaatttttgaaaaatttctaatagtttacagtgccgaaaaatagaattcttgatattccagtttaccacgcgcgtttaaaaaatttcaaatgtatttcggcactaaaaaaaaaatttacagaaatgatattataagcataacgaatatcactgtgaaaagaaaaattaaaaatatgttgacatgtatttttgaccatggaagttgactaagaggttgtaataggaggttgacggtagcaatcttttttttttttttaaatatatatagatatatatatatatattaattagatttatttataatgtaagctcctagattatatagattttagtaggttggttttcaaattttcttttaagcatggttttgtaaaaaaaagatatttatgtatttaaatttaaaattttagctcaatcacacttttgatttacattaattcttttattcagttcatgacaccataatcaacacttaattaacatttgaaataatttatgtataccaaccatcacctccaccaccgcc

SEQ ID NO: 9848 - DNA, 2406 bp, Cannabis sativa
ctcgaatggttgaattggagagaccagcctcttgaaagctaggtgtaatgttggctactaatatcaataaagtaatctttttgagggattaattttttagcgttgaattgtagatagaaacattggtctaaagaaagttctatcacccacaagctcgttctctcttcccctttatttggttcttaccaaactctaccaccgaaaccacactcaaacttcgatgaccactacccacgaccctccctccctctagttctttcaattgcatgatcgagacccacgaccttccctctctctagtgctctctagttctttctattgcatgacagagacccatgaccctccctctctctagtgctctctagtgcatggctgacgacatacgacccacgaccaccaccgtcaaacggacatacaaataatctatggtttctttgtattttttgtttattgtttggtaagaaatcaaatttgtgtgaaatatatatgcattttcaatattttttttttttgtatatggtgcgatggggtacgatggtggtcctatggtgggtatgatagtagtgtaatttggcggttagtgatgaaggtataataatattttgatagtggtctgatagttgcttaaaatttatgctatgataaaagtatgatatggttcgatggtggtacgatagttaatacatttatgatatggttcgatggtggtacaatagctgcttaaaatttacgccatgataaaggtatgatatggttcgatagtggtacgatatttgataaatgcatgatatgacccgatggtgatacaatagatgcttaaaatttatgtcataaattttaagaaacaacttaatccatattctaccctatcgtatcccattgtactactatcgtaccctatcaaaccttcatccctaacctctagattacaatactattatatccaccgtcattctgctatcgtaccctattgtaccatatacaaaaaaatcatagaaaatacaaattttaccgaaactcaatttttttaattaaaaataagaaaaacaacacagagaaaccacaaatctaaacaacaatagcgaaaagggtctctgtggtttctttgatttatcgattttttggatcgtgaatgggggttcgcgattcgcgcaggcccaagcttccattcctttttcttctttgattcccactagtcgtgggtttgaagacaatgatgggtctggaagtaagtgcaattcgggtcttgcttttgtcgagaatgtgagaagacgagaaaagaaagagagagtgggtaaagcttttgatataagaggggtattttttagagatataaaaaatagacttaaaattgtcaatagtgatttaaccgtagtgtagattgttattttttttttttttatctaatttaagcatgttttattaaatttgtcatttaaaattagtgtgaaccaattttgaacaaaatcaatataataaaacaataaattgcttatttaaaggaaaacttgttatcttatcacaaactacaatcatttttttcctgtataaaataactctcacaataaatacaaagtactttgacatccacaatttataaaatatacatacaataaggtataaaaaacttgacgaacattgtcaaattttaccaattttgatttgaaactttttctttgaggttatttcaaaatttatattgttttgaaaaaaatttagcacatccttatagtacatccccaataaggttgttctatacactttctgtttgctttgacattcagtaaaattttatactttatttttttacaattgtgtaaggaatttataatgtaaacttcagcatatggttctttgagcgatgaaaaaaatgactgaaatgcctacagctattaattctttgagatttgatcccacgagctttgggtctataatttgaaaattgaaaagagtgttagtgtgggtattcatacttcgaaactctctctaactcttttagatagatttaccgtatacacagactgagttgtgagcttggagactggtaccctatatttataggtgagatactctatgagcatatgtgctatattaatttttacaatattttgacaattatttcaaaaaattaaatggattaattacaatatttgggaaattaaaatctaactataattagattatttataatcaatatcaaataatcaattatataaaacctttgagcaaataatcaattatataaaatctttgatcaaatataatcaatattgattttctacgtataaacaatttacacatattgactgtactgattatatttattatatagaatcataaaatattcttatcttcttccacttgattagaatttaaatttacctcttaaacccaataattattctt

SEQ ID NO: 9849 - DNA, 514 bp, Cannabis sativa
ttatccttatagatggttaatgttcatttggacaattgaatctaacttatctctaagttattatccttgtgtaaaaaatgctaagtattaatagatgattcacctcgtaaagtctctttagaatagcgaggcggttgtctcgctatttgtaatcctgaggttgttgtgcataactgtattcactcttttgaatatataaattatcttcttgggcttgtatatcccgagggaggtgtgtatctcgtcaatataagttccaataacctcttatccttatctcgcttaagcctatgtagtcagcgagttatgaatagttcctttaatcctttatcaacgaattattctttttctttgaattaaatgatataatttcattagatcaggtggttcatattcccctgcaagacacgtgtcgctctctgatgtgtagctgaattttgggtataataattgcccctcaaatgattataagggtatttcatcttaatcccaatttgaaaaattggatgctttg

SEQ ID NO: 9850 - DNA, 1648 bp, Cannabis sativa
acgacgctcttccgatctttaaatttttagactattatgttaattttttttaatttattaatgatattttactttttgtcataatttgtatcttaaaataccattgtgtaatggagtaaatatagcatttgtttacttttttgtactaaatttaacacaatatttagatcttgtatttgtaccaccacaccaaagccaacccaaaatggggacagagaaggaatattttcacgtccttgatcaagaatcaaaatagcaaatttcataatttcctcgatctctcgcttcttatttcgttacaccatctcattacgagccttctaaattacccataagagcatatgtatcatgcattgttaaaggcatatactagaaatagttaattatgaagtaaatgtcattttggaggacatgaaaagtgacaagattaatgaaaatgaagtaacaaagaaatctaccattaataaaaaagtaaaattataatgttaatttttatatatacaataatatttttcttatacgtttaagggataatatttattcacaagttgtatatataagaatcaaaatcattttttttattagtttgtaattttttgtttagttaattatgttttattttctttattatatgtgctaactctatacttcattttgcattgagaaaaataaatagtaaaagaatgtttgtttcctatatattaatttttttttacgttctccaatgatatttattgcttattttttaattaattattaattgagaaaaaaacaaccggttgtttactttactaataaaaaacaagttatttactaattaagaaaaatatttctaactaattctaataaaaaagtcaatcctaaaatatatattacttatttattttcttaaaaaataatatataatattaatactcttcaccgctttatatctatatggcatttatttttttaattttttttattatatttttaaatcctttcccattctctctatatatagaatgaagtatgaactcacattttataagaacttctacactcatattttataatattaaacaaaattataagtttataacctactcaattagtgatcaataccacaactcaattagtgatcaatacctgagattaattaaaaagatgaagatggtatgtgaggcttgttatggtccaaaggaccatcttttaggagaagatgcacactttgtttgctcaactcaagaaattatcggagtagctgacggagtggatggttgggccaaaaaaggcattgatgctggtgagtacgctcgccaactcatgctcaactcaatacatgaagttatcgacaatgaaataaccaatccgaaaataattttggagcaagcattcatggaaaatgcttcctcaagaattcaaggctcgtcaactgcatgcataattcaccacaataatggggttttgcaaacggtcaacgttggggatagtaagtttatggtgttcagaaacaacaggtcgagtctcgttttaaatttttaataatttataaattcataaataataaaaaaaaataataacaaagagtgaagaactgcaattaatatatctaattaattaataattataaaataattacaagcatacattataaaaaaaaaaaaaa

SEQ ID NO: 9851 - DNA, 530 bp, Cannabis sativa
tctattaattcaatttcatttccacattaaggtgaattcataaacaacattaaattgtgaaatttacaaaataaccatattcatttcaaactatgctgccctaatggttgcctattgtaaatttaggttgcctttggttggaaggaatgaaattgaatggatttgaaatgaatcaatttttattacattgctttgtttggttgcatttaaaagtacaggaatgtattataagttaagcaaacaaaaaagtacaaaaatgttattccaataaattgagttctctatcattttagttgaataactgttctattttgaaataaaagaaaaattcatttcaatgcaatatatataaaaaatttaataattttttttatacaatttaaattttattccatttttattctcattcccatttctatgttttcagtcctcccaattaaatgcaagcaacccagagagcaatttcacgattgcagtactgacccttgatgttattttgaaaggcagttttctttcttttgtttttcaaa

SEQ ID NO: 9852 - DNA, 997 bp, Cannabis sativa
cttgtgtagtgttatttcaatagttttgcattattattgttggctgtaaatgaatattctacttggtagtggtacctaggcccttgtgttcagggcaataagcttcctaataactaagccggaagaagaaagttgaagaactgttgcccaaattatgtttgcatatactgcttcgcctattatagaatagagatctctgatacactaagctagaaactgatcccattgttatttgaaatgttgtaactctaattgcgatatattttaacttcttttttgatttggtcttgggaaaagcagagttgttctgagaaataatattgatcacagagttttgacagtagagttttaatataatttagtgaatcataattgaggtagggaaattggcctgaggcttttcacttgttgttatattaatctaggcttttgttctcaagaaagggaaatggatgggtttaggagtttggacctaatttaaacacagttcagtttaaggtgggaaatggttaactgattagattttgggaagatagttgagaagagtactgaaaaaaaaatgacattttattaccattttctgggtgactttgtaagtcacaaaaagttatgaccttttgtacctcttttgtgatattctataatagataccactattaaaggtcattaaaaaatgtcacaaaagttgtacttgtgactagccttaacaaaaagttctgataggccattgctgctctttacttaagctagaaggaagcataataagaaggggtagccaactaagctaacacatcatcatcagcttagtgatttttctcatgccacagtaggcggcttgggtggatggaattgcaacggcttagtggtgatttcttagctttgcataaggagtgtgcattttctgttacagggcagaggaaagtgtatcatttagctgtagaaagaccattttttttatgtatgaaaagagtaatgatatgtggtgcacacacacacg

SEQ ID NO: 9853 - DNA, 924 bp, Cannabis sativa
aaccgaagataacaccatagctgctcctgttggggaaataaccactaattaaactcaaatggagattcatgcagaggaacctcactcaaatgttgcctttgaggctgtccaagaagcctctatggaaaccatctcgaaagtcactttctttaggacattcaaaaagtctaaagggaaagggaaggccaaaatttcacctcccgctcaaaaattcaaagactccacctgggagatggaccaaaaggaacatttcttttgttcatatgggatgcttgaaacatacaccactaaagtgggattgctcaatgtatcgggactgatgtggcataggatggttgtcccaaaggagtctgcatttgtgagcacggatgggttcaacgtctggatcaacttctgcaccagaccaaagagtgattctatccaacaacccttgcttctttattactttaactttacttttgtggagatagtttaatcatgccttaaccgcgaggccttatgtactagctttaaagactgttgttttaatctatgtatgtatgttttatttgccatacttgtgcttgctttctctttccactattgtttttttttctaggccactcggtagattacctaaggtttttttaaagttttttgttccaatggccaaaacttgatacccttagactttcctactttgaaataatgtgttgaacctttgaagtatgcaatccgcaaattctttagatattaatccttgttgaagtattttttgtggtgctttacagactttggcaaattaatcttacacagagggattttatgcttattacaggatcacgattggagtcacggagcttaactcccatctacgtgtttctcgattaattgccttaagcagagtaggggagacaaggctggatttgtactagcacttagacc

SEQ ID NO: 9854 - DNA, 670 bp, Cannabis sativa
tccaactcccaaaatcctccataaattctctttcagcccaggattacagttgtttgaaatgagcagacccgattttggcttgctgcagacctggccagaccaggcttcaaatttcttgatacaccgaaccaaagtttccgcttccgaagaattggctctgaggaaaataatggtatcatctgcgaacattaagtgggagatttcaagactattctgagccacctgaatcccatgtaagttccccttctgctgttcttggtacaggatacgagaaaacacctcattacacaacaaaaacaaatagggcgcaagggatcaccttgccttagcccccttcccggataaaacttgcgaagaggtcttccattcaagaggatcgcgtatgaaaccgaagtaacacacaccatgatcagtttgataaaggacgaactaaacccgaacaattggagcactttctccaagaacttccactccattcgatcgtaagccttgttcatgtctatcttcatcgccattagaccctctttccctttcttctttttaataactcccacaatttcttggattagaagtgtcgattcagcaatccactctcccggtaggaaagccaattgggtaggagcaatcaatttgtcaagaatcactcttagttttgcgccaggattcgagc

SEQ ID NO: 9855 - DNA, 1221 bp, Cannabis sativa
ttacatgaatgaaaaataaaattaacgaaatgataaatgagatagggaattagattgctatttgtttgggaagaaattaatatatcaaagcatgaatatcgtacataagagaaaaaaaatgcaataataattgcttgatacaaaaatttggtttatgttcttgttgttcatcatatttagaaagtatatggttgtgtttattcaaattttatttttactaaaccgaattggaaatacaattggcagccataaatacctttttattgatctaaaatgtagctacttctaagagcatcatcagctcatttaaaatagctaatagctaaaaaaaatagctaaagtgcttaaattgaccatttacctcatctcattaagctctcataaatattttttatatatattatttcaagttgtcataaatttcagtcaacacaagatagttatgtgacttatgctcccatcaagcaaggagagcttgaaccccgagcaaaaaagtgtatttttaatctcaactcagataataaatttgtttgaggtggagttgctagacaatggcgatgtttagtttatgcatttttaagttctgttttagtgcgtgtttttagtaattttgtgatttattgtttaaatttatgcttgatatttacttttatttgattctcaagtgaaagatgaagagttctttgtttttggtcagttatgttgttttttaagtcttttcatgatgaaatcgatcaattatcgaatgagagaattttgggattcaaagttatgattagttgcagttcacggtgcttaaaaattcagagttcaaaattttttgcttcaaaagtcgtagcccttagacttttaggaagaaaaaaggaagaaaatgaaaaaaaatcaagaaacttaatgaatgccctaactttgaaggctatgccacggcattcactatttagtgaaaaaagggtcgtttttggaaacaacaggaaagtcgcgacattagcgagagtcgagaaactttcttatttgtggtctataaaagtccttggatctaggttttcaatgaattcaaacttatagactaatttagagcatagaaaaacagctagaagcaaaagacattattggaggactccaactcatgatctttttcatttatctttcacccaaaactcctaaacccaaagctcagtcaattcactcgaagttcaaccctaaccatgaccatgccaccta

SEQ ID NO: 9856 - DNA, 764 bp, Cannabis sativa
tggacgattacgactcccagccactgatgacgggatggaggacggtgggcactgtgaggacagatggaggtcagcaattcaggtacatagaggatgtaatgtaacttcaccatccactcgctggtctgtggcagagagagaagaatcacctttagaaagtgtatcttattcaagagaaacttatcttctcactttgaggacaagtcgttaatggcgaacgtaggaaaatcaatatcagattcacttaatgtttggctaacataggaaaagtaatacccgagcaggactggatatgaactccttcttttgctcttccctcttcatctgagggcactccctcttaaagtgtcccatcttatcacactggaagcatgaattcttgtttcattatcccaggtgatgtttattacaacaaggacattctgggtacgtaaacctaacttgacaaccaccactccgaccttagttcccgtagaacctcttgttctatctagaactgctcgttgtgaaaggatcttcctcttagaatcaaaaattgaatcactactactcctacccaaactagaaggaggaggagtagtgactccattaaaacactaagtcccttagggctcatgcaaaaactgtactgcaccttcggctcggagagccttctataccatcagtgcatatggtagcatcatcggttgtaattgtcagatcatgatgaatcttggcattaaaccaaattgccactagatctatcctacgaggaacaaccagtt

SEQ ID NO: 9857 - DNA, 738 bp, Cannabis sativa
atgtcaacctaggcgctgggtccatgttttaacccatagaagatctaatttgctccctgagatcattaatatcttcgttatttcggaaaaactttttggaaaaaaaatgcctaaaacactttttggaaaaattgattggaaatagcccaggttgacaaaatgtcaacctcggcgctgggtccagctttttgcccctaaatggttctgaatgattccctgaaatactcgtatctcaattatttgtgaaaacggagaatatgatcgaaagacttcttggagaaactacttggaaatggcccatattgacaaaatgtcaacctgggtgcttggtcccaattttagctcttggatgactctatttgttccctgaaagcaccaaaatcttaattattaacgaaaacggagaatatcactacaaaaaatattacttttagtcacaataaaaagtgtgactaaaagtaaaatagttgagactaattataaatcagtattcctattttgtgactaaaaggtccttaactaaagttattcatcacaaaaatcacaatttgttatgactaaatgtatttttagtcacaatatttattatgactaaaattaaattagtgacaacttgcatctaaatactatgttttagtcacaactaatttttagttgtgactaaaagtcacatttagtcacaaaaaatttatatagtgactaagaaattgttgttaaaggtagctattttttgtagtg

SEQ ID NO: 9858 - DNA, 534 bp, Cannabis sativa
aaacttacaaacataaaatttgcagtacttgtgccttaattatttctaatatataatataagaaatttttggaataaacttttcttatttttttaagggtcgctgtggtagattttttatctgttttgactagaactttttaatctaatttttttttatgattgcatatcttatagctatttaatgtcacttgtaaaatttttagaaaattccaaataatttacaatacaaaaaataaaatttatacaatcacttaccatatatataagaaaaacagtagcgagtgcagcaaaatatgtaaattttattttcgcattgtaaactactcgaaattttctaaaaatttacaagtggtcctaaataactataacgcttacgatcattaaaaaataaactaaaatgctcttttgtatgcctatttagataaaatatctaccgaaacactccttgaaggagtgcactatcgacttaccctataacataatctccaataaatatactaaaatatggtacttttttttaattctcaatttg

SEQ ID NO: 9859 - DNA, 721 bp, Cannabis sativa
gagtaggctattaccataattacgaggttaaacctctataaatctctgtgctcttatttgcttaacgatgtataattattattcattattatctattattctcaccgctttaattgacttagcgtcgttggctaaaagcaatgtcaaaattttggtgcatttattgagagcaaaaagaacattgatcattgctttgatctttaccaaagatggttgtaactactagaaggtcccaaaccattgaaacaacatgattcaatggctacgaatcctaatgtgcaaactcctgttaataggagcgtcccaatggtggcagatcctgacccgatcatccgtctacatccatgagttccatcatcagcaggatagggaatgacaacccctttggctaggtttaatctaggcacacatgaaatcggaaccatcaatactcataacagaaagactgggctgggtattgaagatccatctattggagaacctcgaatggtgatcggtgatgatactgagtttcaaaacctacgagatgccttagggaaaatgcaagaacataccaacactattcaccatgattaggaagatacccgagcaactgcaaatctagcattcgaataccaaaaatgccaattccaagagtggatgaatcaacagatgaagattatgagagcccaacaagcagcgattaataatcgctccaagtagacaatcgtgctaattcaac

SEQ ID NO: 9860 - DNA, 605 bp, Cannabis sativa
tactgttgaaattaccgtcgtgggatgaacatcacccactaagtcattttcgtcaactcactactttttgtgaggatatttttagttgactctgccctttagaagcattttccagcgaggtcgatgcttgtttgagctaacagtttgtacatctataatgtcaagaggatcattttaatatatgttatgtcaagatccattactattcctgaacactatttttggctaccaaaaattgccgttgtgcatggctgaggtgagatttttgagtctttaaatgatattgtgttgtatattgttggactgagtttgaagaatatattacaatgatgatgattatttactcttttgaagagtgtagaacaaagtggtttttagagtgattgagcttttggagcttaagaattgggggcttaggatcgagtgtctcaattggagaaagttttatgatcctaaggaggtagtattggacttgatatttatatgtgctgaataacattagacatatttcaatttttatgatttataaaaatgtttgaaaacaatttaaaatttaatctatatatttttttggtttgttctgggacaatgagtactaaatatat

SEQ ID NO: 9861 - DNA, 609 bp, Cannabis sativa
ttatatatttatatataaattaattaaaatattaattagattataaattttacattaaattttacaattgtgtgtggtggaatataatgttaaaattatatacaaagtttttttttttttttggttaaatttaacacaatttttatttctctcgtcagagattgatctaacataaataaagagaaagaaaattgttgcaatttttctaagttttgttagtttttgccattaatatattttcaaaataaaaaatttaatataaaaaatatttttaagaaataattacataagacactattttttgtaaaatatttatatttttacgtttaaagaatatttttttttatatttttacgattttcgaaaaaataacacgaaaataacataaaatcaaaaagaaaactacataaaaataacattaaaataacatacagataacaaaaaataaacaataaattaacaagattacaacataaaaataccgtattttctgtaaataaaattataaaaatatttaaaatttcgtaaaagcgtatttttataattttttttttttaatgcttttgtgaataatccctaattttaatccccaaattaaaaaaaaaaaaa

SEQ ID NO: 9862 - DNA, 898 bp, Cannabis sativa
tagtgctcaacaaagtgtgcttaaattaatttggtaatgttaaaagttatttttaatttgacacaaaatatataatattgtgtcaaatttgacaataataaatatttatattttttttggtagcaaataaatatttatattttatttagtattatttactataatattattaattatttattatgatttattaatttttactaaagattatatttcttatttattattttactataatttaaataataataattttgaatattttcaataaaatattaaatgattatcaatataatcaattattttttaattattttatattaaagtaaatttagtacaaattttaaatcttgtatttgagatagtcttaaactatctgtggtcaaaaaatgtgctaaatttaacaaaaaaaaataataataataatcattaatgataatatcaataaattaaatatttatatatttttaaaaatagtagcaatatttttttgaaaattttgtttggtgagctgggaggaagagaaattaattatcaattacctttgtttggtattaaaatgaaagttggaaagatggaaataatatagtgctaataaacaatacaaattaatgttctttttgtttccttcctttctcttatgcctataagaggagggatcaaaaaatgtgggccctgagtggttgtgtcaatccggctcttgatgaggcttttggagtgaatgaggtcttaagttggataaaggagtttagagtttctcaagtcaacgtcgaaacggatagtttcacaatagttcaagttttccgtagctcagtaaatacaaacttttctttccgctgctgcattgctaaatgcaagagaataattgtaaatttgaataatatttgtttacgtttta

SEQ ID NO: 9863 - DNA, 923 bp, Cannabis sativa
tttaagttcgccagggttccgaagccttgagagggtcggccatggttccatgatgcaaccaacaaccgtccagggtttctaaacccaggcatgaacaggctagcttcctagggttaaaccctagatttggccaactcccatgattaaaacctaggaccggccagatctcaaacaagacctctagggctggctagggttagtgttgaattgtaatgtgtgttgtttattcaaaacttaaatgtgttctttgtgctctttatgacttaaagagtcaagaatcacaacgaaggaaaaaataaaatattttccatcaagaaatgatacactatgcattgtaaaactatcatgcagatcaaaataccaaaaagattataatctaacgtgagattcaaaaactttctaaaagcttaaaaagcttgaaacttatcaatggtaggttcaaagaagatatgtaaaagaaagaagatgaggcatatatatagtgagaagatcaaatatctaaaagcatgccttgtaaaaagtcaacacttggctgaccaggctgctccacaaagcctactacaagcaagatgatagttggaaagtccctattcgaccagatatttaaacaaggacttggtagaaaatattatcccaaattttttccacctgacgtggcatgtcatgtaagccaaaactgagaacacgtggaatagaaccttgccaatagcaggacaaagtctccttccaaggtatggcaaaactgtaaagcagcaaatttaaggagttaagcaagccgtcaaggagctgtatcaccatgtcttgacatccaaggggagtacattggtcggccaagatgagcttgtatggtcagccagattttaagctcatggcggccagccaaaaggtgactttcagaccaaggaagggttcattcgaccaag

SEQ ID NO: 9864 - DNA, 1248 bp, Cannabis sativa
tttattgttggttttattgtttcaaataccgagtttttctttaattgtttcaagtacgtgcaccgatataaaacatcaactcttaaccattttacattttatcagttttttttttttttttttttctattaatctttagttgtttctttaatatacacgtctcttgttttctttaaattttacacacacactcttaggaaacctatgaatttattttatctcagtcaactatttttattttattttcttttttccttttgtctttttgtttataatatttaaagcaaatttttttcttttttaaactttaaaaataatttttttaattacatcggtaattatttagacttaaaagttacgcaatcgcaatctactctttaatgtgatcattttaatatgtgtgaactatatatttttttaccttaaccggagaagatgattgaaaacataagtaacttcttagtttcttttttatctaattaaactttataaatattaaaaagaaaaaatattaactaaaaaattatcaaattttaaatttcaacaaaagttaataaattaattaatttcataagttactaagaaattattttatcatttcaatatttaaaaattataaaaatgtaaaataatttatttctaaaataatttataaagatatcaaatagtatcttaaatatcataaaatacattttaaaataataaataaatatcattatattaattttgataataaacttaaaggtaacattttttatatttataatattgtttaatggtatttatttatatttgattataattattaatttctttaatatatttacaattaacataaaaaattactaaaataaataaggtaacttaaacaagtaaccaacatcatggttactaaaatgtattttttttttctttttaaattttaattaattatctcttcataaagtataaaataaactaaaaagttgctttttattttagttatcttttctagtgatagtaaaaaaatatatacttctcacatgttaaaatgatcacattaaaaagtagaccacaatagtatcattttcgaaccaaaataatcagtagtgtaattcgaaaatatttttaaaataatagaattgattgagaaagaaagagaaaaaaattatagaaagttagaaatttatatattttgttcacacgaggaaagagaaaaaaaaacactggcctggacggacgggatgatcaagaaatagaataagagat

SEQ ID NO: 9865 - DNA, 881 bp, Cannabis sativa
cctacatcagccttattggagaaaaaaaaaatacttcttgaacttacatttgtttaaattctatgaccaattaaaataaacaagaaagacagtaaaattctcattttattttattttatttttagtaacatccatataccatcagatatgtcatctttatttatttattttaaaaagccttatagatttttagcttaattctattttcaagcttttcaacctacattaccttgcttgtgaaaaatgtaaccaagtgcaatatacacaaacaataacttatttagaacagctgaatgaatatcgattcgatagacttataaaggcatagtaagaaaaagaagaagagtcgcttaaatcaagataagaattgcaagtaggctccagacactgtgtaactcaggaaatgagaacagtcagccaaacatggttcaactcatatttaaggcatatgtgtgttagcgcgcaaagcaaaataaacaacttggaatactgttttcaaacacaaccctctaaactcaatacaatcgacaaaaaggggatcaaaattaaagagaagattttcggttcacttagctaaaagaacctaccgcatttttttttattcaggaaaaacctacaaagcacatgtggagttgatcatccacagaaaactaaagacaacaactttctgttatgacagttaagttagtctacgcctaagagaaagttagttagtttgactttttttttttttgcctatatagctctgttttttaattgtgcaagtagttcaacttgagaattttaagtgttgagaaagatttctgttcgagttgtaataaaaaggcatagtgagctgagagctttgtaaccaagatagatttctgttcgagttgtaataa

SEQ ID NO: 9866 - DNA, 863 bp, Cannabis sativa
aaatataccccttattctttgcctggggaatttaacaaactatagcagctcggatatgatactgctgtgaagatggacatagggtattggtatttttatatttgaatacacagcaagtgctatgtggcagcctagaataacatatttcctgcagtaggcgtgtgctgcagttttcaactttctgctagaagaaatacattttcatttggtgctgaaattttaagcagcagattttttgttctggtgtaagagcattggtaagaaggagatgcgtatatatgtgttttttttttcttattttatgacaattcaaaaaataatacactccaatcttgctgtaaaaattgtgccaaatgtgggtagaatgcttggcgaagtaagctttgatgtatcatttgtttatgccagtgccattggatttaagaaagctaaatattcttattgctatgttgcaattttatttaagggttgctacatgtgcgtgattgaagctcagtattactttatttgaaagcactttcacagattcaagaatgaagagtaatgctgaaatttatgctccagatatctaacattatacttttttcttttttgaatagatatctcccattatactaaaccacacaatcatgttaaacattatttttcatattactcttacctaaactcagttaaacagaacaagttgacaaggggagaagagagaaggcaaaattgtgtattctagaattttatgttgcttttctgtgtgcccaagaaaaatgttaaacgaagacttaccatatgagatgagtcggtttcttttaatgaaataagactacacgatcacagcaactcttataataaagcatattaaggatggt

SEQ ID NO: 9867 - DNA, 772 bp, Cannabis sativa
gtttttatctcatagagtgaacctaatgagaaaaattacctttttttaaattaatttaagactttattaattaaaaaaaattgtttaatcctgttctctcaatatgacatactaaggagtgctaattacttttttttttaatttttttttatagcagtatgtattataattactgtaaaatttttaaaaatttataatagtttatggtactgaaaacagaatttttatattttagtttatcatttgtgtttaaaattgtgtttaaaagactttaaacttatttctgatactgaaaattattcgaaattttttaaaaatttataaaaataatgttgcaactataacaaatattactaaaaaaaaaatattttaacatgtattattaactacgaacgttgacaaaaattacaataggagcttgatgataatattcctctcatgctatttaggctttaattactgttattatttcttctaagcttatcaaatttagaataaaaaccagtgtataataaacaagcttctattctacccaaaaacccagtaagagaaccaacaacagcaaaaactttgactagcaattatgaagtttgataacaaaaaagtgaatgtatatatagaagtaaaatagagaacaaagacaatgataaacatactaatttaatattacaataacaggactataattccaaaccaaataagcttaaacacacatattactattatacataaaataaaatgaaaggtgattaatactattaattattattat

SEQ ID NO: 9868 - DNA, 1326 bp, Cannabis sativa
gattatattaattaatttttgatcaggttaattttttacctggatggctttatgatcccagaaacatttctgagtattgtaaggtttgttgtcttagccaatgtgatgccacacaaaccaagagctgattcagcaatatttcttgaagcatttagaagagtgggaagggctctatggccaacataacaatttgcttctattcttaattgttcaaatcgtacttcaacctttggaatttgaatttgaaccctgcggcatgcagagtactgcaatgataaatattacaacaactacaataataggacccatcttaattaattattgacataattatttggaactagaaaaatgcctgtaattaataaaatggtgtacctttcaatgcgttgtctcaattttttcaagaatctctcattatcttcatcgaagaccttgaaagtggtgtccatgaacttttgtctgtcgtttggattaagcttccggacatcaacttctttctggactacgttgttggtcgcatgatgaagatcattattatcgttttggacaacagaagccaatatacttgttctcaagcgattataggtgggaagcttttcaatggctgcccatcttagagcttcttcgtcttcattatcttgtcttcttgaccccgaagaagagttttgaaacaagttctcaatatccatatctatcttcctcttccttccaaaaatgatattactctgctttctttgaaactctgtttttctttaatgccttataaatattgtcgacaccaatccataagtaagattttacacataatatacatacattaatttgttttatacattttgaggttaattttaacacatatacagatatatctgtagttatgaacattttgagacgtttatgatgaggtagagtgataaacttaatgtacatgagagaagaatacgtacgggacatgcattttaattacttccttcaataataatcaatccactttcaccgtcgaactatttttaattgagagagcctttgcatgtataagtggttgaacatctgcaagctagtcgaacaggtaaaaatggctattatccgagctgtgttgctctgcctctgatcagtgccgatatttttctccacagaaatcgtgatttcaaatgtattatatcccaaagaataggtatacatacattacgaggaaaagctcgttaaagatcttcacttttttcgcacttttttcactataaatatggtcttataggtttaaaaaaaaagacaaaataaataaataaataaaatgtaactcaaatctataattattgaataagatta

SEQ ID NO: 9869 - DNA, 726 bp, Cannabis sativa
ccgagtgacaagatatttcaataaaaaatgaagaaaaggctttttaacgttggtgactttgtgctaaggcgagtgtttgcaaatacgagagatgcatctgctggagtatataacccaaattgggaagggctttatgtaatagaagcaatagtgggaaccaggatttataaattagatcggcttaacggctcgctaataaagaaccactggaacgtggagcatttacgaccctactaccagtaaaataatgttgtaatttatctttctaatgtaatattttgaacttcatgtattaataaagttgaattattttcaagtaattacaaatttttattctttaaaattacttgaggggcatatatatgtgtatgaggaactgaaaactatcttgaaatacatagtatattgcaaaccctccagtttaatttttttaacagtagcagttgtagatgagattcaactcataaaagcaacgataagctacatacgaggctgaatgtttaacagctcgcattttataggaatgtattaaaacgaggcaccggatgccttaaaaaaaatacttaacctaatgtatgaataggaggcttagccattcaacgagcaattaaaaatatacaaaacaatctccaaggtaaattagtaaaagtatgttcaagtttccttaaaacagatcataactgtttacgcgaggcataattaataactgctcgcaaataaaaagca

SEQ ID NO: 9870 - DNA, 543 bp, Cannabis sativa
tttaagttgttaaatagttggtttacaataaattttacttgcaatccttgtggagacgatcttacttatcattatattacttgtgtgagtgtgtatacttgcgtatatcaattttcacaataagtttttagtaccgttgccaagggttgagataaaagttgtttattatcaactatttcacaattttttctgttttgagattctaaacttgtttgtttgggttgtgtgtttttaggattactcttcatgaatgagaaagaagaccttgaacttgctcatattgatcccaaaattgagcatatttttagacaaataagaaagaaataaagggctaaaaaacactgtaatatggtcgatgagcttggacaggttgggggtgcccataatattgctaatcccattactttgggacatgatagaataagagcaatatgtgactatgttgcccctatgttcaacgggctcaatccaggtactattagactcgaaattccagcatctaaatttgagcttaagcctgtcatattccaaatgctccaagcc

SEQ ID NO: 9871 - DNA, 501 bp, Cannabis sativa
tagtgaggtgtagaagattcatcctggagaattgaatagcactcaaaatctttaagatatgatggtggtttagtgactctgttggatcgtctagatggttttggatgaggtgatgatggtgtttctgaagaaacttcagtggcagattgtatgttgtcattgttgatgttttctggtgtgagtgtattgtcatcattgctgtctggtgtggaattatcattgtgaacctgttgaggcaaagagagactattattgttgtctgtggggtaattacatacaggtatattgtgaatgttaacacttgggagaaccacttgagagaaaggatcaatattagaaaaatcagtgttaagtttatgaaatggaaaaactttctcatgaaaaacaacattacgagaaataaaagactgattactatttatatcatacaatttacaccctttaattccttgagggtaacccatgaatacacaagtgcgagcacgtggagaaaacttagtc

SEQ ID NO: 9872 - DNA, 1064 bp, Cannabis sativa
cccaaatctcactcttatttctctgtatgtgtgtgtgtgtgattgttagactttgcatttaggtttctaatctttgaggaattagtttgggtttattgttttggattttacatctttgttaaactttttatttatgggattttcttcacatgttgattgaagttttgatacattaaggatcctattgaagttgaaaaaaaaaaataggattaggatttctcattctaatttaaggaaggtacttgtatttttttctctttcaagttattgactaagacagtggattaggagttcgtaaaggcaatctgattcatagaacactgatggtggtggaggcttaagagtttcataatttttttttattttttttttctagtttttaaattttcatactaagtggattttaatctttttttctgcttggttaactaggttcataatgtgtatgtctattgtttctgttggaaaaaaaatctttttaaattttgttcttagcaatagaaatcaatgtataaattaccaattttttatttctagctatgttgattaatgaaaagtaatattattttgttctgtaaaagtattattataaatatttttgttaattacttgtaaaatattaataaataacattatcaatatatttttttagaaaataaaatggaaatataatatacacagtgacgtgtaatttgggttactattatatttagagtttgacatggtatgactctaaaatgatatagtgatgctcaatgaggaattctaaaagggtttagtgacctgtagtgaagggtcactatatattacattttcaattacccacaatagtgactcgaagtaaagagtcactaaaaatcattagagtatctcaagatggctcattgaaagcccatttttgtagtactatgccttgcatacaataatgattttacaaccctttttcaaatcatagtctagggtatttataagttctattggtctaagatacattcatgatccctagggaacaaactggatgctttggtcttgtagggtataggaggtggtctttgtaccgttgc

SEQ ID NO: 9873 - DNA, 511 bp, Cannabis sativa
tcattaaagccaaacatacaaggaaacaaaagattaaattttctttaataaaacatgatatgaccaggccaacctatagccaatctcagttgcagtaagaaccagaaacctggtttcaagactcttcttcaacttcagtctaggctaaaattggctggagtaattcaaacttctattacagaacctaacatagtccaaaatctggtagtttatcatctatgaaaaggcaccagtctactacataccttcacaccttcaacttgtagtattgtttgtttgacaggatccaagtgcttcgatgggatcgccgcatccactagttccaagacgctaaaaacatattaaacaaaaatatgaaataagaaaatacaaataagcacattaaaaatactgtaaccttgctatcactagtgtgatggacccaaaagaaaatgtttcacaaagcattgcaagagtgtacaaaaggtggagccgtggaaattaagacattggggactaaatatacacctct

SEQ ID NO: 9874 - DNA, 1208 bp, Cannabis sativa
aaatgtttagattgaagaagaaggttctatgcatataaaataaaaatagatatgattaaatcagagaagatcaagtgtagatgctccacctggttagtttacaacctcaatttggaaaatgtatgctatgccgtgtgaccgtgtctgagtctcagatcccaatctgatttgactcttctgatacgtgtcatgctatcatgccacgtgttatcaattttctaatcaattgataattatggttttattttgtttttgttaatttgaggcaattttgtacatcattatttattactcttctcttctcttttctttccttttctttatcataaaaaatgataataaaaaaaatctcatgtttctctttttatttataatttaaatggaaaaaatataatgtttctacaaatttatttaagtgtttctgtatatttcgttaaatttcatgaaatatttgctatttctaaataaaaaaatactttataattatattgagaaattattgtaaataatatatcttgaggattttataaaaaggataataagaaagtgatagagatatctttcacttttatttttgactgacatgtttactaataagtaatgggaataatagtaaggtaattatttttttacatttatttacttatattattaaaattaagaaaaggagtacttgattaaataaaggattaaagaaagagaatacttttcctatcaattttgtattgaggataataaattttatttatttttattttactttttaatattaaatatagaataacaattttattttttaaaatatgtcttataaaataatactatatattatagtttaactcaaaaggataatttattcaatttaagtattttgataaggtttttggataaagtaaatattatacattactattattttatttcaaaaaaaaaaattagtaagtaatatattacaaatattgattttaattatatcttatttatttatttatatttttctattaatttattcggtttgtacaataaagataccaccacaatatcatctttcttaggcttgggccttagagtatgtttttgcttaaaagactataatttgggaactcctattagaaaatatcacacaaatcccgaaccccaaaatacttgggccagtttaacggtgttgggctaaactttccatcaaaagtgtactggtccaacccatc

SEQ ID NO: 9875 - DNA, 1396 bp, Cannabis sativa
ccaaagcttgctgcaaatgaggcaactgcaaagggcgcaaagctcgctcttacgaaggagaaagaaaagaaccgacattgttattggagctactaatgacaaatccatgctctttcgacctccaaccaccatgatgatgcagatgtcacctctttatggtgtgtcgagctatacgactaatataatttatcatttttttattctattttatgaggaatagatatataaataaaagtattattataattataaaaaaaaaaaattaatgtcttttaaagttttcgagttataaattataaattatgctattttttaatcagaacaacaaagattatgctaattttgtattatttatttggcattagccattaggtatagcgagaaaaatcatctataatagttaaaaatatcgataacttcaacactaataatatgaaaaggttcccaaatatcaagatgtattaaattaaaaaaaaaaaaaaaacaacagtagcaaaattattgttagaaacaaagggagattgcttttgtttagcaaaatgacatatagtgcacatataatctagtggtttctcacaaaattgcaaatgtttatttaagatagtagtaatgttcatagagggatgaccaaggcaaagatgtcaggggtccttcaaagtacatgtattgtttgaaaaaataaaaatattagatgtgagaaaatgtttgcaaaacagttgtccaatttttttagcagtctcaatcatgaaagtaagggaggaattctgaatcgaacattgagtagaagtaaatgtgagtttattaggacaatgttcaagataagcattaatagaaaataagttaaactggaattatggaatgtataacacatcagttaaagttagtttatcagataatttcacgattccatgtttgttgatctgtatctgatgaccattaggtaaagtaactaagttagcaaaaggatttttattgagagatgtaaaacaatgaagagaatgacatatatggtgtgtggctccactatctacaatccagggaaaaagtaaaaaaggattatcattaccaaagacgttagaaaccacaggaagactgtcattggtggaaagagcgcctcaaatttgttgattgaggagggaaatcagttgctggctgagttgtagctgggaagaaccggtgatggaagcctttggactagtagaaacttgattgtccgagtagtagatttatttttcctcttgtcaccatatcctagtggaaaaccatgaatgaagtagcacttctcaaccaggtgacctggtttaagacagttggaataagttggtgggagcttcttactccaagaaggttgattggggtttggtttagcaggggcaacaacaataatactggtgtt

SEQ ID NO: 9876 - DNA, 928 bp, Cannabis sativa
aaacacaaaaatggactaactaatgtcaaaatgtcactgacatccctaacacatttttccactcacttagtgtccaggttgacatcacatgtcaacttaggcgttgggccttggacaacctttaaaacaatggacataactccctcagtattgatccgattaaatcgattcaacttttttttttgaagctatttcaatgctacttcaattgcagttctaatgctattgatcccaaattttacactaagagagttacaaatttaagctacaacttatctggagcgggtcccaccgtcgcgactcgaactctaaaatttgaagatcaacctcaaaagttaattttcacaattagatcatcatctatagtaaaaaatagcctaatcctattttttcgtactttttggattattttattaccatttaataggacctccttcacctataaaaggagagctcctctagctcatttgtaatatttagaaaagtagccataaggtcagagcatctctctctagtttctctctgtaaaagttagagcatccaaacttagctatttttctataatccatctcatgagaataaaaactcaaagtagacatagatccattactgtcgcaatacaggaagtgaacaactataaattattgtgtctctctctatttatacttaacatatatctcattctcatccatctagcaagcgggtgtggcttataagtctctatctagatttttgattcaactaagatcctaggaaagtattccttattgtatgtagagtaataaatgggaaattaggtcttgctttcggatacacgctgagaacctcttcaagttacatagatttgacactcgtccgtatgctgaatatgattgacagaaccttcatctggaaagatgtgttgttattctcccagaaggctagataa

SEQ ID NO: 9877 - DNA, 618 bp, Cannabis sativa
gccgtttccggtcagcctcaccggtactccccattaaaaccctagaaaccgacccaaaccagcttcctctcacatcacccgtaccacccccaagctttctccgctcctcccaaactgaaaaccctaaaccaatcaattccaatatatgcacagacaaaaaaaaatgaaaaaccctgattgagtgaccaaagtaccaaaccctagaaacggaatcaatcaaatcgttgaaaactcccgactcaaaaatccgaaagcgactagttattgctagtgtgcttcaggagcaaattcagaaaccctaaatcaaagctggcactctctcctagtgattagagattctatgaaaatcgcagtcatcttcatctaactgatgccgcttggtcgctgtgaggaggagaaggaaaaagaaaaacaagttggtaattattatttgatattttgttatatttgttttttatttttgcgcatggaatttggggaaggttataagggtattttgggtattaagaaagacggtgtgtttttctgttcgaggaatcttaaggtgtgtaatcatttactactagtatcacccaagggggaacaaaaatgggtgaatgctaccgtttgattggtcag

SEQ ID NO: 9878 - DNA, 950 bp, Cannabis sativa
ggatgggactgttgttcccaaatatggttcttggctcaaggatgaggatccagctcccaatggattccgagcttttcatatgtatgctgatggaagtcctgattctgtagatgtggaactaccgaatagtgaacgagcaaatgttcttggcgcacatggggtggatgctcaagggccggcagaggtggtctctcaaaattcttctccggcagcggctgaggcaactaacggtatgccgatgatggtggaacgaagggagagtggttaccagcagatccgggaatctgggatagtggggagcttaaatcgggggagtggagttgatgcacgatgtgaggtgttacccactgggcctaatgttgggcctgagttggactcttccacctctatgatgggccagtttaatgatggggttagtgtaatagtgaatgagacaagtgggccttctctcgttgggttgggcctcccacatgatacggattgccttgggtcttctcctttgctgggatcgactcaaaagacgggacctgatgcacctggtttgggtgattgtcaaactggagaggcagatgtaaagaagcaaaagtgtggtacacaggagggcagtcagcgaattggaaaggaagatggtttccgaagtgtgcgattggaagaaaaggggaaggagatcgtgtatgaactccaggaagcaagtgtggggggttctttcgtgcagggaatgggagtacaggcttcggggtcggtcgggattagtcaaagaaggtgattgtctattaagaacaaggctcgggcgatggggaagggcaaggttaccactgcttcttatgatttgtgtgcagatgctgggggaagtcgtagtgggttcggtgggggcaaagagattttggatgaaagcattattggtgaggtaggtatttcttctgctgttgatttaccttctcatgtgttca

SEQ ID NO: 9879 - DNA, 921 bp, Cannabis sativa
acgttccaaagtaagattttcatggctgtaggcgatcctgcatagcagagtgcgcctcttcttcattcgaaccaactttcgaatcccccttgtgagaaacttcagttggcataccctctaaccggcccttcttattcttcgcatctttcttgacagccacccttcgccctttgctcctttggaactatcttctagctaggaccaaagaaaaaagatggccctccttccattccatttgcctccttggaataactaatcggtacttcaaaaagattcaaagtcccagagatgtccttgggagggttcactgttttttggagttttgctacacccgtcccatcctagtcctccactattcttctttttcctctaccaccctcatcttgattattcaagtgtcccaagcttcttatctcagcttcattttggatccccatttcagttacagccctctccttctcctctatgctacttctagcctattccttctccacttgggtctcttcccgaccaatcatctccttaccattgttgtcgacaagtagtgcaaatgaattagaagttttcagcccctgtttcggttgaattgcccctgcttttccttttcctccatttgaatttccttcctgagatccttccatccctcatgaaattcatccctaatttcattatccactttcagccatgtaccataggccttagctagttctccatcagcccatgtaatttctttaaactccgaagagcagtctttttgactgtgccttattcgcccacagcagaagcacatgaatgagagctcatcgtatttgaaggctacccacacctttaaacccccacaaggtaacagataaccaggccaaacaggtttggtaatagacatccaaatctaaaatctgtagaatccgttcatcaccattt

SEQ ID NO: 9880 - DNA, 1243 bp, Cannabis sativa
acatttgactggtgaccgatgagagtagggatagatggttcctctaaggtctgaagactactcaggcctacctagcgaatatgagatgcacataatgctatggttatgacatggattgtgaactatggaggaaaatgtcaaagagtcttctctgtatttttccactgcaaaataaatatggggtggtttgactttagcttctttttctttatttggacagttctgctcaacttcttgatgtttgacatagatgggagaactaaaacaaagagaacgtggtgtcactgaatatttcaatgccctggtagattgtggcagtaggatcaaccggttcgttcgttatagagtagtgctgaaaaatataagaaaaaaggttgaaagagatataagattttgtttggcatgtgttttgattcagatcttgatgaagttaggggttgatttgtaacagctcgaagagaggaaagccatatacaagctatgttgggggaacgcaaatcatcactatgagaggcatctgctctagttgcatctggccaggaacctcctaagaaccatagaaggaacaatatgtagtatgatttcttcttcttttttttttttaaacaaatcacaccagagattgatgttggaagctatatggtaaaccttctcaattggaaagataacaagctggtagccgtgagtcatctggattacacagattcagactgagaactcaaatccaccaagctgaaggagagtacttatttcggaggcagtacacaatattttctcaccaagaaacaataaacacaactctacaagctgctcacacctctgttgatagcgacaaacacttctttattggcacaacaaggtaacttctttcagcctttaatagttgtagtggtactttattttcttcctacagccctagttcaagacacttttaacgttaacataacaattggatcatttcaatagtagcatgaactggaacaattttttgtttacatgttccaaatctgacatacaatcttctctctattagtaaaactaacgagacttaaattgtgtactgctcatttctttgaatcttcttgtgtgtttcaggacctgacttaaagaaaatatgagcctaattactactttgataaagaagttacttcgaatcaacaagctcaaattgtgagttgtgagtttatttcaagggaacaaaaaatagtagtggcatcctaagactaggtccccaagtatttca

SEQ ID NO: 9881 - DNA, 673 bp, Cannabis sativa
taatttttcaatttcatcacaagttcccaataggagaaggaacacactcatggcataggtgggaagagattggacaactattttcaaaagtatttctttaccagcaccagataataactttccagtccaactgttgattctgttgatcactttgttcttcaagaagcctagaatagattttttgttccttccaatgatatttggcaaacccaagtaaagactgttgtcggagggttcgttcatactaaggattgagcttagatggtcacggaggctttgttgaacatttgaactgaaaaagatggaagactttgtaaggttgacttgttgcctagaggcagtttcaaaatgacgaagaagagacacaacactgcccgctgcaccagcatttccttggcaaaaaagatagctgtcatcaacaaacagcatatgagtgatggtgggggcaccgttggcaacacgacagccttgcaacaatctctcctattcaaacttggaaatgagagcagataacccttcagcacagataataaataagtatgtggataagggatcactttgtcttatacctcgggtaggaagaataggtcccataacatggtcactatggataatagaatgacgaacactggtcacacaagtcattattagatttacccatcgaagactgaac

SEQ ID NO: 9882 - DNA, 678 bp, Cannabis sativa
aacccctaaataggaaaaaaaaaatacttgttagtcataaacaattagcgtgagaaaacaacttaaacataactgatgtgttaaaaatacacacttaaaaagaagctcaaaattgaattgattggatttcatttctgtatgtattttggattaattaatccaaccatctagaatttgactttatatatatataaatatatatatttttctgctcagtattaattatctgtaaatgtcccacctcactcagtctttcttcttcatattttattttttatctctataacatggagtccaatcttaatatggactaagctttatcttacaaaagacagttaaaatcgttacgagttggggtgattaaatatatgatttgaaagcagagaaaacaaagcaaatgaaggccctttttattccaatagcaacttggataaaaaaataataaaataaattcacataactgggttctcccacaagagaaaaaaaaaagcaaaaaccttctcaagaaacaaatacaaacagagccaaaaaaaaaaaagaaatactgaagttactagtaccttcatgataccaactatggttccactataacgagggaagttccgaataccggtgacaacgttggcagtattgaagaaggactgggcatgggctgccaggagcatgaaaaggcacatg

SEQ ID NO: 9883 - DNA, 782 bp, Cannabis sativa
aacacttcttatggcgtgccgtcttgggttgtctcccaaccaaggtacagttaaacactaagcacgttaacgttgatcttatgtgcccatttcgtaatatggctgcggagcctatattccacattcttattgattgtggttttgcacgtacatgttagaatatctcaagtgttaatatggctggtatgggagttagggaatttaaaagctggttttttgagttgtttaagtcccaaccaactgctatggttgctgatgcagcaatgattagttgaaaaatatggtcagttcgaaatgacttgttatggagtaataaaatttgtttagcttttgaagttatgcggtcggctagaatcgttcttgatcaatggattaatgcttaatcacaaaagaaaagtgcattgttagtagatgatattaacaatgttattgagtgttggagaaaaccaatggtgaatacggtcaagattaatgtcgatggtgctatctttcaagaagagaataagtttggttatgggtgtgttgctcgtgactctaatggccacttaatcaaagcaatttctggcagccgatttggggcggtccaacctgaaattgcggagataattggagtcaaagaggcattgagttggatcaaaagaggcaatggtttaatgtggtaattaaaaatgatgctttggtggtggttcaagccatcaaaagtaatattcaaatgccctctcaatttagattacttgcatatgattgtcgagttttactgtcttctttgatgaatgtgtctt

SEQ ID NO: 9884 - DNA, 672 bp, Cannabis sativa
aacacctagaatgtgcgtgattcaagcaacttgacagtacataatcctaggttggaggaattcgccattgcacctcaagaagggagagtgtcctatagctcgcatatcatgtggatggcccagttctccctctccactcgtatttcattgacatactgtcttactttgggattgtgcatctttagcttcctccaattgcttacgtcttgttgacaagtttttccattgcattcaagggggtacatgggtgtttcccttcagctgtagaatttcattcagtttacaacatccatcattccaccaagtttctcgggacttatcatttttcaaagatcccttctcccaagattcaaggtgtcgctaggatgccttctaaggttcacttcaagcatttcaagtttttcatggtcacaaacatgccaacctccgtttggtttgagtttaaggttttaggtactcatattgctttgtttttatgaatctctcacattttacttcatttgacctagtctttcactttttttagcaaccatggaagtcttgtgcttagtatcgattctttaagcaccttgcagaagtattttgatctttctaaagatgcaagggctgcttggaatctactcatgccacatcatctgaaggagtcaggcttgacaggcattttattatcta

SEQ ID NO: 9885 - DNA, 1094 bp, Cannabis sativa
attaaacaaataacctgtgacattagagtagtgatggagaaaggtcagaaaaacaagtaaaaggtgtataattaatattttcctttctttggtttgtacgaatatataagattattgtttgcattaatttgataataatgatattgatgattatgacatttttggttgttaggttggggaacgttaagtcatgatctttgggcacatgtgtcacttgcttaagtaaacactaaactattgataatataaatgtataataatgtaattaaataaaaattataatgaaaatggtattatgatattgtttaaataataatattgtaataaaataaagtaaatacaatagtatattgataaaaatagcattagtttgattatttttaatatttaaaatctaaataaaagtaaaaaaaaaaaaggaaaagatgaatattggaagttggcagtaactctttgtctttggcttgtttgttttgagctctcaagcagcctcctctacattttgggggtgttttttgaagttctcctatgttatttgtttccttattttgtgtattttaatttaattagttttttttggtgttgttcaccttttgtttttggtggcgttagtcttagactattttggggtttattcctctaaatgctttgtgtgagccttgagatttttgctcattctatcattagtgtggttagccaatatttgtgccattcccttatgaggttatgcggttcgtccgctgggtatgtagagcttcggctcctttcttaaccttgaatgaaattcttttttctaaaaaaaaaaaaacaaacaaactaattatcattacattaattttataaatacaatgagaattacaaaaaatatatatatataaatatataatataatgacattgcaatgctccttccattaaactaaacatgctaaaacctaaaaagtacttgtcgatatttgtaacatttaattttctaaccatctctctcacctcactcaattattaattttgtctagctaaagtgagaaaatccagtcaaatataattttgtaaccctaatatggaataagttaatgtatagttcaatgtcaacta

SEQ ID NO: 9886 - DNA, 1713 bp, Cannabis sativa
cttgtatggccggacaacatgtatcctgcaggtgcatggtcagccagcttttccttgcaggacattgatgcacaacttacatttgtggagtggacatcaaaccaagctgtgagttgggccttgacagcccacgaagatgctacaaaaatattagcaacttccctatttttaaggggcaatttagtcatttgtatttattaattaaatatgtaaataatagctttattttacctattcctaaggatactaggcatgtaagctctactatataaagagtattagcctatctctaaagccctaagtttgaagtctctaaccctaagtcattagctctcaactctatgtctgaaaccttaatcctctcttctctctctctctctgatacaagcccaaagggctctcttcctctctctcacacgcctccaatgctctatctctctctcattaaagacatgcctattgattcatacattgtaaccttaagagagctatattagatgccacctatagtgatctgaatagtattatctctaggtattaatacaactaaaaggggagtgggtcattacccgctaattaagggggtcaaacctctataaaaatccttgtgtttttttactttctagttctaatgtgtaacacgtggcaagcatcagtgttaatataactccactattggctggccaatttttgaggtcaacagtttggtgctttcattgagagcaagtcgagctcaagtagtctaatcaaacgccatggttaacacaaggagaaccccgactacaacttcaacctcatcaagtattcctcaagacttgatggagactgatcctaatgttcaagttccaaccacaaatggaatctccatgaacccaacagatgtggtcacaccagccaccttggcagacaccacgaacatggccaccacatctggccaggttgacaccaccaattcagttggtctcaatggccaacctctgccacacagggaggaccctccactggcatctgcatataaggaatggctaatatggagcaacccctagacaccacaactggatctatttcccaatatcatgttggagagatgaggtcaagaattggcaagccaaccattagcaagcgtcatgtatacttgggaggagatctcgagttagctagacttagagaggtcgtctgtcaagtttgccaaactgaagaaccatgtgttgttgactgcgatgcactcgcacaatagagatgccaattcttgagatggatggatgaccaagtgtacatcctctaatctcatcaggcgtaattagagcaccgtaacagaaaagctaacgacttaataaggctgttcaatgaaagaactgccagaagaggtcaggatctcatcaaagatcctctccaggggagactaatcgacacatcaaggggggtctacaaacaaactatccaaccaagttcctcaagaattgggataacctttcccaacctgaaggaggacaagccttgccacaaagattctatggtgagagcagctagaccctggtagttattgctttggggggcaaccaggagtctctagcacaacaacacccctattgtccaacccatggccagccagcaccctagaagtgcactctggccagctaacaaggtgaattcctgtcccgggacattcgggagtgagtcacccaaaggtcaatctgttgggttttgtgccct

SEQ ID NO: 9887 - DNA, 751 bp, Cannabis sativa
ccttctcagccatcgggtgactagaagcaaaagaaccgagagcccagccctatctgatacccttccaaaagtccccctaaatcaaatcctacgactaatccagaaaggaataaaaaggctcgagacccacataaagtttgttcccatatcccttaagggaaaggcccatagggggcagatttcctaagagaaaaattggtcctcaggttcagggagatcggaggagcatatccgtgcatcaagagccgtggagagaaagaaaaaaagccaaaaggatcctctggtcaatctaaggcaaaaactcaatgcaaagcacgggaacctcaagactcttttagaacgaaaaaagaaaaccataacaattttggataacaccttaaatgaaataatcctagctgaactcgctattctctaaaaggacatagctaaagtctctcgaatgcaaaagggagatgattcagaatctgagtgtgaggactggggagccttgtgcaagaattatacttgaagcagagctctcgaagaactttaagatgcctaaaatgaccctgtacacagaagacacagatccaagtgatcacttgtcaaggttcaaccgagtaatgacagtcatgagagtcagcaatgacgtaaaatgcctgtgtttcccattgacattaagaggatccgctgaggaatggtttaaaaagctcgagcctagatctgtagattattagaacaagttacaaattaatttcagaaggcagtttgt

SEQ ID NO: 9888 - DNA, 1295 bp, Cannabis sativa
cttaatctaaatcaagataatgataataatcaggttaaaaaggtatttaattagtaatccatatattttatgatgatgatgatgaatatgtttgtaaaatatttttatttaattttttttttttctgattttgaagggttttcaaaataattataacacaatggccttagtatttatatgtgttccaattagtcctggtaagagcagattgttattaagtggatcaaggcaaagatttccaaaaagattttatgattggttttatgaaatatttccaagatggatatctcatattcccataaatattgttctggattcagatgcatatctcctacatcttgaggtaattacttttatatatacttacatatatgattagaataatacttccacaactaataatgaaaaatttattaatataaaaaaaattaagaaaagaaattacttacatggtaggctaattaactagagaaagtttcataacacaatttttataatgcaatttttattattcgtgtgctactaatacttacttgtcatgtatgacaccacacatgaataggataataatttaaaagttaattaagggtttaaattccaacatcatcattttatatacaagggcttaagttttttcatttttgactaaggtccaaaatcatatagggtcggcattgagtggatccacaaattttgtttaggaggctgatattaagaaatatatattttttttttagggaaagaaatatatttttagatgggcataaatgtcaaaatatacatatttaggtctaaattgcaaatatatattaaaaaagagtaatttgcggcataaatacctaagttataattctgaaacttttttaagttcccgactgttaagtgttaagtaaattgccacgtaacaatttttaattggtccaagtcattaataaatttttattttttttaaaaaaaaataatttaaatataccaataagaaaatgacacatgcttaatgacttaatatttaacggttaggtacttaaagagtaccaaaaatataacttaggtattattactgccaaaaattaaacttaagtatttatttgtaattgagagttaaacttaagtatttatgacgcaaattactctaaaaaaaaataaggattatgcccctagtcaatatgtgtgtttgccaacatatgaaatgataataacgaaaatagaaacactcctaccactaagagaaaaaagaaatcgataatttgtttgttgttgaatgtaaatgcaggagcgtaaaataatggaagctg

SEQ ID NO: 9889 - DNA, 578 bp, Cannabis sativa
aaaaaaaaaaaaaaaagatctcatttaatttcttgaatgctaatactctttttaaacacaattatacaaataaggacaagatcgatgtttagaaaagaaaacaaaatgagaaagaaaaaaaatcgctatgggctatgttgtaattagatttttatatataattaaagattattatacaatttaaatatttaatatatttatctcactatataattatactgtaagtctgtaatgatataatttgaagtaatttaaaaaattaaattgcactcttcaattctcatatgaaaagtataatcattaaaaacttttaatttcaaacattaattactaaaaaatattattttcttgtataattattaattattttgccgaacaaaatattaaaaatttatatctaattaccgtctcatattcatatacacattattataatttaaaatatattactaaagtgtatgattaataccctaataattattacttacataattacttttaaacacagcttacaagaatcacataaaagtactatttgtaatagagataaatactattttaaaatgtaaattattttg

SEQ ID NO: 9890 - DNA, 800 bp, Cannabis sativa
tcttatttaggaactctgtacacgacttagatcctacgtcagaactctgtacctgacttagatcttacgttaaaactctgcctatggcttagatcctgcatcgaaactctgcctatgacttagatactgcattggaactctatttatgacttagaatcttcataagaactctgtctatgacttagaatcttcatagaaactctatttataacttagaaccttcataaccttaccttagccccttttaggagctctgtccggtatgttacgggctaaatcttcttgaacgattagtggcctttcattggctatctggttcatgattcttgatttatactttgtcagctttgtatttcacatacttcatcttttgttcttgtatggcctttaggctctttacttttgaataatgttcgcgtatggccttagggccttttacttttggacagacgactgaccttgcggtctttaatcctaattttaacttctagacatgcagctgtccaggcaacttatgtctaatctgaagtgtgccattcacacttacttaactttcaattttttgcttatcaaaactctaaattttgcttaaatttagctgtgcttgttcgatgttgtacgatgtgggtgcccccaagtgaccgagcagacttatggtctcttggtgatcacttgcaattcaccaagtattataaaccagtgcctgtgcattttcttggagggacctgtttgtacgcatgtggaactagaaatgagtaactttaagaagtaatcttgttagctagttgtttgacacaata

SEQ ID NO: 9891 - DNA, 530 bp, Cannabis sativa
attataaatagctactcatgaaatatctaccttaaagtacttccaaaagattatcagcaacagttcgaacaaaaaaacacaaagtatatatatgatagagtaggaggtggatagttagggatgtcttgttagtagaagtgtttgagtcatcgtataggggaagaatttgagtcagtgtctagaggtgacactattgttgttgtgggggctcatcagcatcacctccacggtgattcaaataatataagtttaaaacttcacttgttatagcttcacgtctaaggtgacacaaattatagtgacactaaaaagtcaaatgaacataataatatttttttttccatgtccaataatgttagatataataacttcttaaaattctttcataatctacactaattactatgctgcacataaaaaatagttattaaagaggtaaattatagtaatagtagtatggtctttactctattcttgaaaagaaattattcaaaacttaaacagtacttctattttacctcaaaatttta

SEQ ID NO: 9892 - DNA, 503 bp, Cannabis sativa
ccaacttcttatttttctcccaaaactgagccagaacaacctcaggattatgataaaaaggaagacgtggttcaaaattattagcctttcaacacatgaaaaccccgtcatcaaagcgctttttgcagtgcttataagtaattggagccagcaaagcatccctcgcagccttggcagcctccttacgagtctaatctcgaaactcacgaagctctttgagttcgatagtcaaattagttatcgcctccaagtttgtctggtgcagctcctctagaaatttgagcttcttaatgagttcctagttcttttctttggagtctcaaaggtccctcctggccgaagcaacaatttcatccccagccttcagcacggcctgatggatccactctataagggccttctcctcttgggcttcgttacggatggcctccttctgatcctccgactcccgaagcttctacattacctcgtccataccaccaaattctgacacggtgaaccct

SEQ ID NO: 9893 - DNA, 826 bp, Cannabis sativa
tggactaaattagtgtttaatatgtatgttgggtaacccaactttctatacagtatgtctagtctgctgactagtgttcgtatgttttaagagtcttctgtgatttctgttttgttatttggttggctttgtagattggtgtgcgtcatggcttcaagtagccatactggatttgatctaaataaagagtatgcccaaataagtttggaggaagaagaggaggggatcttgattggggatgataatgagggagaagaagtggcctttgatgatcgatggtgtttagtaggcaagttcttgacgggtagaacgctagatttcgatgctatgaggcacatgatggcgtctctttggcaaccggggaagggagtctatatcaaagaattggacaccaatagatatctattccaattttatcatgaaattgatgttcaagctgtcatcattggtagcccatggacgttcaataggattccactgatttttcatcgtttgaagaggggggaggacccgaagttggttcggctgcatcatctcgatctctgggttcagattcatgacttgaagactgggtatatgcttgaaaaagtggttcgaagggcaggggattatgttggaaagtttgttaagaatgatgctaagaattttaatggaatttggagagaataccttcgggtacgggcgactgtcgatattgagaaaccattaaaacgtagaatgaagctctgtaaggataatggtgattggatttgggcaaactttaagtatgaacacatcccaactttttgttttgtatgtggcttaattggtcacgcagaacgttttt

SEQ ID NO: 9894 - DNA, 569 bp, Cannabis sativa
aatgtgtatttcaacataaaataaggcacaaaatgagtaatatttctccttttcaaaacaaactttattttctacggttcaaagattttttttcttctagctcttctctccttctagctccagccgcactagggttgtgttctaatggcttcttttcatttttttttcttactgctgaaaacaaaaactatggttctaatgggttttggtttctaaagtttctatttttctttcttacaccaacagccgcaactaactagaatacctagggtttaaaaaatatttctcttctaacccgaaacaataaactcagaaattaaccactctcttgagctcaagccaagaacaccaaaaatgaacccaaaaaaccacccttctctcaacaccgaacccagaaatctcttggccgaaaaacataatttcagaatgtatattctaatttgactttagtgcatgcatcagcggaaactataggaaatctaaatttttcaggagagtgatgattgcagttataatgacaaaataaccatgggaccatctagaatgtatattctaatttcagaatgttc

SEQ ID NO: 9895 - DNA, 662 bp, Cannabis sativa
agatagatgtggatatggactcaaaaggagagcacgtggaggcttaaaagaatcaggtgggagaaatggaaaaatcaaatggtaaaaatggtatttttcaaaaaacttgttattggcgggttctcatgttggggcccatcgagagttatgagtttgttaagttggaattgttgtgggattgggaacccccgagttgttcaattccttaaaaaaatagtttttcaaaagagacccaatttaatttttttgtgtgagataatttgtaagaaagacaaagttgaatgtgttagagctttattgggctatgatgaaagttttgttgtagaagcccgtggtcatagtgggggacttgcaatgttgtggaaaataaagatgatggcgaaattctcaactttagtaataaccacattgattttgagttgaagatagaaggccatcctttatttcgtgcgactggcttttatggtgaacctcagaggagtttgtgtggtaattcttggagacttattagacaattaactggggaatcgactcttccttggtgcttaatgggagacatgaataatgtccttcatcttagtgacaaaagaggcggtcgaccttatccaggctccttaattcagggtttcaagatgtggtttcataatgcaatcttattgata

SEQ ID NO: 9896 - DNA, 928 bp, Cannabis sativa
tcccatccaaagttagaatttttgtctggaaggcctttcatcgagcgattcctactgctgtctctctgtgccatcggaaaataatcgactctgcagcttgtagcctttgttcgaatgcctgggagtctgtagaacatgctatgtttctctgtaagcatgctaaaaaagtatggcaattggcagctttctctcttgattatgatctggtttcaaagatgcagtttaatgacagtttggttttgctatctacccttaaaaccaccactgaaatggaacaactattatgtaccatgtggtttttatggaccgatcggaataattctatacatggcaaaccagttctttctccatctcagctttgggccaaatttgtagcttacttttccaattatcagcaacatgcttcttcccataattccattaaagtctctactggtgctgcaactatttctaaatggcaaagtcctccctcccatgaattaaaaatgaacatagatgcagcctgtgatgtctcctgtaacaagattggtgttggcatgattgttcgcaattcattgggtcaagttattgctgcctattcaaaatctctcactggtaggtacaatccgcaagaaatggaagctaaggcattactaacaggattagattgggctgcctcacacaactggtctatcaagtatcttgaatctgattctctggtgttagttaatgctattaattgtcaatctgctgctatttcctattttggtgatttagtcttagatattaaacatcgtttatcctatctcttctctgtttgtgtatctcatgttaaaagagatgcaaaccaagctgctcatggcttggttaaacaagcattggtgttggataatgattgtatgtggttcgaggaaatcccctctgtcattttctctgttgttgtaaatga

SEQ ID NO: 9897 - DNA, 1025 bp, Cannabis sativa
tcatcaaatatctcatacagtaccataaatacgctacacttatatagtaatgtatttatatatggttaggtaaattttttattaaaataattaattttattttattaaaataattaattttagtttattaaaataattaattttattttaaatatcaaataaattaatatttataaataattttattttatatttgaattcttattttttttaacgttcaaactatttaattataatatttataaaacaatttttttttacaaatattatactttgattctacctcttttaaaataattttttgaataattaattaattttttaaaaaagacatttaattaattattggtagaactgcttgactgatcttcttcccttataaaaaaaatataatttcgcaaattaagatttcaatttgtcccaactaaatacatcatgtgaattttctatttcgaagcaatctcctacgtcccatttctctaatccaccagttttatcatgttatttccctttttctctagttctcagatgtcgttccactcgccagacccaatgatattggatgtcataaataacaacaaaatattatttttccttgtctactttcttcaaattctttttcatatactttgttcttttttttttcacatgatgttgtttttaggtccattcatttttaaataatatttctagcatgatcattaggtcgtttatatataatacctgcatttttttatcttaaaatttcatacaagaaaagctaaaacatcaagttcacggtggagagtctagagaaagaggctccatctcctcaatcaatgctatttctcggtgatcatttcactatgtaattttgtcccacttgtttcaaatatttttttaaacacgataatgaaagagaaatggaaaaaaaaaattaaacgcatctttaattttatagttattattatatttcaattttttttatttaatatttttcggtgaatcaacaagaaattcagtactctaaataacaactttacatc

SEQ ID NO: 9898 - DNA, 639 bp, Cannabis sativa
tttttttttttcaccctaatttattaatttattgtagataaataaataaataagtactacatatggttggtgccaaacagctcaaggtacagtatcaaatcagatcgatatatatgcccattctcatgatgattctcataattagcttataattactaacttacccataaatatctatgaattaactatttaataaacatgcattgtcattattatatatgcctactacaacatgaatatatggtacgtgatctttattattgattcaagtttaggattagctagtatcattgttaatgatgattattatttaagaagagagagagagagagagagagagtgtgtacgtacttttccgcggccattttggcaattgagtttatttaggaatcgtatgccagtgtgttgtaaaattatattatatgaaaaggattttttggattataataatcgaagttattgtactgattcttcactaaatcagtttaaactatcctatcgtagatatagtagtacttgtacgtccttttacttgggaagtactattggcagccgccaccaccattatatatatcattattagcttagcttgtgtatatattaatgggacaaatgtcgatatacaagttctctaacata

SEQ ID NO: 9899 - DNA, 637 bp, Cannabis sativa
tttctattttaaatattatgtagtaaaaattattatttttttttgtgtaattactaattattttgccaaataaaaaaattaaaaatttaaaagtaattaacaccctctatttagtgtaattaaaatattgcattttgaaatagtgtaattattttattgtagtaagtacacagttactttcaaacacactttatttagtaattcgaatgccctatttgtatcagatctttgatcgagacaaaatcctttaatgaatgaatctattcggttcacattttagggtatctttttttcaaaataaataataataaccaccaataattttcttatttgtatctttttttgacataatgattaaaattacttaaaattcacaatataaatatttgcaatcagcacataattttctcgaactatcatagttcattatctaaccgaaaagcatacattattaaattataaattaatgaagaaaacaagtcacacgagacaaaactacctctataaatttaaacgataaaactataacgtacatcatattatattattttgtaataacataatgtacaattctacatgatatttttcttttaagtatgttactgtgtagctgtacattaaatatatatttatatat

SEQ ID NO: 9900 - DNA, 808 bp, Cannabis sativa
tgtccactacctcgatatttcactgtacacaattgacgacacaaagacacctatcactatcaagttgtacatcacgtgtagataaaggaaatcctccaatttaggcatcatctacgtgacccaaagttaatattatgatatattttaccctaccaataggcttactttcatgtacaaaaccttaacgggtctgggttcacctgaaaacctagtttcaacctatatgtaaggcttcatcccttcatgtaaagggttacgagttttggcaagaacaattgtgtaaaatagtccacaaccaaagagctttataatattgactcgtggattaagacttgttaatgccccaaccacgtaaaattttttgtcttctttactttaaaatcgtcttttctgagctcaatcttttactaatttgttttttgaaaatctaaatgaacatttttgtgctttcattgagagttgaggaaagtattatccattgttgtcatctaaaccaatggttgcaactagaaacataatcatcaagctaagtgcttgtcaagactgtgaagatgttgtcgctcacagtgggtcaaactggcccccttcagagaacttctaggcgggcatcgcaagggctagagagatttcagaggtgggtagctagccatcctcctcaaaaatgccaacaataggagaaagacgttgataaaactcacatcaacaaagatgactaggaagaccatggtgaggaccaacggggtgacaatggtaaaaattatgacataaactacgaagaggaatactatgaggaagacctcgaggtggt

SEQ ID NO: 9901 - DNA, 949 bp, Cannabis sativa
  modified_base (618)..(623): a, c, t, g, unknown or other
ggtcttttcaaatcacctcgccattagtttcacctttttctgacagaggcaccccaacacgcatgtaatgaatcaaccatggaatttaatgtgtcgcatggtcaccacgttggcaggcctcaatgttcgatcaacctttaacgaattacagttcaccaaaaagatgtgtccacaactctaacagtcagcacgtgccaatgatcaattccaacgaggagattgcaagctcctcaaactcggagagtcccaaaagcttgggagtaaaagttatctgtatttccaagcaagggacacatggcatgattagagaagaagattttttaacaacctggatgagcagagataactataaaggctccttgtagaggcgtcttggtaatctaggaggggttttatggatactttatggagagagccatccccatcacaagtagcgtctccagaacacagaagaaccatattcttcctcagctccgagaagtcctggagcacgatttggtaaatggattttggggaaagacctctatggactggtcacagatcacaaccgctacatcaaggtaaatggccatgtcagcttcatatgaaaatttacctacaaacggttacacctttttnnnnnncaagatcaaatcttgtcccccatgctaggccatggtagtgttcgtatgaaattctgggcatgccttttgcccaacggcttgtctagagagtgttctgtaaaggagaaatcttcgagcaacacgtgtgttttatccaacggttggacggtcagatttacagctgtattcttttacccttccaacaggcaatagtacgaaactctatgtgggtaaagggagtacccttgcccacatgtaagcctataaataccctcattttctatgtacaaagggtgaacaattctataatagccaaacctctacaaaaattcctattaactttcttc

SEQ ID NO: 9902 - DNA, 739 bp, Cannabis sativa
ctaagcgctaagagatgaattcaaaaggctgagtgcccatgaatttatcaccgaagcattctatccactttgggtgtccaactccatattggtaccaaattaaagaacaagtggagggtgtgcatacatttcactgacttgaataaagcatgtccaaaggatcaactagcttgtagatgctacaaatggccatgagatcttaagcttcatggatgcttattcaatttacaatcaaatcaagatgaaccctgtagattaagaagacataagcttcatgattgatctagggctatactacagcaaggtcatgccctttgggatgaaaaatgtaaggccacctatcaaaggcttgtgaacaaaatgttgaaatatctcattagcttacatatagaggtgtacgaggatgacatgtttgtcatgtccaaaaagtcttggggcatgtgcggcatctaaacgaaatcttcaacattccctaagattacagcatgaaactcaacccccttaaatgttctttcggagaaggctcaataaaattccttcgattcatagtcaatgctaagggaatagaagcaaacttgaacatgatccaagccattttggactttaagttgccaaaaacaatcaaagaagtacaaagcctaacaggacatattgctgcacaaagtagaattgtgtcaaaatctacaaaaaaaaatgatttcccttctttaacatactcagaggaacaaaaaatttgaga

SEQ ID NO: 9903 - DNA, 818 bp, Cannabis sativa
taattaggtcattaatatttatgatgtgttctaattaagtagtgacacatgacatcctagtcaccacctaacgaaagttaatgaacaaagagtgattgaattaaaattttagtaatcttaagtagttttgtcactaaaaagttagtgacttcttaaaacttacaaacataaaatttgcattgtgccttaattatttctaatatataatataagaaatttttgtaataaacttttcttaaaagttattgtggtagatttttttatctgttttgacatttaatagaattttttaatttaatttttttcataattgtatatgttatagctatttaatgtcatttgtaatttttttagaaaattccaaatagtttaaagtgtaaaaaataaaatttatacaatcacttaccatatatataagaaaaacagtagcgagtgcagcaaaataggtaaattctatttcagcattgtaaactactcgaaattttctaaaaatttacaagtagccctaaataactataacgcttacgatcattgaaaaataaactaaaatgctcttttttatgtctatttagataaaagatctaccgaaacactcctttaaggagtgcactatcgaatcgacttaccctataacataatccccaataaatatactaaaaaatgatactttttttttaattctcaatttgcagcatcactactgatattttccctcaagtaattttcaactttgctggaaatgcatctatggttctagggcctaaagattaccttctagagcaaaattcaatagtgagttcttatactctttcatcact

SEQ ID NO: 9904 - DNA, 527 bp, Cannabis sativa
aaatgaatggagagatttgaaataattaattttacttttcaatggttgtaaatcgcatactttcgaggccgttacaagacaaataaaagatggtggtaagcgaacggttttcgttgttaatcaaaatgcttaactatgatccccgaagaataaactcgaacctcttaaggagacgaattttatgtctgaccatttgagctaccgtataatgttcttacgatgatcaagatttataagcttcatttcaacataagataatcttcataacataaatgagtaaatggtgaaaattagggctggcaattcgtgttctcgtgtcatatttgtgttcgtgttatgcaggttaacgtgtctaattggtcaaccctaatccgaactggtacatgtttcgtgtccaaaaatctaaaccctaattactatctttcattcaaaaggacagggaaagacgaaaattcttactcgtatgcatgttcaatctcttgttttcctgttgataccgattgataatctttaaaccactcgcatgt

SEQ ID NO: 9905 - DNA, 666 bp, Cannabis sativa
tatatatagatataaattataattgcttaaatggctacatacaataaagattttgactaaaaaatcattaaaaataatactaaaataatatatgaaaagaactcatccactaagggatccatccctttatttcttcaaaaaaaaaaacatcttatctgtattccatatgtcatcagtaatgtattagatagctttatttctttccaatttgtttttttgtttgttataataacaatatatatcataaaattactgatcagcaaaaaattagagtgctttgtaaaaatatgaaatttgtcaaattaacaccgtaacaaatattaaaatttgtaaaataatctcatttaatgtattctatacgatcatgatgaccgcacagtttaaatttatagtaattttgcgaccataatgattatttatgatcgcacaatataattcatggtcatttataactacaaccatacaaagttattttattaagaaaaatatttacaaagttatttttctaataaaagtatttataaaggttattttgccataaagactttgtaaaattagtttatgaaattttttatgagcaaaataattttacaaaatattttattagtaaaataatattgtatgattgcacatacaatcataaattacactatgcgactataaacg

SEQ ID NO: 9906 - DNA, 787 bp, Cannabis sativa
tacataatttatatttatgttataattacataagtataaatataacaccattaaggaacaaggccggaaaaaactacaattgtcgttgttttaaatattatcgttaatcatgttttaaaaaaaaaaaaatactacagttaattagattctattataaactatttttaccatttctttttttttcttgaaaaaaaaaaatctttctaagagtgtttagataaaagataaaaaatattttttaatttaaaatattttttggaagaatttaggatttgtaccttcttttacttttgagaagttattttaataattaaattaatttatgtaattcttaatttattcaaaagatatttttttaataatatctatacactttaaaaagtattttcattattttttttcatataatatttatttaaaccataaaaattaattaattaagtttatacttatccatatttctaactataaacaaaaataaaagtttaaccaaacaacactatatatatatatatagaactagaaaggactattaataattaatctataattgtatataacataatctcaatacaaaagtattgttaaaaaaatcttaataggaaagtataattaactgctcttccttccctggatacacctctataattaaattaaaaaaataataaaaaaaaggtctattatttaagataaaaaaaaaaaaacctaagatttagcatgttataaaaaaaaaattaaaggaaattagttatatatctatggctttatttttatttttttctaataa

SEQ ID NO: 9907 - DNA, 781 bp, Cannabis sativa
ataatttccaacaaaaatttgtttcaagaatcccctgttacaaaaattttaccaaagatgctatatacaacagtaaatcaaaatacacattaggtacaatcaaaaaacaactcttgacaactcgaccatacaagtcagataagtcgatatgtacatttgtcgtagaagactatcgtctcatggctaccctaattttcccttgtccttacctgcaccacaaagcactcattagtcacaaagacttagcaagaaaagcaaacaatgaaagtatataacaattagatatctaaaacaaaataataacataattaaacaacagttctcaagtacttgtataataagacaagttatatctgttacttcataaagtaaccatttttgttgttgcttaataagacaaccctgatgccttagcccgacactcatatatctcatttacctaataaggtaacgtcgatgccctaatatctcattgcctaataaggcaatgccaatgccctaacctgacatccatatatctcattccctaataaggcaacgtcgatgccctaacctggtatccatatatatcattatctaataaggcaacgctaatgccctaactcagcatccatataccgttgtcattgtctaataagacaatatcgagaagtaagaaacctaacaacgatttcaattgacgtcatgactttaattcgcttaacgttaatcactgttcctttacctcgatcataatcgagtcataacaataatactcgtatcttaacatgctatgtagtat

SEQ ID NO: 9908 - DNA, 547 bp, Cannabis sativa
tatctccgcccaaatccaacaagtgaaccacttcttagaggacatccgaaagaaggatttactcattaaggaccttcaagtcgaacacaacaaggagaagaaacgggcggagtcctaggtaacacaacatggcaacctgagccttcttctccaaggggcctatcgtaactgtgaccgtcaataggaaaccattgatagattgcaaaagagagtcgaccagagtcaaacgaatggtgtgaaggcatacattgctttagctgccatgcgtagaatgagggagactgccccaaactcattcaggacgcggttacggcagcaactaaggcaacaactaaggtagaaaaatattgcattcgctccctagaggtgtcctatgctgtggtccttcacaacttatggaaggcggatccttccatactttggcttattgacgaggcagacagggaggatgtaagtaggagagtactcgctattgaacataacacatatctcgaggagtttcctttctcaattgatagtggtagcgatcaagaaataagggctgagg

SEQ ID NO: 9909 - DNA, 1001 bp, Cannabis sativa
attattccctttggtaagtgctgtttgtttgttgggtttagactaaatttcctctgttatttttccaaagattctttaagtttttcattcccttcatttttatgcctatatcagatataaagtgctgaaaacgaagaatggtgggaccaacaagaattggcctcgcaggtcttgctgtaatgggccaaaatcttgctctcaacattgctgaaaagggatttacgatttctgtttataaccgaaccacctcaaaagctgatgaaacggtagaaagtgtgaaaaaagaaataaatcttcccttgtatggtttccatgatcataattcctttgttcaaacaatccaaaaatctcgtctaataatcatgcttgtaaaggttgggcctcctgttgatcaaactataataacactatcaaattacttagagaaaggagactgtatcattgatggtggtaatgagtggtatgaaaacacagagagaagggaaaaggctaggcaaaactgggcctgctttatcatggaatgggagtttcaggtggtgaggagggtgctcgaaatgggccttctatgatgcccggtgggtcctttcaagccttcaagtacattgaagatatccttcttaaggtggctgctcaggttcctgatagtggcccttgtgttacataggccaaggaggatcagacaattttgttaagatggttcacaatgggattgaatatggtgatatgcagctcattgcagaggcctatgatgtgcttaagtcaactggaaaactctctaatgaagaactacaccatgttttctctgaatggaacaaaggtgagcttttaagcttcttggttgaaatcactgctgatatatttgggattaaggatgacaagggagaaggctatctggtggacaaggttcttgacaaaacaggaatgaaggatactagaaaatggacagttcaacaagctgctgaattgtctcaatggtctgaaaaaggaaagagttgaagctg

SEQ ID NO: 9910 - DNA, 598 bp, Cannabis sativa
tatgctagctgctaatccaaatttacatgtccaaacaaagtatatcgaaatagacctctattttgttcgagataaagttctaaataaggaaatcaatgtcaaccatatttttactaagcatcaacttgctgactgtctaactaaaccaatctccagtaattaatatgctcattttaggaccaaactcaagcaccctgaatttgaaggcatttgataaggaggcttaattagttatgatggttagtattagttaaacaactattttgttaacgagctttgtaactattttctgttataattgtttgctgctcttttctctcgtgtatataataaacacatatgtaatagtttcataatatggctgaataatagaattcgttctctttgaatattttttttttctctctctctctctatctctatctttctacttgtgaaaaatttttgttactaatggagttgtttcatctactcgagcatactttagttaatggaatgatcctcaaatcaattttattgatgctagggaagtttttgttttccctagtattagtatggagcattggaagttaccaaatattgatatgattaaaatcaa

SEQ ID NO: 9911 - DNA, 674 bp, Cannabis sativa
ggtgtattgacatgtacagtatttgatggtggttttttcacaaaatgaagtttgtgctgagaaattaagagccatgcgcctcattgtgccactccaaggtgtggtgcaaggtagaggcggccttatttggggctctcttatcccctgcgccctcttctacttcctccagttctacctcaaacgaaaccgtcctccaagtacctcctcgaatcctccgtcgccatctcagtcttcctccaatcttctcgaactccaaaggtcgtcttccaggtcaaacttgtccagtcgtggatccataggccgagtcacactatccacccggggaagtttgattgcaaaaccaaatgactccccttactatattgggctggataaggttagggaggatccttatgacagattgggtaacccaaatggggtaattgagctcggtttggccgagaacaaggtgagtctctctttcgatctgattagctacttgagtattattgactgtcaattttgtttactttggcttggtttcaaccgttgcagttgagttttgatcttattgagaaatgggtttctgggaattggactaattcgataattggaaccaatggtggcgatttgaatattagcagcattgcagcataccaaccgttcgatggattgactgaactgaaagtggtgtg

SEQ ID NO: 9912 - DNA, 853 bp, Cannabis sativa
ttgttggagaaatcctttggccacgagtcttgctttatattgtgtaacactcccttgtgcatcttgcttttctttgtacacccatttacacccaatagcttttcgtccaggaggtaaaggaaccttgacccaagtttttttctgtgtgagaactttgatttcagtttgcatagcagcaaaccacttgggatctttgagtgcagcagctaaagtaagagtttccttggtggctatcaaagccttaggtttggagatgcctgctttggccctagtaaccatagggtgattattttgaggtgcaataggtgctggtgcttgagaaacagcagctgctgttgggacagagatggtatctgcagttgctggtgcagttgcagagatggtgcttggtactggtatggtattggaactagaagcaggggatgaggaagggataatgggtgcattaggagtggtagaaggtggaatgtgagaaacaggaatggtgagatgagtagggatggtagctggagtggtggatgtggtggcaagaggagtagattgtgggaaaaacaaggtagagtatggaaagtgatgttcattgaaaatgacatctcgggaaatgtagattctacctgtgttggagaggcatttgtaccctttgtgtttgaagctgtaacctaagaatacacattgaacagatctgaattccaacttgtttttattgtaaggcctagtgttagggtagcaggcacacccaaacactttgagttgattgtaatcaggttctttatgaaaaagaacttgaaatggggtagagtttttcagaacaggggtagggagacggttgatgatataagcagaggctctaaca

SEQ ID NO: 9913 - DNA, 573 bp, Cannabis sativa
atcatataaatccttttaccctttctatagttcaattatttcatttttttgaaacatatttttcttcattttcattgtgtttttgctcacatgtagtttaaaattgtatttgatccgagtaaatctttttcgaatgggatgtttggcaaaaatcattgctataaggccccacttagagttagcgtctagtaaataattaacgatattctataataattattaaattaatttatctgagatctgatacttaattacatcaataacattatgacacttccaggtggtaaaatagtcttcattttatagtcgctttgcacaattattttgttctatagttattgagaattctctacaagatatcgagaattcttgatagaatgacgggattgtcttgaagactattttgcgagccattttcccctcactatttactcattttagattataagaaacacttcttgtaacatttattcttgttcacatttctaatagaccttggaaataatttctactcaacttaagacaaaatcattacattatttggtgtctaactagagtgtgcttgacctgatt

SEQ ID NO: 9914 - DNA, 516 bp, Cannabis sativa
aagcgcggattaagtctctagttaattatatatgaatgcatagggctccacaattcatgcatgtgaaaccactttaattaatttgattgtaaaaaaagtaaggtaaataatgattaacgatatggaattgggttgaattaattatcattttaacctttttcaaatatataaatttaaaccaaaaccctctagagcttaattagctattctctcatgaaatattcagaaaaagtatataatatgcacaatgcatatataatataaataatatatattatgtatcattgatccatctctttctttggtggcctagctggctggctacttgtaattttatacatatatgatatggccaatttcaactaagtgaatagttgtattagatcgaatgtcttctcaatatatatatcatatacttccatatttattaatttgtaatgatatatatcatatatatttattaattaatcctcttttcacattctgcttataacttactcaagtttgactaattgc

SEQ ID NO: 9915 - DNA, 634 bp, Cannabis sativa
acaccttggtttctctaatacaaaccatcagaaacataaaagagtgaccaaatgtttatcctcgttaacttaaaaaattacatttcaagacacattcttgggttcttgagaaggccaaacctattttagataattgtgatgaaaataaaactgcctgtgatctcaaaatgcaattgtattcccatacagcttggtttcactaatacaaaccaacagaagcaagaaaagcgtgaccaaacacgagttttttcagaattttttttcctcattatcattgcaatacacaatctttgtgttcttcatcacaacggcaagaaaaaggccaaatctttttaaggtaaagggactaaaaagacaacatgcaatcgtattccaaaacatcttgattttactaatccaaaccaccagaaacatgaaaagagtaaccaagctcagttgggtttttcaccaacaacaaacaaataaataaaaaagctcacttgggctttcgctcaagaagcaaaattagcattgcaagttaaagaaattaatacaaatgaagaagaagactcacctcatataataagcaggtcaaacaattgtataggtacccggagaatcatctgataattgtccataaggggattgttggtca

SEQ ID NO: 9916 - DNA, 956 bp, Cannabis sativa
gccagggtctaaagacttttcttgctcttgacttggaagttgcacagagtgtacatgcttggttattgataggttgtattccacttgtcttctatttggactatgtggacatgccacgttcggtgagaaaaaaatgggataacattttcccccaagtccttattcaaacgtctgtacaaatagggacattttagctcttatcttggctcttgaagcctttaccgtgcaaccttatctggccaagtattggactcttcaaatgacgtgcttttatgacaaaatgactttattgcaatcaaatatggggaatcatgtgacaactgcacatttttccatgtttatacctttgatcttctctctcccatgtatgccatttactttcctcatcttcttttctttgacatttctctctttctttgaatctgccattgatgagttttaagctttttaaaaaatttagaaacttcttaattctcacgttttagagtagtctttttacattataatctgcttgatagctttaggatgcataatatatgactttttgatgaacaatattgagtcttggattggtacctttggtgtgttagagaccctatctagctcttagatcttgtttaggaacactatccagtacttagatcttgtctaagaactctgtccagtacataaatactgtctaggaactctgttcggtcatttgttttattataagactttgaccggtatctaattttttcaaaaactctctctaatgcttgagcccattgtatacccctgtatggtacttagccccttttacgagctctatcttgtacatctcggaccaaatccttctatggctagtcaatttcctttgattcataggttgtctagttcatgagtcttgatttataatttgtcaatcacggacttagtatttcaaggttgtctggttaatacccttaggttttggc

SEQ ID NO: 9917 - DNA, 572 bp, Cannabis sativa
ttccgatctaattattgtgctaacatttttcaatcaaacagttttacaattaaaaatgtcgtttcagtaaaaatatgtgataattaaaacttttttaaaacaaactgtagttgaatatttacaaaccaagatcctatttctaattaaaaatacacatgtactataatattctgaaaaagtcatctatcggcaaaataaaaattattccagttgatctcccatagatctcaaccctccaggttgttaatattattcactaactttttttttttaaattagttattttatgttaattgtaaatagtacttcttgattagttttgtactctgtctatgtctataaataaaagaagtctctcttggtattgaataagctttttcattcaatatcatctaaagacaattcattgaaactctttgttcttatttcctttaatctttacatggtatcagtttctactaactaacgtcaatgagtcctccttgattgatcatgcagcctcgcaagctactccagttccagttgctactctaactctgtccacctcgctatgaaatcctttttccagttcc

SEQ ID NO: 9918 - DNA, 692 bp, Cannabis sativa
taagagtgcacccatatatattgtgtgtcgtatagaatagtaagtatatttagctatattgttcattcacacaattaattttaatttcagtattgatatttttcacacaattaattttaattttagtattgatatctttctcatcttctgtagtttattgttgtggtaaattgcacacgcaagtgcacgtatcatttacaagtaatagattcaccaagagtaattgaaattgctagaatattcaattaaaaaatttttatatcccaaagacactatgatcttcaacttcatgaagacttaggacaattggggtgtaaggttgctaatacttccatggaagtcaatctaaagctaagtcaagaatatggagaagaaaagttttctgatcccaaactttataggagaatcattcgaaagctccaatatctcactataaccaggcctgatcttgcttacacagtaagcaaattaagctagttcttagtcagtcctagaactaatcacatggatgcaaccttaagagccctttagtacatcaaaggaacacctagaccagggcttttctatccaaaagattcgtaaattcaatttgtggcatacacagactaggcaacatgtgttgatacaagaagatccacaacaggattttgtgtctttattgggagattcttagtgtcctggaagagtaaaaa

SEQ ID NO: 9919 - DNA, 601 bp, Cannabis sativa
ttattcttgaaatttcatacgacttctccctcgtccttccttctttatcttgcagactccacactttatttcttcgtcttctaatagctgctgaggcatagaaatacttggtacttctatctccaagcttcaactaatattctctagacttttgtctccacattgattcttttttccttccatgtttcttccagagacaattgtatgttcttttcttctaggcagtatctcgcgcatattggttgttgttggatccattgaagacgcctttccaaattactaatggtttcgtccaaattgtcaaagtgtctttttttccatgcttgcaaggaacatcttgttttatcaaagttctgcaacaagcttctagcattactaagatcttccaactcccagaccttctttatttcttccctacaagattcttctcttgtccaggcatcataaaatctaaaaggtataaatcctttactcctgaacatgtgagtctccaaaaggattggggcatgatcagatattgattttggaaaattctagataccagcacattgcaattcagtgatccaataaatggagcatattccacggtccagtctttcac

SEQ ID NO: 9920 - DNA, 788 bp, Cannabis sativa
atagcatgttttgttacctcaataaaaaatttctaagcttttttagacagtcttttatagtttggataccaaatcagtattttttttttattttttaaaaagctattatgtttttcgtcgacttatgcctgtcacatactatctatttataacaaccacttaaagttatttttctattagttataaatcgtcgctaaaggagtctattttgataggtcacatagccaacgatttttataaactgatgaaaataatttttaagccagtcttaaaccaataaaaaagaccaattttacagtagtgagctaatttttggagtgctaaataaattatagtaaggaagaaaacaaaattttgtgttacatcactcaagcttcttcaaagggtagaactttaattcattggataaataaatggtgagaaattaaataatgtgtgtggtatcagcctaataaaattatattaaattaaatgattttaattcttttaatttctcacgtctacaaaaaaatctactttagtgataatttttcagtggtaatataatttttttttttttgactaaatatcacttttagtaacaacaaaactaataaaaaaattacttctcactaaaaagatagtatatttaaatacaaattatcaataatttaattttattcacaacaagtgttgtggctaaaaatacatttagtaacaataaattatgatttttggactaatatacttttagtcggtgactttagtgatagcatgaaatagtgatttatgtttcatcacaatttttt

SEQ ID NO: 9921 - DNA, 900 bp, Cannabis sativa
tcattggactggtaattgtgtatacaagtatttctttatattgacatttattgtgtttgaatacttgtactgacccatatttagatatatgagcaatgtacgattgtgtgatctgattatgtgagtttacttgttgatatttgtgtgataaattatatgaatgctgttatattgcttttcttattgagtctttgtgactcacgggtgacttgaagtgtaggtaagggcaagggaaaatcaggacaaccatgagatgaaaattttcttcgaaaaatgtacatatcgtcttatctgacttgtgtggtcaagttgtcaggagttattttgggttgtacccgatgtgtattttgacttactttcgtatatagccatttctgtaaaacttttgtaattggggatccccgaaataaatttttagcgatgtcatcctattcattgctatgattttattgtagtgaagtttaaattattatcacgaatttgattaaatagttaatctactatttgtaaactatgtttcaagagcacatgtgtggcatccctagggtttaggacgttacaaaacgtatcagaaactcaaacacgaacacatcaccattattaaatatgtcacctagactcatttatttcgtgtcgtttttgaattgtgtcatcgtgttgtgactcatattgccaaccctactatatatacctcaaggaagcttgatttgaaactataacatcttcaaaacttcaaagcaaaaaggagagatgttcttcaactgtttgagctttttctcagagattttgttgtgcaaaccaatttttctcgaagattccttctatacatgttaagcagaacaatgagtaagttctctcttcccttttctacatgaattctctatccctctctctctctct

SEQ ID NO: 9922 - DNA, 559 bp, Cannabis sativa
attcaattttaggattaaatgaggatttagggttgccaattgggttttaatgtttgagaatttgtatttagtttttgctaatatatgggtaccgaataagagaataggcacaataatataataaaaaatacacaaggaagagatgctcaaggtttgtgtaatgctgttggtcaccaatggtttctagtggtctcatttggtctctggtggtctttggcgaaaccagagcgtggaagaagacaaagaataataaagaagtgagtaattgaagaatttggagaaacagaaagaagacaccgtaaaattgaaatagaaaagaattttttaaagtaacagtttaaaaacaaagtataaaaataaaaaacctaaaaaaaagtcgtaaaaataaaaaataaattagaaaaaagggtaaacaaggtgattctccaaaaaatatgggttaaaagaataatattttatttagattgtaataatactttaaaaatataaataaataataaataaagcaagaatatttctttcaattcaattttgattacaatattcattaccaaaataa

SEQ ID NO: 9923 - DNA, 688 bp, Cannabis sativa
tccggatttaaatcgcagtttttcgatttatataaacagccctacatgttttcataaatattgatttcataaatcccaaatatgtttttcttcctttatgaaatccaatccaaaaaataattggaatgctttcaatcgtaggaaaaaaaatgggattttgggtttaagaatattaggatgttctcaatcatagaaaaaaagtaatgagtggaattgaaaattttcattcgttattctcaatcgtagaaaagaaaacaaatgaaaaaaaattgggtttacaatggaattgtaaacttccaatcatgttttttactttattttaattttaatatattttggttttaaaaagttaataaagaatattatgttaactaattgagatattttgtttaagttgacgcaaaaatccaataaactctattaaacaaagaaatgtgtgacataaccacacataatagatatttaagtgagtttggtgatgtgaaaaataatatatattttaattaatattaaaaagtatcaatttgaaataaccgatccaattcgtacttttatagattggtttagattttagctactctacagattgaattagatcaaaaaataaaatttgtacttaatgcgaatcgaatgttctataaataaaattgtgtagatgaaaatcgaataaacattctaactaatttaa

SEQ ID NO: 9924 - DNA, 1122 bp, Cannabis sativa
tcagtcatccctttaaattttgttacttcagttatgaacgtgctaatgtaagctcttagaggttctcctggtatttgtttttttttttctaacaggtcttctaaatgatgaggcagctgataagaggaggaaagttttgtatggaatttagatgagaaaaaaatccatgaactaaatttccttagatgtagtttaaaataccattcttgggtggcctctgccaatgtagctgagaagattttgcagcgtacattatctctctccccttacaagtccatttgcatgtcaatatattttaagtaaaataaaggatcttctttgcctgtatacatcttctacactgacattttcaacttgggggtaggtcaagagcattgatttcagaagagaagggttatcctctcgtccaatccagttaaatatttgtgagtttgggttggtgaggccttgtacgaggcttttaagttgatctatttatgctaggacaagtggacaaacatggccagtctattgaccgaccgacattatgatctcttagaactagacttgggacagttttttggctggatggtaggtggaacattttgctcatacagtccccttctgcggtttaaattgtttatgaggtcttgtacggtaccgagttggtcaaacaccgatgtgccaaggggcctttgagtttgaccaacttggctaggtggttgacttgatacctctatcagagtatggttggttagctgactatttcctcctattgggcggtttggtaaaatctagtcgtctactatttggcccataatttgaacatgtggacttggattggacggttaaccgatataagtttgtgcaatttgatcagctacatactctttcaaccaattttgagatcccaaggggatactaaaatcagtcactagttgcagaccggtgactaaataagcccttctggtcagtagggtgacctacttggagcagtcgtcagaggccacctgctaggctctcatgacttccatctcttgatccctccactctaggaactgatatctttattagtcaaaggaaagattggtagctgcccagatatcttgttggtcattgtgcaacatggttttgtgaccatag

SEQ ID NO: 9925 - DNA, 1075 bp, Cannabis sativa
acaatcttaaataatgatgtttctaatatgagaagcgaaattatcaaaagcaaactttggagaattttatgtatgacaattaaatatgcatgtactaataatcaacaaacaattaatcaaacattaaatgaaatgtgaatcaagtaaatattaggaatttttaaaataacaacctttgacgtgtaagaaataaactacaataagaataatatctctcataaagaactcttctctgttgttccttgatgtagcattaggaatttctaattacaaattaatttcattaaattaattcgaactccttatcttgtctttattaatcgtaattaaatagatagaattaatttaattatttaaattaaaaatattaaaaatatttccaaaataattagttattaattaatttttgaaattaattattatatacaatatataaaatatagttaggttataaaataattttaattaactatgtattagacaagataaatgtgcatttaggttagtttgaaataattttctaaaatattttctaaaaataagttataacaacctatgactagtttttagaaaaaacaaatagtttattaattatataataatatatttataaataacaatcctatttattcaaaataaataattaattaaaatatttataacaaaatttcaaaaaatattattttaatatatttttaaaaaatatcacaatctattttttttaaaataatattattttataaagtatatatgatatatataaaatataatttgaaaaataaaatatctttatttgaaaatgataaatatacataccctaaatataataaaactaattattgaaaaagatatttatttgaacatattagaataaaaggataatacacataacaaatatctcataccttattttattttttccaaattaataatcttattattaattaaaacataaaatatatagatatatatatgagcatatacatatatatatgtatatatcaatgggtcgacccttaggcgaacaagggaggaggacgctagtaccacactggcggtgacggacgatggacag

SEQ ID NO: 9926 - DNA, 626 bp, Cannabis sativa
aatacaaggaaatattcaacatgcccccggggttaccgccagttcgtgaaaaggagcatcatatcaccttgagggaaggggtgggaccaatctcggttcgcccttatcgctatgcccaaattcaaaaggatgagatcgaaaagatggttcgagaaatgttgagagcagggatctgtgtgcctagcacaagtcctttctcgagtccggtattgttggtcaagaaaaaggacggaagttggagattctgtgttgattaccgagccctaaacagagagaccgtggctgacaaatttcctataccagtaattgatgaacttctagatgagttacatggggcgaagattttttcaaagctggatctcaagtcgggttaccaccagatccgaatggcggcacaagatgttcagaagacagctttccgtactcatgagggacactatgagttcctcgtaatgccgtttggtctcaccaatgccccagcaacgtttcaagctctcatgaacaccatctttagagacctacttcgtcataatgtgctcgtgttcttcgatgatattttggtgtacagcccctctttggaagcacatgttggtcacctaaaagaggttctgagaagattgcagcaa

SEQ ID NO: 9927 - DNA, 603 bp, Cannabis sativa
ttcgaaatgcaggtcactaatttgtatgctgttagtagtcgatttggaactcccgatgatttcaagcggttggttgatgaagcacatggttatttttcttcatttaatgttattactttaattcttgaatcctaatactttcattaaggataggattttcgtcctgaactttgacatgttccaaatcatgatatccaaacttttcaagccgttaaaaattttcctcgaactaatgagattgttggattcaaagacttctgtctaattctgttaagtttaactagtccgccgattgtttatgtagtaaatcgtgctccccaaacttttacatataccaaattgtgtcttctgaacttttatctacgtcgggtttccattagtaaaattagacaaaagttcttaaatccagcaatttcaatagttcaggagaaatttttaataatctgacaaaagctatactaattgttaaaaatattatcttttaattgtctcacatatcaatttgctagctactgatggatggcaactgcaaattatgcaatattttttgtcactgattagaatttgtacatcattggttttacttttcttcttggctgtgtt

SEQ ID NO: 9928 - DNA, 642 bp, Cannabis sativa
attttttatctgttaaacaagactgacaaaaatatcacttcttactctaacaggaatcatttaatattttattttattttttgctagtgttttatattatttatacatttcttttagtatattggtaaccttttttatatgtatatttttaagctgtatttgaataattaatatgttggatgataaataatgtgtaacattttaatttttatataattaaaattttaatataaatgttactcctacaatgggtccacataggaatttcttgttcattaatgatgaaactatatgagaatatggattgaaatttttagtgggtacgaaaatgggagaatactctctgccaatttcttaaactatgtgcattcctaccagtgacttgtattgaaaatcagatttaatagtttttccaatacaaatgaatgcttgagagcaattagaacgtatctttgagatgagtttgcgtctttgtcgctagatttgcaaatttatatttgtaatgttagttgggtaaataaggatttgactcttaatttatggaatcatttttactttttcaaaaaatcaatattctctatgtgtatcatctagatctttaactatttttttagcgtgtaggtcctcaatctctccgccatt

SEQ ID NO: 9929 - DNA, 1501 bp, Cannabis sativa
cgtctcaagggctgtgctgtagcagatttttaactggtgtggggttgtagcctagccttcggactacaacagatggaagtgctgttttgctaaccaaaaacctggtgtgataatctctctgtttgctgcaactgtatttatgctatggaaaaacaggaatttttgtgtgcataataattattgttatcttattttaaaaattgtaaataatattaaagaaataataaagtatatgttgtatagtttaaggaataggaggtttattcaagctgaaaaaggcatgtatttgcacccaattgagtagttgtagctggtggtttttggggctggttggttgtggccttggtgtttttttgttttgtctttgattaatgaaattttttcttcagtaagaaaataaaaataaataagtattgtaccttaatgcataattataaatcttgacacaaaatttgatggttaactaatttttatgaaaatatatatgaaaagaattatcattaatttaattttattatatacaataataattataaaaactatatataaataatcataattttgtattataattaactataataatataataaaatagcgatcatgagaattttcatattatttactgctcttaagtggtgttatccagtgacggacccagaatttttattttgtgggggcttatttattataaaaaaatatttatacctatattataatcacgattactatatttatttaattttgtgagagcttttcaactattttgattcataattattaaattaaaaaaaattacatttaattttttaaaagataatatttttattaatgggggttatagcccccacatattaatgagtggatccgtccatagtgttatcataagaatatccatattttttctttataaattaattacttgaacgttctatagaagacaatttactcattaattaataaatgtttatttttggtttgtcctgaaaatatatatatttttttgaagataaagtcttgtaaacaaaagaaaccaggatacaagactaaaaggaaggcagagagccattccaaaggaacttactatcaagcccaataccccattttgcaaccctatgagcaatagtattaaactccctattgacatgagccagccgtagagatgggcgaagtgataataagttcttaatacaaacaattaaatcatcaacaaaactacaaccctgagtgcaagagtaaaatctatcaacaatagatttgcaatctgttttcaaaacatccacaggcaggaaaatagaataggcccactccaaagcatgcaccactgcttttgcctcagctaccatcggtgaaacacagcctgaaaaaggtttagccaaccctgctaccacctggccggaatgattaagaacaacaaccccaatgctatacttctgtctattcatatcaacggttgcatcagtaaagatgtggaaagctccttcagatggaagctgctgca

SEQ ID NO: 9930 - DNA, 627 bp, Cannabis sativa
ttaaaattaattggcaatgagatgcgtagcccatgcatcttatgtatgttatttatttcaatacattatcaatgtggaactctctaacactcccctcagaatagctatttttttcttcattaatcttgcacagctcgatcacaagtgattcatttgaccagagtaacatccccgaatcacaagcggttcttttggctcgtctttttagaccggtttttagattttgttcgaatactcattagagtttattttagatttgatatcatgttagaatttgataaggtgcaaggagttctatctcaaaaccaattgataataaaagaagtaactcatacattttatgtgtggtatttagtttcaacctaatatcaatccaaaccctctaacataacttgctaccactcttttaacaccatgattgtaatttgaaatttggattaacgcaagctcctggattaaattaagaaaaaaaaaactttctgcatagatttttgctcactaatagcgcaatgtaacgttgtaagattggaacactagatcagacattcagaaacaattcttcaagaaaaaaaaatttagaaacaccgacgacagtcagatgtcgtcagagaacggcgaaccattgcc

SEQ ID NO: 9931 - DNA, 642 bp, Cannabis sativa
tatatatatatatatatatatattttaaaccagaaaagagaacagaggactataactgactcacaaaatatcttatagggttaaacactcattgaacagtcttgatcttgaataacaatgttgagttcaaataaagattaacaaaggagaaataaatatttattcaaacattgacactaattcttattaattaattaattaagcatatttataacaaaagaaacagaaaatggaccaaatagaatagaactgccttcatataataatatcaccaaatcattcctatgtgaagctctcttcttcattaactcactcctcctcctgcacatacaattttttttaataataatgaactaaacaaaacagaataaaaaaataagtagttataattctcaataataaataattaaatatcattgccataaatatttttatgatacctgtgatttattgtttggagatgaagagatatccacccaacactccaacaagaaacccacatgcatatcctatagccactgctttccaaccgaaaccactccaaaactcagattcatgatgataaactctcgtacttggcctctcatcactattttcacattcctttgataaaggagggccacataagtcttcgtttccata

SEQ ID NO: 9932 - DNA, 557 bp, Cannabis sativa
gcggcaacggcggaggcaggaggaacggtattgtcgtcaagtaatgttgaaacggcggcgtcaagatcccaattgtgactctcgagatagaattgagcttcttctttggaagaagaagtgatctcgcagaaggagttgatgaggtcatcgtgatgagactgcgattctgggatagcggtctccatggtttgcttgctgttagagacgaaagaaattcgattgcttttcagtacttctgggcagagcacacaagcactttatatctacaatttatttataaaacgacagctgcgtattaaaaaaatcgatcaaacgacaaggttttggtgttgcttgctttcatcatattccccagtttgatgtcgtttaagtaaccaaaagggggccaaatgtatactacgataggatgatttgattttaacatttttaggtaaactatttttttttttaaagaataaatagtgtgtaagtaccaaaatttttaaatttgtaagtagtataaatctaatgtttatttttaacattataagtagccaatatttgtaaaactgtaattt

SEQ ID NO: 9933 - DNA, 575 bp, Cannabis sativa
cgcccaaacatacttagacatggcagccctattccatccttcaaccttttttattcctaagcccccaacagatttgggggaacaaaccttgttccattcaatggaaccacctcctccataatttgcaaggtctgtccacaaaaatgatctgcagattgcttctattctcctatacaccttctttggtaagatgcaaatttggctccaataagcttggatggctattaaaaaagagtttattaacactattctagctgcaaaagacaagttccttatactccaactacgaattcttgcagtcattttctccacaagaatctcacaatcagccccagatattttctttgcattgattggtattcctgagtaggtaaaaggcaacatccctcttgtgaaacccgaggctctaatgatctgctcaatgtcttcatctttcatattactacaatagagagcagttttgctaggattcaggaaaagaccagctgttattgagaacaatttcaaggcttgtagcatatacttcacacttttaatctctcctttgcaaaaaatcaatacatcatctgcaaaag

SEQ ID NO: 9934 - DNA, 654 bp, Cannabis sativa
gtatgtcaagaagaaatctgcctgtgacatttagagaataggattagtatcaactcaaggtaaaaaaccgagttcagagactaaggtaggctaaacctgcgcctaaggtccaccaagcccaaggctcccccaaaaatgcccaatgatttagtttttaatgaataagactagtatcaactcaagctaagataattgagtttcaagggctaaggtggactaggcctacacctaagaccaccgagctcaaggacccaagaaaatatatttttcttttaaaattatacatcttgccccaataatatttcttctttttaaggcccacctcatttcagggccgaccctttataacagagttttcgatgaataagagcgagaagcgcaacttacttgagcagagacagcactagctaatcgagtagggaaatttttcggattagtgaaggattcgcctatttgatcgagtaaagaacccgacaacaaactcaagaagaacacattgcccaccaaaaagtaaaaaaccatgttgcaagtttttatttcctctttgctcttagagatagatccaggtagcttagccattccaagcatagcaaaaggaacaatgtaaatgaaacctttaagaattgcactcggaaggtaaccggtaacaattga

SEQ ID NO: 9935 - DNA, 754 bp, Cannabis sativa
aattattatacaaatatatatattaaggaaaaaaaaatgtagcgctaaggacgttagagagtcccacatatagttgatgttccagagaacccaataataattaaggctaacgatctaatagagacattggaaggactactggggttatacctttaacattcctttattagtaatatatgagaacttaatgaagtattatactgttatttgtgtaaagtatattgagtgttaatgaatattgttattagtactactaattagcgatttttataataattatcaaattaaattatgtaaaacttaatattttatactgatagcaatattacaccttgtgtagtgctattcacgattgatcgacacatttttatatttcccaaacttaataccatatatgagtatacactactcattattaattcactcattagtgcgattcaatataagatctataccacataagatattttaacaagtgatattaaatcgctataaatttatagtgtcatcatttcatgtgatgttgagcattttaaagtatcaaacactaaccttaacaaagcaatcgtgaaactgtagacgaagaagtgcagcaacaatagtaggatctttagtgaaagcggctttaacaacagttttaacggtggcctcaacattcacttgtgttgtttgagatttagaaagtggccaaaaaccaggggttgtagtggtgcattttttgttgtagtaactatttgcaggttgcaacaccaca

SEQ ID NO: 9936 - DNA, 831 bp, Cannabis sativa
ccattttgccacattatgggcagcatagttacaattccttctaatactcgaaaaattacaactgataaaagaagaagatgacttagcacaaaaggagagacatagttctcaagagcccattgatagcattaatagctagtctcgagtcactcttcacaataacatacttagaccctaactccagcaccacaaaaacagccaaacagcaggccgcagcttctccacaaagcacatccgagaaaaccaaccgagttgtgtgaacccgaatcatcctgtccagataattccttgctacaacaattgtgcacatactctctaagcccactctgcaaaagaagtacaaatctggtcaatacatttaaacacatcaagaggagtattattgtgtaccaattcgttgcgcgttctcaagatggtgtcaacaacaattgatgcataaagaaatacatcctcaattcggagacccctatttttaagatcccatatgaatttaacccagtcccaaacacgaataccattattacaaacagggtaaatgcctcaaggcgaagaacgccacaggtgtatcgccacatcacgggaaagaaataaatattcaacaaattcctctcccactccacataaaggacatcttgtatcctcaatctaaaatcttcttcctatcacggatcgaacagggagtgctttagaaaggatacaccaccaaagtaccttatgacgctctagaatattgctattctaaagcttattccaaagcaatggagcaacttcacagtgaggagctccatccatagcctgagccagatgagccgatttacatgagaatcaccc

SEQ ID NO: 9937 - DNA, 993 bp, Cannabis sativa
  modified_base (323)..(327): a, c, t, g, unknown or other
gattagactggggaatcattaataattcttggactgataccttccggatgccaccctcacccacttgggtttctttggatcagaccatcgagccttggaattagtcacttccacccctccgggctcacggtcgtaagacaatagtaagcgttttcattttgaaaatgtctggttaaaggatccaaactggagccgaatctttgatcaatcctggacaagtcccacggcccaccatgatgccatccctaatctcattgcaactcatgccacgtgcgctagaagtcttagcaattggaatcacaaaaaggattttaattttaagnnnnncattagtaagattgagaaagatctggaaaaggcccgctcaactcctttttgggatgatcgaactatagcaactatcaaagatctccaatccagacttgaggctcttttgtacaaggtagaaacttactagaaacagcgcgctagaactcaatggctggctcagggggacaagaacacaaaatttttccaccgctacgcctcccataggaaaaaagtcaacaaaattcaaaaacttcacttgccaaatgggggcattgtctctgatgaggagggtattattcgggaaattgaatctcattttgaccagctcttcacttcttcgaaccctgctaaagtggatatgcacagtgctctggagggcattaggtgttctctatctgatttggataaagcccttctgactgaagagttttccctcgatgaaattgaaaaagcatttttccaacttcccttggacaaagctccaggcccggatggtttcaactctaacttttacaaagctaattggtcaactgttaggaatgacgtcctcaatgcggcttccagcttcctcaatggcaacggaaatgtggctcccctgaacaccactctcatcacgctcatacctaaagtcaagaatcccacttctatctctgagtttcagcctattagtctttgcaacatagt

SEQ ID NO: 9938 - DNA, 514 bp, Cannabis sativa
aatgcatataagtagaacccaacgaaccataccatttgttgacctgagcgctaggccctttaaaccgcgcttttgatctatttttgatacttccaaggcttctgaatttgaggacaaggtctcctcccccattttgaccatgccagattctatggtcgcattagatttggcatttgagcaattgaaggcagcgtccccagttgattgtcaacttgggcgctgggcccagcaccaggtcaacctgggcgttgggacctatatccaaggagtcaggtttgtagttttcctcctgagtttgcttgaatctttattatttctgatgacggtgaaaatgcctagaacttttttctgaactgaatcagattcagcctaagttgacaaaatttcaacctcggggctaggcccagccccaggtgtcaacttgggcactaggtcccaatttttcccctttagaaatttttttcaatccccaaaaatagttatctcaatattatctgaagacgaagatgacgct

SEQ ID NO: 9939 - DNA, 780 bp, Cannabis sativa
tgagtttgttacgttgaaaacaatggcgtttgcgttgggtattattattattattatacacgtccgagaatgaaggctttcacaataccgatcgaagaccagtatgcgagaacgatgaccaataaaaagtcaacaaatgatttttttcttttaattttattttatgctatatatctaagtcctcccccaaatctttctaaaattcttgtttttgtcttctttagttttttttcataatatttgctgattagttaataatattttatatataagtatttttaatattttacttttttttattattatctacaaatattttatttttttattttattaattcatttcgaataatttaaaataatttattatgctaaaaatatgactgaaacatttaattccacttgaatttgtttttattatttttgttttacttataattaactattttaaattcttcttttggacatcataaattaccaatttttttaaaaaaaaataattaaatacatgcctattataattataatataattttttttttttgaacaaagggaagattttattcaaaaaaaacagaaccaacacaacaagcaccagctgcagcctaccaattataaattgtcatataaaaaacttaggttataattttttatttatcaaaatttaagtattactattagtcactaataaatacaattataaagtagaactttgaggatactttgaagactatggctagctaggcaccacttgttttagcttttttcttaccaaaacaaa

SEQ ID NO: 9940 - DNA, 1183 bp, Cannabis sativa
tatatatgtttgaataattcttgtctgaatcaattaatcaaattatgtggtttgttatatatatttatttggagttttggatgtaaatatatttttagctctttccattagagaaattactccaattagatttggtttttttggtataattagtctttacacgaaacctaattagatagattttgatgttgttctctaattttgtattaaatttgattcaattctcaaccttaatattattactttttacattttcgcaaaatacatactctgatgagagaactattttctattcttatagatattgaggttagaggaaatttaaatagtttattagttttgagaaatctattattacttttttttaggtgttatgatgtgtgaatacaactattttgtttttattttcatttctctgtttccatgctcttagtgcttttttcttttcctcgatgagctttttgaaattggaccaagaagtttttgttatttctaagaggtttaaaactttcatttgttgattccaatgcatgtttgacaaattaacatgttctgaggttttatgataaatggaaggaagcaagaggttcttcaccaattagaaaagagggcttaaattaactaaaaacccatatttaccaaaagtagctttcagttgtatgtaatatagttattgtcatttttctctgttagttttcagttcttgttgtgttcattatttaggtatgttgctttcatcgctcaaatcttagtatgtttaaaaagttttactattgttacttcacaactgtaaatctgctttttttttttactggtatatatatacctaaatcttgttttgatgactagattgaatctccaattatctccctctcttaaatcttgctttgattatcagaccactagattgaaacaccatctccctcacctaatagtgtttggactacaccactagaataaaagcaatcaacctttaaattttacgagaaggaacttctcatagaatgttgtttgcagatctgttgattaattgttcaaaattgtgggagatcaactacaagtagcaagaaaatttggtgatattgtgtttgattaatgaaataaattatagtattcaatgtactctgttctgcctacaaaactaatcaggtgctaatataaaaattctgaaaaaaaaaaaaag

SEQ ID NO: 9941 - DNA, 672 bp, Cannabis sativa
tggtctgtcagcgtaattttctcttttttttatataccatagaatattaagtatatttaattatgatatttttttatactttaatttttttattttttttacatttttatagaattctacacgtaaacttcaataataacttacagagtaatttaaattacaatcaaaattcatataacaaccaacataaaaattactagaacaactcaaactataaattttaaaaaataatatataaagtgattcccttttaattatttatcacatatttttatatttctatgtctctagatataacaatagtttgatattattaaaaataataatatttaaataataaaaataaaataactggtgtataatataatacaaaaatttaatatattataattttttttttttattaatgtacttcaaagaatataatagaacatttaatgtaagtgctctaaatacttatattttgttcactttaggttagtgatataaatttgtgcatgccataataatccaattcatattatactgtaatttttaaaatatgaatcatgtagtaccgtactataaaaaaatataaatcctgtcatgctgtgctaacattctaaagagtaagcttagcacaattcgtaggcaggggcggaggcactttaaagagtgggatggccctggccc

SEQ ID NO: 9942 - DNA, 705 bp, Cannabis sativa
ctagttggtagcgccatgcaaacaattcaccagtcaccacaaaatacaaataaaacaccacaccttttctttttctttgaaacactaaacagaaaaaccttcaggcttcaataatacgagaatgattcataaggttatgtataacgcaagcacgaagaaagagaagccaagatatataactttgtgcatgtggctcatgattcatcaaaagaaataatttagtgcctgtctagcatctgttttccatatatagtaaaaaaccagtcaaaagaatctacgtcctaaagatcatgaaatcatcacacaagttactaataatggttatgcacttactttaaaattattagaatatgaaggaatgctattaattaaatttccatattctgaaaagtatgggaaatagtttgatcagaattcacagcaaggatattttttacaatacctgcgtaaactatcatattctctgacctaataaattaacaaaatgtcaatacaacaaatattaagtgttgaatgtttttctttcaatgtgtactgaaaacacaatgaatttaatttatttgaacttcattcatatttatattatttattctttggatccatttgtattttgtagttattacgaagggctgtgttcgttattacttcaacggattatgttgtcacaataatttcaagcagattaaaagtagatagacaacctca

SEQ ID NO: 9943 - DNA, 878 bp, Cannabis sativa
aatgatggtcaatctctctcaactcaacactcatagatggccccatttcatctaatctttttaccatattgatcaaatccaattgattattatctcatgtcatgttaggtttagttaacataataatatataattattattaggaaaagacttaattaattctaagtatagagatcaagtggtaagaatcataaaaagagatgtattaagtcaaaacatatcttttgtgtaggtaatagaaaaataaaagtcttggtagaaagaatatatcgcgtcactagttgaaattttttaaattgtacgtgtatagaacaaaacaataaatacgagtgcagttgattgttagaattttattattagcactgtaaattatttaaaaatattcaaaagagtcgcgatacttattataactataatatatattattatttataaaaattaaattattatataactataaaaaacaaatatgagtgcaattgattgttgaaattccatcgtagaattgttcaaaaacacttacaaatatttattataactatgatctctattgtgatataaaataatgaaattataatatctctatatacaaagaataaaagggaaggtccctattaaaaaaaaaaagtggctttttactaaaagatactactagtatttagtactatttttagtattttattactattagtgtaattaagtgtcaggtctcatataattttaaaaaaatactttttgaaaaatatcgataactaaacgtgaaatattagctatagaatattttggacactactaatgcccgataacaatactcgatttttcataattatatcaatcaatgtcattaaatgactggtcatcccttaaatatgctatta

SEQ ID NO: 9944 - DNA, 764 bp, Cannabis sativa
actctaaatattttcatgctatggctagctctagaaggaggaacaattcgatcagtaagctaaaaagaaaggatggaacttgggccgattggagtactgatttgtctagtgtgatagtcgattacttcagtcaattgttcatgtcttcaacggtggattgtatggaggttgtgcggtctatcccaagacgagtttcagatgaacaaaataacgccctgcttgctgctattgaagatgatgaagttagaaaagctctctttcagatgcacccggataaatctcctggccctgacggtatgacgccgggtttctttcagaaatactggcatgtggttggtcaggatgttatctcccaagtgaagcagttctttgttacaggttcttttcctcatgctctaaatgaaactaatatagtgcttgtgccgaaaaagaaacaaccagaaactatgagtgatttgagacctatttcactatgtaatgtcctgtataaggtcatctcgaaagttctagctaacaggttgaaaagcatccttcctatggttatctctgataatcaaagtgcttttctccctggccgcttgatatctgataacattatggtctcgtttgaaattatgcactatttaaagcggaaaagaatgggaaaagagggtgtcatggctttgaaacttgatctgagtaaggcatatgatagagtggaatggatatttcttgaacaaatgatgctacagatgggtttgagtagggaatttgtttcacttatt

SEQ ID NO: 9945 - DNA, 1240 bp, Cannabis sativa
caaactaagtagtttcctctaaaaccttaacctgaatgaaatccttcttccaaacaaccaaaattcttccttcaatgattggactagagtaaaagttccaaccaatgaatttattgtgcattgtttcagtcattttagagcctctcatttaagtttcaatgattgcccctaaaccaactttctttattcgacataaatcaatcacagcctcctgcttcttgttactgttgaagcccctaatgttccaactcattatattgcagctatccattatcaatctcccccatgaataattgccattgtgtcaccatcttgctggccttgtagaatatcaaatgaattacttcctttctcatctgcatcagcttttctaatctccattttcctcttactggttgctatattcttggaggttttccagttttccaaaccatctccttgaacctcctgcataacctcaacaggctttgaagaaaccgtccttacttggcttttcttttccacgattctgatctataggaggagcttgattcaattcagtttcagacaccttggctgcctctttctgaattggattagtctccttcttattctcctccgcattaatcttcttcttcctgcaatatgccccaatatgactatatccacgacaaaaaattgcattgaactggaagccattcatactctacaggttgttcaattaaacgaccataatcattcaagaactctatcactcttagcttatctgagatatccattttaaccaacactctagcaaattttaccatggatcgctccttggtaattttgtctgtcattataggcttccgtaaattgctcacaatggcactaagactttttgtgccccagtagtgtaaaccaaggtctggtaatcggatccaaagaggaaccgacttcaccaaatttatagctgttaagtctgtcgaccatgggcgaattatgactatttttttgtcaaattggaggacaccttcctccaaaaccaggtcacgagttactgtatcattgagtttcacaatagtaaagcctccattcattattattattattattattattaagcatgcatataggaaataataaaacaccaatacacacatgcatagtgcttataatattattatttgtaatctcagcaggagtaatgcgtaagtcatccaaggttgtcttttcactcgaccaatccgtatcccaattttttttggtacttttagatgtt

SEQ ID NO: 9946 - DNA, 679 bp, Cannabis sativa
cttgaacccattgatgcatctgagggtctgggctacggagacgtagaagataaggtgggccaaggaaaggaggataatgggaacccagcaatggcgacattggaggcgaagggactgagattcggccaagaagacgagacccaagaagatgaagaaaagcaggaagagcttgtgaagctccttcttctgaaggtctatggctcgtttcttttcgagggtcttctcgaaatggagctggatgatagtgtttaaggcctggagagctgtctccttggggatcattgactgttggtgatggtggtggtggttggcttcgtagtccgccattaatggaatggggttattgtgagcttggacttggagactccactcagtgactcacacagttcaacttcttttacagtcttgatttagttactagttttagaagtgagataaaggtgggtctcatctaaggtgatgaaggtccgatctcgatgagtttcttaattatgaaagaaaaaaaaaaaaaaaatctaacggtcagcacgattcagcccatttcacaatgtttggaccaagacgagaataatgtgatgatgtgtcccattcttcaatagtattgggtcctactatagataacaacaataatatgagtaaaatattacaaaagtactctaaattaaaaaaaaaaaaaaaa

SEQ ID NO: 9947 - DNA, 579 bp, Cannabis sativa
cccatgatcactaagcatttaattcctgtcactccccaacctgaccgtgacccccatttattatgttttcagaaaacgattggtttccctcctccctgggttcatttcgtgcagacccaaatcatcatgacaataggctggagtagatttgagctagaggatgctacgcctgatatgtcatctcttcgccttctctcttcttcaccaagtttttccaagtatctttcttatttatatatattgctttttgcttttttcgccccacacccctctatttgcctgctatcttctctactgtctggtatttctttgtgcaaccttgtcaacatgtctgccacttctggtaaccctaacctcaccatccacatcagtgaagaggaaacccttgttcatgaattcgatcatgtttccataatctgactccaattgcttggttgtcaaaattctatccactaaaaccatcaagctcgattggattagcaatgcgatgaaggaggcttggataactcattttcctttcactatttcggattatcattctggccttttttttactcggtttggttgcaaaggtgatgg

SEQ ID NO: 9948 - DNA, 554 bp, Cannabis sativa
gtggttggattgggatgtggtccatcaagaggtgttggccgatcccttgttggccaagatttatgcggatttggaggaaaacaaagaagttcctgggttctcccttgaccatggacagcttcggtacaaaggaagggtggtgttggctgccacttcatctctcttaccctagtttttgaaggagtatcatgcaacacccattggtgggcattccggcgaatcccgcacctaccaacgcttacgagctgatgtgttttggacaggtatgaagcaacaagtggtgaattttgttaggagttgtgaggtgtgtcaacgcaataagtcgatggcgatgtccccggcgggcttgctccaacctttaccattgccgggccaagtgtgggatgatatcactatggatttcattgagggcctaccgcgttccgaaggggtagacacaatacttgtggtggttgaccgtttgagcaaatatggccatttcattcccctccgccacccttttaccgccaaaaccgtggctgaagcattccttgcccatgttgtcaagctccatg

SEQ ID NO: 9949 - DNA, 797 bp, Cannabis sativa
aacgttcattcaactattgtgcaaaatatgtaaatgcactactaacaactccttcaactacaaagaacttgttagtcccaacaactaacagtgatttgatgtcgaacaattgaaaagcaaagaagacgaacaaataatgaaacaaaataaaataaaactatgtcacaaaaataaaactaatcgcagtaacaaaaattttgtgaatatattttttttttctttttgtaaagagaaaatttggttggtttcgtttcaactttcaagagcaaaacttaataagaaaaaattcaaaaatgacagaatattgaatggatattattatttttttgaataaaaaaaagtaatttttattaaacaaagcatcgctcaaaataaaaaataacaaatcaaagagaaaatcactctcatgaaatgacgattagcataacatcaagattgtctaacaaaatattgagtaactcaattaacggaccggcttgaacaaccaataaattgtcagtttctactataatctttacaaatgattcgaaggaatattattgagagaccttaacttgaggatgtccactccattacaaaaaaaatactattagtatgatagtaattgtacactctagtttaaataattaaaaaatgacataggaagaatgacatttaaatttgagagttcttctttgtgagagttagtattattgtattaagctatgtttatgaccacacagttaatttcggtccaaaaaactttagacttgtgcccaaagccgaaaaaacgaatttaaatatgaagtgatatttat

SEQ ID NO: 9950 - DNA, 654 bp, Cannabis sativa
tatatataaaataaaataaaaatgcatgagctaaaaatcacttacaaccgagtcggactaaacattttgagatttttgtgcaaaagtttacaattgagtcattttttaagaaaaaaaaaaaagccctagaaaataaaagttttgtgcaatagttcaagttgttagaattttttttaaaaaaactattaagattgttagatttaatgatttttgtttaattttactaacaaacgtctaatataaatggaatagttcagggaatgcaatttgttacatgtcaaagtttaggaaatacaatttaattacatatttaagtttgagaggcgtaatttagtacaatcatattagtaaaattaatataaattaaataaaaattataaatcaaacaatctcaataatttggataagttcgaaaagttgacctaagtatagtccaaaatctttatattgttcctttccttacctctatcttgatgtcttatcttccaatttaggatagaaactagagaattaatcatgggatataattaattatgtaatactacacttaattaatttgaaattgaatgaaattactatatatatatatacaataaatatttctggaaaataaatatatttactaaactatatgtgcacatacctctctttcaa

SEQ ID NO: 9951 - DNA, 709 bp, Cannabis sativa
taattatgcaaacctaagcagtgagaaggacagcgccgccggcagccttaatcttcttctcggcgatcttggaaatgagcttggccttgactacaacaggttgattctcaggcaaagcaccctttcccaaaaccttgaagtaaccaaactgagtcacatcgatcaagggaacgttatccttggtagccttatccttcacctcctgaggcaccatagaccagagcctgtcgatgttgacgattggagagtagaatttgttgcgaagcttgtggaagtatctcataccgaccttaccgaaataaccaggatggtacttgtcgaagaggatccggtggtggtgcatacctccagcgttaccacgacctccaggatgctttctgtgcttgcctactcttccatgaccggcactgacgtgaccacgcttcttcctgttcttcttgaatcgggtagtcatttctgaactctctctctctctctgaaccttctctccctagggtttcggcggctgagagaagatggagcaatggagagatttatgtgtgaagatgggatttgaggagcatggactgatatgagtttaccgttttgcccttagggtttggggtttcgttctattgagacgggtgcaacgaaggaattaggcttcttgggctggcctcttttaaagtttgggcttctgatttctcttgtatttggataagttgtggga

SEQ ID NO: 9952 - DNA, 1151 bp, Cannabis sativa
caaaatagaatttctatacaatctttctgttggtcccaacccttgtggtctagcttggccagaacatgacaatccatcgtcaaatccttgaactcatggctgacccaaaaatgttttacctttacctgtacataggagcacatgtgagccaaggcccaaaaaaatagcaaaacataaatgatatgagtatatagtattcatataacatacaatacgtccctgtgtagataattgtgcactgcactgtacattacaatatttcatgtatattgatgcctttgcatctattgtctatatggtatagacaccacgtgttatgctcacacgtctactttacttatgtaaggctttaatagggtttatctcggtcttagtcaccaagtctaaccttgttatgcctcagtcgcaatactcttaccacttattcatatatatcattaatacatgcttaatcataggaaacttagagtattggccctaactcatattttcatataactaattatacaacatacaaatgcgctagtgtgctatatgctatgtgcttagttcgctgtcttacgtgagttccaatgtatgagaagaatttctagtccacaattgattaggagcaagtgtcggtattccaagttacatcccaagtttatacaaaatagggttaatccgaaaatcacatataatatatattcacatttaggactcaaactctagactaagtaatatagatcttaacaagttctctagcgatataaagaatgtccaaaacggagttctgagtcaaacattatggccaaaataagttttacgaaaatccgggttcaaaagggaattgttgccgcgaggtccttgcgacaaacccttacagagagcatcctatatttttgggcttaaggtcatcgcggggaccacatacatggtcacaacaactaggtttaaacccagaaaacccaaattttcacaacttcaaagatataccaattcaactcaaatttcacatatgctatgcaattggtttctaagcccaaaacatagtgaatgcaaacttaaatcacaataaaattatacatggctaatatacacacattgaagttcaaaaatgtcataattacacattcaaagcttgaaatctccaattcaaactcaaagttcac

SEQ ID NO: 9953 - DNA, 500 bp, Cannabis sativa
taaatttgttgaaagattacacatgcaacacttaataatgggaaatagaatagagcaaattttgttgtgtttcttagggcatctccaacggggaaatttaaattggtgttaaatcaacattaaaaaaaactattatttcaacgctaaatttaaaaattaagtggaaagagtataactatttgaaaattaagttatgagatatgatataacgcgcaccgtgtgaatatcgctattggtctaactaaatatcagtctcatataattttatttttttttttttgaaagaactacacttttagtctcatataatttaatataatagtttttagcaagtatcgctaaccaatcgcaagacgacaggtcttaagagtgctaagcactactggtgtccaatagcaatgttctatttaattatactaataataatatgatattaaggagtttacactaataatatcttttagtaattcttaatgagaaatgctaagaacatctccaat

SEQ ID NO: 9954 - DNA, 642 bp, Cannabis sativa
aagaattgttagtactaattttatagagagaaaaatagagagaaagggagattatcaaacactgtaaaataattagggattaccaaaaataatacctgtgcgtttttggaatcccaccattgtaatctcttgatcattgaagatctatagtggaatcaaggcgagctcgaagaggacgtacccgcacaatttcggggaacctctataaaatccggtgttatctcttcctcttcttttctacaatttctatattgtgtttgttatttttcggcttgggtttttctgggttataatcagtttagaaaggggtgttgctgggttttattttctgggttgttctaggcttgtatctgggctgttcttcgtgttcttcagcgaagaacatacgaagaagacaaaggctcggcttggggtttaattttctaggcagtgtgcaaatttctgggtattgtgttgcatgtgttcttcatgttcttcaaagaagaacagtgaagaaaggctcacggctagggttagaggaggttgatttgtatgtgtttgggaaataaagagtatatatatatggtgtgatgttttagggtttctaataaaatacgacctgtagtattgattaggaaggctgtcgttttggttttcctttac

SEQ ID NO: 9955 - DNA, 654 bp, Cannabis sativa
gcttttgtttgagagacttttcagatgttctccctgttaaacatgtgttggaatcgattacttaactgtctgttagttaagtttctgttattgttcatctgctttgtactaaactacttagtataaataaaggctgggctactcatgttgagtaatgctcttcattcattttctccctgagatttttttcttttggcttctgcctctggtttctggcttctgcctttctctttcaaagattcttaccttttacatggtatcatcgtcttcttgacttacgtgcatggagtcttcctcctccgatcctcaaactacgcttcctcatgctcctggcctcaatcatcatccttggaatcctttctccaactcactttcatcttctcttactttgaagctcgatcgcaacaactacttgtcttggaaatcccaagtcgttcccactgtaattggccatgatcttgaccaattcttgttctccgttgttactcctcctatgaatctggtgactggtgcggtcaatcctgagtatgttcaatggaaaaagaaggatcaacttctcttgtcttggttgcgatcgtcaatgtcggaatcgattcttgctgctgtcgctactctgacttcgtcttactctgtttggcatgccctggaacagag

SEQ ID NO: 9956 - DNA, 758 bp, Cannabis sativa
gtaatgaagtatcttttgaaaagcaaaaattaagcataattgtagtagcctagtagattttcacattataaatttgcagaacactctttgaaggttatgaaatcaagtgttaaatggtttttcattcatttgacacgtgcttgaaggttttggtagaaatttttgtttactttgattcctcaaaatgtgtacaatctggagaccttaaattgtgatgtcttaacttcctgttctgtaaaacttccaggctccacttttaaaaaagtatcctgcaaacatatcagtcactgcatattcatacttctttggtgctttgttgatggtgtcgacatcattctttttgacaaatgaatcaacagactgggttctaacacggtctgaggtcctagctgtaatatatgctgtaagtttcctatcgacatttttgtttctgttttattccttttgtttttacagaattatctggatcttgagctcatttgtaatttactttcctccttccatttagggacacatcaattatgttttagaatagaagaaaagcataagcatagtcaacaaaacaaaacttgcagttaaactgactcttttagaatatttcccttcaacttgaatgaatgattgagagaggaaagtgaggtctatgaattacgatgttctctcttttgcaaaattattacaaaaatctcttcgaggtttgtgttttgttatatgtgcacatgttgttttggtgctagcagatctacagatgatatgtc

SEQ ID NO: 9957 - DNA, 841 bp, Cannabis sativa
gcaagagataaaatataatttaaaattttgatggataaaaatttaagtaaatactattttaaattttatgttttgtaaaaattatcaatttcactatttattttattaatgataattcctaacgtatttaataatattacaaaataataccatagatttaatttttatcaattaattttttaatataacaacttaaagttagtattcaacataaatagacacaaaaagaccaacttcgtcacaacacttttagattattattagattattattatattttattttgataaaaataaaattcaaaaattattttgtactattttaaaaaatataatctaaattattatttaacaaaataaaaaatttgagcgtttgatcagtaatattttatattgtttaaataaaaatatgtaaaactagtactttttacatattaatatgtgggatccaataaagataacaatggaatgagacttttattttaagtccttagcctaatcatttgtcttgaaaattatatatagaatatttagagaaaaaaaatgttaaagactactttcataattaggacttgccaatgaaatattaaaaaaaggttgctattaattaaatcatacaaatattaatatattatgaacattgaaatattttaggagacaattatcgcatgagtgtcactaatatcttattgtagggatatacatatagtaagcatatttaatttatttttgaattttttttaacaatttacaataaaaaaaatataaaattgaaataaaactcaaatgcaagttaatgtttaaatcttatattattctaaattttatgaaaaataattgaa

SEQ ID NO: 9958 - DNA, 532 bp, Cannabis sativa
aatttaataattatccaaatatatttggctaacttaatcaaaaatatatataagaaattatgaaacaaattatttaatcaaaaatgtatacatgaatgattatatattcataattagcccactcatctcatagaatattaatctcatcgttagtttatggcatgacaaccctaacctatatataaaaaaaagaaaaaaaaatcattaattagtaccgtgattaaaaatatttaaaataaacttaaaatacttattaattaatttactcattttcttaattagtttattggatatggttcggtcatgtaatcttcaatgaacttcataatgtagtatctacgttgtacctcatctggtttatggacatacaagaatcatatatgtgatgagaacaatattgcatcatcctttagctttattgtacatgttcatcgagtcacacaaaaaataaagttaatatatacaatatcaaacaaatttatatactatgttattgcttatggaacttatgtagtaatgacttcgtaaatct

SEQ ID NO: 9959 - DNA, 732 bp, Cannabis sativa
gcaactatcgattgtttttttccaaaccaagagacaagattaacaccaaaaaaaataacataaccactcgtggagcgtctatcatcaatactatacaagccactattgagatactatagaagtcgtttataagcatcccaatgaatatatatcgaaaaatgaatgaattgacttagtttgttgataataaaagcaacgagtcaaagtaagatactgttgagtacctaaagtgctctgatatcaatgattctatgagagtaggactagcatttgcaccctccatatgcagctttgacagcaaaaattctcttatataaatcagcaatgaggttagagattaaaaataagaacactgtaaggacctgtcatgtagtccacatatattaaaagaatgatttgattaggactagaaaaaaacccatgtgtgaagagagaatcctgtgctgaacaattagtttaacaacttagcaaatgtttaacagaaaattaatacaattagagcttactgattataatgctattattatatggggttcttcatttttttttcttcttcaacagaagaatgattttttactaaattatttgctggaaaaaaaaataatgatgatagcttaagcaatgattctatcaatgttaaactctactatatacaattattcaggtgagtgtagagagagatttattgcaggcaggtctggtccatacattatctcaatcacaagaatattc

SEQ ID NO: 9960 - DNA, 509 bp, Cannabis sativa
gatgtttggtggcaaccttggatctcgtggttggaatatgctgaattccgagcgcttatggaaacaattagaggaagggcgccttatttacgcagtgtggcggacttaatgtaccgtaacactagaagcaggaatcgtggctttttgtgttttctctttggtaatgatcttggaactaagattggaggaatccaaatagcaaagaacggagtagaggattttattgtatggaagaactcaaattcgggccaattctctgtcaagggtgcgtactgggctgctcaagttggccgattcaatgacactaataggttgtggggttggatttggaagtccagcattcatcctcgcctgagcatgatgctttggagagtctgtgcaaatgttcttcccacagcaaacatatttaactctgcagcatgtaagtgtttattttgtgactctagccctgagaatcattttcatttatttgttgaatgcccctttgctttagctctttggttcagtag

SEQ ID NO: 9961 - DNA, 508 bp, Cannabis sativa
ctcttgtgagtatagtcaagtcatttgtaaattgatatttaattgggttggtctcaataattagaagttggagctggaagcttgtttgaaatggattaacattaagatgtagacaatcaacattccacaggaaagtttatattgctattgttaattttgtacgatactgtttatgggaagcaaggaacattgctctttgggataggaaaatgtatattgtacatgctattgtaaatagaattaagaaagaaattagtgaaaggttttcgcttcttaaaaaggagaaacatagtttataagatagattgtgctttggaaagataggaatgcctaattaatatgtacatgtgtaattgattcttgagcaatagtatttctcatttaccaaaacaacattattattatttaatttaacaattaggtaatagcagcttcaagcaaatatgcattgcatgttactaatacctagtgcatatatatttaaatatactaggttaatattacatgc

SEQ ID NO: 9962 - DNA, 563 bp, Cannabis sativa
atctaacgggtaaaaattaacttataaggttgatcatcaatttttgaagcccgagtcacgacggcaggacccgctccaggtaagtcggaccttatttttgtaactcccttgggagtaaagtttgaggtcaataactttagaattgcaattgaagtgtgagacatgacttgatagagcagtgaaatagcttcaaaatgcaagttgaattgtgtcaaatcggatcaatatttagtgagttatggcagttttactggaggcaaatcataaatcagtgcccaggttgacatccagtgcccaggttgacatcacatcacccagattgacatatgacgtcttccggttacgcactgcacctctttcctattctttggcgattccatatctatcaaagctttaatcttttcagggttcgcctctatgcccctctcattaaccatgaatcctaggaattttcctgaggacacaccaaatacacatttcaattgatttaacttcatttgatacttttagagagtggtgaatatttgtccaaatatttgatcagatctcctgctttcttggct

SEQ ID NO: 9963 - DNA, 670 bp, Cannabis sativa
ataactactttggggctttgaatagaggcagaaaataagtaggaagggaagagagaaccgattggacgagagttaacctttccacccatcaattcgcttagcacactttcccaaaattgattcacaaaagctccactttctaggtgagcccagaggcattccaagatacttcatcggccaacttcctacttcacaaccaattagagatgcgcaattcgacactacctcttcatcctacaaaaccccaacaattggctttcgttcaaactaactttaatccaaaaatggcacagaatgcttccactatccgtaccaacttttgtagggagttctcatcattctcaaagaaaagagtggcatctgcaaattgtaaatggctaacttgaaccttctcttttcctaccacgaacccaaaaaagttacttgagcatactgctttattcatcattctaccaagaacatttgctaccaacatgaacaggaaaggagatagtggatctccttgtctaagcccacaggatccttgaaactttccccttggtcttctgttaactccatatctctccaaagcctttcttcctcaaaaccaaatcaaataaatctcattctacacgatcataagctttctcaaaatcaattttaaagaccaaaccactcttgcctttatttc

SEQ ID NO: 9964 - DNA, 1020 bp, Cannabis sativa
gcctttgttttccttaatgggcttcgtaaggcccaagatcaagatgtgcttaatttgttacggtttttacacaaatacttgttttttacttttacatttttagtactgttcctattatttatatatataaatttacaaaattaatttttttttaaagtttcaaaattacaaaataatttgtttcagttaaaaataactaaaaaaacaagtgaaagcaactaaaaaaaataaatggaacaactagacaaaaataaaaaacaactaaaaaaataatatgatatctacaaatcaacaaaaaaaataacaaaacatcaaccacattggaatatgcaaatcaatatccactcctcaacctcattttgtacaatgaagttttttactaagttttaacaacttgattctcttttattattacattatttttttttttcagaataaattgcggaaaaactcccaaaagtgatacctagctagcaattaactctcaaaatccgattctgacgataaaactcctaaaacttgtattttgttagcaatttaccacttccatccgattttggttgttaagagctatgttgcaatgtacacgcagataaaatgtacaggcgacataattttattaaatggaaacccataacgaccaaaaatggggaacttgagagaaaaaaaacacctcgaaaggatagctcgaagctacctacagaggatctcaaagggacggtcgacgcgattcaaaatcgttgtgtagggttttcatcctttttagagaaaggaattgtgtttaaatttatatttgggttttctatttaaatttgatttgatctgtttaatttttttgatatgatttggatctgaaaaatgggctgaggtggtggtagtagtgtttagtatgatgaagatgaagaaggaaataactaaaaaaaaaagaaagaaattggaaataggatatgtaataaaagaaaggagaaagaaaagaaaatgaaaattaattaaaaaataattttttttaatttttttttt

SEQ ID NO: 9965 - DNA, 1089 bp, Cannabis sativa
tgattcccactattctacactcaatattgtaagtgagtgtattcctatatatatatatatattcttctactttttttatatataatatatatggcgtatatattgtatattatatattgtatattatgtattgtaatatttatttaatttctttgttactccttatattatacagtaataaaattgtaatacatcttaatttttttacattttaataaaatctctaactaatcttattggctcttgtactaaaaaaaagtcacctcctaataatgctatataaatatatttatatgattcttgacaagtgacgtttttgtgtgtgggattggttcatggcacaaagtcaataaaaagaaaaaagtttagtaagttgtggttgagtcatgatagcttgaaagttgagtggaaatatatatgcattgacttctttttgtgtctataaggtggaagagaatgagatcatggcatctatttatagatttatatttatgggccactattcttttttttttttcttaacttatgggtcaccttttcgaatcatgttccgaataatatatataattattaggggttttgaaattcatgtaaaaatttacataacaattaataaaataatttaaattgtaactaaaatctatacagcaacccacataaaaaatatcaagttaacctctaaagcaacttaaattatatatttaaaaaaaattaaaaaaataatatacataataactcccttaattattattcatatatacttgaataaatactattttggtgttatatatattttacattacaccatatattgacttatttaaaatatattgcaaaaattttatttttttacaaattttaatatattttattcattttaaagatataatattaatatttacacattttcccatataaaaagtgaattacaacctcaattaattaataaaatttgtttatagtaatgaatagtattttataaatatagagtatatataatgaattttaaagaaactttaaaatagagaaagaatttagaaaatttgatatacgcaagtgtgtttttaggtggcaattggttggaggtaa

SEQ ID NO: 9966 - DNA, 1074 bp, Cannabis sativa
cactatttttgaattacacgtggttcttttggctttattttttctaactatttttggatttagtggctttttgaattggatactcattagattttttgttttagctctatgtgtaatggaaaaaatagaatgagataagatgtatcaaaagttaatgattgtagtttcctttatattagtagaagccagaattctgtcgcatatggtctggctagaagtattaaactcgcaagtattggtagtggtttgtatcgtggagagggtgatccccctgtgatccccactttttgttctgtgttttaatcaaactggtgttctttcaaaaaaaaaattggagatgaaaaaattagttcatgtattttatatatggtattaacctcccacacattgtgaattgagatcctctaacaacaataaagattgattaatgtttataaggtttcaatatactaaatcaagttcttaatttttttttagtatgagttgaaaatctcatagttatgtactaagttgtgaatatgtgtggtaaatctatattttataaagcttacaaaaatatgtaaagttgttgtcaaataaaggctctaatcgtgctccactttttcttttacctcttttacaattaatcaactaacttaaattataagtaatttttataattttaattattttttaattttttaataataaatacacataatcacatataacaactaattataatcattagacattgaatatataataataaatactcgcattattaactcatagcttttaaataaattaatataaaattttagttatatattttttaataattttaattataaaattataatactttatgttatatttgaattttattattattttaatataattataattgatatataaatatttattattatcaaatgataatatttttaatacttttgagttagtttatttctatttatatatccatgtcataatattatatcatgtctaaatctatatttttttttatgtggtatcaaaaaactcaattcatatttacaacaatagttatgtatgtgaatacgtgtgtta

SEQ ID NO: 9967 - DNA, 1233 bp, Cannabis sativa
gggtgatacaaatcagaagactaatgctagataactaaaacattattcgagtgaggatgataaagtgaaggaagtatcaaggataaaggagagaacttgagtggaagatgtgtattctacagtttaggaaggtaggatttcaaatgagattcaagatgattagttggttattaataaagactaacaattaggcatgaaggatgattgggctatttggttaattcctaaaaagaaatggtcaaaacaagttgtaattgctgatctaaaggcttcaaccagcaacagatatgaggtttttcaagaacctggagatggggaactggtcacaaacaattgaaactattcatggaagtttgtaacgtcttgggttggaatgttaggggcattattaaaaaggagaaacagaggtcaattttggatgtttgtagagagaatattgtgggtcttggtgctttatttgaaatcaagattaaacatgagaaggttagtgatatggtttctaataatttccctaaccgggatcattattctagtagtatagttattggttgtattttattaatttggtagtctaaatttgcccaagttgttatgttgtttgaagataaccaattaatccatatcaaggttaaagttgtggggattgttgatgagatcttcgttacaacagtttatgggagtaataatgctttagaaaggatagctctttttgataagcttgttggttttggccagataaacaagccttaggttattgttcgagacttcaatgcaatgtatggtttctaagatagaactggtggtaaactagtcttggctaaagacattgaagatgatcaaaattggatctcttttggccaagtagaggaattcaatttttgggggcccatttcacttagtctaacaagcatgatttggggaatagaattcattcaaagtttgatagggtatatttgaatgaaggatggctggattattttccaaatactgaagcatgttttaaatgggattgaattttttattattgttattgtgttatcaaaagtaacaagattggtagtgctggtattaaaccgttcaaatattgccaccattggtctttccacaatggcttcaaagattgagttttgacttgctagaacaggtctgttggaactataatgttaactgatataggcaaaaagttgttgagagttaaacaagctttgaagaggcttaacaaggaggagattg

SEQ ID NO: 9968 - DNA, 669 bp, Cannabis sativa
gaagcaagcacatccaaatggtttaaaaaaaccataatctggttctttgggaaatagacactgatatggtgttgcattctcaataactggttatggtagtctattgatcacataggtagcatgttgaaaagcatgccaccagtaagaaagttgtaaactagattgggcaagaagagtcattcctatttcattgatgtgtcgatgtttgcgttcaactctcccattttgctcagggtcatgaggacatgaatgctgaaaatggattccatgtgtagctagaaaggatgcaaaggttctatactcactcccccagtcagattggacatttttttatgggaaaattaaactgtttttcaactagggttttaaactgcagaaaaataaggaaggcttgagacgtaagggacattgggaaaatccaagtaaaacggctaaagtcatccacaaagtggatgtaatattgaaagccttccttagatggcccatgggatggcccctacacattagtgtgaaccaattccaagggtatagaagccctagaagttgatagagaataggggagtttgtgtgttttgcctagtttacaggcatcacagaacttgagattctttaaggagtagctgatatttagtttatgtaacacctttgcaagtgtagtgtttggggcag

SEQ ID NO: 9969 - DNA, 604 bp, Cannabis sativa
agttggcacttcgatctttttcggccactactaaaattaacgaataaataacaagtaaagttggcttaatttaattgtatattcaaaataaacaagtatgaggcatagacgatagatatttagctaactggctcaaaaagccatcggtgctttatttattgaaaaaggttaaaagacacctaaagtcttgttcgataactattttgttttttgtttttctttatttaccttaataaaattttataatttgttcttagtttctgattaattaaacagaaaactaatttttttaaaattaccgaacactacctaggttaatacttataatttaaatatcgagtcaaatattttttattatcataaaaattataaatttttttaaataattataaaaagccaattcattttgatacaaacaccttgatatcttagcaacactcttgtttatttatttttaaattcttcagtacctcataacatatttctttttattaaaaatactaaaatatactagtagtacttaacaccttcataacatatgaaattttatataatttaatattataatttttaaatacaattaatacataataataataatata

SEQ ID NO: 9970 - DNA, 657 bp, Cannabis sativa
ggaacacatagcagaggcaaacattgacgagaagacgtggtgtcatttgatgtatcaccaaaaggcctcaacacttgcttcttgtttgttgtatcacctaaaagaagaacacatatgacgtgagttgtgcagtgaagagtcacatttttagaagacatgtcctctgtccaacgactcgatttcttcttcatcaaaaaaaaaagaaaaagaaaaaaaaagaggagatgtttctttatatacaactaatattgtcttgtctctacttcacaatgacacactttaacactcacattgaaggagaggagaagagaggtttctaatttctttagaagtaagtacaacttgttggacaagaagtaagattttaatttcttcctttcgaacttaccaagtagcagaaaagtgtttttttttttcatatatatatatattaactttttagttggtaacatggttagcttaatggccagagacgaggagaatatcccagctcaaggtagttttcttgtatattatatttgtttgaagacaagtataccaaaccatattccatgttgtaattcataataactactattattatatactataagcgcatgtttctttgtaaaaaggaattgatttaaaatcattttcataagaattggtttaaaacca

SEQ ID NO: 9971 - DNA, 649 bp, Cannabis sativa
ctaaaagatcttctcttctgtaaccaatttttcattccccggcctctattcattaaacaaatttttacatgaccaaaaattttaaaaagatatcacaaaaatatgttaacatagacaaattttatttttatgctttacatatttttatttacaaaaatatatatatttcagtaaaaagaatatattttttttaattgtattatagttgtgatcgttcctgaggttgttttatagttaattttataactatcatgagattgatttctcgttgttttttaaatcgtaaagctacaaataatacatgtaaaaaaaatattattttttgaaattttcatattatttttgtttatataaatatttaagatagagcattattatcgggtatcagtggtgccttacacctctaaatatattgtcttacgattggctagtaatattctcttaaaattatgaaactatatgagactcgatacttaattagaccaagataatgatatacataaaaaggtaataagcatcactgatactttttaacatttaaaaattagattgagaatcttgatttattaaccacccactccatttaaaatgatattttgttttgtttacttagtttaatcaattaattagtattaaattataatatgac

SEQ ID NO: 9972 - DNA, 839 bp, Cannabis sativa
taataattaattataattgttgtcccaactattgtacatggtgacgtggcatccatctgagtgacacgaggagaatatttcatgacttggacagatcgtacgctctataacatactgtccaaagtaatatgtcattcgtaaataattgatttaaagaagaggttgaaaaatccagacaaggtatgttataacgtccgaccagtagccacctcgtaggcacttcgcatatgctgtctaggatgaatgcaacagtaaatgcctcaaaaatacctttctcttttgtttatcaattaaatccatatttttatgtgatttttacacatgattattgttttgtgggaaagtatgttgtttctccttttatcttcgacttgttttgagaaactaaattaatgtaattatttcttataatattggagtcatttcactattcaagtatgagaaattattcattcagcgaagcactcaagctgctcaaatctctataaaagctttcgaaaaaaatcaagaacttcttacttcttttctcataagttaatacaagaaaaagaggagtaggctattactactatcacggggctgaacctttataacaatttcgtgttctcgttacttaattattatttattatttctaatcattttaattgactcattatcgatcattggctaaaagcgtggtcaacatagtcatccaattttcgcacagggtaatgttgcatccactgagtgacacgaggagaatattccatgacctggacgggtcgtaccctccataacataccgtccaaagtaatatgtcattcgtaaacaattgatttgaagaagagattggaatat

SEQ ID NO: 9973 - DNA, 1575 bp, Cannabis sativa
attgctgtcgcctccgtcagtgagccgtcaccacctccgaccgtcatctccagtcaagacatctcctccattgacgctaccactttcgatgtcgtcgctctgccttgttctcctccgattgtgacatctctttcgaaaacaatcagtgctcatccctctgtgtttgatccttccatttttggtgtacttggctccggttatgccgccaatctccctacttgtggaacgattggacaaacttctacatccacgatcgaatctagcttcgctctgacatcatcattcatggcctctcaaacacacattccgcttccgccatgttctcctttgatcttggctccgacggtcccacctccgacttccctccctttcagcaccaccacgactccagccaccaccttcgcttacccgcccgtccagagctcctctcactttcttgctggtaacaattcttttcttggacatcaaggccaaatgccttttactgataatttcttgtttattgctaatcacgacttatcttgtgctgtttttgattaaccttctcatgatgaacgtactccgtatcatctgggaactggagatcacccgaatcacctcattgcttcattcctcttgactggtcaagaaaatttcaagtcatggaagcaagcagctttgatcaacatcgctgcaaaaaacaaaactccttttattgaaggtaccatatctcatccaccaccaaatgattcctctcgctctgcgtgggacattggcaacaacatagttagtcatggattcttcaatctgtatcttgcgagatcgttgctagtatcatgttcaaaaccactgcccgtgaaatgtggacaaacctccatgcttgctttaatcaaagcaacagtcctcgtatttcacaactcgaaatcggtgttaacaacgttaaatagggtgataactcaatcaccacctacttcacccagttgtaagctctttggggtgagcttaacgaataccaaccaaatatcccctgtacttgtggctatacttacggtgccatgcaaaaagttcaagattattacacaagagatcaaatcctccagttcttgattggtctcaataaatcttactggggcatttgagcttttagggcaataaaagggcttcgagataaaggagatcgtgggatccaagtggacgttcccgatttccatggctgactacatcccgagaactttcttgatggctaagtagcgtggagaagttctttgattggaaagaaccccctcccctcactataaaatgtgttctctatggttgttcaacaagagcactaacactgtcttgacaacactgatgttgttggctcttggatctatttagatttttagtagctccgttttttttagctctacttcaattcagttttttttttaattcctattttatgccatatataaacctcatttataaaccctacagataactttttggtattttgccgtgagagtaagtgagaggtttcatctctaataccctaatatggcatttattgctgaagtgtatatatatacattttaataatattaaagtattttg

SEQ ID NO: 9974 - DNA, 666 bp, Cannabis sativa
aatgctattattttaattttgaatgtttgtggtgcgaatagtgtgatttttagtcaatttattgcccatagcttcaaagaaaaaaggattcaaagaaagaaattggaagttaagtacaattttttgaaaatatagctcaggaaaagcttgtaagttcagaaattaaggcattcatcttggaaagtcagcttgaaaaaactgaggaagctcaaaatttaatagctcaggataaaagctcaacgggtgtggttaaaatataaaaattcaagtatttaaagaaccaagagaatgctcatactaggagcaatgtccttaacccaggaggcaaaatgattcagaagggaaaaagtgcacgagaagtaaatacaacaactagaataacggcaaacattgagcaacactatgagaaattttaattaatatgtatatatttataattaaggagccaatccaaaaaaatacatacaaggagtttattttattcatcaaaaatcgacaaatgatctccacaacaagttgcaaaaagtctgtgtagttactagtaaaatttcaagttcgagaatattttacaaaggcactgtcctccaaatacttacttctaataaggctcctcttgccaaattcgagcccattggtaagatcccaatgttgagcattgaggtcttt

SEQ ID NO: 9975 - DNA, 806 bp, Cannabis sativa
cattaatagcctcgtccatgccaacttccctagaaacataaatagcagatattccttgagcatttattggtgatttgacagcattgatacccatatcagctccatcagggcctccatccaatcctccagatcgtggaattgccattttcatcccttgattgaagccgccatttacacctcctaatgttgatcctttcaccactgattcttcaccaccacagtcaccggaatcttccactctcgccattaatccttgtctgagccacctcgaaccgatagtgtgttgtctcctccttggcatggctttcaactccaaactatacggttttttaatcagatgaggcggagtatcaaatagttttggacagaatttttcagagtgtccaagaattccgcatataaaacagaatgttggaagatcttcatacttaaaaatagcataacacatttatcctcccttcttctctaacttcattctgcgttttaatggtaaatccacacgaaccgtaacacggaccctaaggtaatcgcgccatattcccaggaaattattcttatctgcctctacaaaggtacccacatagttaccaatgtccttgaccacttttgctgacataaaaccggttgacataccatgtagttgaatccaaaaatctaatttgttcggcaccacagatcgtggaatctctccttccttcagtcttgaaaaaaccagaggtactctatcaaaagtccagggactaccctccaccactctgtcgatatcaatcgaatgataaaactggaacaggtataagttctcctcc

SEQ ID NO: 9976 - DNA, 715 bp, Cannabis sativa
ttagacagaagtattccttgaatctaacaattttatttttaatagttcaagaagaatatttaataagttaaaaattaatttagtacatattaaaattaaggttgaaaaaattataattagcataattattcatcaaaaaaatattaaagtctatatattcttaatgctatgttatttgttatttgaaaaataaatagttgttaattaattttactcaattttatatatattaatttttttaatataaaaatatatttgatgaaaatttatcttatttatatttttactcttttagaatgtaaaaatatgaaaaatatatattaaagacatatttatttattcatgataattaattaattaagcaattacaaaatagatgcttatataatttataatttaattttcttaagaaattaaatacatgaatgaaaacacactatacgtcatatgatcatgatagcttgatctaaattatcttcatttaaaagcttcatttttttaaaaaaaaaaaattactacttatattgttctatatttataaaatgttaattctaaacataatttattaactattttaggttttaacttttatttttatatatatggataacattatacattgttgattaaatagtaatatatattttaaataataataaaacatatatattgaaaattataaaataaaaaagtgagattttgaagatgtatttta

SEQ ID NO: 9977 - DNA, 754 bp, Cannabis sativa
accaagtcaattcgacccatcaataatcaacaaatttaagtcatgaataatctaattattctgttagctacaagaagatacagaacactaaaaaaaaagggtctttaagccaaaaattgcgcatattgcttatttctttattcgaatcaaagctacaaattctcagagaatcgagattattagtaagacaaaaaaaaattaccctctaaaaaatcacgcataatacctttaatcaaatataaataaataaatatcaatgaatttgacccgctgccattagaaaaacaacaatcaaaattttattccattatattgtcagagtcttggatttctaacaacaagatcgatgcacagagagtcaaagcagatgggtctgttggatactcactctttctccgaggaaagcaccggcgataacgaaagtcacgtagacagagttccggcgcatgatgactttgtaaagaccttcgaaaaggccaccgccggttcttcgagcagctgaatccatggctatctgttaatcttccctaaccactgccttgttccgttcggatctgtaacctaggttttcagaaattgcgttctttcccaaatttttatttacggaagtttacaaatctatacagggaagggaacaagaaaattatttggtaaacaatgtttatgggcctattttgaatttgggtatcatgcttaaagcaaacaaagtgggctgggccttattattaaggggaattttaaagggttttttttt

SEQ ID NO: 9978 - DNA, 506 bp, Cannabis sativa
acacaaggtttgactgaaaacccagcaggcgctgataataccgatggtctcctctcggccactgagacaacgtcatctcataatgttgatattcgatcaactttgtgacacagcaaaaaggtaggggaagtagccgttggcaatggatttggtccttgcatcagcaccggcgtcagagtcatgagctggatagagttgttatatctgatgacccttcgtgagttattcatcataattgcatcgagtcttagcttctttgcctggccccaacacctcttgcacctcgtcgtgtcttcatagttatgccttagtggacggcaggggacacgagcttgaggatgtcagtggtcggtcatctctctagggtgttggctggccagatctgagcttttagggatgagcgtgaatacggtgagtgtttcaagaccatgtgcgttcatcttatgtaccttcttcagacggtcgagggtgtaagccttcaatcttgagaatacctttgaccaaga

SEQ ID NO: 9979 - DNA, 596 bp, Cannabis sativa
atattgtccgctttgggcctaaactctcacaattttattttggacaccttcccaaaaggcctcatactaatggagtaggtggaacacttatacccaaagcaactcttgcctattcgttcgatgtaggactttggttgatacctaacaatcctcctctcaaaccaaggaccaactcgtgacctaccctccagcaaaaccactttgtacggctgctatcgccaaatagaacacaccgtctgaccttcaatattgctaggaagactttcaacacaagacacgaaacacatatctgcatcttatatcaacgtaattaccaacgagacacaccacttgactactacaatattaagtagaattttgtcaagacaccatacatatcttcaattgcgaggtcatcacattgaggggttctcccacacattgcacatccagcaacccactatcccaaattttgaacttttagctctaataccacttgttaagccctattctttcaccttgttgggccgccatctcaacctgactccaacattagtatgatattatctattttgggcttaagccctcacagttttgttttgggcaccttcccaaaa

SEQ ID NO: 9980 - DNA, 1028 bp, Cannabis sativa
gttacattctgctcatttttttttaataatttgtttacttagcactaacatgatttaatttagttcagttcaagagttataagacaaaatataaatatataaataataatctaatgatgaattataagaatatatgtatatgtattttttagagttaattaatatttatatatttaatatcaataaattagattttaggtagcttataaaagttgttaaatatatagaccctcgtaccgtaactttaccggtaagatggctacataaacaaattgtttaaaaaagaataaaatgtatttaaaggggagtaatttgtaataatttgtataattcgaggggatttttataacaaaaaaataattcaaagagaaattttataaggatcatagttaaggccgaccttgtgattgggtgggccttagaaaaaaaaatttattgagccttttatataaaagaaatatgtggtattttaaatattactaaaaatatatgtataatttaaaagaattattacataaagcaccaaattttttcttaaacttttcatatttttacgttgaaagttttttcttatatttttactgtattctataaaaatactaaaaaaaaaaaaacacatgaaagtaacaagaaaacaacatcaaaataacataaaaatcaataacaaaataacaagagtacaacataaaattataccaaaagttcgtattttatgtaaataaaatttaaaaaaccgtaaaaattttgaaaactctttacagaccgtatttttgtaattttttatgttatttttgtattttttttttttttgaaattatccctaatttaaaataaaaaatattttttttgggcacttgagctgggtggatcctaggtgaagacctagcccgccttaacccaagcccgaccttgatcatagttcacaagaaaaaaaaaatcttatttattcatttaaatatattgagacatgataaataattataccaataataatataacattagcgtcattttcaccatacatatgtt

SEQ ID NO: 9981 - DNA, 622 bp, Cannabis sativa
cgagatcacttgataccagacaaaggtgcaaggcgcaagaccacctcctgcacctgcagctcacaacactatgatatcatcttgtcctttgttgaccacaagtgtatcccagtccattagagcctatgaatactccattctcaaatgtgataggggttggagaattattttaagactcaacaagtatttttcttcctccattattgctcgaagcatttctttaaatttttatatttttatattttcctcctcattgtaagtcttgtacttgagttttagattttttggccgttatttgattgatgagttttcaccgtcaacatcattgctctaggagaggaataggcagccagaagggtattaccctcccataaggtaccaaggtccaaacagagaacacatgagtttctagaaggataaggacctcctaaatacccttattgtgtgtggtcctaaattctagagcgctttttaaggaaaagcactattaactatcccctccattcaagtggcaaaacaagttcaccacaaaaaattaataccttagggatttcccccacacttttttgacgtacacgcacctttcccaagcacaggctaacgactcacatcctcaacagtt

SEQ ID NO: 9982 - DNA, 557 bp, Cannabis sativa
atagtttacatcgaaacataaaaaatgtaagtacatagaaacagaaaagcattataaaagttgtaaatatgtgtttttgtgaaatatgaacttatgtttttttttcttcaaaaaaagaatataagttctcaaattagatgaactatgtgagaattcacctattaagacataaataacttataaaagaaaattatattgtgatgcttaatcataaatcataaaaataaaagattggaacgcataacaaataaccaataaagatctagagatctctcaaattgacgattaaaagacactattattataaaaataaaacaaacaagaaaaaatacataaattacattaatctcaaatttgtctatttaaaaaatgttgtgtctattatttccaatccgataatacataaattacattaattgttaatctatttattatgcattcaacatgaatttgggctggtattatactatccaaaaaatttaatgtcaaaatgtgttattttggtggttagtaataattattatttatcattatactattattactttaaaataatg

SEQ ID NO: 9983 - DNA, 591 bp, Cannabis sativa
ttctttctaaaattacaaagaaaagtaccattacatggagaaaaatgcttaagggattctttctatggcatcatgcatgatgtcatatgaagtgtttatatatgtttgtgataagtaagcaagtaagataaggtaaaagaaatagagaagttcaatttagtatctctattgttgatttgatgtccaaatttgtaataaaaatgctctaaatctattatactattataaaatgtttacaaatgtaatttaatatcaaatcttatttattttaagttacaataaaagtaatttatagtataaatacttaaattttactctcgattacagacaaacatctaagtttaattgtacggtaaatggctgcataacataccgaaattccaaaactataacttaaatattattacaaaattaaatttatatatttatctccaaaaataaaaaatatttacatctcaaatttctataacaataattttaaaataacatgtataaccatttaaatgttgctaaatactaataacaatgctcgaattcgacttagaatatgagtttggtttaattatcatcattaatcattaatcatcaaat

SEQ ID NO: 9984 - DNA, 501 bp, Cannabis sativa
aggtactagaaaaggccaggtgtacttcatcttagtttgatttcaatatttgtaaaaagatttgtgtttggagcgtttcagtaattagatacctcatacctgtagtatacaattataaaatgtgtttagagcgttacattgttaaatttcacgagtatattctggaattatgactatgtatgtattaagtatacattggtcatatcgcatttgaagggataattaggagttacattaatgtttgtcattgaaatgattatgtcctcatttaattataatcacagtacatttatttaagtaagtccaaagaaaatatatggtttttgtgatatactaaactgccgatatttacagcatacatttgaaaactgaatgtacatatatatattaacaaaatgaatagtgagtagtaaagtcctggaacaacaataacctcttgattaaaataacaaatagcccttcattagaaaagcttcgtcggttaaatatagtaacaaattg

SEQ ID NO: 9985 - DNA, 595 bp, Cannabis sativa
tcgtcgtcaagtcttatatagtggaattgtcacagcaataggtatggccttcttgtttgattatgaaaaatctgtggaattgaattgaagttgagtttgctatttactataatttttaagctaattaggatttttatgatccgaaatttgacatatatcaaatcatattctcgaactttttaggccgttaaaaattcctcccgaactattgtgattgttggatttaattttactaaagtaacgattgtccattaccaaatcgtaccccctgaactttgatatctgcaatatcgtacctcccgagttttgacatgtatcaaattgtggccacggaactttcatccacgtcagacttcgattagtaaaattagataaaagtccctaaattcaacaatcgcaatagttcaaagagaatttttaacggcctgaaaagtttagggggcaaaaattctaattaccctaatttttatagataaaacttaaaaacatacattgcttatttagttcatttgagcaatttatattgcactttaagatggataaatatcatagttcaagttctcaacttctcatccaataaaagtctgacttattc

SEQ ID NO: 9986 - DNA, 998 bp, Cannabis sativa
taagaaatttttaagacattaacgaaccatattaataggagaaaaaaacgttgtgtctttattagaaacacacttttcaaataaagtatttttggtacctaaccatactgtccccatgtaaaatataaataattgggtgagtatctagtgcacctcagaaggataagtctccaatattttaatttctttttctacaatcatgttgtaattaccaaagatttatcaaaaaataatattatacgtgcaacaaaatatttatcacaatgtacataaaaaacacaaaatgtttctcaaataccaaaataaaagaatgtatcagaatattaagaatatatatttgtatttagggttaatttaggaaaaatgttaaaatatatgtagtgcttataattaattaaagaatgttatattattgttagtataattaaatattaaatctcacataattttatttaataattattataaaatattattaaccattttatttaccaagtatggtgatactatatactaatgatgatgtctagtaacaattcttaaatttaatgagaaaattttggcaaaaataaataagtttccaaccttcaagattagggacttatattaatgggtgtgtataaatcgatccaatctattgagaatcgatcgatctacttataactgattgtataatattggatatctaatcgtgatcggatcagattggatattatttttaaatatctaattggatcgtatcgcatggtagatggtagtatcgaaaaatctaatacattcaacatccaatcgaattaatttgtattgtaataattatattttatattgttatacttaaaatctatatgtatatataaaaattaacatcaaaattttactctttttttcttggatttaatggattcagtttaatccaatccaatccaatacatactggacttaaaatattaaatggatctgattcgattcaaaagataatagatttaatatattgggta

SEQ ID NO: 9987 - DNA, 625 bp, Cannabis sativa
ctatctttgatctcttttgcttatattgaatttttagatttaagcttattggtggtgttctttgtatgcttaagtgtggtgtttgtatgttagtagaaataatgtgaattgtgatcattttgctatggttgtgtgatagtatttatgatagaatcatccttgaagttttgggaatctttggattgggttttggtgtttattttttgtgataacactttgaatttctggatttgagctttgaatttttgggttccaaggtttgaagattattgtgctatgttgattttcttattgtatggtaagttgtgtttatggattttttgttttgaactatttgttgagctcaatttctcaccaatgttagattggttatgtgaggagaaaatcttacactattacaaaaataagccttttatcccagtttttaggggcattttatcccgattttcgctaaaatgaaaatcgagatatatgccagtgagataaaaggtcttataaaaactgggataaaagaccacttttaatcgcggttattatagaaaaaccgggacaaaaagccatttttaatcacagttttctttaaaagccgggataaaaagtgattttttatcctagttttcctata

SEQ ID NO: 9988 - DNA, 588 bp, Cannabis sativa
  modified_base (88)..(93): a, c, t, g, unknown or other
atattaatttgttgttggagacatcaaacaataataatttaacttttttcgtagttagttatgtgaattttttttttaataaatattnnnnnntttaatattgaaaagtaaccaatctaatctgcacatgcagattagatttgagctaatataaagattgagttagatccaaaatataaaattttgaatacattatgagcaaaatagtgtggattagattaaatgaactttcctattattgcttggatcttgtcacaagtagccctaatgattttgagtttgtcatttgtcaagtgaatgatttgctgatcactaatgtctctaccactattctattagcattgtgtagacagtaactcagtaatggaaattaatttgttgcatagttccaataatgaaaattatcgagagattacagaaggtaatcataacagcatccagaagattcaaatgcatgacatctaaagtattgttctaacgatttacaaaggcaataccaatgagcaactgaaacataaagtagaaggttttcacttacaggacgttcaaaattggagaactcaggaatatttgctatttgtttaccaa

SEQ ID NO: 9989 - DNA, 776 bp, Cannabis sativa
tcttcctttttaaagttcgtatttgcatcccatggcttcattattaccgaccttctattgaaaaaaaatatacccaccattaaggacttgatctctgaattccatagagttgaaccttatgataaaaataccatatgttagcattattactttgtcaattttgtcattccagattctgttagcaaaacctttcaatatgtgtaagagagggttcgatcccaacacataacatactatggatggtttccagaaattaacctcctcctcaatatcatctagagtgatcttaacctttctagctccttcagattgcttcaaagattgctctaaattccgtacaatagatccaaatttaagaacagggggagtcgaaagcttaccttggattagagcattgttacattgctcatttgcgtggatgaaatgcagtaagtccttttgagcttcatctattcttctaatctctttcagagaggatttgggagacaatggaggctgaaacacatcctgaagtttagtgtgcgattcatcaatccttctccccaacatttcaactagatgttcatcctcttcatcagacatttctagaggtcttgttccaatcacaacatcaatcgacttcgttcgtatgacatcagattcagagttagggcctttcttcttcgatttctttgctgaaattttttatttttcctagatttttaatctagttttagccataactccagcttcaagttgctagagcaaaaatgaggcaaatattattattattatta

SEQ ID NO: 9990 - DNA, 1009 bp, Cannabis sativa
taaaatggttgtttttgtcttaaatttgtgtatttacactaaaaagaaaaaagaaaaaagaaaattgtgtattttcccctaactgttaaaaaattctattcatgaagttcgtaacgaaattatttgggtctttaatctttatcctttcttttcttctgtcacacttatcacgatggatggaaaactcatgtgttggcctggtctcctcacctgattttcaattgtcaattttttttattaattatttatctactatctgtacttttggtaattaaaattaaaagaaaagtgaaaaaaaacacgtgatgcttacgtgtatttttttttaaaagaaagcttacgtgttccttttaagcattctaggcattttaccttaacggttttatatattatttaggaaaatttctatgatgtatttttaaacttaaaatgagcaatgttcatccaattaaatttacattattttgttaacagtggatctcatctatactaaatgcatatttaatgttttaaatctaatttaattagcaggataatttaaatctaatttacaataataaaaatataaaccaaaaaataataaattctaaggttgagagaaaaaaaataattatagttaaaaatggtgtattttcttctctctcttcataggaaggagaaagaaggaacatctgaagcttgagatcaagaccatcgggtatgtggaactggagcaggagcccccttcgatctaggaagtggaggttacgagcatgactgaggattttcacgatacctagtcggagttgggagtggatttgggccagttgaatgaagcatagctggtaaactctgggattaaatcttgggctgaggaagtcgaggtggctaattttcaaacgttagccaagaatattggagcaaattcaaggctaatcaggttaggaccccctcaactagacttgaattcactgaaccactaaaacatggagatcgttggattgcaaaaattgatatagaagaggttgaa

SEQ ID NO: 9991 - DNA, 681 bp, Cannabis sativa
tgttctcttgcattactctctattcaagttgttttcttctttgaatttggtatagtgaaaacaaggcaatacaattctttggtgtttttgactgaaaatagtagtaatgatgttttgaactttgatgattaacaaagaaatccaactctgttctctctctgtgtatttctctcagatttatgtatacctcatcttgcctttactttcacttttttgttttttatttctgaaatttttaattgatttcctccacttctcagaacaaagatcgatgaggcttctcaacaaattcgattgctctcgactccgatgtatggatagtatatctccataagtaattaaatttaggtgcgatattattttgaagttagattactgctttccctctatatatgcgtacctcgaccaattaactaatttaaccaaggtctttgtaagaagtgccttcgggtctgttgcggttaagtatttttaactacctattttttctttttaactaacttctctattcaaactcatcttttccctcccctttttggtttttttctggtttgcctttcgcctttttcatctacttttggccatcttttgtggatttctgctctgttttgatgctgctttacctctgtgcattgctggttgtcgatcatggatcccattacgaatgctctcaacaatact

SEQ ID NO: 9992 - DNA, 505 bp, Cannabis sativa
gcaagccagaattaatgagcaagaagaagaaatcagacgcacaataatttatacaaatacttacaataagttataaaaacaataaaatatgcttaaataaaataatttatacaaaataataatttaaattttataatatgtgtttgtatttttctagtatattatcttttttaacgtcagtgtcgtcaacgtcaatgctcaactagcagatggtctcataaaagccatcatcaactctagattagccaccttcagaagaaaactttgaatagattatgcatccattctcagtttgaggggtaagagagttttttataagttagtgatgagagttaattagttaatagttatgttagtttgtcaagctatgtctaactaattcttgtcacttaatatgaagaaatgagaggtgacttggctgcctacttgtgtctgatttggcagctgacatggctcccacatatttggagaatatgtcaaaaggaatattctagattgtacaatt

SEQ ID NO: 9993 - DNA, 1159 bp, Cannabis sativa
aactttatggcagaaatttgaggacagactgattctaagggttctgggaatgtgaatttcataataaattaggatatgattataacttataatgtcccaattcttagaaaaatataactctaataaaaccgaaaaacctacgaatcctacaaccttaaattttctagccctagagttattcaaacactcaaaaccaaaatacccaaatagcaaaacaatgcagacaaaaaaaacacttaccaaaaaattaaaattgaaagtatggaggaaaaataagcagaaaagagtgtcacttactgtttgatgagaaattttgggcaaagaagaacttcgcgattgaaattccaaaaatcaaagagctaagttttgatattttttagggggaagaatgcaatcagaagaaactcgcagaaagaatgtaaaagatatagagggcatgaaaaattgaaaagagaaagggtgattgtgattttgtcgaagcttgaaggtttgaggactgaaaaaatggccaaataatgcacagtttcaaatttatacctaaaaggtggccactgttcgatcgaaggaaatttaatctaacatatgggaactacacaaaaaaaggaacagtcggagcattaattgagaaatgatgtgcctcaaaattttagactgccaaattctaagcatgaaaattttaaacgaaaaaagtacaattatacccttgaagacatttaaaaagtattttttagggggcaattgttatacccaaaatgtagctgcttactagaagctgacacgtgtattacaaaaggaatatgaatcatctcaatgattataatattaaattgcattattaaatgcagcttaaataacttgtttcaattaataattgttgatagaaatatttaaactcgctaccacataagcatatgcgagataagaataataactattaatagatgtagttgatgagacaatatgtcaatctcgagataaatagagtatatactagaagtatacaagacgagatatcaaggagcttgtagtttattgacccacataattgggaataagagcgtgcaacttactgacccacatatttgtacatgcagaaaaactacattcatccatctcgcattctacgtgacggagtagccacctcgctagtatcactata

SEQ ID NO: 9994 - DNA, 601 bp, Cannabis sativa
  modified_base (238)..(240): a, c, t, g, unknown or other
aagaaaacaatcaaatctcttgaaatattgttaggttgatttggatcaagtattgttactggtttttaagaaataagcactggtagtgcttagcactttctaaaatgtactatcgttatttgtataattaagtaatgagtctcaaatcagtaattaagcgatgctagacatccatagtgcctcacatcaatattgctcatggtttttggtcatgtaataataaataataataataatnnnaataataataaaaataatcataattatttattaagggtaaatagtagggtataaatatttaaagcgttaaatttgtaagtactaatataaatttaacgtttatttttaaggacataaatacctaatgttaatttgtagaatattgtaattttttttaatttcatcagtccagactctgctattatcttaaacaggacatttataaaactcatattttagatcattagatctagacaaaaatatgtagtatcagttccaaatattcttttaataaattgatcaaaaaagagtctttactaatgatgaaattgaaagaagattacaattttacaaatattaactactcatgccattaattaca

SEQ ID NO: 9995 - DNA, 637 bp, Cannabis sativa
aaaaaaaaaaaaaaaaagaaaaatactaaaaggcaccaattatgtttagtatcactaaagtgtcgtataatgcaattaagtatcaaatattttatcattaaatataataaattttatgacatattactaattaatcactaacggtcacctctaggtaatacaaaacacggttagtacttaatatcaatgctctaaaaaggtcctactttttttatattctcacataattaacctatgatagaggctaatgattagacagtaacttttccctaacacatcttacaactttgttcctaatgtacattatccaaattgttcacaaagaaactttattcttattataaaagagcattaggggggttagaatatatgacttgataaaattcttttgtgacttaattttatttttaaagaacttcagttcgagatagattaactccaaaaaaaattaggattcatagtggggaatccctcccctttgcagttcgaaaaaccggtgtgaaaatatctagtatccttaataatcttttagcaaaaataaaattattacaacaagaaaacgaattaagcaaatgtaaaagtagtttgtgacttaattgattaataaatttttgagttgttctttcttcttttgaaa

SEQ ID NO: 9996 - DNA, 675 bp, Cannabis sativa
catccacctcagccactagcgaaccctccacacctatcacagctcaaaatcctataccagaaacagtctcattccttataaaccatatcagtaactccaatccttctactgagacacaaccccataatgaaacacaaacaaaacctcaaccaaccaatataacccaatcttcatctataccacaagttgctactacaagcaataaaactcataacatgcacaccaggtctcaaaatggcatcactaaaccaaaatcctacatggcaacaaagcatcccttgcctgaatccatgtttccatctgaaccaaaaagtctcaaagatgccttgagtaatccacactggaacaatgctatgagtatagaaatgggagcccttcacaaagccaagacatggacattggttccatatcatcccttaatgaatgtcataggttgtaaatgggttcatcgtgtcaaaatgaacaaagatgggtcacttgacagatacaaatctcggttggtagctaagggatatcttcaagaggtaggcatcaattttgaggagacctttagctctatagtaaaatccacaacatgttactaatgcgtttctcaatggaccattaaatgaagttgtttacatgaaacaaccacctggttttgagggtaaaaattgccctacacatgtgtgtaag

SEQ ID NO: 9997 - DNA, 762 bp, Cannabis sativa
aaagctgtgttgctgtctccatctctaagccagttaatcttagctttctgctgtaaaaaagagttgtaatgttgttgtgctaagataaaagaattcctagcatcatgttcttgtgcatgcaacacttcatttagagggtctttatgcaacttgctctgaacttcatcaaggtgttattttgcttgagtcaaactgcttgcaaatcagagaaccctttctggttaatctctcagaatacatttttcagagccttcaacttttacactacctgatacatgctagtgcaattgatttgttgtatccaagtagcagcaactttgctatcatattcaggatgtgatttccacatcctgaaatacttgaatggtttctttccacacttctatttaggaaacaaagacattatccctggtgcatgatcataggttccctcattccaaaataaagcttcagcattcggataagtatctaactatcattgattggccatgactctatctatcttcaaaaaaatatggtcctgaccctgttgcttgtttgtccacttaaaaaactaccagtagctttaatgtcttctagctggcaggtttgtaagcactcaatgaactcagattcctcatggtattttactctgtgtcccactctctcatctttatctatgatggcattaaaatccccattagtacccacctgtcatctgtttttagtagtagtaagtccttccacagttctattctctctttcctgtcattgaaaccataa

SEQ ID NO: 9998 - DNA, 567 bp, Cannabis sativa
tgaattaattagttttaaaatatatttagtgtttttttttcaggtattatagtactgctaaatactaataataaatatcattatacttctcagatcactaagaataatctgagatatggcaaactatattgcaggggcctactatttaatttttttcttgttaagagagagattggagggtaaaggcctatggggtggctaaatatagttttactataatattattttgaactctctaatttataatatctacccttggtattattagctctataaaatatattcagttgtcatttataataaatagggaaccttatatataaatgtatatgctgaaatatatatcacttacgtacatattttggcaaaagaaaagtacatacatatcagatcattatatatatatttatgtatagtaatggatattacgatcattttttttgttaataatgctttgtggtcggctacatcatttgccaacctataattagtactaaaatgcttgctcaaattttatgtatgatcaacatgattaactcattagatattcgtatgttgagttaatta

SEQ ID NO: 9999 - DNA, 521 bp, Cannabis sativa
agcatgaaactcaaaataaacattattatctctagcaaattgagcaacactgataaggtttttaattatttcaggaacatgaagtaagttattaagaacaagagaatgagaagaatgccggggaaagaaataagattgaccaatatgctttattaacaaacctgaaccatcaccaacatccatttgatcttggcctccttagtcaaaacaattaggaagattctgagcttggggagtacaatgatttgtggctcctgataccaattggtgtcaattgagttgttggtggtggcaagattagtctgagcttgctggctccactgctgggtttgctgagttgatccactgctggttccagttgccgactgtggtcctaagaagaatttatcaaacctatagaaaaaatcataggcagtgtgaacaaatcgcaggcataattggcattgaaccttgttgttaacattttgattcatgttaacttcagatttaccacctcgattgacaaaagcattacctctgtt

SEQ ID NO: 10000 - DNA, 764 bp, Cannabis sativa
aacctctagcctcttcatcttacaaaacacgtaccacccaaccaagaatatatacgatgaaggaatcaaatagaagggcgcaatcccaatccttgcaatcagactcactaagtaggttctcaaggggaggtgagcgccactagaaatatgggaccaaatccatgcactaaatccatcaacactgacagatgcagattccccaaggacagaaatcctacgccacattagaccaggaacattggaaagacaaccaacttcggagtacgcttgcaacatcctgtaagatagaaagcagttggctttttggtccatttcccatatggattcagggcaaacttgcatctccaaaggagtttctctcctcctacagctcctattatctacaggaagatctccctcaccgataggttcaccttcgagaatggttcctaaagcttccaccagctgaggtgtgttaagttgtttttacaattattttttagattaattttagtgtatttttaatttagttttacttttatttggagcaattttacacttttgatcttttattttcgtagatttaaaatagaagaagattagaaaatatcaaaggaaaaagatgagaaaaaaagataaaagatcacataagtgtgcagatggagaccatgccacagcatggaaaagagcatgccaaggcccgtgtcaatggtgtgaagacgtgtggaaaagccaacacgggttgtggcatagaaagggcatgtcgtggcccggccccctaattc

SEQ ID NO: 10001 - DNA, 1398 bp, Cannabis sativa
tcaatttcatttctattgtcgttcatgattcaaattcctcttgcaaaatcaccatttaacctcttgagaaactagtgatactatcatattttggaaaatatatatatttcaattttaaaatattttgtaattattgattgaactttttgttttgttaaatgataaaattgaccatgtattttctaaaattatataaataggacttatttaagctcaatgttcgataattttttttaaaaaaattataaccaatttgaagataattcctataacatgaatagatacgttaaacataatcagttttatcataaaacttctagatcgggttattattaagttttagtttgacaaaaaattatagtctagggtactatttagtactattttggaaatttagggtcaaatctattatttatcaaaacagatagttcaatcaataatttctgcaaaacacatgatccaaaatagtatatattgtgataattaagctataattcgcagagcacatataacggtaagtcaatacatataagttaatgacataatatcgttagacaactaatcttaattcaattatctcgattgattatgtgaagtcaaaaaacacatatactatccaaagagttaaacaaagattaagttgaaaagacatctaaaagaacgagacttaaactcaagaaaatttacggtcaatataaacaaaaaacacaacctagctggttgaagatctcaagatttaggcttaataggacaacctaattataaagaccttctaggatcagtgtgtgagttagcctctactcattctaatgatacaatgaaacttgattaaattaatgcaagtttagtcttaattaaaaaatcaccagaagtgtgatcgattcgaaggagaattatgggggcttagttctcttaaatctctctcacatagaatgagacatatgttcgtggccacaaaatgaatataaccatgagaaccaaaaccaaactagaaagatatatatgcgagatatatcatcgtttattcatttgcacgaataataaaatagttcaaaaatattgtgtttactgattcgctagtaaaataaatatattttcacgaaagaagatttaaatgttaacgtgtcactttattgcgtcgagtctaaaaatttgatcaattttattcatgtgtgagttcgttgaaagatgtgaataaaataattttgtggtttgtctcatattgactaggaataaaaaatttatactccaaaagttatataaatatagactttcataagattaaaaatttacacacactcataagcaaagctaagactaattgggggcggttgtctcatgagaaatttgattcgattctatgttattaagggtttaaacttaaataatttttttgac

SEQ ID NO: 10002 - DNA, 1343 bp, Cannabis sativa
catctagccaaatccatggctaatgtttccaagccttctacctcaaactctgatctcctcaatacttggtggaagtccctctggatgcagaacattcccccaaagttaagcactttgtatattaactttgttatgacactctacccactgttgttaacctatattgtagtaatatttatccctcccccacttgtcctcgttgtgacctgtatcctgagtctattcagcatgctttttttaactgtaagggtgttaagagggtgtggtcatgtacggtttttaagcatattcttagtaatttgagagaaaaaaataacattgatatattgttatacattacatctcactttccaagtgatacttttaaccttttttatgcattctttggaagacttggaacagcaggaactcttttgtgttcaggaatcagcaggaacaaccctccaggatatgtcaggaagcaaaggattttttggccttttaccaacaggctcaacaacaacaaagaactcatattctccctcatagtccaaaccaaagtaggaagtggctacctctggagatggggaaacacaagcttaatgtggatggcactgtttcaaccaggatagaaaagtcgagtgctagcgctttggttcgaaactcttcaagacaagtcgtggttgctttggctaagagtcgtcaaggaaagatgcccccaaagacagttgaaggttgggaattattacaagcacaacgctattgtcgagagggaaacatttaaattcaccaggtaaataacacttggctttggaattgcaatgacccctacccgtttttactgtaatttgtttgggtcatttccactaaaaaaatacaggtacaattagacttgtgaaattacttattacacccttttatccttgttcaaatctaatttttaaatccaaaaatacaatcccgtagctgaaagggctatagcaagtaaatttatctattataaaattatattattatgagcacctgcctcctatagcctattaaaccacaaaaaaagtataaactttatttaaaacttatgtcaactgacacataaatcaacactcatttaatgtaaaattgaaggtgtaactcattctgccaaagtacacaacaagttgaaatcgagcgcctatatatatattaagagaaccactaattcatcatgaaatacttttaagatttctattttctaataaaaaaaaatggacattcttgatcaaacattacataagcatactcttttagaaagttttacaattatgtacccaaaatttaaaataattacaaaactattttcagctaatttatttataataatatca

SEQ ID NO: 10003 - DNA, 758 bp, Cannabis sativa
ttattagcatatggattccagtgattgttgctgaattggccagaattgttccttgatttgaaattggggtttgcaagattgatggaagctgaatcaagatccttattcttgcgttcaatgcggtgttcttgagccaagagcagggcttcaagtgcagtcacttctatgggttcagctcttgaattcacagatatgataaaggtatcataatctggagaaggtaagccacaaaaaaagcagaaatgtgttcttttagtgaagttttatgcccaacagagttgagtttatcaattagggaacgtaccttgagaagatactcattgagattataagaacctttcttgaaattctggagttccgtggtgtattgatcaatccttgcttctgtctgagatgcaaagtatgtggtgaggacataccataattgtagatgtttcccagttcactactcgagtgaggattggttcggtcattgagtatagcagccatgaatacaatagttgatcttgttgatcccaatccatgtaagcagggtttaaaattccagcaacgcgatcttgttcagaaagatattgtggtggagcagtgaacgagtcagagatatattgttgaagcttgtgtcctctaatggcagaaaggacctaaggtttccataacagataattatcatggtcaagttttgtggcaagtttgtgagagaatacaacgggattgaacgagagaccaccaaaactagtagctctgttctggctggttgc

SEQ ID NO: 10004 - DNA, 732 bp, Cannabis sativa
ggtgtttggactcattggactttaactttgatttgcgtgaaaatatttatttatatggcattggacagaggcgtgagctattctttggtagggcaatactataatgaatagtgaatatattgattgacaacgaaaaagaactagttaaatcaaaagggctcaagagatttctttaatgcagggagaaattttgttgaaatttgtaggtaccaaaatggctgtgatatctagtgatctttgtattcttctctctttatcaatgatcaactctatgtttttttttctctatcttttctttactgtctccttttcttcttattttaatggaaattgtcagtaattagtttccattattgagttatgttcgccaagtgattttaaaaacaatgttgttgttatcaatggaattaatgaaacatgaatattcttttcacttgcagtgacaatcaatggagttgttccaattggggaggaaaatcttccgaaggatggcgcagattgggtggagctttttgttagagagatgatgactgcatctgacatggatgacgctaaagctcgtgcatcaagagtgcttgaggttttggagaaatccatctatacacgtgcaagtgcagatgtggcccaaactatccaccaggttcaaaattatctttttgattttatctgttgcctgtgcaatgctctaatacagaaattttttatcttcttttgttgcttagaagttgttgg

SEQ ID NO: 10005 - DNA, 648 bp, Cannabis sativa
ttcttcccaattggaacccttttagccgacccctgtactcctgttgagtaagtagacgggataaggattcagccgctaggataaatagagaaggagaaaggaggtctccttgtctcaaaccacgctctggtttgaactttccagagatggacccattgagcaacaattttatttccttcacttctatacatatccttatccaattcgtaaatggagcagtgaatccaagtcgattaaggaccaatagaataaactcccaatccatcttgtcataagccttctccatgtccaattttatcatcatgaatcctctagtccctctttttttcttcatggagtgaactatttcccttgccatcattgtgttttcagctatatatctccctctaacaaatgcagcctggttaggagagatgaatttttgcaatggattccttaggcgagtagcaatgatcttcgatatgattttatacgtcacattgcacaaagcaatgggccgataatccttagtataggccggggaatccttcttagggataaggacaatagaagtgtcgttgatgaactggggaagttctccgttgtggaagaagtatgataccatttctaccaggtcttctttcaccgtttcccactggtgtgcataga

SEQ ID NO: 10006 - DNA, 1263 bp, Cannabis sativa
aatggtactaatagtcgtggtcatggttccactacaggacaaggaggtagaaactataataatcgatgtgcgaattgtcctatctttcaggtgtgtggttgagttggacacaaagcaattaagtgctatcacaggttcaatctgagttatcaaggtgaaaacaactcaacttcagctgaatctccttcagatgaatctatagccctgcttgctacttcctcaacagttgcttatccatagttgttcctcgacaatggagctgctcaccatgtggtgtctaatgcacagtacctcactgacaaagtggactacaaaggcaaaggcaaacttactgtaggtaatggtgcttctcttcctattctagctattggcaattcttgcattctatcatctaaatctttgttcttgaacaaagtgttgcatgtccatgctatccaaaagaatttcatcaacatctcaatttattcttgacaataattttgtgatcttgtttgactaaaatgtctgctttgttattgataagatttcgaggcaggtccttctagagggaagccttaatcaaggactctaccagctttcttttccctcctccactcagcatcatcaacatgttgcttctgccttagccacttctgttttgcatacaccattagtgcatctcagtaccactaaatactgtaataaaaatacatgtacacatagtacttctattgtaaacaattgtaaagaatccaatcgaattgttgcaatatggcacaatcggttaggacatccttcatctctaattctaggcaaagctctacaaaacaatgaataaaaagttttccaaatctgctttatccttttgtgatgcttgtcaatatggtaaaaattatctatgcatttgagtagttcatccctcaaaactactcaaccattcaaacttatccattcagatctttggggtccttccccatatcctacacctgaaggatatagatattatatcttgtttatagatgagtttaccatgtatagttggatctatcccttaaagaccaaaacaaaagcttttcccaccttgtttgtagatgagtttaccatgtacaaacaagatattatatctacaaacaagatattatatcttgtttgtagatgagtttaccatgtatagttggatctatcccttaaagaccaaaacaaaagcttttcccacctttctcaccgataaaaccttcgtggaaaaccaatttgacactaaaattaaggtcctccaaacagact

SEQ ID NO: 10007 - DNA, 578 bp, Cannabis sativa
gacgatgtacccgccgccgtttacgacgcacgggtactcgatgaatcagaggctggttgttttggaattgaaagatctcagccgtgttttgaaggggcagtataaggtttctgtaacggcgccggcgacggcggttttggctccaccgggttattatattttgtttgtagtttatcgcggagttcccagtgagggaatttgggtgcggattcagtaagtaaatgatagattgaaatatttcaggtactgttaattgtttcttttctttatttcttaataactactattgtttgttgttttattttcatgtgtaatttttctttttttctttttttcttttttttttttgaacaatgcatatgtggtggaatttattgaaaaaagccctactgtctttgtttatacatatatataaatataaatatatatataatatttgtatatttagctagttcaagttcgattcagaaattaaatattggaagacaaaagattagtattttatgtgcttaagtttttcttattattattttgagagaaaataatgttgtattaattattataagtaagaatatgaa

SEQ ID NO: 10008 - DNA, 1175 bp, Cannabis sativa
gaataggaagaagaggattgagttcttgcattagaaagtaaaagagtagtagatgatcataattgtcctaatttctttctcattattatttttattaaaatctcatttaaaatgttttaattttctttgttagaaaatttctgaatattgtttgatcaaatagaactaaagagttgattgactggtaattgatgaatcaatccttgaggacgatacttggtgtactaattttattacaaattgtgactatgtgcacatgcataacttaaatttcacattaaatttttggcgttgttgtcggtgactgaaaagaattatcaatatcagtctaattaatttttattctaatttgattttaattttccttctttctaacttgtttagttgctttatttgactatctcaggtgaattatgtcatatgtgtagtagaagaggagcagacattcttgttcctttgaatcatgagattgagaaatcttgcaagcaaaacagaaaaaacaagagggaagcccaaaagtcagtggagatggcacagaacgatgaggattacaggaatgatttaattcttggaattgcataagggggtcaggctcaagttaatgctgaaagaagcctgagagactatgtactgtccactctgacgggaatacaaaatagtatacgttcaccaactgttgaggctaacaattttgagatcaagtcagctattttacaaatggtgcaatcatctgttcagtttaatgggttgccttttgaagatcccgacactcatttgtccaattttgtggagctttgtggtactttaaatataacggagtagttgatgacacaattaaagtttaaaatgaactaggatacaattcaagtggaactcatggaaggctatattgatgctgacttaatagagattcaaggaaatcaactacaacctatgtatttttaattttaggaaaaattgtgttagttggaaatcacaaatacaactagtggtaactctttcatccacaaaatctgaatacattgctgcaactgaagctctcaaagaaggattatggattcaagacatgttaaaagagttgaaaaactctaagatggaaatgatgatgttttcacagataatcaaatcgcactctatctttgtagaaattctgtctttcatgatagaacaaagca

SEQ ID NO: 10009 - DNA, 604 bp, Cannabis sativa
acactctttagtacgatgaccaaccccttgcatgatgcacacacaataggcaaccattcgtatttcacacatagttgtatttcctgattgatttcatttgtaagagaaaatcacttcaagaaattcttgatacatgcgcactttaactaatattctagcaaagttgagtctctcctcatccttaggtacttgatccaattgaattggagtgtcaagttgccccacaattttaaacaaagctcattctcccgagtattttatgtcaaggccatgtaattgaatccaaataggaaccaaactcacctcatactgctgaaaatcggcatagggatcccaaagtttcatgaccactggtctcctaccaaggaacaagaaaccaccatccagaatttcatctcgagcttggatcattaggaaccgaactatgaatactcttgggttgagcagcctaaccttatctaatatccttccatacttgtatgacaaatccctaaaaaaatctgataggtggcttggcccccaaaacatgacaaactagagacgattttcaaatgaaatctcatcagtaatgtcatccatttcaattttcgcaccatatgagggt

SEQ ID NO: 10010 - DNA, 1320 bp, Cannabis sativa
gaaatgaatgggatgaagagacctaatatttgttaagctgatttttgaatggaagccgatcctttgtaatcaatttaaagggatgggtcaatcagcggaagaacgtaggaaaacgaagtttattactaatattgttattggtgtgattaaatatcagattttatatataatttaatatagagaattgctaaaaggcatcactggtgcctagcatcttcttccgtatcataccactattgatataattaagtatcaggtcccctataattttaaaaaataacttttagggaatatcgttaatcaatcgtgaggcgtcacctctaggtgatgctaggcaccatttgtaattgatagcaatgctctttaattagcagaactttatttttttattacttaacaaatatatattacattatttttctctacattatttaaatattatgtttttttatatatattttaattaaaaagataggatattattcataaaataataaaagggttttttattattacatttaaaagtagtgtttttttttttttttgcatttatatagaaatacatagagcaaccagcagagcaatataaatcgcaatccaaattcaaattgctatccacacagcaactaccatggcaaccaccgaagtaacccaaactgtaaaaataaaaaaaaaattaaaaaataatatatagagtaattcaccgtagtaaaataataattaaagaatatgaaaagttgtatctaattatagttttaaaacgtgtttgagttaaaatagctaaagtatatatataaaaaattaacatgaaaagttgtatctaattatagtttgttgttattagctaaaggataatacctttggctagttttactcagattttatgtttggttttttagttttttattattgttgagctagggttataggttgagtatttaattctaagtttattttttaatttttatgttgaagaatgttattttaatataattgtattttttagtttggtgttgtgatgtttttcagttttgctagctctgatagtaatttttatattgggaaggtattttttaatgtgatggggtgttgttagttttattgtctaaatttttcgggccagttttgtcccatgtggcttgggataagaattttgcagcgcatagtttggcaaagcatgtcattcagttagacaatgagctatcatggttcgaggaggtgtcaccatcaattgtaattgctgctttattaatcatatgtgattttaatcatggcgtaaaaaaaaaaaaaaaaaaaagaaaaaagacccccattgatttt

SEQ ID NO: 10011 - DNA, 1336 bp, Cannabis sativa
agcagtcacctaatttggagcatactgctatgcatcagctccctggttctattcctactgctgattttcagccaacttccatgcttcctgctgatattcagcaagaacctgagcctccaccacacaccagacctgttagacattgtcgaaaaccttcatatctccaggactatcactgttttttatccaccaattttgttcacagtcagccatctaaatctgtgaccgaccatgttatttcagaaataattgattacaccagactatccccaccttttcgtgcacttgttcttgccatttctagtcactttgagcctgaattttttcatgaagcttgtggtataccagcttgggatagggctatggctactgagattaaagctttagcggataatcatacttggattattgtttctttaccccctcatcatcatgctattggttgtaaatgggtttacaaaatcaagtacaatgctgatggtagcattgaaaggcacaaagctagacttgttgccaaaggatacaaccaacaagaaggcattgattattcagaaacatttgctcctgttactaaacttgtttctgttaaactaatcattgccttggcagctgtcaaaggttggtttcttcaccaacttgatgttaacaatgcgtttttgcatggagacttacatgaggaagtttatatgactatacctcaagggtatagtcctaagggggagcttcctcctaatgcggtttgcaagcttcaaaagtccttatatggactcaaacaagcttcaagacaatggttcgaaaagttctccacgactcttattgaagaaggtttccaccattcggtttcagactattctttattcatcaagcaacaagggtcaagcattctcattcttcttgtgtatgtggatgatgttatacttgctgggaacaacttgacagcaatgaatgaattaaagacaagtctaaacaataggttcaagctaaaagacctttgtgatttgaaatacttccttggaattgagattgctagaagtaaacaaggaatatttctatcacaaagaccttatgctttgcaagttcttgaagattttggctgtttgggaagcaaaccagctagcactcccatggaaaccaatctgaaattgagtcaagatggagaagaacagtcggctgatcccaaactttacaggagaatgattggaaagcttcagtatttgacaataacaagacccgatctagcttattctgtcaataagctcagccaatttttaacatccccaagaatgaatcatctccatgctgcccaaagagtcttgcaatatgtcaaaaccagtcc

SEQ ID NO: 10012 - DNA, 750 bp, Cannabis sativa
tgggaggtagttttcgtgcgtaatggttggaaggtggtttgggctgatatatatgaatggatatgtataagtgacattttggtaaataaaaactcattgaagacaaaattgttacccacacttcatggagatatttttgtaaataaattgtcaatttgtatttttcatatataaatttcttagtttaataatttgtgtgaaattattaaattagtcgataacttataaaattgagggtctagcaccactaaacgtgtcatatcgtcttagcaattaaatatcgagtctcagataatttaattttaataactttttataaaatatcgttaatcattcacaaagcactatcttatgatgatactaaacattactgatgcctaataataatggtcgttatttttaagctagagaagcaacaacattgctcttgactcctgagatagggagtcacaccattctaattgtctttttgcaaagaccctatcctatcaccttcacaatcatttcttcatacacaaaagaggtcactttacatttcatttcttattactaaacccaaaaaagctttgagctttatgtttgaaatgatgtgctcattaatgggcttacattgcatgttataataaaacatttgagtcttattcattaagcatctcatctatgtcccattttcaagggaaagaagaagaaaagagtgaagttgaagatgaagacttaggacttcttaaatgaccttgactttgatttttc

SEQ ID NO: 10013 - DNA, 1364 bp, Cannabis sativa
gcataacacaaatgactgctatacattcattcacataagaaatcagatacatctttcacataatgcaaataaatactcaaattcagtgcaaaagctatgaagacaataccaggctcatcggttccatcgagacaatcgcagtagttatcattgagctgagctttggtgaatttcttcgatccatctctacatttgatggaatcagaagacttgtagtacttctcatctgagtaattaaaacatacacagtcaataatcaatcattcttacgtaaaaaaacgaagaaagaaattttgggttttttggcgaaccttggggatcgattccgagatatttgggtggagaagaggttgatctaacaacggaagctgaagttagagaaagacaaagaaggagcgagaaaaccttggggatccttagctccattgttggatagcgaattgagttcaatattcactgaaattcggttatatatataagaatattgtgtagatatagtttatataaatatgtgtgtgattttgaggtggataagagtatgtaatgggtttcttcttcttcttcttcttggagatttaagcgttagatgaaattctccattgttacatcaaaagcatgagaggtttgagtttcagagtgagaagaaggtgttcgattcgaactcttatgatcaaaacgacgtcgtcgttggttgaaatatgagtcaaatttttattttatttttgggaaattgtaatttatttatttttttgaaccggaaaattgtaaataatttaattatgttattttatttttattttcttttagtacaatttaaaagagtagacaattatgtaaaaattaaataagaaaatgtaaagtaatcaaaaccaagattttttcacgatttggtgagcaaaaattagtgatattaaattttatgataatattatatatgaagaaatatatattgaaaacttttacaacacaatcttttaaaaggatgcactttatttgttctggcattcgaaaaaaaaattagtttaatttgttttatggttgtgtactttataattatttaatataaattgtaaaattttaaaaattttaaaaaaaaaaatacattaaaaacacgatttaaactacattgtttgtacattatttttaatattgtcaattattcctattttttaaaaaaatttataaaatatcttaaataactattacgtacataaatatgaaaaaaaaaagactaaaaattatcttgaataccgaaacaaataagaattgtattaaaatatatattataaaagcaccttaaaatatatattaaaattattaatctaacaaacaacttattatatgggtcactcacactttctatg

SEQ ID NO: 10014 - DNA, 562 bp, Cannabis sativa
tttttattcctctccttatttaatttaataaaaccagaacacataggtggcatttacggaaatttaccccatacaattacaataataactcacagcaaactaaacaaaaacacaataataggccaccactacagccaaattttgcatcaaaacatattttattttactttattatttagtttccatcaatttaaatgggaagaacacgaagaaacagaagaacaccaaaaaaagaaaaacagagaagagaaactgaagagaaaaagaaaaccagagaaacagcttaaacacattgctcttttatttggctgcagcactatctaaccattcattccaaaagaaaaggaatatagtacgttgcttttttacttctctgttacaagtggctgcagctgaactgaatgagctgaataagaaagtagagaagctcaaaaaaagaaatgcccccagttttttctgaaagttttactaaacatttgttggaatggaggatcgaatcaatgattgtccttagccttatcattcaaaccatattgaccatagccggaagaagaagaatgta

SEQ ID NO: 10015 - DNA, 1196 bp, Cannabis sativa
cagtattatactatcaaattgatgcatgtaattggtatgaatcgatcaaatacatatacttaattattatatattaatattattgtgttttagattatatgtaaattttgtatcttagttatttatttatttttttctaacaataatatataattatataattttataatattaattatctaaaatgctaatatattgtaattatacattataattatatataattttataattatatttaaatctagcaatgagaattgcaatgtcaaattacgtagttacgtggttaacgcacaaatacgccaatttttgtaattactccactcaattttaattacacaattcctttccaaatgtgcaattataatgtgtgtaaattaatgagatacttattataatttttttaaatatagaaaataaagatacttttacaggaagtgacacgggctgctacaaatatttataattttgtgcatgtatattagaataattagtaattttaatttgccttttaaattttcgatactattaatattttctcttaaaatatatgaattgttaaaaattttccctaacttttatatttaataaaatttagtctttttgttaagttctgtcttattattccgtttaaatgctaacatgtatttataatttaacaactttatcccctaaattttaacaactatcgaattgcacctcttccaaataaatatgagaaagatcacatgtttttttttttttgtatatcttaaaaaatttaatttaaatcttagaatttttttttaaatgattaagaaaattataaaagaaataaaaaatttaaaacaagttaagtgatacaaaaaattaattattttttattaaaaatctgtttagataaaaaaaatatatatatattaaaaattcgatttttgtaaaaactatattttatgtgaataaatttgagtttatttttttctccaaaaatctaaatttgttcaaataaacataatatttttttactttaatttctattttttaaaaaataattttatatttttgttgaatttaattctaattctttatttttttaggaaatgaatttgtaaacacaaacttaattttttttctttaaaaaatcttagtttatttaaattatttaatggcacaaaaagcaaatacaactcagcactaaaacttaatatatttttttt

SEQ ID NO: 10016 - DNA, 2077 bp, Cannabis sativa
aaaaaactttgcttcgttgaaaatatcaatagagaaaataagtagcaaggatatgtcattgatgaataataatagccatcacaaaatatttattattattattcacctaaagcaaattttgttaaggagtgaacaatcccgttaactatactaaagcatatcgtgtagctcaatatgttgttagaagtttttgattcaattcagatcgtagcatttttgaacacactactcttaataagtttagagatttattggattcagaatattttaattaatgaatgttttacccctaaaaaaactattaaggcattaacaatagaaagactatcgaattcaatcataacttagctaaactcttgcattgcattaattgatcattatatgaaccgacttaaatattttataaagcaaaagaaaaaaaaataaatcctttacattcttttcaagcggcgtattaattataactttttattattagtaagttgatccggtcatcaagttttattcctattggttcatgttggtccaagttaactagggtgcgctaatcaattttgttttagtagttagtagtcaatcttctataaattgaaacctctaaccctgagccggctaagcaatgatttcatgtaaattcttttctttgtaaatcaagtgattgaattctcttagatatcgtttggttggagataataaaaatgaaatagaatggagtagaaataaaataatcttcattctattcatttgtttgattgcatgttaaaatattagaatgtcattccaatggaatgatctttctactattttggtggaatgactattctattttaaaatagaagtaaagaccatttcaatgcatgttgagaaaaatttaataatttttcatcaatttttttatgtattttaaattttcttcaattcaattcctattcctattcctattctcattctcatttttattcttatattttattcttcctaaccaaatgctaccttaactatgttagaacggtaaagaaatgaataatgagagaattgtaatactctaagatgaatttcatgaaatgaaataaagtggcggttgtagttgaatatgtatgtgtttaagtttcatctgtgttttttgtttgtagtactcaaatggtttatttttctgatattatcactggaacaagatagtgattttgtttgtgttttgtggcaaatttctgaatcgattccacaacacttattacaacttcttaattaatctccacgtttgaaattatatgttagaatgtttttttaaattttttttcatagcaatgttcgttatagttgtaatatcatccatgtaaatttttaaaaactttgaacagtttacagtttcgaaaacacaggtcattgtactctaaattaccacgcttgttcaaaaaatttcaaatctatttttgacattgtaaactatttgaaatttttcaaatttttttaaaaatttataggaataatgttgtaactataacaaatattatcgtgaaagaagaatttaaaaaaaaaatatttcaaggttatctaaaaaattataatagaaaagattcatattttttaatttaccaattatgatgagtagtcttttacatttctcaaaattgcattcaagtacttataagtttcattgttttgcgttgcacaatgttttaatgaactttttataataatatatccacgtggtaatttgtttttataacattaaatatcaacgaacaaatttgtgatatattaagttttttttgttgagaaaatgtgatatattaagttaaatatcagttttttactattgttgttcaaattctatttgtaaattgttaaatgctgaatacattattatttttttaaaaaaattaaatctccaattagttttattttaaaagtttcctaaatgattaataattttttaaaaataattataaaatgtatgacccaataatttttttttttttttataactggttgtttagacggttaaataaagccaattctaaactataattatttataatgtatttaaatttgtttaaaggaacactaattcaggttg

SEQ ID NO: 10017 - DNA, 1256 bp, Cannabis sativa
caatataaaatatcaaccaaattacaacagtataaaaatagaagaagcaaaacatctactcaaattgtatcactaaaaaataaattataaattataaaaaaataataataataataataataattggcttctcccacggtttcgaagggttcccggtttcagggattggtgcttccacctccaccatggacgaactgctggagaaaaccaataatcttcaggtcactgatgaagatgattgggaaatagacaagagtctattgattacgattgcaaagttcaacctgagggggcgtttatgcactaatactgagcatagcaggggatttctgaagagagtgctgggaggaatatggcgattgaaggagacggaatggaacatcaaggtcaaagaaaaattcaattcaggtcttttcttaacttttactttcgcctctaagtcaattcaaaacagagttctatctaaaatgccatcgcatttatcaaacggattgttgattttgggaaagatggaaaattctaatgagtcttggaaaaatgatttgaccaacttcccgatttggggaaaggccatgggagtaccgatcgatttcttgactaagaataacacagtgagaatggctaataaagcaggggaggttattcaagtccagaattcagatgtatcaagaatggtggcagatgggttctttcgattccgggtatggatgtcaattactaaactagtgtgtcctggtttacccttgccgtactcaggaaagaaaatatggattgctttcaaatatgatgaattgcaatttatgtgctttaaatgtgggagaattgagcatggttttaaagatagcaacaaaaaaccaatcaagattactatggatgagaatgaagaggtagctgcgtatggagtttggttgaaggcggataatgggtgtagatatggatttcaagaaaaaagacttggcacggagcaatatgatcttcaaggagaacctgtgaatcagaaaatcaatggattggagaatgtcactaaagtctccaacccatttggaccattggagaaaacgatggggggttgaacaaatgataaccgagctagaaatccaacaagaattaaggattcagaatgataaggggggacaaagagcaatgctacagaaccaagaacatagctcaggtcatagagagccgaggggataaggaaacagtgcaagaggatggaggcaaagccaaacgaagactgggggaggacttggaagggg

SEQ ID NO: 10018 - DNA, 687 bp, Cannabis sativa
tattactaatactctgaaattggaataataattaatggttatttaggaattctattctccccaactataaattatgtattattatcctccttgaatgttttaaccagttgaatatagtccttaaactatttacaatgttataaattggtcattctatcaaattttttcacaagtgaaaaataaaataatgacatgactgcttagcgagttgtcacattagcgccttgcgagttgtaatatcactgttggtaagattcaatactggctccctcttattttactttaataaaaattataaaaagttgctaactaattataaaatatcatctcatagtagtactagacaccttagtgccctatagcaatactcgcaaattgtgacaaaaatgctttcgaggggtccacacaagaactccaaatcccaaatgattccatattttgaaattcttgtaataaaagggatatttataagttgcaatataagtactcaaaattgagtttataattagtataaactcaattattttttttagcagtatagtattcagtattaataaaattataatttttatctaatttcattttcacaaactcatagtatcttaaacacgacacatgtaaaattcaacttttaagtcattaaatcttgacaaaaacatttagtattaattacttacaaatttactt

SEQ ID NO: 10019 - DNA, 921 bp, Cannabis sativa
aaaaaaatagtatgaaaaaatattatgaaccagttaaaattaattaaaaaacctatatacaaacaagaaggaatcagttttaaaaatactgagacataaattgaaacagaaccggttcaacgataaaatgagaaaaaataaataacacacaataacttaataatcgattttaattaaaaataaaataagatgaaatcagttccaaaaatactaaaaatataaattaaacagaacagattccacaataaaatgagtaaaaacatacaacacacaataactcatattctgattattattaaaaaaaaataacactataaatcataccacatcgccaaaactagtgcacttcttagatgggatattattatttcctctatcacttccaagtcatcgctatgttctcctgaagtcttggatattactaacataccatccacatatacctccatctcctttccaaagacatcttagaacatcttgttgacaacctctggtatgttgtttcaatattctttagccaaaaggcatgtcgacatagcagtgcactcctttgtcagtttggaagttggtgtgttacgtgcaccttgattttgttatagacgaagtatacatccataaaacttaacatttcatatcctgacatggcgtccaccatctataattcgcgaaagcagaaaacagtctttcagacaagctttattgagattcgtgaaatcgatacacattctccaagttcaatctggctttgggactagcaacgaattttccaaccaaacgggatacaaggcttcccagaggaactttatggaagttaattttttgaccttcgatttcactatttttgcctgcattggatctaacgaccttctattctggcaaattgcgtctcattttcatcaatattcgaggcatgttaggtgg

SEQ ID NO: 10020 - DNA, 517 bp, Cannabis sativa
caagtaaatctaacctcagcaccttgaggataggtcgttgagcgttaatcgccttaaatgcgatgccaccacgacattgcgaaggatggaagaggtgtttggggaatcgaaaaggctggaagtggtcacgatgaccgctgctattcgaaaagaaggatgaagatacctatgaagaagtcatgctctctggagaaaacgtagggtgtctcgaaggtccttcttaaattgttctcaaccttatataacagcttataacatatataatgtatacttattatataacttcgaaacaactaaatgaagtcaccaacaaaataacacatcatagctcaagttgtccttccgcaggcagaatctcctttaagtaatggaaaagcaaaatctgcaaattctccaagagaccttaaaccatcccaaatgcaatatgtaaatgtatttactaaattcagtaattccattttgaattatgcactttccaaaaactactaattagattttgtatttttcaaacctgtac

SEQ ID NO: 10021 - DNA, 606 bp, Cannabis sativa
ctattacttcaagaggctaaactagataatatattttaatcggttgtggaaaatgtggtagtttcacttcttaaaattccttggatatgtttggtgtccttgagttgtaggatggaggtgtgttttaggcatatcaatcaaagagttccaaggatatcgcataatagtccttgtagaggtcaaatgagttatcatatgaatccttacccatgtcatctcatatgtctctattaccttcttccacacgaatatacttctctgcactttcgtagaagtcatccagattgttaaactcatccttcatcatgtatcaaagttttctcccggggcgtattcctgtggctatgtccatcttgatttcatcgtttgatgccttctcaatttttgtgatttcagctttgaagcgccaaatgtatcttctcagacattcatgttcaccttgcttcacattggtgatgcttgtgttgggcatgatttaataacatacaacctgatttgtaggaggaattttttgagaattgattgtaagatgtgatctttctgagttcttgccatttaaccacttgtacaaaacaccttttaacgtgaccatgaagcattggcatc

SEQ ID NO: 10022 - DNA, 673 bp, Cannabis sativa
attacaaaattgaaattgcttaagggtgccactgtgtgaaagggaaggcaagaggttttgcaatgtagataatgcagggtgccctaatttgcaatgccaaagattaacatcagatggtgtggagacatggaaaacagaatgctcagtagaaaagatgtacttttattatttgaatcaagattacagtagttgtgtgtagaatcacactgttgaatacaagtacatttatttggtgagctaaaaataggtgattcaattgcagaaatggccaaatgacactgcagcacagatttggaagaagtagaagaatcaccaagaaggtagaggccatccctagctttccctttgagtaacacagcccatgttgtcttgtccttaacaaaacaccaatttttgtgaaattcaacaaaaacatcattatcttgagtgagtttggaaacacttacaatgtttttggtaatggaagggacagtcaagacagcatgcatatgtaaaggacaagatttattgtaagatggaactgaaacagaaccagtatgggagattagtaacttcttaccatctccaattgctagagcatcaggaccagtgaagggtttaaagtcatcaaggtttttgggatcaaaagtaacatgggtggtggctccaaagtcaatgtaccaggaactatcat

SEQ ID NO: 10023 - DNA, 870 bp, Cannabis sativa
aaagaaaataaaaaatgttaatgtttttttttttggggaaatattaatgtttttattcatttatttttagtaatttttattatttaaattatttttaattaaatttattatttacaccaataaaccttcaacatgtggccttcttgtcagcacttaataaattcgttaattagtgaccaacagacttatacaaagcgtgaccttggggactattaccgctaatttttaaaattggagactaatttgcgtcagtcttaagtttttagggacttttgccgcaattatccctagtatacctacatgattgatctatagtaataatctcaattttgatagtgcaatactatcagctaagttttcctctctagctggactagacttgctcattaaaggctttagctaactaaaaaagtaacattttatgcttcaactaagctttacacctatagatgcttagtctattaactattaatcactaataatatggactaacacaatacaaaattatctaatcaactcatattttattaaaatcaataaaaaaataatgtaaatccaaataaaatatttaacaaagagctttaggaatttgaatgatgatcttagattaagtaggaatcgcaaaagtaactctcctaatcaaaacctccttccctcaaacgataatagtaataatatgttaaattttcataatattaaggtgtatatataaatttttggagggtaattttttttaatgtaattttagccgaagtcaagttactagacatagacaatggataattttcacaagacatatttatttttatttaaaaaatgataattctttcagcaaaatttgaaaaccaccacctctcaacggtcatataa

SEQ ID NO: 10024 - DNA, 1101 bp, Cannabis sativa
atgtagcattcccattcttaagctacaaattaaaaaagttagtatatcaatcacatctaatctacttttactatttttttttactcccaatcatcttttatgttttggtttttcactctctcatcaagacttcacaatattatatttttcagttatattcttacatacaaaatgaggttatctcaacaatttaatgtatacatatacatatctcaattttttttttatctcaatttactactttttagttttatttaaacttttcaatgttatcaatgttattaatattaatatgagaagcacccatcgcccaggttgacgtgtggcctggtgtgttgagttctgcttatcaaaatcctattccatctccaccatcaaactatttttttgtagtaaaaaagaactatgactttttacatgtcaaattcaaattttgatatttcacccttctaataagctagaatattaacaaaatcagagagttttgattctacccgattttaccaaaaatcgacatctctaagaactagtgaacaacttcactagaacaaataatttgcctagatgatgtcaacatatcacttaagcatcaaaaaatacaagtctctgacatttttctacttacccaacattcaggttgatgccaaggtgtcaaactgagcgctaaatgtcaacctagtcactgggtgtagtacagccttccgtaaaacgaccataactacataaatattgatcctatggatgacatttaacttgtattttaaagctatttcaaagatttatcaagctgtgtctcacatctaatattgcaattttgaagatttcatgtcctaaagtcgtgctcaagatagttgcaattttttccagagcttaagtgaaaaataattcagcggacaagattcaaacatcaaaaattgataattttcatgaagagtcaattttcatcattagataatcatcaattgttatgatcaacctaaaatgagtattttttatttttgtattattttattttatcaatggttaagatcaacctaaaatattaatatttgaaatagaaaaaaatttaaaatcaggtggaaaaattaaaaaaaaaaaaaa

SEQ ID NO: 10025 - DNA, 595 bp, Cannabis sativa
acccggttgcaaccgtatcttatgatcaactggtcggtaaggtggcagctgtttgggttcagcaaaaacatcaaaaaattctgccaaaagtcctttacccgctgctggaaaagagccatcaaaagcccccaaatctgatgtactttcaataatcccgtccgatacagcccagagttgaaacagtccccgaacttcgccctcccgcatcagcgttgtgaactaagaataagataattggtgtggtgaagcatctcttgacccagccagcttgacaagactaccgttccaagagaattccatcgttagttctttatggtcatgtacgcacggacccaatctttgtaaccattgcattccgagcaccacatccaaaccatagatcgacagaatgtacaaatcaaccacaaacaaatgtccctgtaaaatcagctccacatctctacataactttgagcagatgagaaaattaccgttacccatgtagactttgaaccgttttgtttcctcccaaggtagtcgtaactgtgcagccaacgactcctgaatgaaattgttattgctgccggtgtcaatcaatacttcgagcttctcatcc

SEQ ID NO: 10026 - DNA, 556 bp, Cannabis sativa
taacggagtatgatcagaagtagaagtttctaaattgaaaagcttagcagaggggaaataatctaaccaagattgagacaccaacgctctatcaatctgaacctcaacccaatccaatgtacctcgacaacgctcccaagtgtaagggtacccagataactccaagtcatgaagatcacagaccgccaacgtatcattgaagccatcaataagccatctaggataagggttgccacctcttttatcatcatgagaagtgacattgttaagatctccgattatgcaccaaggcaatgtagatttatttttcagctcacaaataagatcccaggttctctttctccactgcctattcggttcaccatagagccccgtcaatcgccaatgtccttgatcactaccactaatcacaacatcaatatacgatcctccgtactccagcaccttcacgtcctcttcgaccttccataagagagccactcccccactcctaccaaccgaatccacagcaagagctccatcaaacccaatagccacacgaagcctttcaataaca

SEQ ID NO: 10027 - DNA, 506 bp, Cannabis sativa
aaacaaaaaataaaatgcattccattatgtatttaattataagatttgttttatgtacactgcagaatgtactttagacttagtttgatgtattaattttaatttttaaccgttagatcaatccaaaattaccacaaaaaatcactcccatatataaaattcaataataagtccataaattattaaatagtaagattttagtcatattttatgattgcaaaatataattattttaaaacttcatatatatatatattaagttttaataaatcacgctaaaaataaaattataaaattaaatacataactagtgagaatcaattttttaaataacatgttaaattttcctttatgcatagttttttttttcttaaaaaatctattacttcaaattgtgcccttaaatttttgccattgttaaaaattctctactaattataaccaatacattaattatctataaatattattgtatatatatacatcggattaaagatgacttacca

SEQ ID NO: 10028 - DNA, 776 bp, Cannabis sativa
tttatcttacgatgctactgctacggttgataccgattatgatgacagatggtgtatcattggaaggtttttgactgagaggcaaattaattttgaggtcatgcaacacttgatgaggtcattgtggcagccggagaagggaatgtttgttaaagagttggatacgaattgatatctcttctaattctatcatgagattgacattcaaagtatgatgagccatagcccttggacttttaacaggtttttgttaatctttaagaggttgcaacagggagaggatccaagattggttaccttgaatggagttgatatgtgggtacaattacattatcttaggtcggggtttaaaatggctacggttgtcaaggatgtagcaaactacattgggaaatttgttgaatcagatgaaaggaattttatgggctaatggaggtattatcttcgtgttcgtgtcactttgaatgttacgaagccattaagagacgtatgaagctccgtaatactaacgaaattgagttttaggttaacttcaagtatgaacatcttcccactttctattttatttgtggcattatggggcattctgaaagtttttgcccacgacgtttcgaggttggcgagcgcccgttaattaagccgtatggagaatggatgagagtaaggcctttacgtaaaaatcatataattggagcaaaatggctcaagcaattcaggactgccatggatgataagtcagcagcaaccacaacctctcgatcgaggatgccgacgaa

SEQ ID NO: 10029 - DNA, 1924 bp, Cannabis sativa
tctcttttcagcagaaaaacctagcagctgaaatacccattcaacctctcttcttcttctcttttccttgctttgaaaccctagcagccactccttatttctcaaagaaatctccagccaatgcttcttcttctccttcctttcttgctgaaaactcagcagccgagcccaatcaatttcttctcttcttcttcctttccaagctccgattctacagcttcctaaaccaaacttgttgctgccttttttccttcctcctacagcagttcatttgaacctgcaacacacataaaatacaacccaaaaaccagagaaaacaaatgaaaaaaaaaaaccaacagaaaaataaagaagacaaacacaaggaaatgaattcggagttccctctaaatcagaggtacgtctccgtcaagcgaccctcaaagttgcttgagtcttcactatcaaaacaatatcagttacaagattagagcttcctagccacaaagctcagtaggtaatctcaagtttttctctctattcttcactttatttttctgatttgtattacaatatctctcactaactctctctatttttctctctctttctgaggtgattttacaaaggaaaaaggctgctgccactcttgtttcttggccgaaaataacttggagtaaaagggcaggttctactcccttttatattgttgtttgttgactgtgatgtgtttgttttttgagctgaaaacagttataaactgttgttgatattttccttgtaaagctaaaagttagttatagtcatgagatattcatttacttctttatattgtaaagagatgaaagatctaagcctatgaaaacagaatcgactactctaagagttataatggtttgttgaggcttgtaaaagatcttattttatttttccttgtacttgtttaaagcattttccatgagacagttagtatggggatttaaccaacacttcttatagcaaccaattttaggatcttgatcctaaagcctatatataccaccaacacttatcattttagacacaacaattagattgagtttcgagatagagagagaagattgagaggtaaagtgagaaaggtacagataaaagagagagattgggtttgaattttttatgaagaatgttctatagatgaagaagattcttttggaagagtgtgaaagttgaaacactttgagagaactcatcagagaatcaatctcaattgtattgtacttgttctttctgaatcaataaagagcatttggtggtgttccagaactggagtagagcaattaatcatatcgatgtattggatttaaaccagtatatatctccgtgttgactttattatttccttctttgttttcacttctggttttatactctgttcatccctgtttttctctgattatttgtcatgatttgttaattttgtcattgctaattgtttgattgtttaaagtttaattgatttgattatgcgtttaggtgatgattaataaaattatacatatataaacatatagattataagcgcaacagtaaaaattatagatgattgttaatctaaactgcaaagttatcttccctaataataaaattataaatatatataaacatatagaatataagcgcaacactaaaaagtcaatagattaacgaaaagtcacaataataattttagcagtacagcaaattagtttatgagtagaaattattatttgtgatgggtaatttgtaaaaaacaattatgtcctttgcataattatggagattatagaatatagaggcatttttggtaattattttattaagatgataataaacatcatattttagtggaatttgttagagatttgaagatcacatatcaactaagatttatttatcattaagtttttataaaaaaaaaaaaaaa

SEQ ID NO: 10030 - DNA, 506 bp, Cannabis sativa
taactgtaactttttccacaaaggaagatgaagaagagaaagaacgaattatcgtcatttaaataaaaaatcgtagaaaaaaaaaaaaccagaagaaaaacgtggctaaatcatagacaacagttgaaaatcgtgggttttatgtttttggaaaaaacatctttaaatatcgtgaatttcatgatttttggagaaatatttattcaaattgtctagaagtttgaatatgtaaatgaaaataaaaaaaaaataatataggatacaaaaattaaatatgaaaaaaagagaaattaattgagtaatacgtgagaataataacgaaattgtgtgtgccagatattttgataaataaaagtaaaattgttacacaacccgtatgaaagtatttttgtaaataaaatgacaatttatatttttaatataaaaatttctttattaattaattcaaatgaaaaaaattattaaaatacatgcaatcctgtaataaataacctattctaattttc

SEQ ID NO: 10031 - DNA, 1107 bp, Cannabis sativa
atatattaattaaaattaattaaatagaaaaataataagaaaattttttaaaaatatttttttttttttgtatatttataattttacgatttaaaatttttatttataaaaatatactttcaaaatttcaaaattaaaaaaatacgctttgctcaactaaaaataagaaaagaactaaaaaaataacaaaaaatcaacctcatggtcatgaaatctataattttataagacaatcacgaaaataatttcatgacaagtgacaattataatacaactataaataaaccataaataacaaataaaaacaatttattattttcactgaaaatatatttttataaataaaaaaattcaaatagtaagaaagaatttttttgtgtattaaagtatttttgtaatattttaaaaaaatttaatctattttgtaaaattttcaaataataataacaaatatacttaattaatggtatagttgtgcaattactttttctaatcacaattaaaataaaaaagcctatgtgtttcacttaaaatttacttaaagttcagtagtagataaaagtgggtcagacttgtatctagtgtctacgagactccaatttttaaagaaatatcattttctttttacataaaaaaaaactatcgatgttttttttttttttcaaaaacaccattttaaatacaaaaataacaaattttatattacacctaaataaaatattatgttattgatctaaaaattaaaaaaaaaataaatgtatgtagtaagtgtttcatactgtttgagttccacagtctcttcaatcggaaatatttgatcatgatctccccatactaataacacttcctgcaaaatatgtttatatgtaaataaaattgagataatataattatattttgcaaagtacatctttttcatattgggattaaattctaatttaaatatatctcactgcataattaaaaaataataattttttataccttatttagaggaacaacgtgtgcttggttatctcgtccaatagttactccatcaaaaagttctgatttctcttctctattatcggaaaacaacatctataaccatatataaatttagtaaaa

SEQ ID NO: 10032 - DNA, 575 bp, Cannabis sativa
ctacgaaagtgaaaatgtaaaagagacttagaagatggtaactgactgcagtaagggaaacactcatatcttgaaactggtacacagggttggaaaaagcgcaggccgcatacctcttggtgggaagttggcttagatcatcgacaaagtggcttaccatttctgaggcaaaatgagccaggttaggccgcataaagcgcttaaaccagtccgttagaggatctaagtttaaatcacagacgtccccggcatactcgcctcaaaagggcccatcttgggcctccctaacccatttctttaaagcttctgcctcagcatctcccctggacagttctcccatgacatagttatgctttgcaatgcggagctgaaccctttcctcatcagggtgagcaggagtcaagataatacccggaggtgcaggatactcatcgacctcagaatgaatccctgagtcaacacttggaccgggagtgtcagccctctttggtttctttgaaagctctggctcgaccatcacacctttgcgcttccgatcaaggggagggacgacttcttcctcttcttcttcccca

SEQ ID NO: 10033 - DNA, 704 bp, Cannabis sativa
acctaagccaattggagagaattatttcctacaggtgggttttcaggtataaagtaggcatacctggggttgaggaacctagatatgaagctagaattgtaggtcaaggcttcacacaaagcgaagggataaactatcgtgagattttctcactagtagtcaagcatactttaattagaattttgctccatttggtagcaagtgaaaatctagagcttgaacaattaaatgttaaaacaacttttttccacggagatctagatgaagagatctacatgaaacaacctgaaggatatgaagagaaaaggaaggaagatcatgtttgtttacttaaaagatttatctatggcctaaagtagtcactaaggcaatggtacagaaggtttgatgattttgtaactaaaattggttttaataggagtgcatatggcagctgtgtttatgtgaagaactcaaaggatcaggtgtacttgcttctctatgttgatgacatgcttattgcaagcaaatagacgagagagatcaataaagttaaacatgcattgcgaaaggaatttgacatgaaggatttggaatcagtaaagaagatcctagggattgagattattagagatagaaaacaaaggaaactcaagctatctcaaaaggatacatcaacagaatcttggatcgatttcgctttgttgaagtgaaacctgttagca

SEQ ID NO: 10034 - DNA, 600 bp, Cannabis sativa
agagatttcctagtctgaagctattccctttaacatctatttctaatataataataataataagaaaagaaccccagggcttatagataattaattttgtcagttagaaataagtgaagacagccatgtaatatagcaacactgaaataacaagagaattccaaatttttctctcagaagtgcaggaccaggatgaggtttgctaaatacaccattgttgtcagaacatacattttgtcccaatattgtagcgatattaggaaaaccctactttgaactttatccccaagtgtctcaaacaaaattaagaaaaaattatataagtttcatatcagccaatacctaagtattccaacagctaggtgtacgcggcctaatttttgactaaatgaatactttcaaaggtcctttcctaagtgttcttatatgttgccctgttctataaacataaactaaatacatctatataatgaatttgttagtgatttaaataatggcaattggcaggttcatgaaggaatatccttgttatactgagtttatcctcctttcctatgtttgggggtgttttatgcctccaaaaggaggtaatactcttaa

SEQ ID NO: 10035 - DNA, 727 bp, Cannabis sativa
ggagattgttataataatataaaatatattaaaatgtgacaatatatattattatgttaataatatatatgatatgtttggtaaataaattgtgtaacttatgatttatttaacctacactttgtaacataaaaatgagttacaagttaattgcttttgtaactttttttgactgtcacattttggtgtaataagagagtttttacacaaaattaattatggaatccaaaactatgataatatagttgttgagaattggattaatactcatttagtttgaaaggagtaacaaaacacaaattttaagtatactgaaaactgtaccaacattgggaagagttctatctggtgtaactaccaaatcttcattattaatgaattttacacttatttatgtgcatataacaatcataagatgtgatgtgtgtgcattctaagtgtgatcatcaaaaatagtacaaggaggatttattcaatcacatagtttgagctcttagaatatagcgccctgaaattaggatttccctattgggctaggtcattttggggcaagcggatttgttagaaaactcttagcttgataattcttaaagttattttctatggaattccttagtatttagagatagaaaaaataaatttttaaacaaaagagtattacattattcaagtattcaagtcacgatgacttcactattctacgtttaaaattgtgagtaaatgttct

SEQ ID NO: 10036 - DNA, 834 bp, Cannabis sativa
tcaaataaaaatgggaaagggattcactggctctcgtgggacagactttgtcaccgtagggaaagaggaggcatgggatttcgacatttgcgagattttaatttggcaatccttgggaagcaaggatggagattaatcactcgacctgactctctagtagcaaggatctttaaagctagatacttccccaatggcaattatctcacaacctctttgggaagcaatctgagctttgtgtggagaagtgtttaggaagaccaacaattagttaaaaagggagtgcaatggtgtgtgggggatgtcagtaacatacaagttctaaatgaactgtggctgccttgtgatgaacatccttatattacttcatcacatccagctttgaataatgcaaaggtagaaaatcttgtgagcgttgaaggaggttgggatctagaattgcttaatgacctgttcaatgtcagagacaaagatttaatcaccaagatttctctgctttattcagtggtagatcaactgcaatggaggcttgagacgtgtggtttatattcggtaaaaagcgcatataacctccttcaagtcgagtatggaagatgggacaataatccggatgatgttgcaaaattctggtcatctttctggcaattgaagcttcctcccaagatcaaaaatctgatatggcgggccggtagaaattatcttcccacaatgtgtcagcttcaaacaaagagggtcaatgtattgtctctctgcccagtttgtaaggaggctgaggaaacgatcatccatgctctggccacttgcccgaaagctaaacaagtgtggaatagagtgggc

SEQ ID NO: 10037 - DNA, 979 bp, Cannabis sativa
ggaatttcctcacattacttcttgaaaatggataactagttgataataacactatgtttgataaagtaatatattgtattaattattacgaccaaaaattttaatacaaaagttatattatttaatatataataaatggtttatattagcctgtattaaaatatttacaaaggatccgaggtcaaccccaatctccaatctatacccaaacccgggactcgacccagacaagggacctgtcccaaaccggaccccaaaccaaaccccagacctgaactttgagccccggacttgaacttggacccaaacctcaaacatggaccaggtccttgaccggacctcgcctagactggaccctggaccctagaccccaaacctcaaatcccggaccccagacccaaagccagaacccaacctgacccgagatcaggacccccgacgcaaatttaagaccctagacccagatccaggaccccgaactcagactacgacctgaatccggaccggtccttttcattttgagtgcgccataaaatgtcgaccacaactgatgcatactggaatcacattctgattccagtatcactgatcggataaataccccaaggaaaagagtgccaggcatgatgagccatatcacaggtaattaagaaagagatgttcgactcctccctcccacaaagagggcatttgacctcctcaatatgaaatctcttcctaataacagatctaagagggagagcattgggaaggatgcaccaccaaagaaccttatgtcgttctaacactttactgttccaaagtttattctagagagaaggagctacaacataataaggagctctctccaaagcttgagagagataagcaaatatagaggagaaccgcccatccttttcaagagtccaaacccatttatcttcccccataccaaaaggagaccctcctctcaagatagccgacacagtctctcgatcga

SEQ ID NO: 10038 - DNA, 806 bp, Cannabis sativa
gttttgttttgaataaatattaagtcaatcaaataaaaatggtcaaaagaacgttactttaatcgtggctcatgaatgtgtgagtcctaacttacccatgcgcacaaaattgggtgaaccttaaggcctaaactcaattctcaaggttacactttatatacacttccaagaaagtatttctatcctatgcgagactcaaagtactatcacacacttcatttcttatatcttttcgaaattttaactaagttcaaacaggttgttctttaataaatataaaagttctagcttaatatttaggaggaatgaattgatatttttttttcttgtgaaaaataaatataatagattcatgttaacggaaatttaatctttctgatagtaaataataagagaacttcatttattaaaagtgtttttttaggctccaattaatgaaaaattatgtatcttaatcttctatatttatttattggaataggaatctccccttgtctgcttgtactactctttatgatgctattttcttagtaattttaggaaatttaccctatatactattttttaatttttttttttaatttacagtttttgttgctccgctggtttctccagtggattctatgtgggttgctatgtagatttttattgtgattaaagttgctttgttagttgctatgggagtttctatgtagaagtaaaaataccaaaaaaaaaaaatgttcaaagtgtaaaaataaaaatgccccacagtttttttttgaaaaattaccccatataccatatttaattttttttttcaaatt

SEQ ID NO: 10039 - DNA, 650 bp, Cannabis sativa
gtgctagggttcttgtatgtaaaccttggctactaatagggtaagtacaaataatacattaacttcaagcctgtctcattaagcttgacccatgaggtattgatcttctgttgatgaggatgccacgtcaaactatgtcttacttttgtgaataataaagacacaaattctttatttaaagttactttatttccttatcagaagatacaaatcccggtcatgatcatggaaataaaagccctagtattatggaatttggagataaattgttgtgatatagagctagatattcgaatatccattaatcgttcatccagaagatttgttcgatgtcatctgaagatactatgtattggaggtttatctcagctagatgagccatttgtccaatatccagaatacttgactttgctgatggatccagtccattatcttggatgggcagacaattaggcctaaaacagctgagctgaaaccatcttagaattacacgtatcctccatccataatcacggataacattttcccccaatccttcaaatccttaaggtgtttcaacggtttgcgttcaactttccaggtggctaaggacatgtggacattaaaaaggtgaaaccctttttgaattctaaacaaatttatttatgatt

SEQ ID NO: 10040 - DNA, 518 bp, Cannabis sativa
tttgtttgccagataaagtgtgacatttcttacaattagatctgtaagtacatcatatttgtaaatagaacaatgcagagaatgatatcttcagattttatgatgataacttgtgaattatccaaaaatgagggaatctaatatatacccaatcggtcaagacatgaaaaatgaaattatgcttctgaaatgcagtccgagctaaaattcttgatgcgtatttaaagtgagggattacgaagtgaattctgtactctgctaggtagattaagaaatggttttttagctatatttcttaaggtgaatatttctgataagaaaaacgttcagatccttactaacagttgtggtgtactttttaaaaaaaaaatcccgacattgaacatgcgcaaacaagtgattactttctgattttttagggtactgtttgttttccttactattgatatttgtataaaagaatgtttgtttggcagtttgtgcgaatgttttgggatcaaccttgataaactgccata

SEQ ID NO: 10041 - DNA, 533 bp, Cannabis sativa
cctgctgaaccgctcttccgatctttaaagcctgtacgaagcaaagtctatatgaagacaatctcagggcaaaacacttacttgagtgatctcttttagaactccaccgaccagcagtttcactggcatctcctccgcccctgtgagttgctcatttacctctggcatcacgcggtcttgatagaaattgagcatttctttgcacttcttagtttttggctgaagaataggtggagtagccaatgaccttggaaacccgggctccttagtgttggcccatttagagtttttgactgaggtagtagaggccttagactttgcatttttcttagtcagaggaacaacttcagggacgacatcaggaatattcgaggagtctacagccaaactcctcacagtgttgacttgaggagtcttggagcttcgaggaatactcttaggcagagtatcatccacctttggacgtttggcgggagagttctagccggatacctcgcacatcctcttcttcagagcatgcaacattctctcca

SEQ ID NO: 10042 - DNA, 844 bp, Cannabis sativa
gttttgtaggagcaagttagaaagattaaaaaatagaaccattttatttgattcattcttaatagacatgagaattatcttaaggtgactcttttgtcaaatgctcttattacactcgtaaataaaataaaatacttttgtcgtcttttattctattagagtcatatgttaacaattataaatgttaaaagggtttagttgcaaatattctatagttttaattaattaattgaaagaaaataagttttgttgatttattttatttatttgttttgatgtgttgtgattgtaaagcatgggacatgcctaccatgttaaattatacacaaagttaagtcttgactaaggctttggtcttttcccctttttctctcttttattttctttctttctttcaaaaattgtaatagacttttttatgtcttcttgtttcttttttctaactctatttttggctctgtttccatatttatttaattttttttctaaatgtcaaataaatggacatgaacgatagagattaatgtgcaagagttcaaaatcaaaacaagtgcctctgttgtaattaataattgatggtttattaatgagtttaataagcttcttttttttactactattattttgtggtaggacaaataggtagatgtgtggcccaattgtacacttgtatttacttggttgtagtagacacacccaataggaatagaaatattcatttttgactttataaaaatatacaaaatatatatagtctttaaaatagcttggaaattttaaaaaaatcattgcggcgaacagactatttccacggccaattcattatatatcacaaagacaaaaa

SEQ ID NO: 10043 - DNA, 687 bp, Cannabis sativa
gatcattcctactcggggaattagacaaggagattcgttattctcgtatctgtttatcttgtgtgcggaaggcctctcggatttgcttcatagatatgaaagtagaggtttgattcatgggtgtaaagtggctaatggagctccccgtatttctcacatgctcttcgctgacgacagctatctctactgtaaagccaccatgttggaagctacaagaataagaaaaattttgcacaagttcgaagcagcatttggtcaaaaagtgaactttgtaaaatcttcaattttctatattaccaataccgatcatcttgctagagataatatcaacaacatgcttggcatgcctatagcgggggaaggcagtttgtacctgggtttgccaagcactttaagcaaaaacaagtcagcggtcttaggctatctcaaagaaagggttcgaaagaggattgaaggctgggagaataagtttctgtctcgtgctggtaaagaagtgttgattaaaacggttgctcaatctctcccaagttacgaaatgagtgttttcttgttaccattggagattactagggatatagagaaagctatgaataatttttggtggcaagggtcaaacaaagcgaaaaatggaattcattggttctcttgggaccgactttgttctcataaatcaaaaggagggatggg

SEQ ID NO: 10044 - DNA, 633 bp, Cannabis sativa
ggcgccgtctgtgggaacgaacaactttggcaaagtcgtttctctacacacaaccatttcaaaatgtctagatgctcacgccccctccgagatgttaaaattcacctcgatgacaatcagttggtcaccatgaggagagacccaccacccctgtcaccagaaaggaggttgctaataatcacagacctcaactacttgaagggaacgcgggcatacctagacctcaagcaagataagaagaacactgccatgagaaggtcccagttggcgaccaacatgatagagcgacaacctcgatgactccataggagaaggtgtgactcaggggtggatagtctcttaaccaatcacacatcctccgcccctgacactgaaagatctcagaacctcacatcctatagcagggaaggaaaagtgagtctactccatcacgtcaagatcccacactagtatgcacaacgatgaaatgaatgagctaaaccttatggttgaaagagactgtggtgaacatgcaaaaggtcctagatgagctcttgcagaggcactccggcgcgcccttattcaaacatagggcatctgaagtcaccaaaaagggtatgggcggaccgaaggtagccctgggagacttgaggg

SEQ ID NO: 10045 - DNA, 729 bp, Cannabis sativa
ccccggaataaaagcgctttgatactgtgagacaatcctatccataaacggttttaaccgattagccattacttttgtaattgtcttatataaaatattacacaaagcaataggtcttaaatccgtcatccgttcaggactttttgttttcggtataagcacaacattagccttgttgatatcattttcaaactttccactagagaagaaacgatgtactaccttaacaacatccatgccaacaactgcccagtttttttggtaaaaggtcggagtcaagccatctggaccgaggctcttatcaggatgcattccaaagatagcattacacacctcatcctccgaaaccgagagcaaagatgtctcattcatatttttagacattatataagaaaagaaatagtaaatatttactctcttatttatttatttataaaagtatttactctcttatttgaaaaaaattaataataataataatagataaacattaaatcatatttcaccaggtgctgctacacctacagaaaaaaaaaaaaaaacaaaaaaacaaaaattagtcataaatttaaatttaaatatatataagttaggaaactaatgttatccaaatataatttaaaatataatattttgatattgtattacaaataaaataataatattgaaagcacataattttttttaagctatataaaaagatggcgattttgtgtcaaatattaaaaa

SEQ ID NO: 10046 - DNA, 859 bp, Cannabis sativa
actattcgagtatggggcattcaattgatgtttgcaaaagaaagcaggaaacaaagacaatacgggttccaaagaagataaaaaataacaaggctactagttttaaacttgtggcggatgaggatggtttctaaaaagtttagcacaaagggaagcaggtcaaaacagggatggacaatcctggtatagatatcaggggagatgtctcaagcaaagcaggaagggaggccatggtaacatcaaattcttttgagattttggtagaaccagtacgattactaaatgagaatgaaaatgggaaagagctcaatatagacaacacaggaggaaggggagtacctcctgttccacatggatagaattatgagttagaacgttaggggactcaacaaccacaataaatagatagaagtcaagaaaatgatttccaaataccaagtggaactttttggcctcctagaaactagagtgaaagctcaaaatatgggtaacatgtacactactttgttctatggttggtgtttcaaaaataaatgctatatgtagatcttttttgtggaaaggatcggctaaatctaattgccctagttatgtatcttgggataactttgcaagtcaaaaatagagagaggccttggcttgaggaatacaatgttatggaatgaagcagctttaggaaaatatgtttgggacatagctacgaagcaagaaaacttgtgggtgagatgggtgcatgttgtatacttaaaaaattcaaacttatagatgacagttggtattggagacagagaagattaacaaaacacataaacaccactttattttgcaacaacagcttatgttaagtaagtacaatatc

SEQ ID NO: 10047 - DNA, 726 bp, Cannabis sativa
actaatgttaattaaaagagaaattttaaaggcaccaatttggcaccatcaattgtaattaaatattgagtctcacataatttaatttaataactattatagattattattaaccaattacaagacgctatctctaaatatgctaggcaccaccaacactactacaaaaatacccaggcagctttttcataacattaattaaaaaaggaagctaaaacctcctaatattcttgctaatttaaaattaacatttagagatggttaatttataaaaaccgtaagtataaaatttaactacacctacagagtcagttgggagtttgggaatcgtgaaggattattatataactctatcacatcagttattttcaaataaccgacgacataggcacgcgaaatcactgatcacgtgtgccctatgtcgtcgttatttctaaataatcaacgggagagggttatataataactctttcagctttgtcttctcccacttcgtcttcttcttcttcacgaaaccaaaattagctgagagaacaccaccacgaaactctcgccaaccacccatatcttcactatttttacaccatttgagcccattttttttatatcttctattttccatacttaaacatatacacctggaaaagtttagatttttaccttgttctaagtgtaaaccgaatccaaaaagtaattgtggtggttataactccggccactagttct

SEQ ID NO: 10048 - DNA, 616 bp, Cannabis sativa
gatgatgatcataatgttttagaagatgatgatgatagtattagtagtggtgaagaagaagaagtggagaagatcaataagaagaagatgattacgacgaaaaagaataatggtaaattggatgagagagtacaagaaagggtaacccgaaattcgacacgtagtaataaggatgagggtagtaggaagacgaggaaaacggttgggagaccagtgaagaaaccggagaaggagaaggcgacggtggtggccgcggccaagacggaggtaactaccaataaaagagggagagataatagtgagggggatgttggggttggtgggaggcttaaaaaacgttcaaggagatgatgatgatgttgaatattgaatagtattattagtagtggtacttagtagtttagtgttgtataatgtatattatttagtgttgtattgttttttgatctcttgtattattttgaccttttttttatttgctaagccaaatataagaaaggaaattaaggaaggtggtaatttcctcaaaggaataggtcttcaatgatttttgtccttcattaacacaaacgagagtagctcttttagacctttcttttgttattttttacaattc

SEQ ID NO: 10049 - DNA, 528 bp, Cannabis sativa
aatatatatgcatttatatatatagtcggcagcatgagattaattggatcttattagttagcaatataaaattattggatcattttaaattatgtgtggtatttttgaaaattattaaaacaaatatttataattataaaacagatattttttttaaaaatttttgagcctagcccgccttaattgatatatatacatgcatatatatatgtacggttgatatatatatatatatatttatcctataaggctcacatcacatgcatgcaatattctccaatgtgttatcgtatcaaaccaatattggattattatgttatatatatactaacttattatacttgtatatttatttttatattatatgctatatatatttattgtagtgtataattgtatggtatactctcgaacgaacgccgcccacatactacgtacttatgtaataattaatatcatgtagatgtatatatttgtcataaaattataacaatatatattgcataatttattatatatagttatata

SEQ ID NO: 10050 - DNA, 674 bp, Cannabis sativa
tatgcatctataaatagggatagaacccagggaataggggatggccaatcttgggagaaatagataaaaatgttattatttattcttgaaaaacagcatcattgtattatgtattcaaacatataaacccataataaaatggactcgtggactatgaagatttaacttcaaaactacgtaaatatttcttgttatttattgttgttcatattattaattacaatacaattaattatgtagtttatttattacaaaaaaagctaattatttagtttaaaaaaaatctgcgttaacagaaggcctcattaacatcaatatgctgaatatcccattaaaaagtgacaacaagacaaaaaataattcttattgtagatgcttttataactggactgaaagtgtctttaaaatctattctaggagtttgttgaaaagcccttgtactaaccttgacttgaatttgtctatacttctatctttgtaatacttagttctaaaaatccatttattgcttaagagattcatgtcaggggaataaggtaccaatatccatgtctttttctttttaagagttgtgttctcagatccatagcatttctccattgaggcaaactaagagcctatttgacagttctaaaagtcttataaatctgttattaagaggttgttagcatata

SEQ ID NO: 10051 - DNA, 508 bp, Cannabis sativa
tgggcagtggagagatgctcgattggatagagttcctttgtgggtgaagatgagaggcttccctcttaaagctttgacattgaataatgtaaagagacttggcaacttggcgggagtggttcaggacgttgtttggaataacccgcaacaaatttttcttaatggatatgttcgagtaaggattggatttcccattatgggtgaggtatttgttggcagattcattcttgtggatggtggaaagcgatgggtgcaacttaagtttgataaaatgcccttaatttgtttcaactgtggtgtttggggacatgatcaggccatttgtactaaaccactggcactggaattgaatgagcatggtgatcaagttccaaaatttgggacatggttaaaggatgaggatcccattccaaattgcttcgtggctcatgatcagaggagagcaaagttgcacgaggaacgatccatggctggcggtgatgtaacagatgaggcggtgagtcgtcgg

SEQ ID NO: 10052 - DNA, 597 bp, Cannabis sativa
ctttgttctgaaggtctttctgctgcttttaggctcggggagaaatactttgggtttaaggggatatctatatctcgcaacgctccccctgtttctcatctctttcttgccgatgattttctcattttttccacggcttcccagcaagcatgcagatctattagggaggcttttgatatttataaactggcaactggctaggaggttaactactttaaattgtctgcactttttttgcctaagcatgttggatttcttttatagcaccttaaggatggaacctaagccctttattagtaattatcttggtgttcctctgttctttgaccaatccaagaagattaatttcaattttctcttagatagggtttcttcatatctcattgtttggaaccataaaattttttctagagcagataaggagtttctttcaaaagttgttatccaagccattcctccctatgcaatgtcatgattaagaatccttgtttgtcaaaaaattgaaagtcttatggctaacttttggtaagggtcaattgtgaaaaatactaaaacacactgaaaaaatcgattttttctttgtaattcaaaattttt

SEQ ID NO: 10053 - DNA, 888 bp, Cannabis sativa
tcaaaaaactcaactccaccctatcatagaccttgctcatgtccaactttagcgtcataaaactccttctctcgttgtttttcttaaatatcaaatggagcaactcaatcccaacaatcacattatcatgtattgatcgacctagcacaaaggcactttgaaaagaggaaataagaggaccaagactgcctttcatctgtatcaccaaagctttcgacacaatgttatacattacattgcataaaattattgtttgacactccttgaccaccttccatttggctactttaggaactagaaccacattggacttattaaaagagtgtaccgacttcttgtcattaaaatttccaaacacataccctggggttgtaacaaaattcataataagactaaccaatcttttcgcaaagccaaatttcctcataacttctctcaaaaaattcaactccaccttatcataagccttgtttatatccaactttagttccataaaactctatctctctatttttcttaaagagaatggagaaactcaaacccaataatcttaattgtcagtattgatcgacctagcaaaaaggcactttgaaaagaagaaataagaggaacaagagtactgttcatccctatcgccaaagctttcgacaaaattttatatattacattgcataaatttattggttgatactcctttacaatctttggtttggctactttaagaactagaaccacattggacttattaaaagaacgtaccgaccgtctgtcatttaaaatttccaaacatatagatgtcaccctaataacgataatatcctaatatttatgaaaaaatattacatgaaaaccattaggccacgacgccttagttgcaccaatttcctt

SEQ ID NO: 10054 - DNA, 717 bp, Cannabis sativa
acctttgaggcttcctcttttgctagtaatcaagccctttgtggcgagcccctcgatgtaaaatgtccaagcggtaatccagtcaataatgaagatcttatggatcataatgatgatgacaatttcatcgatcaatggtttttcgtgagtgttggattgggatttgcagcaggaattctagttcctttcttcatgatggcaatgaaaatttcttggagggaaacttatttcggctttgtagagattgtgatagaaagaattccattctttgagcgaagaatgagagcaagacgaaaatggcctaagggacttcatcattgagaatgatacattcatgttgcacctattttaattccagcaagtttgtgtgttgtgtaacatatcattgtatttcttttttcttctttgttttagttcaaagtttttgtgtgtggtgtgtatttagtagtggtgatactgaacctgtaagaagtgatcacatttacacacttttcgtttagttggaaaaactttcaaagaggaccaacatattggaactatctcttttgcaaagctattaatataacttaattcattcaaagaagcttgattaacattagtctaccctctgttgcatgattaatgttggattttataccaattctccatttggtttttattataaacttgtttgagtcttgagtggagaacttatagattatcatatatatatatata

SEQ ID NO: 10055 - DNA, 917 bp, Cannabis sativa
cacattttggtagaaaatagtggaagacaggaagctcagtttgacaaaactgaatgtaattgtaatttttgacgattttaaaggaagaactagacttttaactcaacatgaaagttgtagactcattctcatctttcatgaatgtcttgagtcatccaattttatgctgtattgaagaagttatgatcaaaatattgttatgagtgtgctacacaaattcttcagcaaccacggcccttaacgacatttaagctcggttgaggtggcaaaacgtgagaacacgttcgtacaattcatcgaaaataaatatttaacctaaattgaatgggcttttagagttctataaataagacttttaggattcattttaggacttttaaactgggtttttgagatagaaactcatagaaagtggataagagggagattacatcaacaattactcatcattctaattcttttcttcccttaatgtttttaattttttaattattattatgcttatgaatatagttgtgattatggagtagttttttttgttaaaggttatttcagaatcgttaaacatgaattcttgttagggataataaatattgttcttgatttctctcatattaaattgttttcatttttctatttatgctataaatattgtgaattcttattaggtgtacaactaattaaaattttgcattattctattatcatcttataattacttctcacctaatagtttagatttctaagtagagttataattttcaattaaatgtaatgtcaaatgttttattaattttgatgaaaaatagaatctatgtcagttctaatttttgaataataaattgatcatagtgcttatgggtttgatccatatttaccattgtactaggggtgttcgcggtgccggtggtgcgatt

SEQ ID NO: 10056 - DNA, 827 bp, Cannabis sativa
taattttaccaaattatggtcacccttctactcataggcccgagattgacgttcggcagaaaaagactcaaccacaaaaaacaatatagttagtctctattgatcgaaggtcaagccgcctctgaataatattttttcttaaaaaaaaataaaaataaaaggtacataaaataagaaactaaataagaaactattgtgcacattgtatcatataaaataaatggtaaaaaattgaactatatgtacatagactactgcacatagaataaatggtagagaattgagtcatatataagaacatgggttactccactcattgctaattagttttgagatagcaccccatgattcttaacagaaacacttggacctcgaagtcatggccctgtgaatagtattagttgtggttcatggaatttttgtgacgaaaagacttatccgcatgtgaatttttgtgagtagtattagtaacgtatcatgtggtttaaggtcaagacacaattttgacactaagtaatttgaattaattatctttatttaagatgcattccacgcctcctatcgaaaattgactacatagatgtgtatcatgtgtttgtgtgtgagatttacattggcgatattgatggcaaaattatgtgaactatatagattgtaacctttaatctcacaaactgattatttaatggtattatcactaagttttagaggtagtttttaaaggtattctaagcaatacaaaaggggtataaaataaacgtggctatagggattttatggcgtcagttatttcatatagggaccttatggtgtcgggtcataataac

SEQ ID NO: 10057 - DNA, 553 bp, Cannabis sativa
tcgcttgatgtggtgagtgctacaagtattccaattactcagactaatggctatggaattcttttgggaacaggtgacaaagtaaaggccgaaggagtgtgtgccaatgtgactttggagttaggtacccttcgagtggtaactgattttttacccctggagttgggtggagccgatgtcattttgggggtcaaatggcttgagaccttgggcaatatgcaagtaaattggcgaaccatggtgatgaagtttgaacgggaaggaacttgggtgactttacaaggggaccccaacctttgtaaatctcccatatccttgaaagcaatggtacatactgtggagcaagtcggctatgggttctgggttcatctaggatccttacactcgcaagtcagtgaggatgaacggctggtgccaaaagaattgacggaattgatgcaaaaatacgacacagtgtttcatattcccccggggttgcctcctaagcgaactcaagagcaccgaattaccttgaaagaaggggttggaccgatctcagtccgtccctatcggt

SEQ ID NO: 10058 - DNA, 507 bp, Cannabis sativa
tgttcgcaactccaatggtcatgttattgctgcaatctcttcgcctatcaaaggaaattttaccgtcaaagagatagaagcaaaagccatctcctactgccttaattagttgaaacaaatcaactgcctgattcatctcattgaaactgatgctctcaccgtctctcagcatgtcaataatcctcaataatattatggacaattcaatgacttaattaatgatattatttatcagatgtcctctttcctctgtatctctattagttatgttccacggagtgccaacttcgctgctcatggtctagctaggtatgccttgcgggtggatactgatatggtttggagggctgtttgtcctagccccattgaacctattcttgtaaatgaacttattcattaatactaatagcttttctctcaaaaaaaaaaaaaaaaaaattgaataaaaaaaataataataatatgtgaagtaatttgttatagttaatattttttttttttaatttt

SEQ ID NO: 10059 - DNA, 1247 bp, Cannabis sativa
  modified_base (1133)..(1145): a, c, t, g, unknown or other
ttaattataacaataataatataacattttatattagttggaggtattggatagcatttttcaaatttgacacatatacttttaggtaattctatgttatgcccttaaaaaaagttattttgatatatattttggcatattgaagagttttttagtttattttttttataatcgtatttattttagttaattaaaattacctgtaatatttataatgccaaaaattaaatttaaatattttattacatgcgtgattttttttaaatgtctggtgaatactctgtgattatttgaactttattttttacattgtaaattatttaaatttttctgaaaatttacaataagattatcccctcatgtatgttgaatcagataaagaattactgaaatggtctttttaagggtgtattataaatttttctattttttttaaaaaaattatgttaaatacatatttattttagtgctagattatctgagtttcttttaatttttaagtgcctataatcctacatatataaaagggtaaatatttttttagacttgtgttctataaaaattattaattagactctatgtttgttaaatgatgaattaaatcatgtattatctaaaatggtacaaaatagtatcctgaactaatttttttatcaaaataaaagttaataataactcgatctcaaggttggcactgagttgaaatgagtctaagagaaaataaattttttggactcttattataatttatacgaataaatggtatttttaaaagattttttttttctttagacagcctagcccgttttaacctaggtttgcatacaaaattgggtttatttttttggataattgtataagacactattttttataaaaaaaattacttttttacgtttaaagaatttttttacattttaacaatttttcaaaaaaataacacgcaaacaacaaaaaaaactacataaaagtaacatcaaaacaacaactaaaattaacatacagataaccaaaaattaataacaaattaacaagaatacaatataaaaagaccgtattttctgtaaataaaattaaaaaaattgtaaaaatattttaaaattccgtaaatttatatttttgtaatttttttnnnnnnnnnnnnngtatttgtaaaataatttcaaataaatataaatcctttttttttttaatataatataaatccttcttttgaaaaaaagaagcaaagtagaagttccctctgg

SEQ ID NO: 10060 - DNA, 913 bp, Cannabis sativa
tgggggtagagagatatttaagagaggcgtactcgagagttctagtactttcttttcttctcctgatttttttgataacctagaagagtgaagtagaatgtgatctctgacaagtttatgacgctcatttcctttatcaaactacctatgggtcattaatctatcaaccattacccaatgggcccaatgccaatcccaacccttcaacgctttaagcccatttaacctatacttgggcttatatattcacgcaaaacgggctccaccaaaatcacttaaatgaagttcctttttttttaagggaaatttttatgggccacctaaatttggtaattattttcaaaaatgacgttgtttttgttgtgttaattttatgcatatgtagttgccgtttttattgctagcttcctgtttttaacgttttctatattggattttttattccctactttttcagcccaatttttcaaaaaacctcttctttgtaggcgtgcaaacacttttataaaatacaaacatgaatgaaatcaactttaatttatttcaaaacccacttttataaaatattatttttaagtttaatcaaatagtgatttgactagaaaataattttttaaattagaaaaaaataaaaataatatatatctatatataaatgaataaaaaaaaaaaaattcagcaaaataaaacaaaaaagaaagatgctcaaacaaacaaatattttttagattttagtagaaactttatatttacaaaaaagaaaaaaaaatggaataatgaagctatttgttggatgcaggtggtgcacgcgcgcttggtgaattgattttcttgacccattaacaattggtcacattcataagaggaggtggtactttgtgttgttatctcacattaacgttataattgtaat

SEQ ID NO: 10061 - DNA, 792 bp, Cannabis sativa
ggcataaaacccaacaaaatgctcaaatataagagaaggaagtatcacccaaaactagagcatctgagaaccaaaagtaaaccactaccttattatatttggattatttaacatttaatcaaatgtaagagtaggaagtacttcctgaaatcagaacctcaagtatccaaaagtaagttactgccttattatatttggaattaggtttcgcacgtctaatagtccattcaggttaacttaaaataaaagttgaagcttcacagttaacccaggttaacacagccagagtatttaggttacttaaatcaattgattcacgtcaagtaaagagtggagtttaaaaagccctaaaaccaagtgataaatgtcaataaaatgtttgaatcttaggatagttaattagctcaggttgaatagttattctgtgttccaaagaaacctttatgtaagaacattttcgcaagaaaaatatttaagtctaagcatttaattgaaaaactaaagtttcaaactttttgaaccagaacctcacgaggcttgaaacattaagaattagtagattctacgatataaagagaatatccaaagaattaataaatagtaccaaatacttaaaaactccacaataatggtataaactattgtctccacatacgcataaagggggacccttatcccctaaaaagaaaagaaaataaaataatgataaatcaaaactaagtagaattatccgatggttgcacattttgtgttatggcattagatagggcctccagcatcgcagacttggtc

SEQ ID NO: 10062 - DNA, 703 bp, Cannabis sativa
ggggactgggaggatgagataatgatattaaatataaatatttggtagtcaaatctcatctcaagatattttggagttgttctctcaccacttcgatttctttgttcaattttcttgggcatttcatagccttttttttttttttggtggagtttcagagccatattgttgacactatatattcagctcatactaaaagtcttctttgaaatgtaaaaacttcaataaacataaagaaatgaaattataaaatttaaatttttatataatcagtgcaaaaatatagagcatgtttggtattgttttttatttttattttaaaaaagcgtttttacaaatgagaacaaaaactaatttttgaaattttcaaacacaaggcacatttagttagtgttttttaaaaataatattgaccaaaaatgaattattttttcaaacagtaaacaacattttgttgttttcgaaattcttgttttttgtaactttattttctaaaaactattttcaaaaaataaggccaaacaatacatgcctaattattttcaaaagacaactttctatttttaaaaataaaaaatatttttttagttatgatatcaaacttgcactaatatgataatataatataatccctctacattatcaaaaaacaaatgctgaaaacagaacaacgctaccagcaggaacaaaaataacaccccta

SEQ ID NO: 10063 - DNA, 532 bp, Cannabis sativa
gatttgtagtggtttgactccaaatagtagtaacaatttactctattttgatacattaattaatgataataggtttgtgatatagttcctccaaatataaagatttctgataattgttttggttatgaaaagttagataacatcttgaaagacgttcccgaaagtctaacttgtccatttggaagaagtcttcgggaaagttaatcttcctccagaaggaagtttcggatggctaattgttccctccttgaagtgagtcctagatagtcggctccaattgtggcctttccaatctaggaagtcctttcagcatacactttggtctttcttccaggaagcgtacatatctttcataagtactttatcttatgctgacatggagatactgtgttacaaggagtttgttaagtcccaactaacttaacaacttagcatctgcaaccaccgactctggaatccatatcctgaatctataaataccactacttagctttacagagagaagagaacgagatcagatgagtttcgagag

SEQ ID NO: 10064 - DNA, 652 bp, Cannabis sativa
cgataatgatgcctcattataacaatgagaaaaatgtttttatttatataataaggacaaaatgcttagacgatttattaaaaggaatatgatgagaagaggtcatcgagttatccataattatatgtgagtaggtatattaattttttgagttgttaggttgttgtgtttatgacacattttacatgttatagctagtatttttttcttatttttttttattaatattataaatatatattgtctcattagagtagaagatataaatttaaaagataaaatattttaaagagagctaattaaatatgtttaaagcttaggtaagtcaacaatatatttagcaaagaaatatgtaattatttttacacaaaaagagaaaaacaagaaattgtaacttgtataaagactgtgcatagataattataatcaaaatttgaaaattgaaaataaatcggttaaggcttaagaataattcgtatttttatcttttgaatttttgatactgatcatactccttaaaatatacagcttgataaatttttttcctaaaatataatagttacataagtatatgtattctgttaggcgttaaaagttaagattttcactttttaaactttgaataatactaaattttgcctctttttattaa

SEQ ID NO: 10065 - DNA, 558 bp, Cannabis sativa
aacattcaacccctcatctgaaatccccccaggcaagtacattccatacttgataaaattttcctaggcagccaactaaaaaagatctcgtgcttcacgaggaattcggaaaatagattgggacttgtcccttaaccgaagagttagaggtgcctattcataaatttgagccaagtagaatggtagatgcttggcatttatcctctaaaagatataatactcctgtacgaaattctcaatcttcttgactcgtttgtcattggtgtcgactaaccacgagcagtcgacttgagagaaatagaaataacccaagaaattttttcctaggctggacttcaagtcaataaactagtttatgtagtggggtgaaggttttccccatcccagctatgtgtagggcatgaacagtgctgccaaatatttaatggccctcaacatgaactaagtcgggaaaatattataataattttccaactgttgaaagtacaggtggagtggccataaagcaccttgctaagcctacagaccacacaatgcacagaacccctcaccaggatc

SEQ ID NO: 10066 - DNA, 650 bp, Cannabis sativa
attggtcgaacagggttttcttcttctctagaggccttacctacctatattacgaatttgattgcgcaacaccagtgggagaagttatgtgcaattcccaagccagctgtggcctctgttgcccctacattttatgctgcatttgatacgaagaatcctgatgtcgttcgggtgaggggtcagagcatccccttttctcttgatgtgattaacaacatctattggctgataactcccctagaggattagtttcatattttgaggattaacccaacctctatcccatttgacgtcgtgcttcgtactattgctcatccgggttctgcatggtctatctctccttccgaccaccaaactttgttacacttgtctttacgacttgaagctagtgtttggcttcttttattaactgctctttgatgcgcatgacccatgataccatggtgagtcaaacacatattttcttattgcattgtatcttggcgagcaagaaaatgaatgtgcgcaagatcgtttatgatgaaattcagaagtggtttaagaaaaaggacgccaagctatttttctcggctcttatcactgagatatgcctagcaggtaatgctactcagatatgaacaagtggatcatcattgatatggttttgattc

SEQ ID NO: 10067 - DNA, 1066 bp, Cannabis sativa
caaaaggcaaaatagaactgcaagcagcagaaaaaagaaaactcactgctagtatgaccctccctgatgcagagaacaattctccagcgatatcaatgtcaacagtagtttcagcccctacagctggctgtgagacacatgccaggaaatggcgaacaactagttcgtacaacctctgaaaaatattaacttatcagggaaaatatactaatgttttgcttggaatatattatataaatggtgtcttacaaggtgatcttgactccatgatcgttctccagcagagaactttgttggatggattggtggatgagccttgtcatcatgtccaccattactagggtttctccaaattccagcaccagggtctaataatctttgtgcatatgatccccaaacaggatgcccttgttgttcttctactatagcctattaagagctcgatacgttagtaggtttacttatgaagatgataatgcaaaaggataaccaaacataatatccaatcaaagctggccattatcatctggaaagtgtaaagttaatgtagttcaacataacctccaaacattttaacattggacaaaagaaaaagaaaatcaacaaaatcaaaaatactactgaaaaattaaacaagttaaaagaacataaatacgctattagtgtcctacaaatttagaagtcacatatagggatcagaacttaaaattcaaatattttagcaaatcaattgtggaggttaggaaaatacaagagtataacttggatactctttcaaccagtacatttacatgtgaggatgttcattattaagattttgctacagcacctagaagatcaatatcaatagctaaaatttcttccatcaatacaagatcaaaatgtagaaggttaagcaatatatcctaagacaagaagcttaagcaatctcaaatattttcatacatccatttttgtgctaacgtcaacgtagctaaaaacccaaattttgaaatatattcaaatgtatttactgccattcaattttatttgatcactctttcatatgaaatttcaattttaattt

SEQ ID NO: 10068 - DNA, 568 bp, Cannabis sativa
ggaactcacaaaataaagccatattttcgccacgggatttatttcattctgatgcaacaaatttggcgacgcatcctgcccatcctgatcatgaaacctcaaccccaggaacccaacaatttcaactatgtccacatagtcaagatgttcatccttttcaatcacccttaatcgctattcatctctagtgagatctggcaattcgtaaagtgcgttgatagcatcagatgtggctgagacttccttattgaaaactttaaccagtccatgtttcctttcgggccaattggccaagaattcgcaagccatggtgacgttggctcggtctttgacatccacatagctaacccaattcatgctttcaatttgactccggattgcttcaaaccttggtttgcgtctcaacgggtattgatgtaatcaatcccccaatcttcaatgtagggcctatccttcaacttgaggaactgttcttgagccgcttcactaacaaatcaggtcttgtcaaaagattttcttgaagcggcccgagaaggattggatgatgaaccaccctcttcatttgccc

SEQ ID NO: 10069 - DNA, 559 bp, Cannabis sativa
catggcaaaggggcactgcctcctcctggtttaggcaaacgagcgcgatcatgctagagcgagaatttcaataattttttatcttttaaactcttttttgatcaatggttgggtgcttaagacaataacacgaacccatggttgagttttatgattctagatgacatgacagagcactgtactatacttttggagaatcagatcaaggtaaatgttgatgcaacaatttttaaaaattgatgttatcatagtttttgttgggtcttccgtgggaacgaagcattgctgcttagggccatttcaagataccgcaatggattttgcaacttgaaaatggtggaagagctatgatttaaggaagcatttagttggattaaaggaaatgcttggcataacgtcatcattgagacaaattgtcttgttgtggtggaggttgttaggtgtcaatagagtcttattttggctaagttattgctcaaggtaggtttttgattcttagagtgcttgaggaatgttttttaattttttgttaaacgttctcctaataaattggctcact

SEQ ID NO: 10070 - DNA, 1528 bp, Cannabis sativa
tgaattgataaagtggggtcaatgcatcttttaaaaagcccacgagaagaagcttcatccttaaagtaatttatttttgaaatcggcccattagaagagagagccgacccatcagccccatctaataaacctttacctttcccaaaagtcttcctttggacagcgttatttgaattaaaaaacggcaagacttcagtattctttctattgaccatagtaccaccatgaacggtattacccagaatggaattttctggcatgcgcgaggcagggagagctttgggaacccacaccctatttcgagctacgacccgtcgccatcaccgtgcgattcagagcttcgtcgaacgattcccttcataccagactccatggccaacagtcgattcccagcacgaaccaaaccagtgcctgccagggccgtagaagacgaagccggagtgaatgaattggcacccgagaagacatccaggtatgacgaatccgtagacatccatggcccaaacatagggaaaggaaccccattctcactggacaccgtgactggagaagaaagagaacaacctcttctttgatgacccaacttgccacagttataacaaaatatccacaatttcttgtatttgaattgtacccaccgttggatacccgattccagagcaaaataacatccagaaaacaggggaagattaacgttcaggctaatcaaaattttgagtgatttatcccatagagccagtttgccttcgtccaaatcaacagtaataactttgccagccttggcccccaatgttttgccatatacaacaaagaaatagtctcttgggagattataaatgtgtatccaggttctcacatattcaaacaagtcaaagttttctttccttggcgcccatgctttcaagataaaagtataaccttggacacaccaaggaccatgatcaagggcccaagtacggttttcagtgcttaaaaatcccaactcaaagcagttatggttgttagcaccttcattcaaagctaccacagtcacattaaacttccagactttttccacaaagttaataatagtggcctcattaactaccattggggccacaactttcccaagaagacaaaaagtggataatgcctgctgagatgaggcacaaggactaagcttgactgaagcttcctcataagaataacactttccattagtggaggagttggtggcattaactaaagccattgaaacagacaaagaaaagacaagctaccaaacaacaccaacctcaccaaacccctcaactctcaaccaaccccctaccccacagaaccaggagtaccccacgactgagacaacaaaaggaactaaggaataaaggaaaccaaaaaaaagagagcagagaaacctaagactcaaagaaaggaaacagacacaaaccacacactaccaagatggagaaacccaaagacacagccaaaaacctaacagatacaaacacataccaccaacactgagaagaaaagagaaagaaaaaaaagc

SEQ ID NO: 10071 - DNA, 687 bp, Cannabis sativa
agctatgcttgacatatacaataaagccactggacaatccgtcaatcttgccaagtcttctattttgttctctcctaacacccaggcccaagctaaaatatctttctttcactctctcaaaatggaagataagcccttcattgacaaatacctaggtgttcctcaatattttcatcgctctaaagaatccttgttcctgttcattcttcaaagatccagcaataagctttctgtcttgaaccaataatcattctctagagctcgcaaagaggttttgctcaaagctgttatccaagccatcctttcttacgttatgtcttgctacagaatttccatttctatttgtaaacactttggaaagttgatttccaacttttggtggggatcactgggtaataacaaatgcaaagttcattggaaaaactagccttcgatatgcaaatataaattttttgggggtttaggttttcgtaatattatccaccacaaccaggctatgcttgctaaacaagcttggcgtatttttaccaacactaactcccttgtggcctccctcttaaaagctaaatactttaggcataacgactttcttcatgctaatcttggacatgtcctatctttcacttggagaagtctcccttggggtagggaccttcttttaaaaggtttaatttggaaggtggggga

SEQ ID NO: 10072 - DNA, 733 bp, Cannabis sativa
aacgggatgggtttggggtgccggggatctcaatcatcagtcatagtcatgttcgacgggcaggaggtcctctcggtctagaaagctattcgtgctacgaaccaaagagaaaaagagagagcgtggagagaaaatctaagagttgcataaaaaaaaagaaaaaaaaaaaagaaaattatttgtcatttgattggcttcatttttatttgatgctaaaattttctttcctaggaattttagatttggcaatgggtagtttgtatgttttgtatttttatttcaaatctcaagtagtgttctttttttttttataattattattataactgatttaaaatataagtcatgtggtggttcagagggtctgataaatgaaaaggagagacaaagagaggaggattcaggggaagagagaggaagaaaaaaacttatgttttaaaatttttattttgattttgattttaatcatttatttataattttaaaataaggatttaatgatgaagagagcaccttaaaaataaaattgaggttggatggttacttattttattttaaattgctgaatttttgattaaaaaaacaaaaaactacttttaaaattattaccgaacaaccccaaagtaatttaaaagttgaagaagttttaataataatcacacagaatcatctaaataataataataataataaaacatcattcgaccataaattaagttaactgttaaataaa

SEQ ID NO: 10073 - DNA, 1170 bp, Cannabis sativa
agcccaaactgattagttttgatatatgggaaacaattcctaaacttgtgcactacatttccttgcaaaagaaaaagtaagttgaagatgtgaagatagacacaacaagaggtttgaaatgagattagaaaaggtggtaggagtcaatcaaaaatgtattctgagtatcaataaaagattcatctcaccatggtagttggagtgcagattaatcctcagctcattcttgcccccaaacctatttgagaaggcagttcttatcctattattacactatttacatataactgaatacatattaatcgagagctggtcttaaagtatacggcgcctgagggaaaatcaaatttcaaggtccctatatatgtagttgaattattattaaaatgatatttctaatgctttagtgtaatggtaaagctttaaaaaattcttaaaatttaatttttcatagctacacattaaaaaaaaaaaaaaaaagagattattttagcttaaagttatacattttaccactacatcaaataatatttgttttatgttcatcttatttaatattttatcaatatattaataatttttattttataattcggggcctgatcggtcgggagcccgaagcacacgcctagctcgcctactctcagaaccggtcctaattaatcctcaagtcattcttgcccccaaacctatttgtgactgtcttgaaatggtattccacgggtcatgtatgtgaatgtgaccattgtggggttggacttagtcccgatgggctgtccaacttattcgttggctgaccacgtgggttaatatgagccctcatccttttgggcttaccatcttgtgggccttattatttgtcaatttacggctaatggaagcgatgtgggtcgggttgtacaacccataattaattaagcttgtatgattggttgtacacacaacaaatattattatctattttgagtgtgataatcagaatctcgtgatctgtagaggaaaagagcggtaagctgtgtaattctatattatttgaggaaggttgagtgtgattattttaaaactgtataggtataggtctacacagttaaagaatgcttaaataaattgatgggtactacccatgacaacaagatgcatgttcttttctgtaattcatcacttaagaac

SEQ ID NO: 10074 - DNA, 545 bp, Cannabis sativa
tttagttacagaaaatatttcacttgataatttatcgagctgaaaataacgatgaaatatttctaaatgttatgtgaatcttattttaagcttagtaaatttttgctcaaaataattgtcttttttgataatttataacctgcactaccaaaaaagttacttttacttcaatcacaacataaattttttgtggctaaatattatttttagtcacaacaaaaattatttaggactaaaaagtagtatttagattcaagtaaattagttttagcatcacaattatggttaaaaatatatttagttacaagaaattataatttttgtgactaatacttttagctacaatttttttagtatttagattctttcctatttttagttaaaaattttactgtgacaaaaaataagattttttttgcttaacaaacataagtaagaaaatgatatttaaatttctatttgaaattattcaaaatgtgactataatgtataatatatttatatgtatatgaatatgatattgtagtttgaagagtatgagaaga

SEQ ID NO: 10075 - DNA, 807 bp, Cannabis sativa
aaacatactctaaaaattgagcctcaaagttatgctaaagcatcacaattcattcattggctcaaagccatggacaccgagacacaagccctgaaaaaaaaatagaacatggatcatcaccaaactaccactagggataaaaagctatcggttgaagtgggtatacaaggtcaaatacaaacaaaacggggatgtagatcgattcaaagcctatttagtagccaaaggctacaatcaacgacaaggaattgactactcccaaaatttttgcacctgtagcaaagtttgatactttgaaaattcttctagctcttgctgcaatgaacaattggaatgctcaccaattagacatcaataatgtctttcttcatggtgaccttcatgaagaggtttacatgaattttccaccatgatacaaagctcctccaaactctatttttctcttaaaaaagagcatttatggcctaaaacaagcctctagacaatggtattccaaactaaaatccaccctccttgcagattgtttttcagaatcactgtctgataactcattattcataaaacgaacaaccaacatgtttcttgctatcttagtatacatggatgacattgttgtagccagcaacaatgatcatgccatctcccacctcaaaatttcccttgacaacaagttcaaactaaaggacataggctcctttcatttctttctcggccttgaaattggtcaaacaagcaagggcatctcaatttctcaatgccctttcacgcttcagctattgaaagacacggggtacttaggagccaaac

SEQ ID NO: 10076 - DNA, 700 bp, Cannabis sativa
tcgagctgctcctgagactttctgtgccccatgcaccaagagtcgaccttagaaccatctccttaactcatcctccaaggccactagcaacagctcctcggagtggcaccaacaaccagatcccacttggggagccacgtgtggagatagaagaccctgaggaggccattccttaggtaactcaactcagccaaactgtggctgacttgcaacaacaactgtgatacaatctcgataagtaacacgaatagtttcaacataagttcatggaaaactagaaaaacattgaaaatcaatgctttgagaagaagcatcgaagagctaatcgtggaactgcttctcgaagaggtatttccgagttggtgagagagacaccctgttgaccagttggtcatgtaggaactagtatccaaggtgaaaaggtgaatgcttgggatactaatgctacacctggtaaccgagcaggcactagacaaacttcaggcatggagagctctcgaagggaaagtaccatcaatcaagagcctaaaaagactcaagctaaagggcgccaactaataggttctcaacttgatgttgaacgaccttgcaacaacaaaagaaccattaggattcctccactaagtactcctcaacattctcaagagaccaaaccttaagaccctacaaggggaaatgtacctgctactcatcttgatgg

SEQ ID NO: 10077 - DNA, 1141 bp, Cannabis sativa
aaatacagcaatttcaaaacaattaaattaatttatttcatattttcttgatatatatctctaagaaacattagagcctacacatcatattcatagtcttcgtgccagcatttcatcaggaaaatatgtaattattattattttttttaaaaaaaatacataagttgtttttttagcgtgaatgcgtgattcgcctaatttatatttttgttaaatgacaatttgaatattcaatttcgtaaaatggagaccatatatacgaaaacgggtaagtttgttttgtcaacatgcgaatatttgattgagctttataattagttataattgttgaaaaattgagcaatcgtgatatcaattagttaaaaatctatttgactgaataaaagattaagatatcaattcgttgcaaaatataaaatttaaattatcatttaacaaaatatataagtcaattttgtattcacatcgaacgtagaagccaaataagtatatgtcctttattttgaaaataatttatcattaactatttataaaattttaacaagttatttgtagcgcgtcaaaagaaaccatcagagtcattggagatgatgacatcgcttttgttgggtcgatcaatgtcttgcccataagacaagacttactcgtaggtctagctcaaaagcataacatgatgtgacaactgtactttcttccacgtaattgaggtgatagaagagatgatgaagcacatcaaagtttcgatcttaatatttgtggtatagtttctctaaatgaaaaggtctctacatttgttagttttctcgcggtcccggaaggagtcttggagaatgaaagtcggatccgaaatgaattctcggatgactttcatgttcacttcgggtccagtcttcaagataaattattttttttttaaaggaattccatctggctagttattcttcttgtattgatagttcagatagtcaacttcattagagttttatcatgttcgcaagcgtcttcaataaggttcgtgaccctcgtgtccgaaagcttgtttatgttcccagaggtcctggttcttacgctaacgtagaatcttcactaaaagaagagttggttaagttagttgtgcagagaaaattttaacaagttattt

SEQ ID NO: 10078 - DNA, 1421 bp, Cannabis sativa
acactgatgatgatgaagatgaagaaccacaatgcccataaaccactttcctagttttcttatcaaatttcctatcttcaacccaaagctgaacaagaaaatctctgtctatatgggtatcaatatcatttccagcattattcccaaactgacgaaatgggatcaaagaagtctgttttgaaattgacccaattcccaaaatgggatttttgggtgggattatcaatctttgttgaaaccccacattttggtaatatctaaaattattgagcttctttgtaagacaactccaactcctctttgtcaagttcatttttctgtcaatttctcagtaaccaaacacaagaaatgtaatgtaatgatatggactgcttcttcttcttcttcttcttcagatgtttctctctcttcccatgattctcgatcaccttcggacaagggaggcttctctccctctctctctctttgatccttttctcaaagtacagttggaaaacagaagtgatattatatgtatttatttattgggcttgggcttggacttggttcactcctcattgggccttattgggccttcattgggatattttcataaatacctaaaaatttgatcagctgttttatagcatttttatgagtaaatatttttttattttataaaaatagggataaattgtttttgagttgttttatatttgtattacgttgatcacaagttactttaataaagttctgtaaaaataagagtaatttatgacgtaaatagctaagtttaacttttatgaagataaatatctaagtttaaattttggcgaaaatagtacttaagttatatttttggagtttctgaaaatacctgatcgttaggtgtaaagtcaatattcacgtgtcattctcttattgatatattcaaatttatttttaaataaaaaataaaaatttaatgacctaaaccaatcagagattaccatgtggctattgacttgacacttgacttgacacttaacggtaagtagttattgaatttcataaaatataacttaagtaaatatttgaagttctcaaatgtgaatggtactattcaataaatggcattatcataccatttttgacacataaatagttataattttgaatattatttgtgtacaattataataatttaaaatatttgtaaatttttggatgattactaataatttaatgtgctaataattaaaaagttccaaacaatcaaattgtatgtgtatttgttaatttatcataatatttaggtataaaactcttgaccctctcataatactatttgttaattccacacaaagttggaataataaaataaaataaatattaccaaacctattgataagccttctttctacaatttaagtagactttaaattaaataattaagtatacat

SEQ ID NO: 10079 - DNA, 697 bp, Cannabis sativa
gttgagaacctaccttcttacttcttacttcttactattcaatcatatgaattttaatttttgtactagtctctaatttttattctctaatataaaataaacttaaaagagaattttagagacggttttgttgtgttttcagtttttatttttaatagtgataataaaaatagttttttatcattttaaaaatttaatggtatttgcacaaatttttaaaactatttttaaatttttcttactaaaaaattcaatattttaacaccatgacatgacatgaatccattcggtctgggttcaggtttagttctgggtctaggatatgaatatgtgagcaaaaatgtaaaatataatatgttagacgaaaaaaaaaaattatttctaaaaattaaaaacaacatttggatgttttcggttttttagtttttaaaagcttaatttttaaaaaaaattagccaaacgacctttattagtttttaaaaactgttcagttttaaaaaatagaaatcaacttttatacaatttctactgaaagatgtaaaaattgtgctatatttggcacaaaaaaagtagttttgtggtaaatttacaccaaattttagctttgtactccaatacacaattgcaaaagtaagtattttgatttaagttcttttaatagaataacccggttgaagcgtaatgatcatacatttaa

SEQ ID NO: 10080 - DNA, 562 bp, Cannabis sativa
tcaccaaagacccggtctagactttggagagacatttagtcccgttgtaaaggctgccactgtgcgtgttgttctcactcttgctgttgcgtatgattgggaggttagacaagttgatattaataacgcatttctcaatggaactcttgatgaggatgtgtatatgatgcaacctccgggttttgaagatcctcaaaagcctcatcgtgtgtgcaaactccacaagtcaatctacggattaaaacaagctccaagagcgtggtacgatcagctaaagaccacacttgttcactggggttttgaaaactcgaaagccgattcttcctttttcatgatgaagcaaccgaagcacaccatcttggtacttgtctatgtcgatgacatagtagtaacagggaataactcaaccgaacttcatgccttcataacaagactcaatcagactttctctctaaaggatcttggacctctccaatactttctaggcattgaagtatttagagatcacactggaatttacctgtctcaaggcaagtacattgctgaattactacaaaaggtg

SEQ ID NO: 10081 - DNA, 741 bp, Cannabis sativa
agatagattttagaatagtaggctcgtgcggaaatgaaagataaactccacaaagtacgcttataaggacaaaaatgggtttgttctattattattatatgggctgctggctgctttgcaatttgcaaaatgcacctgatcaattaaagggaaacttacaaaatattagaaattgggttaatttttacaaaaatattatcatacagattttttttttgaaaatactatgttttataaaataccagtgaaacacaaaataaaataacttaaaacaacagtggaatatctataaaacaaccgtagaataacagtaaaaatttaacaaaatacacaatataaaacttacacagtatttttgaaaaaaaaaaatccaaccaaacagtaaaatggaataaattgaaaaatattttttttttttggtatctattaattaaaaatacatttatattatattttattaaaatatatctactttttttaagtagattgtccaatacactttactctctaaagtttagcatataatttatattaacttaagagatctaaagaagatattatctataaaagtgaatatattttaaagaatataaaaataaaaataaaaattaaaacaaataaaataaatttgttataaatgtaatttcctccatcaaaatactagaggactagaagtagggccaacgaaacagtaaggccaattttgaaaatgaatggtgagatgtggccacgtagaaattc

SEQ ID NO: 10082 - DNA, 507 bp, Cannabis sativa
cccttttgttgctctgtggcagttggtactgttttttacttttaactgttaatgtcaatttctttttcaaatttcttctctgaaaactactcccccctccccttatttggccgttaacttactctctccacccttatttctctcttctagtgactatctgtaactggttctattaatcgtggtttactggtctgttgctgctttgtttctccttcatggattccttccatcctgatatctccaaggcttctctgttagagaaaaagaagtggtcaatctatcttccatcactgctcctccttcacgtccgaccatccaccaacttatctgcaaaatcttttcccgaagaggatacaatcccaagcaattgcatgatttcatcaacaaaaaatggcaaggaaggtttgctgtcaccaattctaactatgaatttgaatcatatatgatcacttttggctgtgaaggtgatctaaagagagttttatccaaggaaccttggcatctcca

SEQ ID NO: 10083 - DNA, 549 bp, Cannabis sativa
tttttttttttttttttacgaaatagttactgacgaagcaacttaaatcacaatcaaaatttacgtaacaactcatataaaaattactggagaaatcagtactgaagcaattaaaactgtaaatttaaaaaaaaataaaaaaaaataatgtatgggtaattttttttttatatttttagttaatttaaaaataaaaaacaacattactttatatttaatttttataagaaaatgataaaaatattcagaattttataattattactgtaattcaattttaattagtgattaataatgtttatatacatgcatgtaggtaatgactgatcctgatgcgcccagtccaagtgagcccaccatgcgagaatgggtgcactggtattatatatatatatatatattatatacatgatgtgatataattctgtataaatatattataaatgtatatgtttttataatttaattgaagggattttatttatgtaacaattttcaggattgttgtggatattccaggagggacaaatccaaacaaaggttaatata

SEQ ID NO: 10084 - DNA, 966 bp, Cannabis sativa
caatgtaatggcagatgccctgagtaaaaaaggtctaggatagatttttagcacgaagatgatctctccttagttagtagtcgatatggttagggcttgcattgagtttttggttggaaaaattggcaatttaacgcttcagtctaatttcttaaaaaggattataaattatcaaatagaagaccttgagttagttaagtctcaggaggaagttttaacttgtttgctaaagacttctcagttttaggcagtgggattctacagtacaaggattgattctgtgttcctgatagtagtgagctcagaaaagagatattagatgaagctcacaccactccttactcgttacacccaggtaccaccaagatgtaccaggaattgaaaccttacttttggtggtgcggtatgaaaaaggatggggtagattacgtaactaagtttttgacatgccaacaaataaaggctgaacatcaaagaccgatgggtttattatagtctttaaccattcctgagtgaaagtgggaggatattaccatggattttttggttggatcatctagaaccacgagtttatatgaattgatctaggttatagtggatcatttcatgaagtcatcacactttctaccagtgaaaactacttatacaatggattagtacgctgaattatatgtaaaggagatagtttatctccatagggctccaaagtccattatttcaaatagagatcttaagttcacttctaagttttgggagagtctctagaaagccatgggtataaggctgaagtttcattatgatacggtttagaattccagaattatgaggaaaatatttatggaaagttagaatatcgaggttatacagggtatttgattatgaccattttacctctagatttgatgattactttgtagctaaggcaaatttagtctttttcccatttaagttaagctaattaatcct

SEQ ID NO: 10085 - DNA, 1474 bp, Cannabis sativa
  modified_base (928)..(939): a, c, t, g, unknown or other
actggttatggctattctcctcctacttttttccaaactttgcttgcatttttttctcagttttattcattttcatgatatcagacctaaccgtattccttgacaacatttaaaacatgggacccgaagtacttgaatattctataaactcgctatgcttaacaatggacaaggaatattcatgcttaacgatcatttgagccaatttgatccttcctaaatcaggatgaaaattaaaagtaactgaagggcttgcagttgcactaggattactagcaagcttggcctttcttactggacacctctctacatgagaatttaaatgcctagtccccttagaactttctcccaccagcttacgcttgtagtaattgcaaactactttacttttgccatcaatattttgtcgggtaaaaggatcccatgcactagagattctttttctctgtgtctttgtagtcagattttaatttattgtattactaacagattatactttagttgctattgctggcaaaaaatcaacatcatcctcaaaattagaattgatttgaccagacattctattttaacctacattaacaccatattctcatatatatcaattaatgcatgcaattgcttagaaaatatgataaacatatccacgaaaaattgggcaacaatttctctattttattaacctaactatctgtcaattacaattgcaaacaatcaaataacacacaagttttcatccttatatcaccgcagcagacaaattttacagatcctatttcactaaaacaagcaagttatgaacctcccattatcaccgcaacatacaaagtctcagaacctactttgatatggatgaatatataaaatattcaaactctttataaattagatgtaatataatatagcaattatagaaaaatatacctcnnnnnnnnnnnnttggccatcttagggatttgacagaccaatatgcttttttgtctaataaagttgttggggcgaggtgcttctttagatcaatggacatatctaatttgtacgtgtcccacggcttcataataaagtaaatttataaaaatcaatacgatatcaccaaaattaataaaaatcgattccatcttccttggtaagccgactctgtggtacgccccaataactcacaaaccccttctcgattttgaaatgacacttttttttacctgcctcaccttctcattatgctctccatcgcaaatagccaccgtactagcacccctaaaggtgcatgattaaatctctgtgtttcttgcctaatatttctttctccttgctgaagaaattgatcaggaagtaatggggagcaagattgaatctgtcaaagtactattcgctctataaacgggagagaagtagagaactaaagaaattgagactaattttttttagggatttaggtggtttttaaaatctaaaatcaggttgggtcgcgcctgac

SEQ ID NO: 10086 - DNA, 642 bp, Cannabis sativa
aggcccattaggcgaagcttgactactgtaataggaaagctagtaacctgattatgcagtttaatgagagaactgttgggagaagacatgatctgattaaaagtcctctacaaggaaggctcattgatagatcgggtagagtctacagctaagtagacaatgggcaaacaatccagccaagttcattgggaacaaggatggatttccccttaccgaggatgaacaaatcctaccaaatagatcttatggcagaaatagccagtccttggcaccaggtggtatggggggtcggctaggtattcctgtctcagtaataacaccattaggccagcctctagccgactaacataatgatattcctctctaaaacatttgagagtaaatcgttctatggcctattttttataaactaggcccaaaacaagtggaaacacccatgacatcaactcaaggagtgagaattgaagtaactttattccaccaccaaataatcacttcagaaaattggatccaccaaacctaagtaattgatgtgatcaacaccctatcaacacacaggccacactggccaattaggggggaacaatcgactagacactacctagcatagagctggccagccatagccaattacctagatta

SEQ ID NO: 10087 - DNA, 828 bp, Cannabis sativa
tttcttcactgtgattaaaaggaacaaaaagaaaaattgtgggatgtagactaaatatcattttgaatactacattttacaaaaattattgattatactccctattttattaaatgagaacttagactttttatttttaaaataatataaaataatactctcaattgattttttatcaaaataaaattgaataataacttaatttaaatatgatgttatgataagactgaatatattttatgtatttgtttatgatataaactaaaaaattaaaaatcaaaatcaaaatattaatttatattattataaaaaatataaaatttaatttatcatttagcaaaataaaaattctatttaataaattttgtaaaatatagaatggaaatattttttttttaaagtgctagaaagtacacataagtgattctttctcccttggcattattttcttgcgtctcactccattactcttccgttatattctatttctttcttttgtaattgcagaatacttagtattgaaagctccacggctatggcggcctctgctctactaatggacccgaaacctttggagccaccgccctctttcccctcgacgagagctgacccatgtctctccgaacagtacctctcctccgacgaggacgatctctacagtcgcctcaagtcactgcaacgccagctcgagttcatcgacatccaggaggagtacgttaaggacgagcaaaagaatctcaagcgagaactccttcgtgcccaagaagaggttaagaggatccaatcggttcccctcgtcattggccagttcatggaaatggttgatca

SEQ ID NO: 10088 - DNA, 762 bp, Cannabis sativa
tattacatttcttttcccattctagaggtttgtttttgaaactctttttggtttaataaattttctttttatttttttcatatgaccgtgctcgatttttgagcataagcagattaagcttgtacgtaaggtccacttaatttaggggtccaaaaaaccttttctctcctttataaactaccatttttttttaataagagtcttaaaatattttttttaatggttcactaaattttaaaaacgtcttataactaagtggcatgtatagttgcagtatgagaagatttattttactaacttatcaaatttgttgacactaaacatataaatattctttaaaaatatagatacatacttttaggattcatcattagaaaactacgttcaaacaatgtgttgcacgcgtgattattttattttatacgcatgtaaagtagactgttttaatattatattctatattgtaaattattccgaatttctcaaaactttgtaagatatcttaaatagctataatgtacataaatatgaagaaaaaaaaattacactaaaaaaaatttctggaagtcgaaacaaataaagggtacatcaatacatcccttttaagcgagtctatttagaattaacctatattttgagtttgcatttttaaatcgcaccaaattagtcacattagtattataaagttaaagtaccaaattttgatagtatacataatttataaaataagaatttggctgggcaagttaattaatatcccat

SEQ ID NO: 10089 - DNA, 577 bp, Cannabis sativa
aattgggctttagaggcaatttttttggacttaaggcatcaactttgaagaaattagcgaccatcgttgttcaagaggtcgataaaagggggtgatcaatcaattgaaggcgtagaaccccctatgtcgtcagttattatgaaaaaattgacggcatagggcttacctaggcgttaaaatcgagcttatgtcatcggttattttctaataaccgaagtgtatagttttatagcatcggttatttagttaataactgacatctcatgatatttctttaatttcattttgaaaataaaatctaattttgatataaaatcaaaatcagttttttttcatatatatatatttatgaatatatttaaattaattattaattttataaaactaaaaattaaattgacaatctgagtaaatgtatatattttcattactctaactaatatattacacaaatattctaaaattactctaattgtttaaaagttatctaaacatagaaaaagaaaaaaaaactatcttgtgcaagtgttcagtcatcaccatgaattactgcgagtaattttgctagccactcttg

SEQ ID NO: 10090 - DNA, 994 bp, Cannabis sativa
ggcataaaacccaacagtaagggcttggtgaaggcatcggccaattgtaatgtgcttgaaactggaatgaggcgaactgtggagctgttgattttgtctcgaatgaaatggcaatcaagttcgatgtgctttgtgcgttcatgaaatgtagggttgttggcgatgtggatagccgattggttgtcacaatatatgaatgccggacctgtttgttgtatttggaagtctgaaagtaagtattggagccaagaaatttcactcgttgttgtagcaagtggcctatattctgcttctgctgggctttttgagatggtgggttgtttctttgttttccaagatatgagacaatcgccaagaaaaatgcaaaatcccgttgttgatcgtcttgtaattggacaggaagcccaatcagaatcagagaaaccacggaggttgagagaggaagtatttgaatatagaatgccttgaccaaggcttcctttaagatagaaaatgaggtggttgactgcctgcatatgttgtgttcgaggggctgacatgaattgactaagattattcactgcataagtgatatctggtcttgataaagtgaggtataggagcttcccaattagttgtctgtaggccgagggattagtgagaggttctccttgctgatcgtccaacttagtccttggattcatgggggttttagccggtttacatccagaaaaaccagtgtcatcaaggagttgaagtgtgtattttcttttagaaagaaagagaccttctttagattttgcaatttcgaatccaagaaagtatcttagctcacctagagctttgagtttgaattgttgatgtagagactgctgaacttgctgcaaagtgtggatgttgggacccgtgagcactatgtcattgacatagacaagcaaggcaacaaaattatcatttgttcctctagtgaataaggtgtaatcggcctatgattgtttgaatccgtcttggagca

SEQ ID NO: 10091 - DNA, 742 bp, Cannabis sativa
gatctaaacttggtattgaggagaaaagattcattgattgtggatcccaccatcaaaaataatatatattaactttttttgagtttttttgaccagttctcacacacatgctattttagaatattaagttaatttgtgtatattgttgttttcgtaacaaatttgtagtattttgtatccccatctttttcaattagaaaagtctcagagcctcgatcccatttcaattctccagcttcaatttctatccaagtgactgtcaaagatatctcctatcaaattgtgtagatatttgtcgtcttatagtgcttactccaatgattcaatttatatataaatatctgcgaagttttaaccaccacatgataatgttttgtgtgattgaaatttatttaaaaaaatattatatatattttgaaaataaaaataatattatatattatatgttatattttttcttgaaaacaaaaaatgagaattttccttaactataagctgcaaattcggtcgttggaattttttttttttaaaataattagcatttttttctaaatttataacactactaaattgtgccccttatagcataccattcataaataatacctttcgaaatatttttttcttatagtaattaacacaatccttccatcatatttgattcaaatttatcgtgaaatgagtgaagtggtagatggtaattaataaataaattacgcaaatgaaatactcttcaaccttt

SEQ ID NO: 10092 - DNA, 891 bp, Cannabis sativa
aaggggaaattttgttagaagataggcagctcattcactgtaagctcagaatggtggggtacaaagaggagttctatcttacagcagtctatggaagtaattcgttaaatgagaggaaggaactctagaataagcttgctagtattgggcatctgaatgctccttggatcatccttggatacttcaatgctatgtttgcttacaaagacagaagtggtggcaggaaaattaaaggtcctgaaatcctggattgtcaaaactggcttgcgcagggtcaggttgaagagttgaagtcctcgggtgctttctttacttggtccaataatcatgaagaaggtagtcgtgtgttttcaaagttggatagagttttcactaatgaaaactggttagattgttttctgaacacagaagtaagtttcagatggggagctctttcagatcacagttattgtcttgttaaacatatcaaggttagtaaccgtggtactaatccttcccgtttctacaattactggatgttcaaagaggatttcagagagaatgttgttactgcctggaagaaataccatgttactgatctgaaagctttgcaccagcagctttttaggatcaaacacatcctaaaaaactgctatgttaacaagcgagagaatgtcactagtatgtataacgaagcccgagaaaagtatgttgaagctcaagaagctttggccataaacccgcaatgtcctacagcagctagagcggaaaagttgaatcatgctaaattcctagaagtctgaaaacagtactttagctacctgcaccagaactcgaaagcttgttggataaaacttggagatgaaacacaagctatttccatggtatcatgaaaaagaggagggctgagaa

SEQ ID NO: 10093 - DNA, 696 bp, Cannabis sativa
ttggggagtttatagtacctgaattgtatctattctttccttccacggtaaatgtcgaggtaaaaaccaggcgagagttgatgctgtgtagaaatctccacttggaacttcaagtatcccctcctcaaaataatacgctgttcaaccacgtctgatcctttgaaagttcctgctttagctgctattgtcggagtattcaccaaattcagatagggagtagggagaccagtggcttgcacccaaaacaccgccttggttaagtcaacattgttccataatccatcctccagccattcgtggatgaggaggagtttgccgttaataagccaaggtcttttatccaaaacctccacacaatcatcctcctgatcaaagaaaatgccccaaacacccggtttaagtgtcttgaacttccagttgccttttagcttcttccacacttcacttaggatatcccttagtcgacttttagatacacatttgccttcaaagaagcaggctatgacccctgttctcgttatctcctcgctcagttcaaaatcaggttcgagttcaagggtcatagcctccaaaaattcagaccgaagcgtctcaatctcctcattgccgtctttcgaaggttctccattgctggctccagtagtgtcagctttgtcacattgttcctcattaagggccacaggaggagaggagtta

SEQ ID NO: 10094 - DNA, 660 bp, Cannabis sativa
agcttctctcaaagtgtttatctcaatctttttcatctacagaaaaattcttcatacaacacccaaatccaatctctctttttcctgtaccgctctctcttcgaaatcacctcttcgaaacttgtttgaacttgttatcgcaaaatgataagtgttggtggtatttataggttcaggatatagatcctaaagttgttgattgtaagtgataagttgttaagttagttacgacttaacaaatttaaaaatttctcataataatatttccacatcagcttaagataaagcgcttctagttgagacatacgcttcctggaagacaaaccaaagagcacattgaagggactccccggataggaataacaatagccggagttgactatccacaatttccttccatgaggaaacaactagctatcctgaactttttccggaggaagactagtttttctgaagactccttttgggtggaaccaatagacattcgagaatgccctttcggatgatagttgtcattccacaagactttttctgaatagacaagttagatttctgggaacgcccttctggatgacattttacttcccacaaccaaaataggttttggagatatttcatttagagaaagtataccacatatatagaataaatatatacata

SEQ ID NO: 10095 - DNA, 730 bp, Cannabis sativa
tttcttttggtatacatattagatatatagtattatgttggattatattttataccattataatataatgtaaaatttcgatttatataaaaatattgtatatatgtgcatatacaaattaatacaaaacataatattaaatatgagatataatattgtattataaatggatccgaataatataatataatcattttcctatttagtacttataaaaattataatttttttaatacgatgtttatagtttttttttagtggtaattatagttgatatttcactaatttgtaaaaaaattactggtccaaaataaatttcaaataattcagttacatatatcacttttcttgtaaatatgcttaaattgattattttgacttctgttattagtattgtaaatcatttataatttttttaaaaattagtgatatgttgaatgtaactacaaaatatagatcgtcatcaaaataagaacattgttatgaggcacttatagtatttaacactacgataaaatatcttcttataattgattaataattttctataatatttattaaagtaaaataagtgagacatgatattaaattatattaatagcgatattacacctcacaatgtgctaaacagcatagatgtctttagcataggttggacaaaagtgacatttttccatatgtagttttatatataaaaggagtatcaacttgtattgatcaccacattacc

SEQ ID NO: 10096 - DNA, 686 bp, Cannabis sativa
gccaatttgagtcacatagatacaggtgagtatcttagatttagcagcacaaaatagctagaccttttggaatgttgagattattcaggattatagttttggaaaattttacccctaattggttaggttacttcttagtgaagtaagtgtaaataagtcatttacattttttgtttttagtggaattttggggtgtgtagaaaaataatttctttgtgttactggaggatgataagctgatataaggatttaattagtcatttttatccttactaaaataaaatcaaagaaaaaaaaaaagaaatgccctagtctctttcttttttttttttttaattggccacaagaaaaaccccaacccaaactagtttgttttcacaattttagacctgaattcaagggggtttctagcattgaattcaaaggcttttgctaaccaatattaaggtaagcctctctctcaaattctctttgtttttctagtaaaaagttaagattttcatgcaattgctaggttttttgtttctacacgaatcaggatgagttgagattattttttggagttaattttatgttgtttgagttgttatatgttaattatggttgtagctatgattgaccaagatttggctttcaagctcaaccttggtcctgtaatggtggatttgtattcagtgggttgatga

SEQ ID NO: 10097 - DNA, 745 bp, Cannabis sativa
aaaatgtcgaacaacctgcacttacaaaacctcgtttaaattatcaacagtggccacatcaatactaggtttaagaacccctgagttttcaaactaattatgatttgtgtgagaactcctaagttctctttgatgttctctacatggcttttttgaatcaaaacgaggtttaagacagggggaccccatgtctccccttctttttattctgggtatggagtatctctctcgcatcatgcagaatattggagagagggatgattttatttttcatgagagatgccgagatctgaaattgaatcatttgagttttgcgggtgacgtcttacttttctgcaatggagatttcaagagtatctacctaatgctgcaagggctcaaactcctttcacaaacttcaggtttgttcccaaatccatctaaaatttctttttattgcaataacatgaatgattatgagattcagagagtccttgatgttttgggcttcaagaaacatgatttgccatttaaatacttaggcattcctatatggcctaagagaatcttagcagctgaatgtggcatattagttgaaaaaatggtggcgaggataaggaattggagttcttaaaacctttcttttgctgctagaatggttctaatcaattctgtattgatggccatccactcctattggtgccagatcatggattttccaaagaaagttattcaagaaattgaagctatttgcagaagtttcttg

SEQ ID NO: 10098 - DNA, 501 bp, Cannabis sativa
acaccaaaagactaaagagtttccgaaatagatatagaagtccaatgtggatctacaatcatctggatcagaggcccaagctgcatcacaaaaagcttgaagctaaaaatgagaagctttggagagggtgagaccatggtccattgggtcagcaaggcacctaagaatacgcttggcatcaatccaaagagaagaaagaggatcagtcataaatcggcacatttcgttgacactaaaggcaatgtcaagtcatgtaagagtggcatattgtaaagcactagcaaataattgatatgtacaaatggacatcaggaacagggccgccttcatattgaggccactggaagctaccattcattgaagtgttttgagaattaaccctctacatatgagccttgtgaagaagatcattgatatacttggcttgggagagatgaaggccatctatggtgggagtcacttagattcccatgaagcaatcaacaattccaagatctttta

SEQ ID NO: 10099 - DNA, 782 bp, Cannabis sativa
atcaaactccgtaatttgttgaacaatatagcgtgttcataaatcgagatggcatgtttcatttttagactatgttatgcaatttttttttttaattacggtaggaatgatgatgtgtcacgatattaaatgtctatttaattaattaacatctttcatgtaatttttatacattataggtataataataaaaatttcccaatataatatttattattgttgttcttaattgattgttagaggtagagaataatttttaactatttttaaaatcgtaattatcttttgttatttgtttcttttttatattatttagttgcaacttaaaatttctaattaatttctgtttgatagtaaataacaaattaaacacagttttagtaaaatcaacttatatttactgctatactaaaataaataataataaaaaaaataaaaataattaataaatttattgtgacacacaatacgcatcaattggcaactatcttagcagccggacaagtatctttggagcagtgtattgctcatgtgggtggtatgcacaccacttgaccccctcttttttcagccaaaaagaaaaaaacagtgttgcaccaaaatcataccaaacaattctttttatattctcattcctaagaatctaaactaataagtgcatgccctcctccaagctccgaacccaatcatcctccttgcatattgcattgcttctcttgacaatgaaatcaatatcacaagccaaagtagctattatgataaccttctcaactcaactcaac

SEQ ID NO: 10100 - DNA, 827 bp, Cannabis sativa
aagaggaattatattgggaacagagatcaagatcggctcggatgatggctagtgatagaaatacaaaatactttcgtaacaaagcattggcgaggaagaagaaaaatgccattactgagattataataaaaattggccaaaatatgtgttgagaaagagattattggtcaagtggagcgatattttatagaaattttttaaattactaacctgataaatgagcaaatccagcgtggtacagaagttgttaattcatgtaatgatcgcttcctttaatatgagaattagtaaataactagggtttaattttagaaatagacttttaaattattattttcattattatagagatatatttgaattcttggtgtattaatcatgatacatgtgaaagtttataaatttcatattttatgtctcgtaataatgaaatgcgacatatggcctgtatagtcacttaaatatggtttggtaccttagaaataatagagcaatatagttagatatttggaatgtcacagtttttttggggttatggttttggaccatattagcactaggttatgggtttacttagagaaaaaaaaaggacaaataggtcttctttaccttaatcttgtcttttaggaaagttgatggatttgtattaatccttttcagttttaattgtatatgatgaatatttgaaagaaaaaaaattacctattatctttcaattcacacttagggaaataaataaataaaaaattagacaaatccattatctcttttcctctgtttcctaggggttaaccctcacaaagcaaaaaaaatccttttcaattctg

SEQ ID NO: 10101 - DNA, 504 bp, Cannabis sativa
agataccttgtcagtttctcgacgtaaagtcaacacttgaagggaggttttaatctgatatccccaagttattgtcagtttagcttcaaaatgctaggaaataatcaactaaaactgaaattctaaaaggttattcaaaattagaatattacaagatgtctgcccaattgccggtatggttgaataacaggaagtccgagaggagtagtccactgaactgctttattctctgatgctatcacctgcttatttttgtattaaaatttagttaaataaagaaccctattaaaaaaagaaaaggagaaaaaagaaagataaacaactactaatgagtgcttattctgtaagtgacagcatagattaaagaattctaagaccaattaagttaaatgctccaccaccatcctctcagcaatcacagtaacgcaacagaatcctcatatatagattaactaaagcaaattgtatgtgcgtaaatagggatattgcttagatatcttcata

SEQ ID NO: 10102 - DNA, 510 bp, Cannabis sativa
gaagctgaaggaaggtttaggggatgagacgatcagatccgagatttcggaggggatgagagaaattaaggagaatttaggagaagaggtgagtgagtttacttatggcgcgaatttctcggatagagggaagggattttcgatggcgattctcgcggtatttaggagtgaaagtgaattggaagccggggatgatgcaaagaagtacgagaagttcaatgagtatttggatttggaagctacactcgtaattgaatttgtggtcccgtcccaatagttggccatgtttaacttagtactgtaatgttaagtgaaaatgagagttgagaataattttattatttgaaatgttgttaaattaccttatgatgaactgtatatcaactccattgagcagactcagttgcatgaaatctattgtaatattttctgattaagattttactacttaagttaaatgatcctagtagatgactagggatatattagcatttaagtgttaaagaaagt

SEQ ID NO: 10103 - DNA, 918 bp, Cannabis sativa
ttataaataatgtgaaattacttacttatttttttaaacaatttttatgttaatatataatttaatgaaaacatattaattttttaataattcattggagatgtccttagtttctgaaagtatgtatattaatagattcgcatttaaattgtttaatttttgttgttacttggaacttataccatgataccatcatgttttttttcgttgcatattagaaaatttgtttctaatatagcatttaatacttcaccaaacacagatcctccactaagaataatatgtcaatatacgacttgtaaaaaattaaaatttatacatctagtagagttgaaacttgaaatcacctctgaataagcaagaacataattatctcgctctcttaagatattataaaattgaatttgcagttgtgagagggtgaaataataatgcctatgttattctattctcacgctcgtttagtacgtaagattggattagattggattaaattaggcaaattaatttgtctagtgcagtgtttagacatgctggaagtctaaataattaatccaactaatcccatctatctggaattatttatcacaattagtaaggtggaataaataatctcatacatataagatttttttatcgttttttttttaattttgattttgttaatatatttaaatttaataagaatattaatgaaagatgttatactcgaaattcggaaatactccagaagctgacacgtgtcctacagaaggaatatgaatcaactctaataatataataatgttatatcattaaatgcagaataaataactcgttattattaaataaaattttgatagataacattcaaaaactcgttgactatatagttttaagcgagataaaaataaaaattattaaactgagattgacgag

SEQ ID NO: 10104 - DNA, 586 bp, Cannabis sativa
tggagcattccaaatacagtttaaagggcgtattaatgaatatgggtagaagttagtttgtatatgcgagctgtgcgtggataatagagtttgttactctttatagctggccaattagtttaataacagtcttctttttcatgccttattcactcaatttatataaatacaattccttatttaactcaagctcacttcatctcattactattcttaactggtgatgtttggaaagtaaaattccaattgatagcaatgacgggaataaaaataagaaagaaatgagtttaatcatttatcagcaatagattataatttatgagaccaattagtttattcgtaagccaacaatattgttggggtaaaaatacataattgaaagataaaaattcctaaaaagaggaaataaataataacatttttcttttagttagaaaagtaaaaaacacaccatcaccaaatgggattaacttgattaagattagtaacacgctacaataacactttaaattttttttttattttaaattcaatttttgaggacttaggaagtaggtgagtcaatttccttttattattggaaagg

SEQ ID NO: 10105 - DNA, 585 bp, Cannabis sativa
ctaatatgatttaactttgagattatgtggaattgttctaattcctaaagagttgatatcgtgtttaattattcgaaattatatatataattatgtataaattgagttatttttgttagattttcacattatatgtatttatatatatgcgtctctgtgtgttttgggttatgggtatagaagaatgtttattaacttggctagtgggttgattgtgttgtgagaagttgagtgaattcattttataagaaacaaactctccatttaatttttcttttcatatttctgtttggactaatgatcattattttgaaagggtttaattgtaggtaaagatacctatgtatgtagaattaagtgattggcataaagaaaatttgaatgagagaatttaatttgagttattggaatgaaacccatgtttggtttatagtgattatgtacatacatgtgatcaaattaaaataagaaaatttgtgatcttaatagtgcagagtaggtggaatgtttgacaggaaatgatcatattcaatgtctttcattaaaatctatcactgtaagaaatttaattttttcttatttttt

SEQ ID NO: 10106 - DNA, 541 bp, Cannabis sativa
acgaaaattctcacatatatatagggctttcgagtggttcaattaccacaaatcaaaacgacttgactatctcagtagcctgggcttagcaggaaacgacactatttttgcttctttctttctttctttctttgttcttttgtgtgttaacaacaatggtgaaggacgttgaagtgggaggacagcaagggtactcggccaaggactaccaggacccgccaccagcaccattattcgacgccgaagagcttggtcagtggtccttttacagggctatcattgctgagtttgtggccacgcttttgttcttgtacatcacagttttgacagtcatcggttacaaaagccagactgatccagccaaaagcgccgatgcctgtggtggcgtcggaattttgggtattgcttgggctttcggtggcatgattttcgtgctagtttactgcacagccggaatctctggtcagtactctctaactgtgacattttatttaccttgtatttctagttcattgtgtgttcgataaaatgttccactctg

SEQ ID NO: 10107 - DNA, 957 bp, Cannabis sativa
  modified_base (152)..(162): a, c, t, g, unknown or other
  modified_base (864)..(865): a, c, t, g, unknown or other
tgtaataaaaggataagatctaattatacagtggtattgtttttgtcaaagaaaggggacccgccatcaattgaatttgttcttaattattagttttcattgaagtactttttatatttaaaaataaaatataatatgtatatatatatatnnnnnnnnnnntatatatagcagccagttgagaagtactatattgagtcaaaaaaaccaaagctttttctatagtcactaactttcacattctttattacatgcatacatatgtatatagaatatacattaatttattcacaaaagaacaaaagagagtattctgtcaagtatgattcttctatctaatatattaattggaatattttttataagtgatattttataattcgttaataatattttttaaaagtttttttttaactatatgagatttgatatttaattacactaatcatattataacaacgaaaaaatattaagtggtagcttttaataattttcttttttaaagttaaatatattatgtgtcaacacaaaaaataaaagtgaggtcactaagcatattttgagctatacttaaccaatggtgcaaaatcttccaaatgaaaaatacaaaatgtaagagtgacatcattaaacatatgtcaccactaaaagtaagagtgacgtcactaagcatgatattttgagctgtacttaactaagggcgagtttggcacagctgtgttgtgggaaaaagcagctgtagctgtgctgtgaaaaaaaaacaaccgtaacaaaactgtggacaaaaagttaaattgagtgtttggtaaattataaatttcaaagtactgttgtttgttaagatctattataatgataatgatnntgttataatctagtttcttataatcacaaatatgtaaaaacttattttatataatatgttggattgtcggatttttgtctaatttcatttaa

SEQ ID NO: 10108 - DNA, 802 bp, Cannabis sativa
tttattgtataggggtgaagccacagaaactgtaagtaggacggttgtctcacttaaaatttagcttaatataagtaatttaaaagttatggctaaatcaattttttttggtatttatactctttggtcaaatattattaaatcatattgtttggtgtagtgttaattttttttttttttttttttttttaagtttaaggaggtcacaatctatttttttgtatgaatgttggattaaaccttataattaatgtaaaatgtgatcacactaaaatttatgcttataattgtgtattattttatattttattatagccttattctataatatttattaaaatattttataaacattgttattaagctatatgatgtttagtaccattataaggtgacactctataaataattagtgattttttataatcattattaaaagtaaaataagtgagattcaatattaaatttcacaataacagtatgatatcttataagtcataagggtgctaggtgttaatgagcctaagccatttaagctagcatctagtagttaatgtttgttagctcaatatacttagatttcagttgtacaattagtttttatgttagttacagttcttgattttagctttattgaacttgtatatataaactctgtaactttcttctttaatcaatgagaattattgattttttttttttttttgtctaagagtttttacatggcatttgaacttgattgttcaaggtatgtagaacttgtccgtacccgttaatggatgtctgttgaatccttctttgt

SEQ ID NO: 10109 - DNA, 859 bp, Cannabis sativa
taattagttatttttggaaaaattcgtataaaattacaaaattatagtgtaaataataataaaagtctcaattaattaatgattaataatctcaattaaatcatatatatatttttttaaattttcaaatacttatcttattaatttataaatattttacagtaataataattaataacatttggttaaaaaacaaacactaatgaaaattagtgctaagcaaagattattatattaaggctaattaagatttttattactccctaaactttaatatgtatcaaatcatgtctcttaaacttttagactattaaccttgaactattaaaaatattagatttaaggaatttttttaaaaattttagcaagtaaattgtctaacatggatgaaagttcaggagcttgatttggtacatgttaaagttctaagggcttgatttggtagatatcaaaatctaaggagcatgatttagtacatgaataatcatagagttagtaaaattgaatgaaacaggataaatatccttaaatccaacaattcaataatttagaggaaatttttaacgactaaaagaattcaggaacataatttagtatatgtcaaagttcagaaaacaacaatccttattagccttatattaattacattaatatagtttattgacaaatattgtcttcacattaattatattattacattttagacaaagaacaccactaacataaaataaattaatctttaaagaggacaatttatattaacctgaagaaagtctaaatatccaaccaatatctatgcatatagatggtctaatggaacaattaattataattttatattatagcaactaggtactat

SEQ ID NO: 10110 - DNA, 1511 bp, Cannabis sativa
aaaagacttttaattgttttttttccctacttctcaaatcgcctagtaacttctcattaactgttcccttcaatccaaaagttattagtttcttcacctgaatcatgaatcctctcattgataaaatgaaaggaatgatgacccttgctcaagaagatgaatcaacacttatcttggatgatgttgatgtataaactggtaatttagatattgtgctaattgctagagtgcacattaccaaatttgtcttcctctctcaactacaaaggcaaatgaaagatcattggaatggaaggtgccacacaatgataactaaaaaaccacttaatttgtttgttcttacatttagatgtgaaggagacaaatgaagggtgcttctcagggagacatatcactttcaaagccaccatattatgctatgcacgctaagtgttctgtaaaatatcacatttgaagaatttatcttctctcctttttcggtccaatgctataaacttcattttcttagtaagtcaaaaacattagccaaagctttagaagacatcattggtgaatttctggaagtccatgaagattcgttggaagaaggttggggtcattttttcagtttctggtaaaattggatgtcactaagcaattattaagaggtcgctacatacgacttaagcaaatttgagacaaattatgggtggaatggtgtatggaatgtggaaggcttggacattcatttcaaaaatacttaaaatggatggaaaaaaaatagataatggtattgaacctgaattaccatatgttcctgaattaaaaggggctacgctccccaaatctattatgatagatacagaacatatttttctaaagagaatgcttggcctttactcacgcgcttggctccaaattcattagtgtcagcagttccaagcctctccagcagaacatcaccatatccatggcctcttctgccaagagaatcatcttagaagcaacaaaatgatagaactgaagccattactccaagatccacaccacccttaagtgtaacctctcccttgagtaacaatgctccttctagtgcttctgctcaaagtgtagtagtcacgaacacaaatataattgccactgcaaacacacaatcagcaacaactgtacaatttacacaaacactcttaacaaatatcatcagcaaaaattctggtgcaaaaaattaagcctcgagtcagtcctcttcaacaattgcaacaaataaactagcagtaaagactctggatgtagatgatctatctgacctttacataccatatgttggcacagttgccacttatcctccaattccatcaacgatatacactcctcatgatgaatctggtttcaagcctctgcaaatgtccgccattgcagcaaaagatgctgtcatgtgttcatcaatgaagcagtcgacaaataaggaaaatgcatccccaaatcaaatcataaagagacaatctggcacctgttgttggaaattattttac

SEQ ID NO: 10111 - DNA, 621 bp, Cannabis sativa
aaattaaattttatatattttaaacaaatcaatttttggtcataacaaggcccactcttgtcatagcaagcaattttatatattgtaggttattattcatttacatgagcattgttattggacaccaatagtggctaacattttttataagtgttgtcccacaattaattatcaataattttaaaaattacatgagatataatacttaattacaccaaaaattatatgacacgaagaaaggtactaaatacttgtaatatcttttagcaattctcataatatataaggaggaaattgaattattcatagcttaatttttttttgaaactgaaaatttttattaaaaggcatcaagccgaaagatcgagatgcaaaagataggcaatttaaacagttaaatcagcaggcaagcccgaccaccacatttgggcctcatctaaatctaatgctcgttttactaaagaatgaacaacatgattttttgaccgattaatgcaacagagatatgctactgaaaaaattcttaatatgattaattattcatagtttaattatgagtacgaattaattaagtagtgtttcacttaattaattaacctaataataatgtcttttactgca

SEQ ID NO: 10112 - DNA, 1593 bp, Cannabis sativa
gcaaagggtttatcatatattatatttgtgttgtcatagttggtaggttttataatttttttatagtatgtgatttctactatttttctaaaaatttacactaaatatttttttaaaaaaaatttatatttatactttctctacttaattttttttttactatttttacttattaaaatttcaatttttttttatcttctttataattttttagtcagttttgaccgactctgtttttaagtcagttgattatttttctttcttttctctttattgtttttattttttttttaattctttctctctcttttttctcaaactaattttttttttgtctttgtatgtataataagtgtacaattttatatctcatttttataacactccttctctctcttacaaaaaaaattaaaaacactcctcttatatttttttatcttttatatgattaataaaagtagtatattttatttttgaattttttgtagtttattcagagttaatttatgaatgatttgtatattttgacaaaataaatgtcttgttattattctgttgatttatagttatatttttcttattttctaattatttttatgttgttatttatgtgttctatagttgttttttcttttgtttttatgtgctttttatgtacggtaattacttagtttatatatatatatatttgttatcgtgtatatttttcagtttattctagacaatatttttattgcaaatatgtgtatttgttttgttatttttatattatttttcagtttttagttattttttaactatcaaataggaaaaaaaataaaagaataaaattgtaacaataaattccattaaaagataatgtaataatactaaaagataaattaagtaaaaaaaaatcgtaatataaaaatataatgaggagttgatattattttggttattgcaattagttcaatgttttgttttgttgctttgtagttatatttttattattttatagttatttgttaagttattctagggtaatttttaatggtttttgagttatttttttttttattttactgaaacacagtacttttataattttgaaaccttaaacacagtatttttgtaaatttttccctattttatagtgtttttattagtttcccaaaatttaacttttagaatttatgtttgagtaatttgcagaataaatacttatgtttaacttcctattacagataaatacctaagtttaatttttaacggtaagaatactttagttatatatctggaacattcataggtacctggtctttaagtgtcaagtcaatgaccacatggcagtccttgattggttcaaatcattaaatttttattttttatttaaaaattattttaaatatactaataaaaaaatgacacgtgaataataatttgacactaaataatcaggtacctatagaagttctaaaaatataacttaagtattgttatacccatatttcgagcaacaatatagtgttgacatgtgcaatgaagctaaaatatgaactagctcgaattatccagtaataaatacactcagacaactcgcctcaggaagta

SEQ ID NO: 10113 - DNA, 849 bp, Cannabis sativa
ttaatgcatatatagtatataatataggataagtccacattgcacttttttaaaatgatagtttagtaaaaaaaaattttgttaggaaaactttttaattttttttttttataactgtttatgttataattatttaagattatttgtaaaattttaaaaaatttcaagcaatttataatatcgtaaataaaatttacatatcttgttgcacacgtgactgttttttttaactgtttaaacttttttttttcaacaaaactattcggattgcataaaaaaattaaactatttttttttggtgctgaaatagataaaaagtctattagaacgactcttactctctaaaattgaccaccgttagccaataaattaaacaccttatagcattttcaagacctgaatgacctgagatgataaaggggttatcattatcaggtaactaaggctcccccgacacattgatatttcttccatccccaatactccaacgtacccttttaccgttttacgcaccactttttgagctttcaagacactccgccatactaaatttgggttattacccaattgagcggtaaggtaattatctttagcaaaatatcttgcacgaaaaatcttatataccaaagagtgtccgagtgaacaactgccagccttgcttgtctaaaagggcgagattaaaatctcttaagttacgaaagtccatatttcccacacttttgtgatgagtcatcttatcccaagatagccaatgaatcctgaactcttttctttcgatgtttttcactaaaacttggtcatatgttgctccatatctcggcttaagttaaggggaagtagaaaaacgct

SEQ ID NO: 10114 - DNA, 543 bp, Cannabis sativa
gtacgtattttaagataagatgaccatttttttttccagaggatgatgaccaatttacatacaatatacaaatagatatataaccgggccgcacagactcacatcgaagggagatgtggcaatcgctctttttgaacaaaaaaaaaataagaaaaaaatttatatacattttaattagttacaatatataaaatattagtgatatttgtgaatataataataaatgttttagtataataatagaattatttttgttttttttttttttaatatttactagtattagtatcttaattgttgaaagtagtattttgcttgtaaaatatatttaatagtatatacataaatttgtattaatttttagtatgttatattatgaaagaaaaaagtatgctttcttcctttaaaaaaaaaaatgtacactcctcaaattttggatttgccaaattactcctccacttaaattttggttattgatgatattgtatattgttgttggagaataaatcaagaccaaccccaaagtttttttttttttttttt

SEQ ID NO: 10115 - DNA, 559 bp, Cannabis sativa
tcaagtatcctttgatcacttacagtaatgggggttttaagacacattaagtacaatagtaaattattgtgaagaatgtataagaataaatttaaagaataataatcccttctttcgacatctacacaaacaaactaattaagctaagaagatattccattggtagactttgacatcaaattttgaatcttgttgtagtaaacgtttgagttctgctgcattctcagcatcctttgcaagtaacaaggcaaagcctccaccaccagcaccgaccagcttatagccacagcaatatggatgagcgaattcaaagagtctatcaacaaattcattactgcagtaaggatcaagttcctgatgcaacctccaagcctctagcattatctccccaaggtcatctaaatcacagttcatcagagcttcccttccaatctttgcaagttcaacaaggcgcttaatgctagataccagaaggttatctcggcgaaggtaccggattactaccttttgaaggacttgatgtgcaaggcgaacctgtgaagttcacacattagaaatt

SEQ ID NO: 10116 - DNA, 531 bp, Cannabis sativa
gcccaccgcccacatggccaaagtagagctcgacgaaagcgaaatcccttgccccaccgctcgtccacgctcaccgccaccaccagaagagctcggccgagtcacaaccctcgacatcggcctcggacctggccccacacttaccgccttctcacacctacaactcatcaacaacccattacccgaagacctcctcctattcttctccaccgccgccacatgtggcggctgccccgacgacgtcgcaaccaaatattccccaaaatcagcctcggaagcattagccacgctcgctctatcaaacccctcggcggtagtcacactccaatcaatgctagcttcactaggctcgtaaccataatcagccgccgtcacacccgaaatcggatgatacaaagcagcggagatcggagggaaccgccgcattgcggccgcttcttcgagagaatctcgtcgttggcggttgaaaaggaacatagaagggtgagccgctgtggtggttgtgggttcagttgtggtcgtttgctgagt

SEQ ID NO: 10117 - DNA, 607 bp, Cannabis sativa
gtgatcttagcacttttctatgtttttgttttatattcataataattaattcagttcattatgtaaaaaaaaaaaagatcgtcacaagtattgtgtagaattataaggggtgatgaaaagtaatcaatattctggaaaattgatcaacatggaattttattttatgccttgcttgtcaattattggtgtcaaaacattctgactgatagatttggtttgttgaatggcacttattgtgaaattattttacatgtagttctcttattaccaaagcaaagtgcgatgtatgttgagtttcctccttgttttgttttttgtcatattgatgcttgttattgcttcaaacttttatctacatactttaatcatttatctgatttaaacggtacacgttgcaggtagctccaacgaaatatcggggttcacttggcagtatatgtcaagttggaacgtgctttggtattatttcatcactatttctgggccttccctctgaaaatgatccacattggtgaggttctttcctttgtttttgtggttatctggattggacaatggatgatgagttgacattaaggattatttttcttttctccatttataattt

SEQ ID NO: 10118 - DNA, 1131 bp, Cannabis sativa
ataaattttgtattctttaccatactatgacacatctatttatattctcttatcattttttaaattttaatacatgtatacatataattcattttttagatgacttttaactttaattcagtttattttgatgttattaatatttttttctctattttgttcagggtataaggatatgttggataatgtttgtcaaaattcaagtttttcattttctttatataacaatatatgttcgactttattttttcctcacaaaagttttggtacccaactccccagtattatatgaatgccacaatatatccattataagaagtctaaaaaactgcagaagtcaaaaaagcatatagatatattattgtgttttcttttggttttttgttttgtttttttttttatgtaatctcataattaaaattttttagaaacgaaaagaattgtattacatattatttatttgataatttataagatttttttctatcttatcttcaataataacgttaaatatttaaatcacaatatttatcttttacaactatcgtacattattttttttttctttatttgtcattattatttttttttttgtaggacccgtttgtgtaactctaatataacatttattactataaaattaaataacaaaagattattatagaggaaaacaattaataaaaatttcactataaattaaaattcaatagtttaaaaaataatagaaataattttatatttacatttttatatatatatattttaaaaaatatgtgttatttgtttgatttaaaagtaacttataaatttcacttaatttgtttatatatattaatcaatatatataaaataaaataaaaatgagactaaatgtatattacatagttttatttaatattacaatatatactaaataaaattatttcatgtttatgcttatttgttatactatatgaaaactaattagtttctacaataaacttaatagataactaaaaatataactttaaaataactaattattagtaatttaattatttaccaattttactaataagtaatgtgagtttttttttttaactttattgtaattattagcttattaaatagatttaaaagtaacataaatat

SEQ ID NO: 10119 - DNA, 605 bp, Cannabis sativa
atggtcagaagaacgaccagttgaacatactcaacgaaccccagttaacggaccgtccaatccaagaccacaggatcaaattgtgggccaaatagtagacgggaaatttttttcaagttgttacttggaagggaatgatcaacttagcacccatcctcaaagagaggtatcagttcagcccataattcacaacggtcaagcacaaaggcctccagacacatcagtgtttgaccaattgggtaccgtgcacggcctcaaaaatgacctaaatcgcataagagaattggacgagcaggatattcctcttactgtacagccagacaacacaaattactttgttcccgatctagttctatgaaatccttatgtgacacaggcaggtcaagttgatccattaatacaagcacaaatagatcaacttaagagcctccttcaaagcttgatcggcctaaaacatacaaatttagaacatgatcggcccatagttctatgcactgtatgtcaatgcaatatgcacacacaatactcagtagtggagcatacatacacttgtgtcaatgtgaaattactcccataattccctcgtaattgaaaactacctaaca

SEQ ID NO: 10120 - DNA, 534 bp, Cannabis sativa
attcgaaataaaataatgtacctattttatttctatatatgatatatgcagtgtaaacaaattcatgcacgcatcttcatgtttcgtaatctaattaattatataacaaaacaaataccaaaatttcaagtagttccaaaactgcatgcttcgttcatagttacgacggcgaccccaggcggtttttgaacttgtgttaaattaaattaaattattttagtgaaattttgattcaaattattaattattaatgtgtggtacttcattatacataatctaatgagattaatatattggattacattcaaattattatttatttattattttaatttaatcacactaaaatttgtgattaaaataaaaaaaaaaaattgtgaaaaaaagaaataatttctatgttatcactacaaggtccgtgattaaagatatttatcacaaaaatcacaatttattgtgactaaatgtgtttttaattacaatatttattgtagctagaattaaattagcgagaactgttggaaattattttac

SEQ ID NO: 10121 - DNA, 703 bp, Cannabis sativa
gttgtacgaaagtcatccattagactttccctcctcaaaggacccattctttatcttcattggataatatttcattaaagtcaccaaaaatcagtcatggttcagaggtggtggatgatgctaagttttaagcaaattccatgtatgaattcttaaatgagcttcaggttcaccatagattgcagtaaagtagaaatggtgattgttatcatacaagacaaaaacatcaaaatggttcattgaataggtgtttaaatttatattaacattatctatccataaaaacaataatcttcatttcatgcccaatctaggaacttcaagaccattactaaacttaagggaaaaacgaatacgagtgacataattacattgtaatttagattccatcataaacagtaaatgtggacgctgctaattaaccaggagcttgagatgtctgaatgcagaagggttacccaaatgatcttcatggctaggtgcggggctgcttcaaagcaacctccgctgaaaaggatgaagtctcctcaatagcatctgtctgtgtactagaaacagagggctgaaatcattgttggacatgctaccttggttgatatttctacatctttttaggacactttgaaaattattaggatcgatctgcctcttaaaagtcatagccaaagactcaaaatgatgactgttatcttcactaagaata

SEQ ID NO: 10122 - DNA, 748 bp, Cannabis sativa
ctttaccttatttgccttcttcaccgcccttggcacgaaatcagctgggtagagtttatacttaacgaaattggcctcagtggcgaggagagtgatgtgtcgtgcagtgtctggcagttgaagaattttttgtgccctcctcttgagccctaatgtgaatggagagcggtagtaacatggcacatgctggaagctggtgtgacaatgtccattccttggaaaaagtaatactcatccacaaagttccttattttactcaccttggtattcatggagcctgtcagccacttctcctcaaactgagaaaaatagaagtatcccaatctgttttgcttgggacttgacttcagattaaagagccagttggtgtcatgtggggacggctcaccccattcttaagaggcataaatgatgaacaaggctgataagaatttgatgctcttaggagtaaactgggtcgggctaaggtggtaatagtctgcgatccttctgaagtacggaagcaagggtaacatagcaccttgcttagtgtggacgtccgacttggcgtagtaaacttctcttggactagttcccaactggttgggggagggatggaagcattcgacatcccctaagtaaccatgcttgagcaaattcttcatctttgccctggtcaccacagagagaggagaaacccatcgatctcttagtgcgccttgcctcctcaaataaatggcctcagtgtattcctcagtgatataatctt

SEQ ID NO: 10123 - DNA, 705 bp, Cannabis sativa
gaaaggagatgattctgaatctgattgtgaggatcgggactcgtgtgctaggaatgtcctaaagactgaactccctacaaaatttaaaatgccagaaatgacacaatacatgggggacatggaccctagtgaccatttgtcacaattcaatatagttatgacggtgttaagagtgagtgatgatgcaaagtgtttgtgcttcccattgaccttgggaggatccgtagaagaatcgttcaaaaagttagaactaggttccgtgagctactggagtaagctacaaactaactttcagaggcaatttgtgactttcagaaaaataaaccacgaagtcagtgctctgactaatatcaagaagtttcccagagaaactttgaaaacctttataaagagattcaaagaaaaagtatctaaaactaggaaagttaatgatgaacaaaagattgctacaagcaggcattagagtgggaacccttttttggaacgagcttcaataagaaggtgcagcaaacctggaagatttccaaaagtgagcccagaaaaacatcaatatggaagaagcacaaatcatagcatttggtggatattacatgaccggagggctgaataacacttacggagtacagtacccgtgaggagtacctactggatctttaacaccacccagagtggtgcctgctccaagtgtgcaattccaagtccact

SEQ ID NO: 10124 - DNA, 725 bp, Cannabis sativa
aaataatcccatctgcaaaaccacgataactaaataaattagactgttttaaaaaatttacaatgtctaacactaagaactgctttttcctgaagggtagctaagagtaaattatcatcaatacggatgatttgatgaactcacatgagatagatatagtacttttcaatgtgtgtgaatgcatcactttgttttgtttcatattgacatgatccacatgaatgagtgaatggtggtatgtgtatatatgtatgaatgtatattatatataaatattatgggggcattcaggtaatataactagccgctacaatgtattagaaataaggttgggtatcccatccaatctattttttttttcataatttgatttgatctaattagtaattaaatttagaaaattattatccgatcaaatttaattagactccaaaattcaatccaatccaattcaattacgattggatcggttatttaattgaatatctaattatacaactaatttttaatattaactttaaaatatgaaaaaaaaatctaaaaactaaatatcaccattttaatactccataaaaatgtaatcttacaaaacaatcaattaaaccaaaataataaaatagaacaaaatattattgaaaacaaatattacataaaacaataagtgttacaatttcaccagaaaaaactatcaatcactaaaaatatatattttaatatttttatta

SEQ ID NO: 10125 - DNA, 890 bp, Cannabis sativa
ttcttattgtaagctgcttggtttatctatttttagtgattatgctcgatgaaaattattgcatataatgaagtttgtttgatttaccaattaatagaaatttatcttaaaaaaaagagaaaaaaaaattataaaagtgagagaattaagaagagaagaaaaaataattagagcaattttagagtgctatctcacttaatataatttccttatataagaagttattatactaagtttttacttttagctttttttttataaactcaaacataaaacaataacacaaaatatattgtcattgttattaaatatataagaataagaatgtaaacatacatataataacaaagaagaaaaaactaaaagggttcttgaaattatttcagttagatgagtgtatatatatataaatatatatttagtgtatcataattttgaaataatttaagaactttaacaaaataatatttaccgtgggcaaggactcgtgctgataacatattataaaataaaatataatatataacgaaataggagacgagagaagacaaagagaaagtgttttattttaatggagtgatctcctatttatataaatatgtgagtcatagattaagaaactaaggagaggaatattaatgacaataataaaaaaaattggtgaattgaacatctatatatataatatttcataacaataatcaaattttattcttaattttttagatataatttctctttgaatatattatgggtaatttagttgaatatattgttagggtttatcttcttattgtaagctgcttggtttatctatttttagtgattatgctcgatgaaaattattgcatataatgaagtttgtttgatttaccaattaatagaaattt

SEQ ID NO: 10126 - DNA, 734 bp, Cannabis sativa
ttatgaagacccctactaacatgccctcttttaagccccaattttaaaattggctcattttttattataaggctattatgaatagtttaagctcttttatcttgagttttgtcaagcaatctgctaataaagtggtgcacatgtgcaatcttttcattttgaggtagactgtagtttttgtttaaatactcttcttggttttggatgatatttcttaataaaatgctgattttattcaaaaacaaaatcataaatatataaaaaatgctatttttttttctatgttataattacatttacaatatttgataagtgaattttttaatgcaatagtttattgctcttcgtttgattttatttttaattcaaaggttccattttaaaattttgtcaaagatgtctcaaactcgattaaattttataaaaataataatttattattttttttttaagatattagtattattatagttagtaaatatatgagaaatgttgaagagtactatatagtagtgtttaatactcttttatatattaatatcgttattagtctaactatatatcaggtctcatataatttaatgtaataacttttaaagagtatcactagctaatcgtaaagtgacacgtttaaaaaatgttagacaccattaatatttaatagcaatgctctagatatatatttattgatggtatagaagtggtgtttattttccaatactacattttggtgc

SEQ ID NO: 10127 - DNA, 1135 bp, Cannabis sativa
cagatttcagagagtaatgggtttgggtttttgggttttgctctgaatttcggattttggtcttctctctgttctttctttctctctctcttcctcgttcgaccgtcttctctttttttttttttttctaaaaacaccaaaaaacaaaatatttttggaaatggcttctttttaactcattgggcctgggcctgggcctgggctgggcctacccttatttgtgggataattatatagtagggctttttacaaaaatactgaattttgggcaaaagtttacaattttactgttatgtgaaattttttacaaaaatactattttttataaacaaccgtaaaataataaaatagaacaattaaaacaaaaatgaaagaatttaaaaataactgtggaacaataataaaaacttctttttggaaatggcatcttttttaacccgatgagcctcggcctgagcctaggctaccctttctaggaaactagactattattttcattttttttttcgaaaaatgtatactcgaaaaatttacacaatacatttgaaaatggaattttctattgtttttacgaattatttttatttatatttttacgatttgtgttattttaatattgtttttatgctattgcaatgttatattatattttcgcaatgtgtaaataacggtttttttaaaacaatgtataaacaatagtttgtaagaaaaataatctgtaaaaatttgagaaaaataaaatctcataaaaacataaatttttagttgtttttggatggttgtgaaataatcacatataagtaaaaataaatttgaattatactaagtgtttactagaaaatatagacatgatgacatggacagcacttctaacacgtgtagtgacgagaaagacaccttggagccctaaaatctcgagtaggggtggtaatacccgtgcataggcctagtgcccatgtcaacacctggatctagggcagaacatttgcacctgaaaatctacccattcgacaaactcgtccccgacctgaatctgaaaagattggatttaaaaaattagtgggcaagtttaagcagattttttaaagtagaaaatattgtcgaaattatgtgtattgctataaaaatgtaaaaa

SEQ ID NO: 10128 - DNA, 978 bp, Cannabis sativa
actctgaatccaaaccccaaccccgacgccggatcgaacccaaaccaggcttcggtcttggcctcggacccaaactcgaacccgacttatataaaatcaataaataaaaataaaatgaaatttatagaacacacttttgtttattgttttgaaaattcaaaaataaaaacgattgtagaatacatttttgtttttcaaaaataaaaatttaaaaataaagtgttaccaaaaactacctaaaaaagtattttcaaacgcaatatttgtttttctttgatgtgtagattgaaggaataaaaaaagcacaagagatgcatggtaattcatgaccattagtacaagataagaatgtctttcataatatatttgggatcccatatattttttatgctttaaataaaatgatatcgtgttgatttagatgtgcataaattgttaaactatagtcttagattatgtccttgatcatgttttgttaataattggtatcaagagcctaaaatcatccaattttaagattcaaatttatttatttattcaattattattagtttccccattttttctatagtcatagttagcttaactcataatcaaatttgatgttttttgattattttggatggagtatgaactactacatgtgtatttgagatactctaaggaactttttcaagatttattcgaggactatgaagcatgatctgggtaaaaattggttcttgaacactacctctattgctaaatatttgttttgatctattacaagattaaggatgtttttgggggaaatgaaaagatcttgaaaaattgagaaaacctcccaaaacggcgtcaaagacatatcactagagggccatttttgactgggttggagtcatgggtctaagctgggtcgagacgatccggttcagttttctaaggttggggatgactggaaaaaatgttatgtcatttttcttttatgaggaaaacgac

SEQ ID NO: 10129 - DNA, 726 bp, Cannabis sativa
tttgtatgatgaattcgaagtttaagagtttttcgaagttaccatgaaacgacaaagcagacgagtgccattttccaattggagttgagaggttgtgtgctccttttgcaacaaatacagcccgttgaaccgtttatgatcacttgagctatcatgagtgctgcggctgcagttaaaccgagagccattgctggacttcggggatatgcacattgagtattcgagatgaactgaacttgagagccctgttatgattcaatgaaggaaaaacaaaaaggccttttacacatcgccccgtgttgaaaacagattttagtacatacagagtaattttgtgattctaaccccgaaaaggcgatattaacacgaacacttttaccaaacacagataacataataacatacattaaagattacttcaagacagaactctgagaagtctaatgggaagagcgagattcgagtgttgtgagagacaaagagtgtgtgagagttggttttaagagtaagttgttaggaactaacttaacacttgtatctgagttggaataatcgggtttcaaagggcgctaagagaacattaaggtttctaggaaaggggattttgattcttagtgcattgtgttttagttgcaaatcagatcacatttaaaccaattcatctaaaactaatcataggaggctctaattgttggcacatggattactaaagagtcaagaacttag

SEQ ID NO: 10130 - DNA, 686 bp, Cannabis sativa
gtaaaataatttccaacagttccgcccctgcttgcacgagtatgttgttgtctactctagcagcagttttctatcatctctggcgtgttcagaatgatgctttatgggaacaaaaattgtggcaagttaaacacacagtccaagtgatccaaaatgatggtaaaattagattagctagatcagtgttaccttgtaagagttctatgggggattgttatccgtgtttttggaagatagacacgtggcataatgggaaggtaatcaccatctaaaactgggctgaagccttcccacttacagaagcccaaaccaaacttggagtgggcccaagcccaataaagactaagagcttcaccttcgagacatagcgttcttccaagacctaaaagcccgcctagtctttcgagacacagaaggaatgaagacctttgaatgaaaaaaagggctccataggaggcagaccaaacgggatgctcctggacgcctaccacaagatgactctcggaagcctaccacagactaggagccggatgtctaacatagggggagtaacagaattctaccgcgagacaagaagcgaatgtatcctctaaaatgacgtgtccatctctctgacacaagatcagatactgtcccctatgtcaaatcacggtagtgcacgcaccaccatacactccttttgtccg

SEQ ID NO: 10131 - DNA, 604 bp, Cannabis sativa
acagcagatacgatgaaaattgcacgggacctgagcaaaaccaaaaccagatcaaacaaccgccaaacgccttcattgctactcctgaaatagtcgacagcgatgcttggttcgcagacagtggtgcaagcaaccatattacctcaaattcatcagccatgaacacaaaacaggagtatgttggtaaggaatttgttgctgtaggtaatggaaacaaacttaaaatagcacatgttggcagtggcatgcttaaaaccaattgtggtaaaactttatgtctcaaagaagtcttacatgttcctgatattgcaaaaaatttgattagtgtgtcaaagcttactgctgataacccgatactaattgagttctatcctaatgtttgtttgattaaggacaaggcaacaaggagggtgctgctccaaggagttcttaaagatggcctctaccaactcactcagcccaaaatatctcagtccgagtctagtttttcctttcaatcaagagttctcaaaccagccatgtttactggtattgctgttactcagagtccttgtgtaaatcagtctagaactgatcctctttctatttccaaaagtgatgtttg

SEQ ID NO: 10132 - DNA, 729 bp, Cannabis sativa
ggcctgagatagggaaaataggtgcaaccaaacaccttgaggaatccataatctggctatttatgaaacacgcattggtagggtgacatgttgtcaagaacaagagttggtagcccgttaatgacaaatgtagcatgttgaaaggcaaaccaccaataggagagatctaaaccagcctgtgcaagtaaggacattcctgtttcattgatatgtctatgcttgcgttcaactctgccattttgctcataatcatgaggacatgagtgttgaaattgaacaccgttagctgctagaaatgaggaaaaacttctgtattctcctccccaatcagattgaacctttttaatgggaagggagaattgtttttcaactagcactttgaactgtaggaaggtaagatatgcttaggatttcaaggtgagtggaaaaatccaagtgaacttactgaaatcatctagaaagtgaatatagtacctataaccttccttggatgggacatataaagggccctaaagatcagtgtgaatcaattctaagcgaaaggatgctctactagatgacacaagatagaataacttgtgacttttgcctatcttgcaggcatcacagaacttaagttctttgagggtgcctgtgtgattaacattaaacaatattttagcaagtgtattggggccaggatggcccaactttgaatgccaaatttttataacctgagtagtgttaaca

SEQ ID NO: 10133 - DNA, 743 bp, Cannabis sativa
catcatcttttggagctcatcacatgttttaagaggcaaaagaaagacactcattgcataggttggaagcgattgaaccactgtctttaaaagaatttccttccccgcacgagacaacaacttgccatcccaactattaatacgattcttaactttttcctttaaaaagcccaagatagacgatttattgcgaccgattatattgggcagccccaaatatttgctttcctcactagcctccaccatcccaagagtaccgcaaatttgctcacgaacactaacattagtattaggactgaaaaagattgaagacttactggtattaactttctaaccagaaacttcttcaaagacaaccaataaatgacgaacatgagcaactgcatcttgtgttgcttgacaaaaaaaaaataactatcatcggcgaaaaacatgtgagagacaacatgtgcacccctagccacccgaatgccttggagaaggttgttcctcacaaactgaccgattaaattagatagcccttccgcacacaaaataaaaagagaaggggataacggatccccttgtcgcaggccacgggtaggagttataggtcccataacatgatcaccatgaacaaccgaatattgaaccgaagatacacaatgaaggatcatctcaacccacctattatcgaagcccattctgatcataatagctctcaaataggaccactcgactcgatcgtacgctttactcatgtc

SEQ ID NO: 10134 - DNA, 613 bp, Cannabis sativa
atttttatgtataattaatattaactagatatattgttaaaaaaatattaaatagatataataaaaaataattttattttaattttgtaaaataatatataagatttatgtactcaactaaacagtgtaattcaattaacgggtatataattatatattattctacacagccaataaataaaatttatacatttttctacgattatattttctttcataatatttcctataattaaattattttgaacacttctttatttctaataaatacgcttagtcacattgaaaaatgacacacttcaagcaaataaaatttgctgacaattgggaaggtaaccctcgtttttgtagtgttttatcttaatgaatttttgacatttagagtttaactatatgcaattgtacatatttaaatattctaattaattatactgttgtaatacttattttcatttgaagtgcgcaccataataaagatgccctaagattttgtattgaaatgttcttagtctaaattaggatttgattgttaattttgcaacttataaaccgaagtgtcatgagatttataaattcttaatatacatatttccaaaaagtaactttatatata

SEQ ID NO: 10135 - DNA, 1092 bp, Cannabis sativa
gttgcatattcaatctgattatataagctttgtgtgaatatttgggtagtctagggcttagaaatttttaaggttacgcgattcgcagactttgagtttagtttttgctctattttttttccaggaaatagggcatttttttctttgaagtcatgtcccaatttaacctagatttcacactccttgaatcctcagaatccgaatgtcctttatttccaaccttagtttataaacctcagacccagaaatcctaaaccttacttcagattaatgatgcaaaaatcaaaagccatattatcaggtctagccaagaagaaacttcgaaccattttaggagattttattggaacttattttactatgatctagatttactaacatgtatatttgattataatctataatctaacaacctaaacatgaatttactctcacaaacaaatgatttggatggaccttatcatattactaggtttatcacagatgaaaaaaattataaaattactaattacaaattatttgtttgatctattaacaattggactatgattaaaattagatcattagatctataaacaagttaatcatagtaatttaaatcaaataaatagtagatttgttaaagaaaaagttttgaataacaattaaataaacaaacaaacaatgtaacaagatctggaaagttcattaagatatttctattttaaaataaaatatttaaaaaatatcttaatttgaattcaaattcagttgtttagaaaatatttgaaaaaaatattaaatttaacaaattcttaaaatatctcaaattaaaatttaaattcaaatatccaacttattttcaaaaaaaaaagtttatttaaataatttaaatatattaaataactaataagataatataatataatatcttaatatgaaatttagatatttctaatattatatttcaaatattatgatttaataaattaaatttaacaaaataaataaattttgaaaaaataagatatttatggttgggatattatcattttatttaaaataaataaaataaaatactcttaaattcaaaaaatttagaaatttttacat

SEQ ID NO: 10136 - DNA, 756 bp, Cannabis sativa
tcatatacagattttcatggtcttctttctctacgtcgttacttgcatcgttgataaatttgctgcttgtattgttcctgtaagctcaacatctctttctctctattccaaactttagatccataaatgtatttcattgaaaacaactcaaggcattctgatttttttttaaagactccggcgttgcaagggtctccaatggcgattaagggctgaactcgtacagaacaaaatcggtgagttctattggcaacattacttgttttactaatatttatatgctattattagggtttgaagtaacttttcaattgcattaattttaatgttctcaagatttatcgaacaatattttactttttccatttctctgattatattttatcaaatattgtgtttttacaatttcgaatgtatgtaatcgattagggttatatgctcatgatttttttttttttttgaaaagaagtaactgtttgatagcaattaacttgggttttattgttttctattttgttctaaaacatagctgttgtttttgtttatagtagtgaaaatggttgctattgactagagtaggttttagtactgtattacatgcaaatatgtgggttacaatcatattttttatttttattaattatatttaaataattattaaaataatatatttaaattcagacaataaaagtatgagataagttcgcttgaaggtaaagtcattaatcatcttataaattttttcgttattatcta

SEQ ID NO: 10137 - DNA, 654 bp, Cannabis sativa
tttttttttttttttttctaataccctgtattgcttcatgtaacattccactgatgatggtatgtggtttctctcttactcaaactacgtacatatatcatattaaaagtaaaatttaaatattttatggatttttatattatttttgcaaaagtatttttatttcaaaaaaaattattttatggatttttttttttttaagaaaatgttttgaaagtatgagcttaaggagctaattgattacccatctagttaatttaaatgttaagtaaagaataatataattttcctaatttttaacctcttttttttttcttttttttttttttttacataaaacaactttttatgagaaaaaactataattttcacaaaactaaaaattctcttataaaaaaaataagttatctaataaataccattttggacaaccactaaaaaaaagggctagaaaacctttcttggcgagcttgtttgtggcccatcgagattagacacaatctcgatgatcaaaagttgttgaaataaatcacaaaaaagaatcagaatttgacttatctcgacgagactcaaaaagatcgtcgagataagttgagcaatttcggtgtactttttttttaatctcggggtcattgaccgccaagaaaagttcat

SEQ ID NO: 10138 - DNA, 539 bp, Cannabis sativa
atgtgatatgggagcaagcattaacttaatgcccttgtctgtttttaaaagactaagattggaagaagctaatcctgcagtaatgacattgcaactgacagatcattctttaactcatcctttgggtataattgaagatattttggtgaaggttggtaagtttatcttctctgctgatttcttaatacttgacatggaggaagatgataatatttctattattttaggaagaccattcttggctacgggaagagctctaattgatgtacaaaaggggaaattaaaattgcgggttcaagattaagagatgagtttagaccggggtccgaatttgtgagtaaaaatgtaaatataatatgttagataaaaaaatatttttaaaaatagacaataatattttgatattttctgtgaaccaagtgaaaggaaattttggataagatcttatctaaagatgatcctccactctacagataaaccaaagttgcatgagtacgtttcttacctagcgacacttgacatggccaacttcaatgttt

SEQ ID NO: 10139 - DNA, 560 bp, Cannabis sativa
gctttatccttgctcccttttcttgtatcattagctttttgttcttgcatttcagcctttttctgagctcgtactaaagctcgtctagcacggggacgcatttcccttactgtccgaggaggcatgacatatggttcaatgggtctatctccaaatggatgttcgcttcctgtaaatattctgagctttctatctctatcctgcaattacagaagcatctgatgtatgataaaccagagaaaaacatgaccaattatagccaaaaagaaataaaaaatacaaaggctgaatccacaagggaaaaaaaaggttttaaggaaacatagatttttcatcctcaaaacgtacatcacgtaatttgttccttggaagcatacgaagcacagctttccgaatgacttctgtcgggtctttggccatttggtctttcaaacttctttccttgaggtgtcccacatacctacaagtcgaacatggtaaatcatcaagaaaaaaccaaacaatcggcttatttacagatatcacacaaatgcatgaatgaatttatagcctatcttgct

SEQ ID NO: 10140 - DNA, 547 bp, Cannabis sativa
aattagacaaaaagcaagaaacaaattgaaccaaagaggataataacacctccatgaatgcaccaccatgaacaccactatcacaaaaatgattggaatataacttaagtgtaaaagtctacactagatcaagtttgcgtttgggtctggctccgattctatagtccaagattagatttgggtttggttccgagttgcattcgggtcaaggatccaggatctaaagtggggattgagtttgagttggattggaatcaagtcgaggtgaggagtattactctaaaatagattttaaaaaattatgtttggctctcttttttaaataaaaaataatgtaaacacaccttaataaattattaaatttaatttttaacgataataataattatgttatattttaaaaatttttgtaggtacttagctatgtcaagttaaattctacatcttattttttttaattagtatatttaaataaatttttaaataaaaaataaaaaattaataagctgaactaattgtcatatggtaattaattttacacccagaa

SEQ ID NO: 10141 - DNA, 620 bp, Cannabis sativa
  modified_base (235)..(245): a, c, t, g, unknown or other
gaaaaatctcaaataaaaagaaccctaatcccttttccctcttcatttcccttcgcccaccctagtctcttcctctctctctaaccttcttgttggtggcccagctagccacgcatgatgtcgacctgaccaccaatggcctccgcccatctaaggtatgtttttgtgattctttctttcttcctttttttttcatttgctcatctgctcatctctctctccctctctctctctnnnnnnnnnnntctctctctctctcatttttttttatttgtttttttcctgatcgtcttcgaggtccgggtcctttcgagcttcgccatcactccagcatcaacacgatcgacgcaccatcactttagctccagcgtccaatgtaaaagatgacattttattaaaaaaaaaataataaaaaaaagctattttcgttggcccagcccaacttgaaactcggtccttacctactcgaacccatcccaacccgtgccagagctacctagacccaaaaccagacaacccatactaccccgcaggcgagtttggtacacacttcccacacatttgaaacttgaacccgaataactcaaaacctgtaaaacccacactactaaaaaaaccta

SEQ ID NO: 10142 - DNA, 636 bp, Cannabis sativa
gccaagtaagccttgggtttgtaaatgccactttgagatctggtgcgcatgtgatgtatccgagatacaattgtagaagtaattggtggtggaggctgcacattagaattggaaggaagcacagtagctgcagatggaatggtgtgactagcatctgttggcgtattacctgcagaaataggttgctgcactactgaaattgaaggagaggccgattgagtaactggagcaatgggcagggatatattatgcggatgtatatcaggtggagatggtattgtatctgctatatgttgctgatggatatttgggttttggacagccattggttggtgaatatctgatataatgggaggtggtgcaggtatgggaggctgagctgaagtatgtgggggagttatgataggtgcagaaactcgagtagagatgagaggttggtgttgttgtgtttggatatgtggagaggcaacatcagtagtagagcaaccattaaagggaggtgcatcaggagtatcattagtaaagaaagaagtaggaaataaggatggttgagatgcatgtacctgatgtgaatgagcactgtgatgagctggaaaatggctctcattaaagaccacatttcgggctatgtatatc

SEQ ID NO: 10143 - DNA, 778 bp, Cannabis sativa
  modified_base (114)..(114): a, c, t, g, unknown or other
aaaatataaatggttatatatatactatgttaattttaagtattatcagttatatttttaattagtttttattttagttatatatattgttaattgtataattagttttttttnttaaaaaaaaaatatttaattttaagtgttattcattaaaaaaaaaataataatatacaaaattaattgtaaattataattttagttttattactgtaatagttttaattttataatatttttcattgtttttaaaatatcatttattttttttaaataataatagaaatatatttttttagtaaaaaaataataataaaaagatattattcgctttaaatatatttatcctcgtttttgtttttagaaaataaaatacctcacttcaaacctactttgagaaatgctaaaagatatactcatatattgcctaatacttttgtgaagtataatatttaagtgtaatttaatattaggtcttacttattttactttaataaatattttaataaatggctaactaattataagatgacacacctcatagtagtgctagctaggcaggcttggttctcggcataagtagactaagcctgtgtctaaagcccacctaacttagaagctcaaatttgtttacccttttagaattatatattttttactaatttttaaaaaatataatatttttttaaaataaaggcctaaaaatatttttttttggtattacctattatatttcacgaccaaacctagtgctagctaccttggtgccttaacatcttga

SEQ ID NO: 10144 - DNA, 728 bp, Cannabis sativa
atcaatatttgaagaagtccattttgtgaatgaaaacttttcatgcaatggttacgaaagggtgatacgtgtcaccggtactatgtggatgtggataagcatagccaaccaccggcaaccattttcctccaccgcacacttctctatttcacttggccccactttcattatttttattattattatttttaaaaataaataaaaataaaataaaatcagagaaccattggagtttgggttccattcattccattccattggctttcttcttcgattccactcactttgacttatcaaaactccaatcaacatggtttcttctcctcccactgatccaatcaccggagcttcgtcttgacaaaaatggacgcacgccgcagactcgccgttatctcagcgcacatttgttcaaccgggtcgggttttcatcagccccgactccaacccgtttctgtttcgggctccagttctggttctgatgctgatcaggggaagtctctcaatggagcatgcgtcttttgtaggattatacgcggtgaatcaccggcttttaaggttttcttattcatataaatgcaaagtcttttacttaatttttgtttttttggggttatgaaatctaaataagacttgtgattacgttaattgaaattgagagttggataattgtttggttactgttaatatatttagtataacatgaataaatgttctgagattcaattttg

SEQ ID NO: 10145 - DNA, 997 bp, Cannabis sativa
ctctatccccccctctctctctctcctctcgactgtattaatccagctccaccacgatgcaggccgtagccaggcgtctagggcaaaaatcactgagcccttcgccttcaatttcatcgctcaagtctatctaccctctcaactacgatcactgtacgcacactctttctttcttttatctctctagggtttacgttcctaattattattaattgagcgtttgagattgattttgtgtagattatggagctgaacacccgaggtacggatccaccgttgccactaaaggaatcggtcaccttgttcggaaagggactggtggaagatcatctgttaggtaaaactgtttattattattattattattttgaatgaagaatgtgagagttgaaaatctgagttttagcttgtttgggttttgagaaaatgttggaattggaaaagttccatctttttatttatttatttgggctttgtttatagaacgatcaatatggatggcaaattgatcaaatttcattgctttttgaatgccccttttggaatgtaccttcatagaaagaaagaaaaaactatggttgtgtttaattgaagggagtgaaatggaattgaatcatttttcattctatttctttgtttgattgcattttaaaagtattggaatgttattctatcatcttggtgaatgactattccattttgaaatggaaggaaacaacattacaatgtattttaaatttgatttgattccgatacctattctcattcccatttctattcctatgttttcattactatttgttgaagtcttcgcaatttttggaaagtgtacttttcccaccaccattgtgttaatacataaggctggtatataatttttgtgtttattttgtatttcagtggcatagtagctacagtttttggagcaactggatttcttggtcgttatgtggtgcagcaacttggtaaactgagtgttaattaatattatttcttt

SEQ ID NO: 10146 - DNA, 1176 bp, Cannabis sativa
aagatacttaagagatgtcgtggcttcaatggatcaacctcttctactcagtcaatggaagatggttcggagattcaagtttctactgcaatggattctagtctctcatatgacttaattgcagagaatgctttgcaaccccataactcatcatgaaaattttaagttggaatgcacgggatttggggaacccgagtacattcaaacatctctgattgcttgttcaacaacaatcaccccatgttttgtttctcatggaaacaaaactcactcttaattcaattactagaatccgtcaatcactacatttctctaactgtcttgaagcctctcaggttggatttagtagtggtctaatgcttttgtggacaaaggatgttgaagttacattgttgaatatgggttcaactttctttgattgctatatgaaattcaatggcagcctaagttttcacttcactagattttatggggctccgaagattgctaatagatcaacctcttggactctcttccaacgttttggtgatgttgctccactccaaccttggcttgctattggggacttcaatgaaattttgtccaacaatgacaaatcgggtggagggcttagacgtgagtccaaaatggaagcttttagaacaacattggatgaatgtttcctggaagaggtgccttttaatggtgatcctttcaccttgattaaaaatcgaactgctatgcatacaatcaaagaacacctagattggtgttttgccaacaaccaatggatgtctcattttctcatgccaactgttgttgaacatctagactactagcaccactcagaccatagagccattgctgctaccttttcttgtaactcaatgattgataactcaagaaagagcagaagcaggtttagattcaaaaagctatggctatccgaccctgaaagtgctgaaattatatcgcaaagctacaatcaaaactctatttctaacccgatcactgctatggttcttgatctgaattcatgtgccaaaaatttgcaaagttagcatattggcaagtacggaaaaatgaagaaaaatatcaatagtttgaaaaccaaagtggctgacttgaataactatactgctcgcaccagtgaacaattgaaggattttcaaagtacggaagccatattagaagatt

SEQ ID NO: 10147 - DNA, 1052 bp, Cannabis sativa
taaatttaaatcaatgcatgtgatgtggtccattacatgaacctagcaatttatagtttttcatcatgcaatctgaataatcctttttgctagttgtgtcctctaagcaattatgaatcccaaacacaaatctaacagcaattgacacgatttctacaataatggcaaatcctattttatgtatcagattgtgccaattttcattaactatatacacttataaatgagaatcaatatcattctaagacagaatattgatcttaaatacggtttacaatatgaattgttattcttagaaagaaatatacctgactagtttgctcttgttgctttcctctaataataccagacttttttccaccactctcgttgtcattattgccctttccagttgatccattagaatctgctccacaagatttggcgtttggtgtgttaaaaccttgcatataccgagatgcaacaaccgccttttcttccttaatgacaatcttttgtcttgtgttttcctccttcacctctaccatctctttagatcttgaaccgttggttccctcaaaatgatcagcctggaccggactctctgatggctctaacatttgcatcaaatccttggggttccccacaaaagggtgtcgtcctggaactggtcgaacctcaacaagagtaggaactggcttccctcccttgactctctccacatagaagaactgaccaagctgtaacttgttgttcaagataagttcattgtcttccttggagagggagacatacgtcgaatgagaagagtcagagactttaaggaagaaaccatggtcaggccataattcagagccagaaatggcagggacaatgctaatcacttgcaagagaactgaccggtaatctccacgaacctttacattagagtttatactctgaagaagctttattagtactcctggtgtaagagatgccattgctctatcctgctcgtttgatagctgaattaggcattagaatcattgtcatcatcacatgatcaaagtaaatctattatcaatatcagcaaa

SEQ ID NO: 10148 - DNA, 555 bp, Cannabis sativa
tagcagaacgagccactatgtttaatccttccatttttatttccgtttatggcattattgcccttgtttccatggtgctggtgacactaagagcattctcttgcaccatttgggggcttaagacagctcaggttttcttctcacagattctttacagcatcctacacgcccccatgtcgttttttgataccactccttcgggaagaattctaagtcgggtaacaactctgaaaacatcactgtagagtgctttaatttctctctctctctctctctctagttccataactcagctaaccaatgataaccttttcttttctgataggcttcgactgatcaaaccaatattgatattctccttcccttcattctgggaattgctgtatctatgtacgttacacttctcagcatattcatcatcacatgtcagtatgcctggccaacagtattcttaatcattccccttgtatggctgaacatatggtatagggtatgtatgtatacatggcaacacatattctctcaatcttatttctaagatagcaaaaataaaag

SEQ ID NO: 10149 - DNA, 674 bp, Cannabis sativa
acaacccacaaccaaaattcttttgaaattgctacacttcattctcaagattacaataatttcaaagagggattagcagatagaggaggttgatggaagagggtttcaaagccaaaaatgaaattttgatttttattttttaataataacaagtatagttcaaattattaactttattgtcaaataaccattttttccttaccacaaaaattcatcatacttcacacataagggcaattctcattccacaccacacataaattcatgtaatattagatgtttaatattattatcctaatcatattacttacaaattttggattccgaatccaagccaaaatattaaattataactatattgtactaacttatcgaaatttatatgtaacatgagaaagcgaatatactacataataatgtaattcattcgtacaaaatatatattaaaattattattttatcctttgaggtcaaaattataaaaatatcccaaacacaaaaataagattttaattttaaatattctataataattttacatttattcttaattgagttatttaaaattactaattcatttttaaattttgaaatattataattattctctccttataaaaattttgtcttaaaatttaactgaacaattcatgatatttttgtttcacatccga

SEQ ID NO: 10150 - DNA, 773 bp, Cannabis sativa
ctcagccgctggctgataggttgccacctttcctggcctcccttgattaaccccgaccaccaccatcaccatacaactatattacgtcagccctgactatatatatgtatattcgtatatttgtgttatcctaattttttcccacataatgtggcatgtccacataggcaagatgaatgccacatggagtagagcttgccaatagatgaaccaagtcaccaatcacaactaatcaattgacgaagggcccaaatgcttaagcaaaatgaagatacaataaaatggccaaccaggagggtctggccggaccacccctggccggccaaggaatgtgccgtctagccctatacaaagggtaggccagatagcacctgtaatggctatcacaaagaagcccgaatgactggtgtttctatagccttcaccttggacggaccacgactcattctcagctgtaaagctactccaacaacccacgaaaatagggatttgactccaaatatcaacctattctttgagaaaattaattagctattttgtgtataataaatgtatgataaaagatgataactcccctttttaagggatataaatctattttgaatctagatcttttatgagctctcacctatataaagagcatgaggccaagccaaaaacctaagttctaagtgccaagctctaatctcgggacccttgctctctctctcagtcgagtatccataaaactgatactaagattgtttacttatctcacttgttcaagatttgcc

SEQ ID NO: 10151 - DNA, 718 bp, Cannabis sativa
aaaaaaaatctcattaatttaccatattaaaatagaatttaaaatgattaaaattgcacacacataatattatgaatagttatgtgtaattttgtcaaaataatcaaaaatatatatatatattgtaaaataacacctatagaattttccaaaatgtataattaaatttatttaacatatgtataattaatttgacatgtaataatgttcattggaaatatatatgaatacacaatcttttggggacaccaccatcatcaaaattattgtgctttgtttaccccttcttctcaatgactaaaaagacaaaatgtgacataatgaaaactaatacaatttgttagtttgcttaatgtacattctatattttaatttgacacatttagaagatgctttaaaatgttacataaattattaataatttagatttgagtgaacttgacttatacttgaagttcacaccaaatactactacactaccaaatgatatcataaaggtactccaagcccaaggtggtctcatcattaatctatatctattatcccactatttatttcatttttgtataaaacaaatatattttattgttccaatgataacatatcttcaaattcttattacttgtgtcaatgagtattgttaaagtttcaaagtagggattaatgtattcattatagcatcacatgtgagatagtttattgtatatttgaatatgat

SEQ ID NO: 10152 - DNA, 609 bp, Cannabis sativa
tcctccattagcatcaaccaatttttctttagaagaacctggtaacaagttcgaataaacgggggacatgccttctttctcaaatggtgagtcatttagcttctcaggtatgggctgataccaagtttgggcctttatcttctttgaccccaataaatggactatcatctcagagacatttggaggattagcaattaaagaaggttgggctttgtacatatttgtataatccagccccaataagtcatagtaaagcttttggagctcaggatcatttgtgggccatttaaagttgatgggctcaggaaaatgatgtggcatttgagatttgcaagctcatatgtgtggaatgtccagactttggatcaaagatggtccaatatcaggaatagtttctatatcatctccttgacccatcacgtgggccaaatctggggtaggtagctccactagaattttttgagggggaatattcaaattttccccacgtgctggacacgccttctcccttggacgctcttccgatctaacattctttaccagaataaaatgatccctctggttaaaatactgtggaaaaatagtaaagttgagaaagtgacctgggaa

SEQ ID NO: 10153 - DNA, 1478 bp, Cannabis sativa
aaaaagaaccatctcctcctagtgattctaggtaaccatgacgaggatgttgaagaagtgaattcagtatgaaatgatagtggcggaagcctttccacaaacgatcttcgaagaagattgaatgccaagaaggaaatagccaaagctgaaaaagcaagactcctcataaacaatttgagaaatcacatcaatgatcatgtttgcagaagagaatcctcaagtgataagactcaacgcttggaacgtaaagttgaggagttaatgaagatcactaaaaagatttctagataacaaagtggtgccgtatccaactctgaggaagaggatacaaagccttgtgtgaagagaattattgatgcacctttaccggagcatttcaggatgccccagatggaattgtatgaaagacgaatggaccctagggaccatttgtccaaatacaaccgcatcatgcaagtttccaaggccagtgatgatgcaaaatgtctatgtttttcattgacattaagtaagtccgcagaggactgatggaagaggttgtctccgggatcgatccataactggagagacctacaagtaatgtttagaaaacagtttatagcagccaaagattatgatttggaagctagctctttgaccagcgtcaagcaacaacaaggagaaagcttgaagaagttcattcaatgcatgatggatgtggcaactaaaaccaaagtcactaatgacatgataatggtggctctaacatcaggacttacaactggatctttaatatggggagatctccaacataaaagggtagataccttgagttaattcttaacaagagcccaagggtttatcaatctagaagatgcttacacccaagcatatggagtactcccaacaccttccaccacgataacaaatgcctaaccatcacagatgacaactccagccatttaccctccatgaactgcttactcttacggtatatggactaagcacttctgtacagcaagctgtacaagctactttttttagggtttgaagatgcacaaacggaatacaacgaaccgaaaaatggaagttctagagtctaatatgacccactcaaggagtaaaaggagtacaaagggtccacattagagtgagtccgcaaagaagggaaaaaccaaagaatcaaggtagaccgagtatacaagtctcatagatactcgagagaatgtatacaaggcaacctgtaatatggtacactacaggaagcctccaccaatgtataagggtagaatacacaaaagagatccaaacaaaaagtgtgaataccatggtgatattggtcacaccaccaatgagtgtgactacttaaaagatgaaatagaggggttagtacggaacgaacacttaatcaattgggtgagaatcccagtcatctatctgggcaaggcagtttcacatggacaactttttattcgaagacagcaaggagccataaatcc

SEQ ID NO: 10154 - DNA, 565 bp, Cannabis sativa
gagagagagagagagagatatgaaatggtttttatgggttttgttatttgagatgtttttatttcattctggtttaacaaattaaaaaaaagagagaagactttgatcaaattataggaaagagagaaagggtatagtttgtaaaatgaaaaactattttaattggtatttagtttgctgattgatgaatttttctttctttctttctattaagttttgatttttgtatgcaaaaacgccatttattttttgaaggagcattactattttgtaatattttattaatcattttaaattttaataataatttttgtatgaatatatgtgtatacattaatattatatattccagttaaataaaatataataaatttttttaaaaaaagtgaaattgtcgcaatatattttaaaataaactgattcatataaaaatgtactgtaaaataagaaaaagtaaatttttcgtaatatattttaaagaataaagtatgaaagttattgtgagtgttttaaggtgtctaatactattacttcaaaataataaaaaagtgtccaatactatata

SEQ ID NO: 10155 - DNA, 1544 bp, Cannabis sativa
tcaacaagagcattggaataatgccatgagtgatgagattcttgctttggccagaaataaaacgtggattcttgttagacttcctgaagggagacaagcaattggttgcaaatgggtttacaagaaaaaggaaaatcctgatggtagtgttctcaaatataaggctagattggttgctaaagggtttcatcagcaagctggtttcgattttacagaaacctttagcccggtggtcaaacctgtcacaatcagagttgtgttaactctagctttgtctaatggatgggaggtaagacaactggatgtcaacaatgcctttttgaatggtaatttacaagaagaggtctacatgacacaaccaccaggttttgagattcctggacaagaacatcttgtgtgtaagctcaacaaagctctctatggccttaaacaagctcctcgagcttggtttgacaagttacaacattgcttgtgctctcttggatttctttcttctaaatctgatcactccctgtttatcaatcattcctctcactcaacaacacttgtcttagtgtatgttgatgacatattgattacagggagtgactcagccacggttactgatctcatccacaaactgaacactcaattctctctcaaggatcttggtccactcaattattttctgggcatagaagtcaattataccgaaactggaatgcacctttgtcaagccaagtatgctcatgatcttctagttaaagctcaaatgctaggtgctaagccatcacctacacctatgacaagtggacttcgcttatcaactcaccagggggaacctcttgaggatgttcaacaatataggtcaattgtaggtgccttgcaatatcttactattacacggccagaattgtcctatagcgtgaacaaagtttgtcaattcatgcaaagacctttgtctacacattggcaggtagtgaagcgcattcttagatatatcagtggtaccttgagccacggccttcacttcactaaacctgaatctcatgaacttgtggccttttgtgatgcggattgggtgtctgatccggatgatagaaagtccacctctggctatgtaatattctttggctcaaatctagtagcttggaaaagtaagaagcagcagaccatttcacgctcgagcacagaggctgaatacaggagtgttgcgaatgtcactgtagaaatcacatggctgcactatctgttctctgagcttcacatcaagcttcctcatccacctactgtgtggtgtgacaacctaagcacaattatgctcactcagaatcctattttacacgctcgaacaaaacacatcgagttggatctgtattttgttcaagaaaagtttctgaacaaaatgatatatatcaagcatgttgcggcttttgatcagctggcagacgggctaacaaaggctatttctagccaaaggttctctgttttttgaaacaagctcaaaattgaagatcattcaattatgaacttgaggggaggtgttaaaggagttagttagtctg

SEQ ID NO: 10156 - DNA, 709 bp, Cannabis sativa
tgaatccagcaggttgagccatatatacacattcttgaagatctccattcaagaatgcattattgatgtctatttgctgtataggccaatgattagtgacagcaagggaaaaaataatccgaacggtacatggctttatgacaagactaaaagtttcaaagtaatcaagacattgtgtttgctgaaatcctttggcgacaagtcttgatttaaaccggttaacagaaccatcttgattgtatttgacacgatgcacccatttattgtcgattatagtcataccaggttcataagggaccatttttcatgtgttgtttttaatgagagttgtgatttctgtctacatagcattgagccataggggatcttgaagagcagccttaagagatttcggttcaatgctgatattggaggagacagtgaatgccttgggttttcgaatgccagcctttgcacgagttgtcatagggtgtgtgttaataggttgctgtagatgactggtggcaggttggtcattgtttaagctggcagcagggtttatgatggcttcaggttcatgatcaagggctgatggagacacatggatgttgggattgagaacactggagtctgcagatggtaaagaggcagaaataacaaggataggggcatcgggttgggaactaattggctgagttgggaatgtccgaatgtcagcagtggtggtaat

SEQ ID NO: 10157 - DNA, 750 bp, Cannabis sativa
agtctctgtcaactgcagattcaagccaaacttgaaagtattcgtcatcttcttatcctctgccatgggcaccacagagaccggcttcttccaggtttttgccacaaaatcccacactgaggatacatccacggacatgggagcgataaccttcccatacaaacaacatgcagacagtgcctttaccgaagaagcacacggggcaagtttcacagaagtttcgttgcatgaaaagcacttacctttctaaggagaagagatagcaataactgtctccataaatactaacaacagaggacaaaagaaaaggaccccaagaaataactcccccacctaaccaatcttcccaaccactgaaacaaagactaacaataaacacagaacactgaactaagacaaacacaccaactcacacgaagacaataaaaacaacatagtaagcaccaaacacgaaagagaacaacacacaaaaaaacggctgaacaacctaagacaccctcactcaaaccactcagtatccaaacatgagacaaacacaaaagactataaaaaggtctcagagcaaaacacgagagaaccaaacaaaactagaaagagaatcagaaaacacacagaaaccaaaagaaactgggttgctctgaggagacacgaagaaaaccagcagacaaaaaattaatattaattaatatattatcattctcttcatatatatagcatagaataattttttcttatatactcacaaataaa

SEQ ID NO: 10158 - DNA, 570 bp, Cannabis sativa
gatatcaactttacaggtccccaatccaactcctcacccacccagaataatgatgatccacctcaagctcttctcacagaaacaaacaccaacaatgatcaatctcatgcttggtacttggacagtggagctacccaccatatgaccaatgacacacaaaacctcactacttcagctgactacaaaggaaaagccaaagttgttgtaggtaatggctcctctctccctatcttgcatataggttctagttcagttcataccaattttccttcacagtctttagtattacaagatatacttcatgtgccaagtgttaccaaaaatttacttagcatttcccaattcaccaaagataaccaagttattcttgaatttgacgatttatgttgtcttataaaggacaagaaaaccaagcaagttcttcttcggggtaatctatgtgaaggactctacaagctacatgttccttcaccaagatccaagaatcccatcaagtctactgattctaccattcctcaagcccttaatttcaccactactagtaaccctgttcattccagccaacatact

SEQ ID NO: 10159 - DNA, 678 bp, Cannabis sativa
tactactaaataatatatgcattgatacattttaaacttgagtatttaaaataattttttagtcttttttttttattttttttttattttcatacattataaaggagaagtatgaggcggtgaggtgacgtgacactctataatctctctaatgagtattatttattctctccaccaaactcttaaatagagataacaattatctgtgagactaaaatataaaaaataaagcaacaatattacctctcttccttcggcatttttataatatggtattatttttgttttcagtaatttatttatattttgaccaactgatctaattctcaaaaagaagtatttttgaataaaattatgtaataatttatataagtatatgattgattataaccttccattaaaatatgtatttggttttagtgtttttgattgtaagattattttctaagtttgcttattgataaagatatcggcattaaatttatgtattattttttaaatcttttgttcctttaaacatttttggtattgtgaaaaatctgaaattgtctaatcttaagagaaacaatgggagattgtatataagtatgatcaccatagcccgattgcttttttttgagcaactcagtatatattacgggaatatatgtttgtgaattatcttttgagaatattttg

SEQ ID NO: 10160 - DNA, 704 bp, Cannabis sativa
aaatataaacaaaaagtgtcatttaaaaaaaaaataattacaccccactcaacttaaattttaggtccgctatatccttaacaatcaaataatgttatacaactaaatgactatacatccccaaaggaagaaaggaaagtcatttagccaaaaaaaattgttcatccattcgaagagcatgcacaactaatccatctgtaactatattgttcgacgtatatagattagagatactcctaaaaatctaggcaaaaaactattacaacgtctgcaacaccatccccatcaataagttcaagtaggaaagtgtttttaaagttgaaataaattcagtgcgaaaaaaacttgaggtattttgtatattattcttaaatttataattaatgtatttaattttaatgtgtatgtagcttttttacaaacaaagtttatgtgcccacaagataataccaagtttgtggaccatgctgattatgaaatgtcaaaaggtttgcgtgactggggctgattgtaagaaaaagtggattgaatatcttaaggagcttagacaggagaggacggacatgttacctccggacagagtaacttaagtggagtgaagtgattgcattgcttacttgaacacaaaaaaaaatgtatttgatgaaattattaattttagtaatactttacgttataaacagcaataaataattaattgtaac

SEQ ID NO: 10161 - DNA, 1047 bp, Cannabis sativa
tcaagatttgccttacattattctcgctattttaacattcaaagagagccacactagaaatcacaaggtaaaaacctgtaatctatgtggtattatcactcgaatcaatacaataaaaaggggagtaagttattacttgttaatcaacggggtcgaacctccataaattgctatgtctatttaattatttgcttttattatttacacatggtgattgtgatcgtaaataaggctccactatcagttgaccaaatctgaagtcaacattttcgtgctttcattgagagcattatttgccaactcaatcaatcatcatggttgtaaaaaaaagaactacaacttctacttcttcaagtcttcctcaagacctctgactgttgatcctaatgttcgtgttccaaccaccactggagtttccacgaacccaactgaagcaacaaatcttgccaatcctgtcagcccagcagacccaacaaacttgaccaacacattcaatttggtcgaccccgctaacccagctaatcctaatgaatagcctttgccacccaacacagatctgccgatagcacctcaaatagaaggtcctgttgacacaaaacaacctctacagagcggaaccaggactattccccggtattatgtaggggaaagaggactagggaccgacaaactaactattggtgagcctcatgtggactgggagaagacattaaattggccaggcttagagaggccataggccaggtcgagcaggctaaagaaccacacattgttggttgcaatgctttcacccaatagagatgcaaattcatgaggtggatggacgactaggaggccatcctccgggcccatcaggaggagctggaccaccgtaactaggaggccagtaacctaataaggtggtttaatgaaagaactgttgggaaagtatctgattaaagatcctttgcaatgatttttttaatatattaaaatcgaatcaaatcagatccgatctggaaaaaaattaggcggggccaaacagatctaatctaagatccaataagt

SEQ ID NO: 10162 - DNA, 557 bp, Cannabis sativa
atatttcatcggtttttgtagggtacgtagctagctgcatttatttttaagtttagcaattaattacgtaccttattaccactggtaattaaaatataaaaataaagaggggttagttgatcgatcaataataaacatggattgaccagtccaatccaacatcatcattttaattcattgctcttcacatgcatggctttccacctaattctattttcatacaagtttactactttctacttctactgtgtttaacattcaattctttctttctttcttcttctttttttttttttcatttaatctcttcacaaaaaacaaagaatgcattctttaatttttaccccccatatatatatacatattttactttagtttaattaaactactatttttttttacttatgttacattaaaacttaagtgatgatgattttctttttttttttttgtagaaaattcaaaatatttaattgtgtggaaataataaccttgaagaatctatttaaagaaaacctgaaagaagagaaattaatataaatatatatatgtgtgtg

SEQ ID NO: 10163 - DNA, 549 bp, Cannabis sativa
tctattaggcctttaaccttggtggcttcggcaataaacctttggacgtaatccttcaaaggtttggcttttcgtagtttaacctcaacaagatcttccagttacgatggtatcagtgttgaggataagaacttggtgtagaatttttgggaaattcattccaagaattgaatcttcctggagctaacttgaagtaccattgttaagatgtttttgatagggtttttgagaagatccgacactgcacatcaccattaatcttctaaggttcaagttgcatctagaagtacttgatgtgtgctaatgggtcctctcgtctggtatacatcttccatactgatgaaccccttgacctatccagttcacgatctgaaggttttaggccagctaggcccttgatcatgtatcttatctgatccaactgcgcttgcacaaaaagatccgatgttgtagaggcctttctaattgtccctttttggatgggctgctgccctaaattgaccaaagtctagctggccataccctgtgaaagggcttgctcgaggctgg

SEQ ID NO: 10164 - DNA, 1236 bp, Cannabis sativa
gctctttgcctactgcccctattatgactacgtcggttatttctagtgttgacaaaggcaaagcagtcatggtttctgaatgtccccgcatcattttatctcccccacccatgaatctgtctaatgttaagagatctttcacaaggccaaacgttcatattgggaattctgttagggaaatgttgaaacgagctcgggctgttgcagatgatgaagatgtagctgtggttccctccattataatctctgaaagcaacacccgcccagaaaaatgagtcttttaagctggaatgctcgaggtttggggatttctcgagcattccgaaacctctcccttttggtgaaacaacatcgtcctcaagttctttttgtcatggagaccaagcttagggctggttctattgctcgttttaagactcaactttcttttgactttgcttttgaagtacctaggaagggtttgggagggggtctttttttcttttggaaagatgttgttaatattaatattttatcttattctagtagtcatatagactgttttgtaaaaatgactgataacataagttttcatctttcttgttattatggttcccttatttttctggtaaattggattggtataccttgcttaatagattatatgatgttgctccttttattccttggattatcattggtgacttcaacgattatcttggtcttaacgataaatccactagtactcggccttctcctagtgctatggttcatttccaatccttcatttataagtattctctctctcccatgcctcatattggaaaccgatttacttataaggatggcaacacgtttgaaaggctagactggctattgttaataaaccttggcttgaccttttccctaaggcaacccttactcaccttccttattttggatcggatcacagatgtttaaaagttctcttctctgattctcgacataaaaataatagtactcatgttttttcgattcgaaattttttagctatttaaacctgattttcttagtgttgttcaaactaattggtcttctcagaaccccaacgacaacactaatcccctttcctttttccttggttgtcaatcccattgtgtcaacaaacttcaagattggggaaaaacaaatgtcatttcaaaaataccattcgaaatcttcagactgtcttggaaaatacttactcttcccctgtgcttaatcagattgatcttcagc

SEQ ID NO: 10165 - DNA, 1405 bp, Cannabis sativa
tgcgacgccaactgaaggccagagctcaagctatcaccatttctcgctcacaagatctctcttccccttcttctttattcgtgcaacgcccactaaagaccagagcttaggccatcaccgacatttctcgctcacaagatctctcttcccctttttctttgctcatgcggcgcccactgaagacccaaagctcagaccatcaccggcgttgatggtccatatctctctcggagagaagtgaacaaagttgaacccgaagccctgaataactatttatctcgctctctccatcagatctctctcggacatctctatgttcacagttctattttttttaggtcgttagatcttgggttaatattttgtatatttttttaatctttgatctgttattgatttttttttttttcagatttgcttaatgagatgaatattttttgcttaaaatattatactggaagattgaatgatatgctgttatttttttattttggtattgtttagattaaatcatgagcaaaatactctttattattattattattaaaattttattaaaataaattcacgaagatataataaaaaactcatcaatctaattttaaacaaaaaagtttataattataatattaatataaataatataaattatataacattatatatataaaaataatttatagcattttaaattttataatttcagaatttactaaagtctagttttaataatttttttctttttgaaaataactcttttagtgtctgtttaaaacaaacacttatacttattattagtctcggttttaaatcaatactaaaggaaaaaaatatatttgtatattttaagtgtcggttttaaaacgacacaaaaactcattcgtttcagcttatagctgacacttaaattctaactttttgtgattgtagaatacgtgtcgattctaaagtataagtaaaagtttaaaactgacaccaaaaatacaatttgtaatagtgtcatcttatttattataattttatctagttaaattaattcattacaattctttttatttttatgatcttcttatattattgacgaaatttcatcaacaaaattttataaataaaggcataatataaacaaatacatatacatatgttctaataactctatcaatcctataatattattggaaaaatatataagttgtgatccaattaaagagcttatcctaatcaattatatgacctatatacataaatatatataacaatttaaaggaataaagtctttaaaaaaataaataaataaaggaatgaagagccatactattaatattagctaggtacttcatgagaattaagatgtgcgtcactttcttgaaggaactttagacaagagttagtttattattataat

SEQ ID NO: 10166 - DNA, 777 bp, Cannabis sativa
attcatcaaattgtaatgtgtatgcgtgtcatcaagaaccatccaggtgatatttttgtagaaaataaaaaatatcatattttcatgtaattatggaaaattaccaaatttctacaaatatttgtaaacttttaattttcatatttgagagagaaaaaaaaaggtcaaaatctatagattagcattaactcactattttattaagtttaaactttaaattgttaaaagaaaataatagtgtcaatagtgatggctcgtgattttattagtgttgtaagtctatgcgtgtcgtgttagtttgaatcaattttacttgatgagtatcttccaactctctacgagtacatgtgagtgagaagttgaaatccattgttaggcagttttggtggggttcgaatagtgacgaaaggaaaatactttaggaaaatgggagacggtttgtcaccaaagacattgggaggtcttggttttcgtgatttctaattatttaacatagcactggtggtgaaacaagtttggcagctcttgcaaaatctcgattcgttactagcaagagttttgaagtataagtatttcccaagatgttctctgctagaggctggtaagaaggatgtcttatctcatttgtggactagtcttgtatggggactatagctacttaaaaggggtttctaacgaaccattatagtgatggcacgcaaattaaggattttcatgacttgcaactgcctaaattgtcatcttttaaggctattactcggagacttaatgacaata

SEQ ID NO: 10167 - DNA, 522 bp, Cannabis sativa
tccttgaagcttagatatcaaacaatagtgtttctagaattattgacaaatcaccctctctgccaagtgctataaaatcgagaggcttccactaggctattaaaatgggcaatggaatttagttaatttaacatccaatatcaacagctggtgtcaatcaaaggacaagccctagctgacttcgtaatggagtgctctaggtttggtgaccttgcggacgagtcagtcctggagttgcctacctagaaagtgtatgctaatggggcctctaatgaaaaaggagtcagagcaggaggactatgacatcaaacaatgaagacaaacatgaagccatgctggcaggactatgactggccaaatacgttagagctcaacacattgaattgcacaatgactgttagctggtagtaaatcaaatatcaggagaatatcggactaagggagaaagtgtggttacttatgtaatgatgtcccgaaaattgttgcaaggtttcaaaggctataactgttgggttttatgcc

SEQ ID NO: 10168 - DNA, 683 bp, Cannabis sativa
tccacttatgctcattcgggtttcacgagtttggtattaggttcttttttatgattttgttgtctatctcgacctaccggttggcttattagggtttgtgcaccactaaattctttttgattcctccattgcagtaggcttggagttggtcatcttttcaataaaattaatataatctacatttggtttagtttaggttcttaataattttaattaatatttagttattaaaaatatgattttgtaatactcatatggtaagtaagctgttgttaatgataagtcgagagaggtgtataaggaaatcaattctacttagagaaaattatattgtatatttattttattttacctgttttaaattttacttttatttttatattttttaagatatactaacttttataaatgatgtttccattatacactttagattaatgtaaataatgtgctagacttaatggaggacgagagtatattaagaagctcaaactcacataataatcaacccataaaattttacagtaaatgtatattttaataatatagataaaatatttgaataaaacatctttaagtaaaagacttaaatattctaaaatagagtaatattaaaaacacacttaaattattcaatcataaccatacaataaaaattagagtaaattgcggtataaatactt

SEQ ID NO: 10169 - DNA, 510 bp, Cannabis sativa
aatctctatttcagcagctattttttgaacctgacccgaccacacgagttttcaattttttggttttttggcagcgggtcgggacgggtggtcgggtttttcaagtttgcgggtctaaatattgagccctatcaactcattacagtgaaggtcacctgaaatttagtagactattgtaataaaaaaatattttgagcttttatttttaaaaaaaaatattgtattttttaaaattaatatagaaaagtacaattttaaaaggaatttttttttttcatctcggttagatgaaccctaaacacagacttagcctacttatacccaaggccgggcctaagtacattaaggattaattaagaatattgagtatgtcttaattacattataatcaaacaattaattcagtgaaaaaactatctttgattaagtagctaacgtatatataaataattaagaaaagaagagtagtgcgcatgcaactaagatcattatacttatatatgaaaatga

SEQ ID NO: 10170 - DNA, 613 bp, Cannabis sativa
ggtacaacacttagtggtactcggagtatggttcaaaccataccaacactattacagtagcagtacgtagtgcatgtggtacagaggtcgtgccttagttacgaacgttcttaatcatttgttaagctttgtggatatgtgtatgggcgcctaaatataagtcagtagtatattgtatgttatatactttttttattgagtctgtcaactcatagttattgcttgcatgtgtaggtaaaagaaaggctaacactgattagtaatgagtctagaggtcaaagatgattgtacatgtcatgatggtgtgacctggagagttcagtcttgggacaacttaggcttattttgaagttgctgtgcggcatggttgtaaggtttatttgaatatgtaagcaagtttaaaaggaggatcctgacttagttctatgattatatagttatagttattaaagtttaatattattcaaaaagttttaatttatcacaattttaaagaaaaccctttgattagcgaagaaatacacagtaatcaaaagatcactataacatgcctaatcattatggcgttacaattgcactaaagcacacatttatccttcaggctctaactcct

SEQ ID NO: 10171 - DNA, 605 bp, Cannabis sativa
gtctgcgaatagtgttgctcattatctagctagaacttcttattctgttgctcatcgtgttatcaggagtaatgatatttcttatgagtttcataatgtaattttaaagaattgcaattaataaagtgatgaattattttcaaaaaaaaaaaaaaagaaaaagaaagaaagagaccaatctaacacaaccattaaagctacaactttaatagataatcaagaaagagactaattttatacaaccattaaagttacaacttctgcctggataatagcaaaagttcttacaaaagccaaaatacatgagtaagtaataagtatccaactatgaattaattatttaaaaataccataaataataattttagattagataggaatcataactttagaatagacacgctcgtttagttaataaaaaataacacaagttaaaaaagatattcaactcaaattgtatcaataaagttacggaagtttacatatctatactaataagaattttgttgaacaaaacataataataattattatttataaccaattttaaataaattaaatatatattccctaataacttcccataaataattttattgtacagt

SEQ ID NO: 10172 - DNA, 829 bp, Cannabis sativa
gttttatgtttgtcaaatctttttccactagtttagaaaacaagaaacaaattttgaaaatgaggagagcttaatgtgataagcattgctacgatttacatatcatgtcgttttataattggttagcgattttctataatattataaatggaactcgatagcatttctctaatgtgatgagaaaacagtgaacagagacctaaatagttgaattgcccgactcacaattccatgaagaattaggtttttggtttttgggaatgagaatgtaaaaaggaagttatgttttgtgtgatttaagcagaatatttataattgtgtagttcttatttttaaatttattttttggtttttgggaatgagaatgtaaaaagaacttatatcttgtgttattttagcagaatatttaaacataattgactttgagatttcctcaaacaatttcttggtataaaatataaaattaattcatgattaatttactataatttgagagagtcttggtgaaaaataattacatatacagttctctagcaataaaattctgaccttatatttataattctagagttaatgttttaatgattaagattattatattgaattacagctaacttaaattagttaaataaactatcctactgtaattaataattatggcgtgacttgtggccacaacactaaattatctcaaaaaatgcattctaatggaaagtttgtaattattttcataattcattgaaaactttttgaaaaaaataataatttagaatacttatcatgtcataattaaaaattatatttattatatgaattttagttacaattt

SEQ ID NO: 10173 - DNA, 505 bp, Cannabis sativa
gtcccgatatcttaagggtcatgcggccacatgaacattaggttaatgggacacccccaccacttcaagactcagttggttctagtcacaacttgaatgcatatgcataaaaaatgaccaactccaaggaagaacagagtggttgggggtttcacagacctaagggttacccagagaaataagtatgaaacccccaaccattaccaaattttgacttgaaggcaaataaacctaaatatgcgagtacacaaaaaaaaacgttctatcataaagatgcaaacattcaaagtttatcataaaactcgtgggtattcaaattttcagccaacaattttccaaaaaaaaaaaatgccatattttgcctaaatttctaattccatcaataagccctattaatctcatgcaccattctatccctaaaaacccagatggcatgcaaacattcagagaactaaaattacagaagaaataaggaagaaaaactaaccttctgtgtaaaaatcct

SEQ ID NO: 10174 - DNA, 1016 bp, Cannabis sativa
ctttaggttgaatcccaacctacagtataccatgtttaaagaaatagtttcaaaaataaagtaatataaagtgagtaagtggaccttctacaaagcaaaacaaaattgttatggatatattagtctgatgtgctatggaccttctacaatatgagaaaataaatttattttggtcttctgtgcttttttattttttaagctccttttcagttaaactctacgtagtaattatttttataggctaaaagtgcttcgtttggtttgactgttagagttttaggttagttatttttaatatattgggtttcagcaagtagtgaatttatagtcttgtctactaaaatttttgggagaattcatgaggaatgataaatctttctttttttttagaaaaaaaataattatgaggggaatgatttgttcaattacaatgtttatttaaaatagcatgactttcaaagaaactctaccaaactcaatcgcaatcatagatagagccttagaaacaaagatacaaatataaaactaaaaaagcatatctcacaataaggaatctactaaacatgacattcaagaatagtggaaaaaaccactaatcctaaaattagtttaggactcttaattttatttcaaatctaccctgaaattcattatatttttccttgaagttaaagtttaaaaatgatatttttatttggtaatataccatgtttctctatatatctcttttaaattaataatatattaatctcctttcacatgtatttttgtctcacacccatctattggatcatcatcacatattattatatatataagatttatttttctcatatatggtaacataccatcttatttgctgacatatattgttatggaaatatgaatttatttgccttcagtagcaatatttatctcctagttttaatttatattgtgaagtaaaatgcatttctttttgtataattactgcaaaatgcatgttacaaatttttttatgtctataaatttttact

SEQ ID NO: 10175 - DNA, 818 bp, Cannabis sativa
gtcttggggatcatcttcaacatcgttaggattattctcccctaattcttcatcttcgattatagggttattacgattctggtctttgtcacgttgatcttggtgatggtatcactgtaaggagttcagatcttgataatgctctactacagatagaaatcgagagctagagatctaaatgaaaagagtcatattatttcgatgttatcactgtaagaatttcttaattctaatgtgtttattttatagtttttaggaactttatatttaagatgttagattgtagaattataatcagaatacatgttggtaaatctaaatcctagtaaaataatttctaacagtctaagggtacacccctacactaacctcatgtggatcattacctttgaggtaggggtaatagtataacccctaaactgatttgactcctgtaggtgtgtggtgatcgtttatcccatttatgtgggtgctagtccactgtccctcggggtagtcaccttgtttaagctaggggaaatgtgactgtcagacttctcttttaacggtcatgaccctgggggtagtcaccttgcttaagctaagagaaaagatgaccgccagacttctatttcaatggtcatgaccctaagggtagtccccttgcttaagctaagaggaaaggtgaccgttaaacttatctttcaacggtcatgaccctgggagtagtgaccttggttaagctaaaggaaaaggtgaccgtcatataggtcatgactttacacattctttatcaattcaacctcggtatcctagtgccacgtgtcatcattttttcc

SEQ ID NO: 10176 - DNA, 535 bp, Cannabis sativa
gaactttgaaaataaagcatgaaaggaggcacaaaaaattgatacttaccgaagtcagggcaacactcatgtcctggatctggtaaacaaggttggaaaaagcacaagttgcatacctcttggtggggagctgggttaaatctgtagcaaaatgactcaccatttcggaagcaaatagagccatgttagggcccacaaaacatttgaaccagtttgtcatgtgatccaaattcaaatcccaaacgtctccggtatactcacgtcaaaaaggcccatttagagcctccctcaaccacttttttcaaggtctctgcttcagcgtctcccttggacagttgttccacagcataattgtgtttggcaatgcagagttggatcctttcttcatcaggatgggcaggagtcagaatgatgcctggaggggccagatactcatcgacctcaaagggaatacctgaataggcacaagggtcgggggtgtcatccctcttcagcttcttggaaggctccagctcagaagcaatgcttttacgct

SEQ ID NO: 10177 - DNA, 898 bp, Cannabis sativa
gttgtgtgcattgggtgaaggtgttttggaggagtatgaggataaggagagaggtgaatgcatgatgacaataatgacattcgaaaaggaatcaaaggacaagacgtgcaaggaaaaagcgtaaaaccacgctttctgaaaattgaaagaaaggaggtataagtagcagcgaatacggacatgcgaggcctgatgacccgaccaagggtacgatgcaaccactctcttacaacctgtatctggggaccacccgacatgcaactggggaccatgcacgtgtacccggagaccacacactgcaaccatcctcctacaacttacaattgggcaccgcctgacaccagacaagggtacggggcgctagactacctccaacacctgcaacatgcaccgagaaagtgatattttgtccccatgggaccactttgtacaccaggccactagagcctataaatacaccccatcctagatgtgaggggttgaaaaatcatacttgtgaaaccatattaaaagcaatagaaaatcctccattattctctccatttcaagataacaatttgagtttatatttcatattcctcttcatttcatttctaaacttgaagcataagttggttttatgaccaccagttggttgacgagttctcactgtcaatagtgaatttgtaactaactcaacaacactacaccttacaactgagcttaataatatatttttttttgttactttgtattttcaaatatgttagttttttaaaatcaattattatttttgtgataaattttaatttgaggactaaagtgtaatattatattttaagataaaataaaataagagttaaaatgtaaaacaaaattgtacaccaaatcagtgaaaattcaaaatccaacattatta

SEQ ID NO: 10178 - DNA, 640 bp, Cannabis sativa
taagaactaagatatattagttagtcaaatttgcaattttttcaattctttatttcttgtttatttgggaattatttcttatgtgtaatgcttctttttctattaaggtcttatgtgtaatgtttttttttttttgaaacatcttatgtgaaatgttaaagatacattttttattataatatttgaaatataatttctttttgttggatataagtatattttttaagaatataaattggaagaaaaaaattaaaaataaactaatataattaggaagttttttttttatttacacttttataattgacttgttattcatttataaaactaaaaacaatataacttcgaaatagaaataatataactttaaaataaaaataatttttataaaaattaaaaaaatataaaaagaatgtaaaattaaaaaatatatatagcaatctcccttaaagtttagacaataattggcccaagaaaataaaaatcttcttaagtcgttttgcactttgacttaatttaatttgttgcaatatgatctgtgtctaaaagttggacaatcatgaagttggagtagttaaagaataagtcatcatgcatgaatgtatatatatatattagcatgtaaatatttgttgctatt

SEQ ID NO: 10179 - DNA, 741 bp, Cannabis sativa
tcaggcccattggtaaagcccaaagccaaaaatgcattaaattatggaaaatttacaaaaacactgcgacacaatttttttcttcaaaaataccgtattttcataaaacaacagcagaatacaaaacagattaaccaaaaataaaagtaaaacaactaaaaaacaacaataaaaatttattaaaatacacagtatttttgaaaaaaattctgctccacaataaaaaagtaaaaaaattaaaaatttcagtatgtggtgtaaataatctttaaaatatgttatacctatttcaaggttgtcaagaatatttttattagattaatttgaataaaaatcaggaaatgaacaacactttaaaccacttagctaaattacatcaattaagactctaatgacatgaattgcccaatgtatttagttcctcttagtatgactttatttaactaataataattttgataaatgtatcaatgtcatttgataaagaaaattcattaaacttcactcttccaatcatggctattttagaaaaagaaaaattgaaaaagagaggttagttagtgtagcaacttttcttacaccccgacaaaaaggccaacaaagaatagaaatcaatgcaatgataggccatcttgttgaactaggattggccctaaacaacccaaaagaatcaaagaaaaaaaattataataataaaaaagtttgggtagtagaatagagtgatctttaatacaagcattt

SEQ ID NO: 10180 - DNA, 742 bp, Cannabis sativa
tttttctgggcattgcccagtggccgcggcgagcacaaccatggtcgcggccataaagtcgactacagagaggggtttttaaaggctatctcgccgtggcgagcactaccatcgccgcgaccataagtcgattccagagacagtgttttttaccctcatctcgtcactgcgagaccacttgtggccgcagtgagaatgccttgacaatctttaaaagggggaaacaattttttcaaaatcaaaacccctttctcaaccctaaaccacctcctccgaaaactcactccccataaccaaatttcttcattctcatctcatcaaaaccctttttcttccaattttttcataatcattcatccccaatcactctaaaacacttttttttctctcatcaaacactcttatcctctcaaaaaccatatccaaatccctaaacttcacctaaattcaaaaatctcactattcatcatcatctacctcaagaacttcaaagttttcttcaatggaggtagagtaaaggagattttcattgaggtaacaatttcttaaagttatctatgcaattgttaatagataattttttattttgggagaatcttgtgaaattagtgtgattttatggatatcgtttaatgcatcattgtggagagttgtttgtgaattaatttgtgatatttgtgattgggttttcacccgaaaagtggaattttaaggggatgtgctgtcaaaattttcttgaatt

SEQ ID NO: 10181 - DNA, 1120 bp, Cannabis sativa
atatctagatattgagggtgtacctctgaaagagtttccccaagaaattagtagtataaaacacttgtgtttcttatctgatgtggttttgagtagtgatagaaatagtggaggatttaaaatgaaaaggatagcagagcttgagaacttacttagaatttctgggttggaaaatatcaaggatgcaagagaagcttcagaggctaatttgaaggataagaagtgtctttccaaactgactttgaggtggaaacataaacataatggtgtaggtgtggctgctaattcacaaaaagaaaaagagaaagaaaaggatatacttgaggcgcttcgaccacatacgaatttgaagcatcttgtgattgaaggttatagaggtacaacattctcgaactggattggagactctgcatttgttaatttattatcaatcagaattgtcggttgtgagaataattgtattttactcccactcgggcagctaccatttctagaacgtcttggtattagcagatgcaatagtgtgatcttaataggtgatgaaattcgtcatgacaagggtcttcttctattcagatgtctagaaatgttatatatttttgatatgttggagtggaaagattggtcatttagtagtgaagctattcttgaacaaggtcaaacactattccctcttcttaaaagactttatctcaggaattgtccaaagcttcatgttggattaccgggttgttaccttccatccttggaacttctggatatcaggaattgtgaacaaatggtgggtttggtcccgagaactactcaacagaccgtcacaggcacatgccttccctctcttgccaaattatggatacgtggttgtccagtgttggaatcgcttccagactggggatcacactccaaactagagtgtcttatattacccaactccaaaaagctcattgagaaccataagcaatgggatctacagagactctcatgtttgaaaagggtaactatctttgggtgggaagatgaattgtttcctgacaaagggctccttcctataactcttgatcaagttgaaatctttaattgtagtaaccttgaaactctaaacggcaaggcctttcaacaa

SEQ ID NO: 10182 - DNA, 1270 bp, Cannabis sativa
acctaaagacgatcctcaaaacaaaacttctgatgatgatcttagagagaagaatcaacttaataagttagaccctgttgtaattatggctaaacaacttccattggcagaaagtagattgactcatcaagatcaattcaacgagatacttctgagaaaggtgacaagaatggagggtgtaatgactaccctaaccaaagagactccttatgtacaagctcctccaacaactgatgcttctgaaagagcacatccaaaagattctggaacctcaggtcttcgcaaagacaaaaggaaagggatagtcgttgaaatcccaaagaaaactacttccaccaagcagcataaaaagtctaaaactatcaaccaacctaaacagaagaagaaaggaaaccatgcttcagggcatggtgaccagactaattctacaggtaaagtcgcacaagaaagtaatactaatgttgaaacgcgaaagccaaagtcctggaaggacaaaaatcatcccagcgattccagcaatcaagataatgatgtcgatgaggtgtatccaatatcatatggcaacagtggaagtctctccacgactgatctttgaagaagattgaacgagagaaaaaaaatgccaaagtagaaaaagcctgagcctgtgggaacgatatgagaaatcatatcaacaatcgtgttcacgaaagacaatcctcaagtgacaagactcaacgcctggaatgcaaagttgaggagtcaatgaaaatcacgcaaaagatctttaggaagcaaaattacactgtgtcaaaatctgaagaagaagatacggagccatagtaaaatgaagcatagaactgccactgtcggagcacttcagaatgccacaaatggaattatacgaaggaaggacggacccccgggaccacctgtccaagtacaactacattatgcaagtcaccaaggccagtatcgatgcaaaatgtttacgcttttcactaacactaagcaaatctgtggaggactggtggaagatattgtctgggggatcgatcaacaattggagaggtttgcaagcaatgtgtagaaagcagtttgtagcagtaaaggcatttaacctggtagccagttccctgaccagtgtcaagcaacaactaagagaaagcctaaagaaatacatccaacgcatgatagatgttgctactaaaaccaaggtcactgatgtcatgaaaattgtggccttaacattaggacttgcaactaaatctttgttgtggggagaccttca

SEQ ID NO: 10183 - DNA, 519 bp, Cannabis sativa
cccaatcaaaattcacatcatatacagaacttccccaaaaaacctatgaattataaaggaaaatttaaagaagaagaatagtaatttcaccacaaaagagcttcaattacaactctagagctgccaacaaaatctcacttcaataatcctcaaaattgaagctataaaaaaatgaaaagttgaaaagcttgtggtggtttttctctatggtgtgggtcaagagagagcaagaaaagagaaagtgtttttaattttgatttttgtttcttcttattcctacattattcccaaacataaacataaagctattgtatctttatctaaaaaaaaatgacaattaccaaaatactctttacataaatgtacatatacttaaattaggagtaaaaggctcatttttttaataactctcataaccttataatttctaattgttcataaaaagtgttagtacttttaagttttaaaatactaaactataccacagtagtttctactatttcagattataaatataat

SEQ ID NO: 10184 - DNA, 667 bp, Cannabis sativa
agggcataaaacccaacagagccgtatagtctaggtcgaccccatcatcagcatgctggctaacctagtggttaatgtcttggtcagccacctcctccataggtgttggtcggccaactccttttcatgagtctttgatgattatccctttcaataggtagcgacctggtctacctccatccaactcttgaaaagtgcctttccatgggccaacgttctctctataaaatcctcactgtccatgtacgacattttagctcgagggttgcaaagttgtaactcatacgtgagttaagaggataattcagcatactcttccctaatggtctgcttgccatcaagagtctcctttagcttctgcttgtgatcataaaggtcagactgcaacccggagatgaaggcaacttgtgcggtgttctatgtgtttctagcgctaaccatagtctctaatctagaaaccattctctctctctcccctaggagagcctctagctcagatatgtctttgtcctttgccacaagggaagcatccaaggtcttcactcgctcctaaagagcatataaggacccttaagagccatcacgagctgagctcaacttcatcaaggcctgaaagcaaaacaaaacaacatcagtgtcaaggccacaacactggctggctagtccc

SEQ ID NO: 10185 - DNA, 511 bp, Cannabis sativa
ttggggcatcagaactgaaggaaccccatgtcgagactggaatgattggatgtgctggttcagggatggtgcgaataggcctctcaacctttgttttgaggaattcttactgggggcgctctgtacttttgacattatttggaaagttcggaataagctgatacataactcggtgaagttgggaatggcggaggcaattcaacaagtgtgtcgcctctaccatgatcatagatccacctctcatgccaggctgcggaaggaaagaattattatttcccctccaggggactggatatcctgcttcacggacatagccacagcctcggatcacgccattggggcagctgtgttcagggactgcaaaaacaggcttcgggcggccatttccaatcgcctccatgtcacggacccaactctggcagaagctactatgctggtggtagcggctgaatacgcgaccaaaaacaactttgacaaggtgctgttcttctgtgataatagccctgtggtg

SEQ ID NO: 10186 - DNA, 672 bp, Cannabis sativa
actaaatttagattaaatataaagtacaaccaacaaggagtaaatatgaggcttaatataaaattcttaagatggttgtcagctgagacctttcttatatagaaaactataacttacccaaagagcccacagactcctgcggaagtttcaaaggagtggcaagtttaaggctcaggataagtagcaccaaaagagaatcgaactctagaaggcaactaaatgagggactttatgcagcaaaacatcccaactattacatcacatactcagtagtagtagtagtatgtttgttgttgttgtactcccactaaataagtattagatttatataattttgtccattaattttacaattaagagtacaatttgtatgttctcatacatatataaatcgaatagttccttgtgtgggaggggcctcaactagaaaccatcttagggactacttaacttactcctcaataattttcgggattgatattacactaaagaagttagaaatataatgtacaccacctgattccattttcacatataagggcccacacacacctgcataactctcaaaggagcgcgacgagattagtggcatcatggggaatcaaactccaaaagacaactaaatgagagactttatgcgaagcatttcaatcactacactacacacttatg

SEQ ID NO: 10187 - DNA, 722 bp, Cannabis sativa
attttgatatttactaaatcatatcacttaaattttaaaatatactaattttaatagtttaatctgcatcctactttcgttaataaaattggacaaaatttattaaatctaataatttgaatagtgtttttaaccacttaaaaagtttgaaatagataattgagtagattttaaagtttatttgcaaaaattctaatagaaaaaaaaaagaaaaccaaaattggtatattccgtcgtcaaagtgagtgaaatcattcgaatttggatccagctccgactccgatcgacggcaatggcgcttcaatggaaaattctcacctgcgtcatcgtcctgctggtggtggagaaggaagaggaggagaccctctttaccattatcttcattcttccttcatctaagttcctcaatatccctttcctctttccagctcataagtatgtaatttcatttgtttttgtgggctttctcctgaaattctcttacattactctgttctgtttggcaaccgagaaaatttcgaatttttatgcatctataagctttttcggaagtcaattatttatagggttaggaattgtgcagatatctatgggaaggagttgatgaacgactactgagagagatcacttcgaaatgacagtgagtttttcggaccaattcttgtttgattgaattgaactatgcctgatgaatgttattgtttgattgtttttttacccaa

SEQ ID NO: 10188 - DNA, 1340 bp, Cannabis sativa
gctctcgccgcgacgaagatttatgctcgctatggccatgacttgcttgtcgtggtgaagttttaggctcactgtggcgagagcctcctgctaaaaaatttcgatcgtgcgttgtgattggtattttagccataactctttcaatataaatcagaattggaacgattcaagatgtttcgaaaagctgagaacgatatctacaactttcatgttgagttcaaagtccaattttgcttttgaattagtaaaaaattgtaattacgttcaattttgtcaaaccaagcttgccgacttctactgtttttcactaaaatatgctaaaatctctccaaataactcaaaatacatgattagtcttcaaaatagcctaacaaattaaaattacgctaatcaataatttaaagaatcaatttaagaatattaatgcataaaattgatcatattaataagacaaatatcgacttatcaatatacatatatatatatatttgattataggtaattctatagtatactcccttaaaaaatgtttccgtaaactctatattcgtttcagtacacaaaaaatttttttagtcttattttatttttctcattatcgtatacattatagttatttatgaccacctgaaaatttttaaaagattctacatagtttactgtttacaatgccaaaaataaggttcaaatattttattgcacgtataattattttttcttatacatgtgataaacaattatttgaatcttatttttagtattgtaaactattgaaacttttttaaaaatttataagtgatcttaaataattataatgtagacaatcatgaaaaaaattaaactaaaaaatcttctaaataccaaaatcgaaggataccgaaactctcctattcataggatacttcatatttttttcttttattttgtgttaaaagtgtcattattctgtttttattaagtagattaacaaaataaacaacaatatttatttgagatgaaaatataataagttaggtttgatgtttgtgttgagttcggaagcaataaataatggtatatgatacatcaaattgataaaaataaaacacataattatctggttcagcaatttgcctataccacgggaggcaactaatattattaagctaagtagaaaatatacataatatagatacaaattttctactaataatacctctcaaatgtttccgtaagtgttttctcaaactcacatttcttaaagtttggctatacaaatgctctctctctctctctctctctctccaaataccaaagaaaatcccacaactaccacccacggcgactctctctctctctct

SEQ ID NO: 10189 - DNA, 1060 bp, Cannabis sativa
ttcatatatgttaatttttatggaattagtcagatctttaatttgtattgtattgtttatctctgaaattttattggatttttcattgaataaaattgatgtttataaacaatacgtatgaagtgtcactaaaaattctctttccagtcactcttattagtgacgcgcattgaagtgtcatcactaaacagttttagagttactcaatgtgtgtcactaaaaggcaccagtggagccaagcaccctcctacgtgtcaatatcgctattggtctaattaagtataatgtcccatatagtttaatataatagcttttagagagtatcgttagccaaacgcaaggcgacacgttttaagggtgctatgcactactggtggtgtccaataacaatactcttttttttaaacgcaattagtcatcgatacgttttttcctcaaaatactcaaattaattaatgtattagaattagattggtttaatagacaatatttttttaacaaaagatatcgattccaaatttagttagctggtttgatgggtcacgaaacattttgtgcaccactcaaaaatcaaaatagtacatttatcgtttacttccaaaaatatccaacattgaagatttgaagaaaataaaacacaacataaataaataacacacgtacgatattactcttctagtaattaaataatactagctaggttgtaatatatagctaatgttcatattaaatacttggccctcgtaccgtacgtactaataattattacacacttaacacttaatcagccttgttattattataccaccaataatgcaccccaacacttattattattaatcatcaattcaaaggtgaccgttgaggaacaccctttcggcggcgattaccaccgacgtccacattcaccggccggcggtacatcataacatgatgatgaggtggctcattatagtcactaatgctacgcttcttaactgttggggttctgcaactactagagttagtaatattcgtagttgactcgggagtagtcaatattcgatccagtagaactacc

SEQ ID NO: 10190 - DNA, 574 bp, Cannabis sativa
tgttattcatcatggacactcatggtggctgatattttggtgcactaataaagaagttgttacgatttcatggtgctcagtgagtggcttgtgtgtgcagttgtgttatttctcttattttcttgtcattaacctccatttatgtggaatggttttttttttttaaaatagaattgttttcagcttttatggatacactttgctataggttaatgtttttgagagagtatgttgtaaatatttggttatattaagatctttcctggcttcagaattttttttgagaagcatttatcgtaaattgattcatgtacaatttttaaattctgattcctgcacccagatttttactctatcttgtcaatcttcaatatttgtgtcttagcaaaatggtccaaatttttgatataactatgcattttatttgattattcactagtcttttttgttaaaagtagactaatgtatatttttgtttgtgtcttattttttgaattaaggttctcttgcccgacttgttcgatgctctgttaatttcttgctttttttcttttgttattgtctgttgattagg

SEQ ID NO: 10191 - DNA, 856 bp, Cannabis sativa
ccccccaaaaagataaaggtagttgagcaaggcccatatcagtgatgtgtttatattttttctcagccctaccctattgttgatgtgtgtgagggtatgtatgtctaaaggtaatgcctagatcataaagaattattttcaatggtctattctctccccctaatcagcttgaatggatttaattttggtgttcaactatctttcaacataggtattaaaatatttgaaaacattagttatttcagactttgcagtaaagggaaaaatctaagagaactttgtaaaatcattaatgaagcatatttagtacttgaaacctttagtagaaggataagagaagggtccccaaagatctgtgtgcactattttaaatggacaactggtgatattttgtgaagagtgaaataaaaattgatgaagttttccatattgacaagcatggcaaataggcatatcagtagaggcaattttcaaaaaattgagaattttattaagaacttttttattaaggtggcaaagtctattgttccacaaggttacaagttgagaatttcttaaaaaagaatatggaaaaacattgttattagaattattacaaatggcagtagaaactgtatgaacttggtacaaataattcttctttgtgacagtagctgagggacttgagtgagaagaagcaggggcctggtgaagaagttgaggggtgatttgataaagaccacctttaagagcaccttgaaggagagggatcctcgattgattgtccttgacaaaacacaaatcatgagtgaattcaacaatgacattattgtcacgagtaaatttggaaatgcttattaaattctttgttatggct

SEQ ID NO: 10192 - DNA, 798 bp, Cannabis sativa
tgtgtgaaaataatgcaatgacttattctaatttacaaatgacaatttttagagatttataaatatagtcgactttcatgataattaaattggcaaatgagatttaataacattctcataatttttttcccttgtaatattcaagtaattaacaagctcaactacactttttttgtgtggcaattgtactacacttttgaaatgaaattgtaaaattggtttgaaaaaatatcactttacaaatttatatttaaaaatactataattaacgtattttaatttggaataattacatgagccactattacatttttacatttagagaatgttttttttttttttttttatatttttacaattttttaaaaattaataggaaaacaatataaaattaataagaaaattacttaaaagtaatatgaaaataacactaaaataaaaaaaataacatttaattaacaaaaaattaacaaccaattaacaagattacaatataaaaaaatcgtattttttgtaaataaaattaaaaaaattgtaaaattatttaaaattttgtaaaattgtatttgtgtaatttttgttgttgttgttatgtttttgtgaaataatagcttttaatttttccttttaaggcccatttatttctggttatgattcaataacaatttaagatttagggtgcaccgaagcaatttgtatgtaatagttatttaaagtgtaataactaatagtgtttaaaaaaatttattttgtcgttaaattttgctaaggttcttagatattttaaataattattac

SEQ ID NO: 10193 - DNA, 654 bp, Cannabis sativa
ttaattaattttaatataactttataataagggttggacctaagctaagtcgaattaagttcgcgtttaagacccactcaatcaaaggtccaaaaaatatatatatattttaataaattatacatattttttaaataaagggttcaataatttttggcctacccaatcttagagctgtccttgttctaattaataattaatagtgataattttgcaaaaatttgtacttcctaatagtgctgtaaatatgtgtgtttttaacacgaaaaaaatatgaatttatacattacacgacacgaaaaaaatatacaatatgacaagcccaaaaaggatagtatgtaggcataaatagtccaacatcaaagtttaaatcattataatttaataataataattcgagtacttattaatagatcttcaaaatttaattattttttatatgatagtctataaaatattattaacagattatataaaaaaattgaagcaatataaaaaaaatatctatatagtttcgtaattttctagttaattgcatcgaatatggaaaagtagagtacaaattcgagctcatacaagaaaataatgagctgctcgagtaaagcacaacacaaatctaagcatgatacaaaaataccaaactaaagggttgtg

SEQ ID NO: 10194 - DNA, 554 bp, Cannabis sativa
gccaaataccacactatggacaaccccataaacgtgccagatactgtattcaagggatctacatcccttgaataccttcaattcaatgaagctttggagatagtgacagaataattaagatgcttgctagttgctactagtttcgtataagagaagatttggtaaaccttttagatcctcgcttatgtatcttacggtgaatggtatacagttttggttgtttctatagtattattctccaaccgagttttttttttttaaaaaaaaattacttcatattttaaaaaatatattaaatttaacacataaaaattgtattaaatttaacacaaaaatataatattatacaaaatttagtctaagttttacttttttatttactactaggtaattaattacttttttaatataataattataattttttaggttgttaatgtttgtgctaaaattattgataccatataaaattagaaaaattacagttaaatccgtatttgctagatatgtaattaaaaaagatgaagagtgtatttgtagatgctagtgtcaga

SEQ ID NO: 10195 - DNA, 500 bp, Cannabis sativa
ggtctaattacaatgaaagaacttgcagaatttgccatgttcgtacacttgcaggtgacaggatacatgagttggtcttgtggaaaatagtgattgtcaggtgtcaggtggtctcaacatgcagagttagtggttgcagagtacccttagtcgggacgtcagggcgtgtaggcgaaacgtctccactactcgtaccctctctcacaattatcctcttgttctagatcttataagtggcatggtcgtaccctgacgtgcacttgaccgtgtgtatgtttgtccttttaattcttcgatcaatagttttcttcccaacacttaggaaaatttcactaagtgttggttacatcacatgcctgagatgctctttaagcataagtggtcgagatgcttccccaaatgtgagaaggtcaccaaggagctctcctcttggtgtggcaaagatggtcatcaagaggctttcctcttggtgtggccaagatgcatgcttgtagggcttg

SEQ ID NO: 10196 - DNA, 503 bp, Cannabis sativa
gataattacataaaatatatttttacattatgtttaattttttttatatgggtattttacaataaaaagataacatttaagagtaaatagtagcataagaagtacctaaagttttatatttgtaagcgatatttttaacggcataagtattcaatgtttgtaatactgtaatttttctctaattttgttagtatagactctgatattgtctaaaatcgggcacatacaagatttaaatttttgattgtctagatagaaatatatagtatgagttatgccgcttacaaatataaaactttaagtacttatgcccttatttacctaaagtaataataaaaaaattatttataaattattaagtattttctgtatataaaattataaaaatagcaaaaatatttaaaatttaatacaatggtatttttctaatttttttgagttttttatgaaattattattttttttttacccaaatggtggaggaaggagtcgaccactatttc

SEQ ID NO: 10197 - DNA, 658 bp, Cannabis sativa
tttatttatttatttttgaaggagcattattttatttttcttaataaggtggaaatttgagaatttttaaaaatagttttttgtattttatttaattttagggcttaaattttttaattataaaaatattcttataaaattttaagattataaaaatatacttagttcaacaaaaaataaaaaaagacaacttaaaatcaaccctacgacaattataaatcaactgtaaatcaataaaaaaatatcatgacaactataaataaattatacaacaactaaaaaatagtttattatttttactaaagaaatatttttataaataaaaaaaaaataaagagtaaaaataaattttcggtgatgcatttttgtaaattttttttaaaaatttttcgttaaatttttcttggaggtaagaaaagaaaaattgctccaaacttttataaaaaaggaaagaaaaccaagaaagaaagagctaaatttggttggcatgcacacatgagaagggcgtgtatagtattcctcatccacctggcacctactgctctttctttggttggctcaaatacgtatggattttctttttatccattttctcttattaaagttcgaaattgggaacaaaccattccacattattactgattactacagttatgtt

SEQ ID NO: 10198 - DNA, 930 bp, Cannabis sativa
gtctacgaattatggagtgctaggaatgaggctttgtggaatcataatgtagctataaagattgttattgtacaaagttagaaagttgtgataaagtattagtaaagatgatctgaaataggttgaacgcttgtaatgttagaatttattcaagcttcgtttgtaagtctttacaagatgtaattgaagtttgttgagcgatacatttttttaagcaaaaaaaaaaaaaattaatacaatcataaattttaataaaatacaaaccatattattcaatattatatgagaaatagtatatattaatatattacattgtagtatttttgaacttagattgtattatatattgtggtaggacctaaagtcaaggtcggtgttcgagttaaggttaaggttggggtcggggtcgaggtcagggttagggctaataatctttattgaggccagggtttaaggttggggtcttcatccctggtctaggctcggggttgggattggggtcagggttatacttcggttccaaggtcgaatctaggtacaatacggtttggatcctaggttgggtcgagatcgagctaggagtcagttttggatagtgatctggatcccgggtccaaatttaggtattagagttctggtgaaggttggggttcgactctcgaacttaggtctgaggttgaggttaggatccaatttagagtttagatcataagtctaggtacaagttcgagtaatctatgttcttattagtagtttgtgttgtgatcagttctggtcgcggtcaaggtagctaggtttgggctccaaatcttggccgggtcagggaagtcgaggttggagtggggtggaggggtgtgattggatttagtatgacatatgatataaataaaaatatatattatatagttttttaattttcttaaaatcaat

SEQ ID NO: 10199 - DNA, 656 bp, Cannabis sativa
atttggagaagtttggctcttgaccttgtgttgaacaattgattgagagtgttctgaatttgagcagaggtttgacagtgaatcacgtatccaagcgtcacctcattcattgaattcattaaccaatgcattaagaattaattgaatctcaactattggacaaaaatagggttagaacatcacctgctaaaaaatgttgcggaggaggattgttagcgaggatgtagccgtcgggattgtaggctcgagtggctgcaagaactaacgatctccagaaattgtagttggatcgatccagccttagatacaatggaagcaagttgttgtttggtaaggtagcttagggaatttcttcattttgagcttgagcaattggatggactagttcattgcgtggatttggatcttgttggtcgttggacgccatagctttgatatcatatcaaggatcaagacagtgatcttggaaagaaggaagaagaaagaaaatgatgactgaaaaatattgctcaactaaaatgcatgagcgagctaaacttgtatttataacattgtttttacaactgaataataaaatatttgtgagttgtcaaagtcttgtttgttccaatcattataggcagtttgttcagtgcctaactgattttctaacaaac

SEQ ID NO: 10200 - DNA, 1236 bp, Cannabis sativa
atttaaacaaatccatacaagaactgattgcaccattttaactgaatcgagatcaaaggaccaaggtcgaagcaccaatggcttctatcaaagtgaatcactccagtttccaaaactaaatatctagtagcttcatctcaaaaactcaccagcgtaaaccgagaatgcattcgaacaatgctctcaactccaagattgccctaaattcgtttaataaatcctttgaaaacttgaaatggaggattagctcccaagaccacacatataactgaattcttccataaagaagctttaatctcaatttcatcctcatgaatctttgcaatgagttaatccccatattcaatcggttcagtaaattcaaatttaatggaggggtcctaacctggttagccttgaatttaatccatgcatccaccacataatattaaaaactagctttctcataattattagcccatttcttaaatctaacttgttgcagcgttgagattgacggtgcaaccagctctacaaccaagttttcatgggtatcatggaattcctcataacaacttgtatcttctaggttttcctggatcaaagggagttcctcatctaacagctcctctatctcgacaagcttcacttcgagagagacgatggaaaagacttagacccagacggcttaactttgataatttagatgggctttcatatcacacgcttcttcttcgccatggaagagggagagcgcgaaatacacgccctatatgagtttcttcactcaaaaaaaattagtagctaccacacttttataataataatagtaagataagatataaagattttatataaattattttaatttaataataataatttttttttaaaaaagagtaagtatatatgtaagtaggaccagcaaaataagtttaataagataacatgacttgaaacctacacgaaagttagtggaattgggtttgccttaaataagttcgggtcatggggctgactcgtctaacctatttaataaacgggtcacgttcgagttgacacgacttacacaaaataacatattaatgacttatttagagttattttagtactttaacatatcgtaaatgtgttcaacatgtcattaatatattaatggattgacatgtttaaataaaatttatttttaaacaggtcgtgatatgtcaatccatttataaatgagttgtgtttggattttatttttgacacgattat

SEQ ID NO: 10201 - DNA, 509 bp, Cannabis sativa
tcatatgttgtcacaagaaagtcaataaatataaacataagaacctgggaaaggcgcccagcatccaaagcttgacgaaatctggactgcaaggcctccgcaacagcatttacttccttctcaggcacagcaaagcacacagaatgctcactactagcctacataaacaaaatttacaagaacaataagttaatttttttcaaattgttgttaagtggattcaaaggtcacggtacctgagatatcatgataacattggcccccacatcctttacagcaccaaatatggcactagctgtaccaggaacaccagccatcccggttctggcaagagaccaaggtgtcaaaacgagaaagctaaattcaaaagtatacattatctgtaacagattataagcagtaaaccacagcatggaactcacccctcaacatttacaagagccaaattgtctattgttgcaaaccctttgacataggactccatgctctgaccatcttcatcaataaca

SEQ ID NO: 10202 - DNA, 623 bp, Cannabis sativa
gccaacaagttaatctccaaaaatcgtcactttatttctctcccaacacggatctcagggacaaaaatcttatctttgattacatgggtatccttatcaaagatacctttgagaaatatctaggtctcccctagcatattggttgctcagaaaaacatgtcttccactacctcaaagacaaaatctgtaagcatctcaataagtggaagcacaagactttttcgaaaggcggcaaggaaattttgcttaattttgttatccaagccatccccacttaaaacatggcttgttttcgtctcccttatgccacatgccattccttggaatctatcatggcaaatttctggtgggggtttagttccaataataacccctcaactcactagcaaaaatggcaaagctctgtcaatccaagagaaatggcggtctgggttttcgctcacttgttcactttaatcaagttatgcttgctaagcaagcttggcgaacccttcaacatccaaactctctagtggaaaaagtctatgctcccagataccacccctgatcttctttcttgaattgcaacctaggccactctccatcttttgcctggcgtagtgattactgttgggttttatgcc

SEQ ID NO: 10203 - DNA, 634 bp, Cannabis sativa
gcggagttaggctggcctcatccctccccctacaagatagggtactcttttgagctgaaatctgttttgaagcaaaatcgaatcgaatacttttactttaatcagataggctatcagtttttgggtgacaccaacagctcgactttgtcaaaagtgggaggatatgccagaacttacggcattgcttgggatatcttgtaggtccaccaccgcttctagagggtgccaacctacacaccctccatccccactctctggatgagggatttagctaattatatcctgtccctgtccattgagaggaggaatatattgaggttggcttacgaggccaacttttggaggtatggtcttgagtcttgcgttgaggggctaaaagcctgcctggaagcctggatgatgctccggtagtagaggaaacttgccttagaggtgggcatactcttcaaatggatgacgatatccccctctccaggattgtgaagaccatggagaggagagagaaggccctttgccaacgcttagctcgcggacgcaccgttagcaatgccactctatcgatttggcctagaagccaggattctactaggcctacccatcccccgtctacttctagaggcaagggcaatgttga

SEQ ID NO: 10204 - DNA, 532 bp, Cannabis sativa
ccaacgaggtggctacctcaacatgggatcccattgactttgcactttgtgactaattgccaacttgtttctaagttgctgaataagaatgagagcaaccttgttggttttggtgcaatgctacaatatttactttgtttctaataatctcaatgcttttaagtttatgttttgtaaaagctctgcgaattttattgctaataaactggttctctctctagatgatgagataagactttggtggccatgtttacatgagtttttataagcctttaacttgttttggaagtgcctaatgaaattttcattctttcaccaaaaaaaatggtgttagtactcgtattcattaccatttatggaataattatctatttgttccttataaattaattatatcacacagaccagtattatatatctagtaataatagaagaaaataatttaaaatttggtgcattttaaaagcaataaatattaataaacgactgttgacttttctgtattcataccccctttactaataataggcat

SEQ ID NO: 10205 - DNA, 1005 bp, Cannabis sativa
cctcttactcagtccactcaaacacctcaagctcttccctcctcccaacctttgccgaatccaccttctccacttcctatgccaaagcaaccttcccatcccatgatcacacgggccaaagccggtatccgtaaaccccgtgtgttcaccaccttctcaccatcacccatggcctttatgactgagttcaaacctgatagtgcactcactgcgattcaaaatccttgctggaaagctgctatggacacagaagtttatgctctacggaaaaataacacctgggttcttgtgcctagaaaaccaggtatgagtgtggttgataacagatggatttttcgggttaaactcaataaagatgggactgttcaacgcctcaaggctcggctcgttgctaaaggattccaacagcaacctggcatagacttctttgaaaccttcagcccaattgtcaagagtgccaccattcgaattatacttgctctcgctgccaccaataattgggacattcaacaagtcgacatcgacaatgcttttcttaatggcattctcaccgaagatgtgtacatggaacaaccttttggatatgtcagccccacgcatccctcttatgtgtgtaaattgcaaaaagctctctacggacttcgacaagctcctcgggcttggttcgatcgcctcaaacatgtactgctgtcacttggtttctgcaattctatatctgactcttcactgttttcttacaagagtgcaggtgctgaactttatctactcgtctatgtcgacgatatcttgttaactggcaacaacaaccacaaagttcaatccattatctctcagctacaacagtatttctctctaaaaactcttggatctgtcaactatttccttggcttcgaaatcactagaggggcgtatggcattcacctatcacaaggcaaatacactaccgatttactcaccaaaacacacatgttgacatcccatgacagcccaacacccatctcagtt

SEQ ID NO: 10206 - DNA, 594 bp, Cannabis sativa
agtttgtttggagcaataaaattcctattcataaaaaaaaaaaagaactgtaacatcagaccagcttccatcacgcaagcaactcgcatacaccgaccaaaggatgtgagttggacaattttagaagaaaggaaacatacctagcttctcattttacttattgtaaatatagaaaataagcagtttcctattttatttcttattagttttgggaaaataattagttacaattcttccttataaatagcggagtcatctcacgattgagggacacaaaagtcacacaaaaaacacaagagagaaatcttagaaaagagttatagattcaagagtgaaatactcaaaaattattgtaagagctttcgagggagagatcaaggctttcttgtttctctctgcacaagtcaatacaagtgaaaggggagtaggctattaccatcgttacggggccgaacttctataacaacttcggtgttctctttgctttattattatcattatcataacattgtttttttaattaattctaatcgctttaatttgactcactgtggttggctaaaagtgattaatattttttgtactttcattgag

SEQ ID NO: 10207 - DNA, 602 bp, Cannabis sativa
gagtgccctcgttagtacggttgggaaaccaataatagtggaccaacatactaaggattagacctgagttcaatttgttagagtcttggttgagatggacattacggactctcctctaagaacaattccatatcttagcgaatatggtcaattgatggaacaaagaattgactacgaatggtagccggtgaaatgaaaaaattgctcaggttatggacacataatggcagactgtaggaagttgggtcaaaaaagaatgatcatgataaaccagctggtaatcttgagaatgttgcaagagataagaaatcagaggaggctgaggagaagcctctgaagtcctctaaaaataagaatgaagttgttccacaaatgaaacaagattggcaaataccgaagaagatagtgaaccaggccaggaattttgctcacttaaaagctacctctggttttgaagatgcagggaaatctacatggaatagttttaatgcattacaaatctatgatggttgtaaggaaaaagatcagctatcaaaagaagcagggtgctcaggtattttgcttgatatctatggataagtacaacatagttagttggaatg

SEQ ID NO: 10208 - DNA, 566 bp, Cannabis sativa
aacacaagtgactaagcaaagaaaattaacaaggctcggtgtctaagtgaaagagaagggttctcagaaccaatgcaatgagatcagcacaacactccatattgagcaaaaatgaccaatccggattccagaaccatggactaaaagtgtactaattagacaatttttcatataacagtttaactctatagttgcttctcttttagaaaggagtcaatttggatcatgcaatttaagccaaggtccaaggcagaatgtaatgaaaatcttgttttcaaaaaacagacgttcctgaaatttggtaggccttagaagaaaaaaaaaagaaaaattgaggcctttataaaaaatatgtagtatcttcgaaaaccactaaaaaattatgtatattttcaaaaaaggaaaatgttttctttttgggccctaagtgcaggcctagcccaccttaactcaaacccgaccctaatcaagaaaactccttcaaaacatcaacaattgtttagtgttcaagttaatagctccttctgatatcaaaaacaatatcaatgacaaaaatatataatttt

SEQ ID NO: 10209 - DNA, 1302 bp, Cannabis sativa
tatatatatttatttattttaaaacaaacttctatatacaataaatgatattgtcattacaaataatatcattcaacacacccgatataatatttttaaacaacgatattgtgagcaacaaaattaaaacgatcgacaaggagtcttacaaaaccaaaaaataaattagaatatttttaacaatgagtaacatagttatgaatttcccacctcattaataattgtctataattaataaaaaaaaattagtcttccatttcaatttgtagaatttaaaaagtgtacattttaacttttcaattagtctaaattaagctatatcaaatttttagtttttaaaaacaatgaccgcttaaaattagcttattgaaaaaaaattctcttttgatagtcatgtaaaaattatttacatatattaatataatatattttctcaaaaaagaatatatttttatataaatatatatttattataagtaataatggagttttaattaataaagattaatgcaattagcaataaaatggatggaaattcaatagtcagtattagtatatatatacaataataatcatttaaatatgttaagaaattttaattaagagtgtgtacgtaattgccgtacaaccgttattacgttacccataattaaagataaataagtaattaataataattctaagtaaataaaaaaatgctgattatgtgctgggacatttgaaatatatgtaaattaataataataataaaaaagtaaattaattattttatttaactatactttttattttttttaaaaataataggtttgaatgaaattaatgtatattagaatatgataaatattattttggatattgtattttgtaaaagttattaattttattatttgttttgttaaatgataaattaaaatttgtattttttaaaattgtacaaaataataacatgcactgattttttgtcaaaacaaaaattaataataattcaatctagagttgttatgacaaaactgaatatattttctatagctgtttgtgttagaaattatcttcaaattagttatatttaaaaaaaaaaaatattgaaaattgagcttatatattattttgtgtcattttagaaaatacaaaatttaatttgccctttacaaaataaaaaatctaatcgttaacttttagaaaatacatgatctaaaatgatattaagctgtatatatataaatctatctgtatatgatattttccactaataattattactttatacatcaagcttaattatttttattttgtataaaa

SEQ ID NO: 10210 - DNA, 562 bp, Cannabis sativa
tatttaatatttgtaatgtaattcttatgacatagcttctccaatgttataaagattctattacataatgtaatcaccattacatgattagcaaatattataatagtaattttgatatagttaatctctattacatcaaactaaacgtgatattaattacatatgttgttaatcattttgtacttttttattagtagataatggtagagaaaattacatggttttacatttaaacaatatgacagacgatacattttatcttaaaagcgaatatgtattacactgttcatatttaaacgtaattaataaaaataaaatatatgattaacctataaatttcgacggagattatgtgccttaacacatctccacatacctagtatatatacaattttatgtgttcttcatatttttagtttggttctaagaatggttgagatttatggttagtgcttttattattattattattattattattttaactccaagaattaatttccattataaaatttatcaagaaattagtgagtcgtattaggatagaatatagatacctcaa

SEQ ID NO: 10211 - DNA, 801 bp, Cannabis sativa
tttttttttttttttttatttcgagtcggctgagtttttcgagtgaataggttttcaggtataaatgtgacgccctagtcactactatatattcgtgaacacaaattgctactacatcaattgattattttatattttttttttcatttcttcaataaattattattataatatttaatatagatgtagcattatataataagccgtcaagaacatagtatgaatgaacatgtttgaagaaatgttttgataaagtggtggtggaaaaggacggtttggacggtggagaattgaatgaaataaatataaaaattgaaaacgacatcataacaatttcttataagatttgcttttgttgttaacttgttatgttatggcttatagtatggtttgagtgatttaggtatgtaaatctcctatgacatgccaacccatttttcggtggtattgttaaaggcaaaggccccatcacactaaaataaaccttcatttaatttatttattttttatttattttttttatgatcatgtacattatagttatttaaaatattttacaaaatttagagttaatcaaaaaaatttaacacgccaaaaaatagagttcaaaaaatctattgcatgcgtgatatatatatatatattttattttatatacatgtgaaacatgtagtttgaacattaaattctatattgtaaattattttaaatttttcaaaattttaaaacatgtcttaaataaatataacgtataactataactatagcgtatatcattatgaaaaaatagactaaaaaatt

SEQ ID NO: 10212 - DNA, 529 bp, Cannabis sativa
aatgtacttaattttgttaaagaaagaataaattatttatcagagtcccactaaatttagagtttagggttggcaatttaggtgtggtcggggattattattattattattattattattggataaataatcacttcaaacaaaatatatattctctttaaaaaaaaaacacaatatttattcgattactaaaattttaaatcttagtaattattaaatgtaatataaacctagtgaattaaattctttttccttttttaaataatgcaatgccacatttgttactatttatttatttttttgctaaagcatttgttgctattttcaacgataaaataatttgttttttttttatcaattattcaaaatatatgtatatttaaagatatgtttgtaatttccaatttatttattctaatttcatcataaaataaatatgagtaagaatatctcaaattgaatgtggatgcaatagtaaatcttaaaaggaaaatacttaatgttagaacagtggcgaaagggttcacac

SEQ ID NO: 10213 - DNA, 549 bp, Cannabis sativa
tgttaattgaattgtttttgacgacaaggttttagcatcggtaattgcttatgatgattcactaatctgccgtactgtttgaaacttcttcacggacctggtgcattgttaaatttttaatatatgtttcaagggcatggtgataaagctctgagaactaaataacttatggattgtacatttaaaagtgtgtatcctctagctttttaagttaaccaatttgtattccagtccattaatagtagaaattctttaataagatttttagtccttattttcatatagctgcaatttcgttatatgacatagattgtaccttttaagtgtgtatcctccagctttttaagttaataaatttgtattccagtccattaatagttgaaattcttcaatatgattttttagtccttattttcatatagctgcaattttgttatatgatatgctccgggtatcatgtgtatgatgtctattgacttacaagatgcgaacaaaattttcttcaagtttatcatgtatgttgtaaccctcaaccttttttttttggtg

SEQ ID NO: 10214 - DNA, 1246 bp, Cannabis sativa
ttattttatatgtgtgggcccaatcaatgtgctaatttcctttttaaaaataaaataaataaatcaggtcaacatttaatttttttagtattcgattttgtttcggcaaaataaataaataaaaaaaactacctcaaaaataaataaataaataaacttgcttttgaaaggtgggttttttaatcatttgccacatactaataattaagttttttttttttaagaaaaaaaaataattaacttttttaagaaattaaattttctaggctaaacacaaagttgttaactaagtttgaaattgaaacgaagaaatttcgatttagttgtcagaaaggctatcattgatatatattaattttttttaaataaatatagtgcatgacggttctaaaaactggagagtaacatgcaactcgtgatttttttttaataaccttgtaactcatgaatttattctcctgaaaataaatgaatcgttaatttaaatttgggctcctttttttatgtaactgattctttgaaatatttaaatttgaaattttgaaatgaaaatatatatatatatatataatttcttggtaaaaggccctacaaaagctataaaactcatcattagaaaaaataattacttgatttttttaattaaagttttttttttttggaaagaataaaaagcatatttcgctatttgatttggaaggtcaaatatatatatgcgacatttattcgtaatctttttatttatgactaaataaaaaccatttgctattttatttgatattttttactgaataaaaggagatcttaaaaaatttcacatttgtaaaaacttacataaaaacaataaaataacattaaacctctaagatatattttaaacacaattcataaagaagactttttttttcaaatgtttaatctatcataataaatttacatgcaattgaatatctttgtaaaatgcgtgattgaattttttaaagcctaaattcgttatgtttcattggtgctagtaaagtttatttactaaaaaacatacaaaaccatataaacaaaaatgaaaatactgcctccttcattaaataaaaataaatatagataatatatatcgtgaatcaaataaatggatacatataaatatcgtaataatataaatatatatatataaaaaaaaaaatcaattgtaataaatctataaacatcaactaataaatccagtgaactctctacatgacgaaaactgagg

SEQ ID NO: 10215 - DNA, 574 bp, Cannabis sativa
cctgctctggaacgttctagggtcctctttctttggttttcatccagtttgccaccgtcgtccgaccttcctccttctccacctctctcttctctttcctcatttaatattttcttcagttttcctccttcatcattgccatcatttacttccgcctcattttctccttttccaatacctcatttaatgtcctctcagaaaatctttggctatctctttcctaatattttctattaatgtcactaatttacgatctgccccttaatcattgttcttttttaattccagcctccattttcccttttacgagacatcatttaatgcttcatcagaaaacatttggcttttcttcttcctctcctcatttcatacatttattgactgtcactttcctcaggtggaggcgtatcattgccctactgttgggcaggcgaggatctaggcctccagcacattcaatggcgatcgcatcccctcatctcccagtctcttcctactcaaggtattatttctccttactcatctatttaaggttctgcgcctgtctttctgcttactcttttcctgtttcaac

SEQ ID NO: 10216 - DNA, 580 bp, Cannabis sativa
aataagaaaataccgttcggcccggtaatatcccaccttctgggttatcccctgaaaacactggtagctccattcgcggaggtctgaaatcggtagctgggggttggccatggtagtatgggttgggatgtggtggtggttggggcggaaaggtattttgaggtggcggagaaggagggaatcgtacctctggtttgaacggtgccgaggaagaagacccatcttcaccaaccgtggtgtgcagtcgatcgttgccattggcgactccttcaacctgcatctttcccgtggctaggtatcgagtccattgggccattaacaacttcggcaacctatgtatctcagatctcaaattctggatttccatcggaaatcgctcctgttgtgcacgagcttgcgcaatctccttacccagctggttctgaatttcggtgagggccttgttgaattcgaagctcattgcttccattttctcgtcgaactgttccattccgggatccttctttggtcccattagtgctctgataccaaagttgataggaatttccaatcaaagtagttaccacagcagaataatgaa

SEQ ID NO: 10217 - DNA, 1260 bp, Cannabis sativa
agaggaaaatggtagagcaagaaaaagttgcacacaaaaacaagaaagcctcttacagatgcaaaacatggtagcaaaagggaacctcaacactaaaaacccaatagtgggaaagtttaaccatctcaggattgaaccctataatccaacaaatgacaagggaatgacaaaatggctgagccccaaaagaagagctattagctatggccagaggaaaatgctcctagggacaacaaagatacacaaaccaactattgtggaaagaaagggtcacccaagccctagggctaggccttcaaatttattcgtagagcagagtcaaggtcacctgatgaaaaagcaacagtgacttgatgtaaaaacaagggtcttgctaaagggatagaagataaagtctgaggttcaggccaagctgcatctcacagataacgatgtttaccctcagttatctcttgtaaaaatcacttatggcgactagcaacttcatccagattggtttttattgaatggtccctaattttggcatcatttatctcatgtttggattgaggtttcttgattttgggtttgaattgaagggctaattccttaggacattctatttctagaaaatctggagttgaattttcaaaattagactgggacatttttacaaaaaagaataattctaatttttagaagaaatttattcaaactagaagcctatgaatataataaattcctacgttttttctcttttaaacactaaaaattatccaaaaactaaataggagttacttaaaccaaacaaagtaagcaatgatgcaattaattataaaaataagagtaccaactggaaaaaagaaataccaaaaggaaaagtataaaccacttactgctcaaatgtggatttttgcacaagggagagttctgaaactgggattgagatgagtgaatcagcgtactctatgaactcctgaagttgaggattaaatctgaagaaactcggagaaaataagtcaatgatagagaaggaatgcaaggtactaaaaagttgagaatgatttttacaaaaaagctcgaagatttgaaaggcataaaatggtgaagtggttgttttctcttgagttttatactttaaggatgatcatcgttagatcgaaagaataaagatctaacagatgggaacaaaagagaattagaaaagatgggaatttagtgctaatgatgtgcctcgaaatcatgaatcgctaaaactgaaagcatgcaattttttaaatt

SEQ ID NO: 10218 - DNA, 535 bp, Cannabis sativa
ttgtacaacaatttatagaataggtccgacatgacccgcaaatccagtaattttgtaccgtgctcggattcatgtagtgcttcggaccaatccatttttcttaaataaattaacttatttttttatacgggttcaaattcatgttctatggttttacatttttattacaaatgatgagctatatattaaaatatatgtgtacttttataattttagatacttttatgtctttttttaataatagttacacaccattatataaaaaatatttatatatttgagcttgtcatatcgtatcatgtctaagtttatttttttcatattttttcgtatcatgtctaagcattttttttttcctatcaagtcgtgtctctcaaattcatattaattttatgttgggtcacaaaaatcgatccatatttatgatttgacttaggcaaaagagaaaagttatgtcactgtcagtgttttgagtaaaagattccctcactaaagtgggatttgacttagaaaatgacaaaagtgaagtaatata

SEQ ID NO: 10219 - DNA, 617 bp, Cannabis sativa
caatcacagttagggtcatgtggcgaccttagaggcatatataacggtggccttagaggcatgtgtagtttctattagaaactctagataaggctagataataactacattatggttaattatacaacttaggacttactatgtgtcatagtaattgtacctacgacgatacttggttgttggtcgaccttgtaccctttgtttcttctagaagatgtcattgagtgtcattgacttgaataaatttgtagctttgtcaggttgctcacctccccttatttcttccatgaagacaatgtcagctgtttgtttggggaggtgacaactgtgcaggtctctttgatttccttgtagttatgattgatacgaaatagagaagcagtagggcgaacctgcatgaccctcacatagccaaaatagttttacggggtcacaccatggttgtagaaagggttggcttgccttgtgccaacattagtcccaaaactggcctgagaatgaaagtcccgaggctgagtacaatcgtgaagaagttgttcctgttaggaggaagagatgcaagccttgcgccatcctgtccaattgtcccttatgtcactatgatagtgatggcaatc

SEQ ID NO: 10220 - DNA, 560 bp, Cannabis sativa
ttagaatgaaatttattttctttccatcattatttaaattttaatatttatcactttacatacacataattagcctaatatgtaattatgtagtttgttatcaaaatcataaggtagcatatttttttaactatttatacatatcataaaacatatttaatctgctttaaaatatgtacaaaacaccgcccataattatgtataaatttatacgttaaattgtataaaatactaaataattagtcaaaaatagcaaaatatctcaacatagtctctaattaattttagacaatataattacattctagcatcatattgacagtttccaaacaatgaacactacttttactatttattttaattaaaacccaattaattagttagttgattccaaataatttgaataaatacctacaatgatcaataagttataaatcctgttccatatcataccattcacggtaaatgatattacaaaaaatatgttttactattttaacatcacttaagtattttccataattaatttaagcaataactaaataaattaatgaaaaata

SEQ ID NO: 10221 - DNA, 682 bp, Cannabis sativa
attaaaaaaaaaaaaaggagaaaaatgagtatgatattgcatcaatattagtgccaagttttaggatcaatattagtttttagtttaacatccaaacatttgatctcaaatgggtagctccctttcaagcattcttccacatcattaagcattctgttcaagcaatactattgaagatgtttttagatgcctaacacttttatgaggtagcaggtctggtcatgaactaagataaactaggcccgtgcctaaagtccacccaaacccgaagcctaaaatttttatataatttacttttttacataagaaaaaaaataatatttttataaaattttataaaaagaggcccaattattaatactcacactttactttagatataacacatacaaaaatatttttgggcgtattattactcatgaccggccctgtataaataattgggataagttgatgaatatctcttttttgtatctattaaccaaaaataccctcatattatatttcactactacaaaattgagctttagatgcagtttttaagggctttcagcatcggttttagcgaaattcgctaccgacactgttccaggtgatgctaaaaggttaaaaacaatcgacgccataggactcctacttaagtctaccactaaaatacacccacttttgtaagtgagttgcc

SEQ ID NO: 10222 - DNA, 1026 bp, Cannabis sativa
aaccgatgataccacaacttatgccgaaatggttgacaagggtctcgagcagaaggtgcagtaaaaattctacaagagactcgagaggccccgagtgctggtacctctctatttctagtcctagtaaggagattggtgattctaccattgagcgaaagaaaagaattttttcgactactggtagttcaagtcaaagcaagaggtgtcatggaaatcagagtaaagggggacgtcagacttactcctatcctgattgttcgcgttgcaagaagcatcatcctggggagtgtaatcgaagagcttgttatcaatgtgggctagtcgagcacctcaagaaagattgtcctcagctgaagaaagatgaacctaagaaagaagccaagcctactccagcacgggtatttgctatcacctaaggtgacactgcagccagtccttcagtagttacatgtcagcttcttatcaacaacttcaattatattattttgtttgactatggggctacacacttacatgtagcatcgagggtacttagttagttgggtaggcctagtgatatctttgagatagggattggaaccctgctcctaatggagagttgattatctccagaaaatggtttagctccgtgctaatcagaattgccaacaaagaactaagtgctgacttagtggacttacccttggtagagtttgacattatactcgaaatggattttctgtctaaatactcaaccagtatcgattacaaacaaaaaatggtgacttttcaactagaggaagaggaaccatttatttatgtcgggacagttcaaggttctcgtgtcccaaaaattacagcgttgaaggctagagatttactatgcagtggatgtgtaggatttctagcggttgtgattgattctcataggcccgagtacttggacctgaggaggtcagagtggttaaggaattcttagatgtgtttcccaaggagttaccaggattaccaccacagcagaggatagactttattattgattttgta

SEQ ID NO: 10223 - DNA, 819 bp, Cannabis sativa
ggggaacctgggaatttcacagattatgagaatgaatggaagttgtaccattgttaaattcaatgatgttacaactcgggatcttaaactagaggaaggagtggtacaatttgatcgccaacccgtcatagtttgtccttggtcaactgatctcactgctcttcaattgatcaagtctgttccactttggattaggcttcatgacctaggattgcactattggggaaacacgagtttgagtgctattgttagcacaatcgggactcttataatggttgataagatcacgaaggagagatcaatgattaaatttgcgagggtcttggttgaaatggagattacggataaaccgacgagagtcactcacttctttaatgagtatgggcaacttattgaacaaagtatcgaatatgaatggctgcccaccacgtgtaaagtttgtcaatgatatgggtatgccatggcagattgtaggaaagctaaaaataactagaaaataaggttgaaaaagaaggcgcaaaagatgttaaaccagatgcagggaaggaggaaaaatagggtactggaggtgagaagtcagtcgagaatttcaatgattctaataaacatgataagcctacaatgaagagaattgattacaataaaggagaggtggaaaaaggaaaaaaatggtcagattaaagaatctgctggaacttggcaaactcctagaagagttgctcataacaggagtatgggaaacccaataacagcacaaactcaacatttgaactcatttgaggttctacatactcaacagggggtggtcaaagtgaagaa

SEQ ID NO: 10224 - DNA, 985 bp, Cannabis sativa
cggagtttgggatttggggtcgggttaaggttcgggtttgtgggttgggatcccaagttcgagggcctgggtttgggtctggatttcgggttctaactttacggttgagtctaggttcgggaacgaagttcgtgactagggtttgggttaaggttcgggattgggatcagggctaggggttagggttgggttgggatgtggggtcgtgggttagggtcctgagtctgggtgcgagttcggggtcaagtctggattttgggttccaactctacggtagtttagattcgagggtcggggtcgaagttcgtggctagggtttgggtcagcatccgagattgggatcatggccaggggttagggctgggttgggatccggggcctggtcaagatctaggtctgagtcaggattcaagtctaagtcgagactcgattctagggatggaaattaggcggggaatgctctctccatccccgtcccctttaactattataatacccatccctgcctccatccccacatattcccatcagaagcggggcgggaaatcttcggtagggcaggtaatactcacggaaacccatttattaaaaaaaatgaaattataaataaaaaaagtaaattgtataaaatttaaaatataatatatgttaataatttaaaatagacaatattatttaaaataaaataaaataaaaatatttaaaaatttactaataataaactacaaaatacatactcataatgttttaagaaaaacacataaatataatatatcataaggaataatattataaaataaataaattggcaaaggggtattatctccatccctgcccgtttaatattcggggataaaaagttatccccttccctgcctcattctctgtttacgcgtagcacagaccctttattcattggtgtaatttttattctaactctgtaggaatattcaaaaaaaattacaaattgcttaatcaaaataaa

SEQ ID NO: 10225 - DNA, 611 bp, Cannabis sativa
acccacaagtactttgtttctcatccttgctttaatcaaaggttagagattaattttctaaacaataattatagagcatttttattaggttattaacggtggaagcaacgtgccatttaatttcacaaaattttcactgcctcacttacatgacttggccctacaccctgacaagcactttctctaactgctcatatcgagcttgtcatgaggcaccaatagtgtccaataccactcaccataccaatggttaatagttttgatttgagcattattataaagcaccaatggtgcttgctcgaggtggtgtcttacgatttgttatcgatattcagtaaaagattacattaaatcatgtgaaaccagatacttaattgcaccaaaaacgatatgacactttaggtagtgttaaacagcgctagtgccttttagaatttctcaataaaatagtagtatgacacctcacgagtgtgttctttagcattttattataattataacctaaactaataagttaagtgtattttttttttccaacaaaatgtgatgaattgattagtttttgatttggtaacaaaaatattacaacaaaggtgaaagaggtgaatacc

SEQ ID NO: 10226 - DNA, 721 bp, Cannabis sativa
tgcattatgcattcacgaacttatgcagcctcactattcttgattgccttgtgtatcttcatctgatttcgtaggaccgggttagaccccatacgtttttgtaaaacccaatctttgaaccatttagcaagcgacgtaaagaaggttgatttttcttgagcatcattttttagccaggttccatacatggggtagaaattacccttctcatctttaacgactatgggggccttgaaacaaacgctctgatcatgggtgagtaaaccgtacttgacatagagtttggggagtttcataaatctttcaatgtctgcctacagagaaaaaagcttgagaatattggtttgttaaggtcaataatggccctgaatctcagtgtactcataccaactgcgtcctcaatacccaggggaagttcaaagattggggaggctttggaagctaattatttgagattggagaggtttcagtaaataggtggtatgctttcaacgttgacccaaatgggggttttgtcaaaacgaacttcagccggagttagccaagcgggccagggcatgatgactaacaaagcaccgcagacaaaccagggacgacatgccaggacattcatggcatcatctctgttagcgaaagtgaactagatcagaccgccatcaatctccttccacttacagcctctaatggcattccacgacaatttaagagatccctgaatggc

SEQ ID NO: 10227 - DNA, 1077 bp, Cannabis sativa
taggggttcaatccatcatgtgacatagatagatcttttaaaacaattcaataacgtcccaccacgcatcttaaatttcaaaaagttaaatttcaaaaagtattgaaattttaagacatgctattatcaacttgcaatgaactgctttttttctaatagagaattcccttaatcagagcagagtgttgcaagaaaatccaccttttttctaatgttaagtagttgaaaaactattcatctcttacacgactttgtgagttcggagtttaactgatttttgctgttgcattggtgagtctaccaattttttagagtttatgtctagaatggaccagactgagaaagaagggccaaaggtggcagaagagataacgagtattatggatgaacctcatgtggttgaagacgtggaaaccgtaggggggaggacgtgatgaatactacagaggaggcgatggatccaggggaaaacaccagagaagaaggagacttagatgacatgaggcaacagttctttgactccatgactctcgagttagaggcagatatggagctgagtgcagaagttacaaagaaagctgtgttggcaaagacttttggcagaagaagtgtggcaaggggcagagttaaagaaatactttcaaagatttggaagctgaatggcaactggaagatgaagacaatgaaaccaggcttatggggcatcttttttgataatgaggatgacaaaaaacaggtgttgaaaaaaagaccctggttagtaaatggtgtattacttaacattgttgagtggcctcaggatggtcattgggaaggaactgatatgaacaaagcacggtattgggtggaggctcatggcctccctactccatacctcacttgggaaaataccgacatcatagctaggaaagttggtgattatattgattttgatagagccccaagggaagttactgctcgacggggattcctaaaattccaagtggacattctccttagccagaggttggtggctgggttttatttgaacatctctagagataggaaggaatgggtacagtttaaataccacaaact

SEQ ID NO: 10228 - DNA, 757 bp, Cannabis sativa
tttttttttttttttgaataaaacctgcaatagttaggatgttaaagcttttattagtttgagttcaattattagaaggaaaatgttttttttttctaagagaaaaatataaaatctaaagattagaaaacaaatactaattgttagaattagaactcttatcatagtgttgctggcccaatttctatgtatttagataaaacataaataaattatttcaataaatcatttattaaatgcttttaaaaacaaaaaaccaggtatcatatttcttttcttttctttttttttttttttgaaatgaggtatcatatttctaaaatgttatattttagtttacatagattgaaatgaaataggcgcgtactattccactcgacattttgcttgagaccaattaaattaaaacaaatacattgaaatagtattgaatttttcatgtggtttctgggacatcaaattaggcaataaaagcctccacatgcaaagtttcagagttagatcttcggtggggtccgcaccccacaccacaccactctaataagtctctaacctctttatttcagcgaaaagaaaggtctctaacctctttaattttaatttatttgtagtcaaatctatcttgttacataaataaaatttttaacacaatttttttttttttgaacaacacaataaaaaatagggtcaaaatatttttttggaaaaagttttactcctaaattattatcccttatataaaacataaacataaaaa

SEQ ID NO: 10229 - DNA, 526 bp, Cannabis sativa
gtagtgtaggcaccaacctaatctagctagcttctttgttaataaaaatttggtttaattatacatatgaactaataaaaagataagagtctctttctaaaaaaatgagattaagacctaaactttctaaagtaaattttagtcaaaaatgaatgtttattggaccatattgaatatttttgggcatatccaaattcgattcaattatatattatgttaaccctaaagattgagacttgtgatttttgaggcttgtccattaatcacatgtcaaagagaatgaaggagtacttctcccttgaagaccgagcactcgcgagaaaatcaactgcatggcctcttaagggaaatgaaagagagtgtggtgacttggggatagatggagagagtgtgggtgggacatggtgagggtgtgggtgagacatggggaaagatggggagagtgaggatgagatggggagagtgtgggtgagttgaggagatgggaaagaagagaatggagagctggggagatgggaaataatag

SEQ ID NO: 10230 - DNA, 739 bp, Cannabis sativa
ggaaggtgcctgacattattgtccttgaaattgcaaaggcacttgtaattcaaaatgtcacgtctcaatgcattacactcgatcttaacaatattcaactcgactctgattgctaaagtttagttcataaacttaataatttgttatctttagatttttttatgggtttaattcttgacaatattagaattttatgttctcattttaatattgtgagttttagtcattgttttagattattagctgattatgtaactaagtttgctttaatagttattgcaagtacagtttggtggcctagttacttatttttgtattcgaaactttattttggttgatgctattttttaatgaattctcctagctttcgacccctttgagctcgttgctcttgggtggtattttttgagactattttctaaaaaaaaataattctttctgaattattgaaattgttaaattcaaacttttgtttaattttattaatgaaagactaacgtagataaaagttaagagagtataattgagtacatgttaaaattcaaaagtatgttgaaattcaaaaatataatttaatagatattaaagttcgaaagacaccatttaattcatggataattgttgcgttaataaaattaaactgaattaaataaaaatctttaaatttaataatttgaatgaagataaattttgaagaaattaaaatatttggaaacataatttaatttaattttttttt

SEQ ID NO: 10231 - DNA, 695 bp, Cannabis sativa
gaaaggatgatccccagtaccgaggacgcgatcaaggagtctgctactaagaagttcaaggagcatagcccatgaaaacatgttattttgcaatttttttagcactatacaccactcaatatttttgccataactcactaaaattttattgaaataatgcagttcaagtggcattggaaagctcttttcatgaattatctaagcttgtataatgtccttcccatgattttgaattttcagtcccaaaaatgggtttgcgagatcggctatgaatcctaaattttttttttgcaaatttcatgcaaattttctattttattgtaatttaattggacctcattccttgtaaaaggacagatcccctagctcattattcacactctccattctctctaaaaggtcagaatttctctctccacacgtgtttctctctcttaaaattgtgaggttaagctctccttattagtcattttttctctagttctctcctggaaatttgcttttctaataataaaagctcgaaatagatatagctctattacaattgcgatatggggagttaactaatacaatttagtggtgttgtcttttatttttgttatttttcagtgggccactatcacttatcaagcgatatggagctgaccgcttttcaacatcaacttttttgtgtttttattgagagcataactcga

SEQ ID NO: 10232 - DNA, 696 bp, Cannabis sativa
aataagagaatcacccttcaattattgtactatattagtaattccatttaaggaaattattattcatcatagtcttcaaactctcacccctaatcttggttttcaaaagatccaaaactaatcttattcaagcggcaaagattcaagatagaacattgcttattgactttattcatacccctaacattccaataaagaaggttgcaccactccatcttgattatttgtagaagtatcaaaacctgcctcaacagttggctcttaaagtgcttcataagtgtttttaatggaagttgccacccctgagcccttatattttttatttctaattttcgttggagtaatccactcaccactagcagattcatggatattcccaacctattttccattttttagcccatggtaacacagttatagccttagagagattggctaaattccagtgttagaaccaacaaactgaataatctcaacctctttatttaatctcagcatctgaagcagtctcctaagttttttgaggattactctctacaatctttcgtttcacctgatatgtttttagctttttaacccaaataagccttttgtccttaccacaattactcacattatgttccaaaaatatcacacgaaccacatttagttggtagccatttgtattctactaattattgttccatgagttgattt

SEQ ID NO: 10233 - DNA, 649 bp, Cannabis sativa
ctttcggaaatcatattttacgtatagaggctccaccacgttacgtagccccaaagctaccagagtataacaggacatgggacccctcagaatatgtatgccaattcgagcagaatatgataaccgctctacgctggaagacttggaagcaatcaaatgcaaaaacttcacccagggattaagaggtcccgctctacgctggttccacaacttgccgtccggaacagtaaactcgtatcaggacctaatcctaaggttcaagacaaacttcgcaataagtgtccggactgcgaaagtagatacggatctgatgttaatacaccagcaatttgatgaacctttggagagattcattaacaagttcagtgaagaatatgtcagtatcccgaagtgtactgatttagtggcgacgaaagcgctaatgcaaggattgctgcatggcacggagttgaaaaaggcgataatagtggaacccggcctgtccctaacaagggccctaaccatggcgcgggggtacgtggctttggaggcagaagagaaacgacacgctgaagaggtgtcttgggaaacgtcggcatgggagatacgttcctattcgaatcaaaaaaccgaacgccagatgtacgacctcacaataggaccgagaacc

SEQ ID NO: 10234 - DNA, 603 bp, Cannabis sativa
ctcaatgccaagaattcttttggctgcacctaggtctttcatctcaaactcacaatagagttgttgttttaattagtttatggaagatttgtccttgccaactatgagtatgtcatcaacatacaataaaaatttgattgaggtagtaagcacatggatcatgtttactcttcataaaactagtttccgcatgaattcatcaaactttaaattctattacctaagtgtttgctttaagccatataatgacttgttgagacattcctgattggaatctccattgtcatatccctttggttgtttcatacaagctttctcttctaaatcactatgtagacacgtagttctaacatccatttgctccacctcaaggtcaaatgctataacctttgacataataagcgtgatagatgtttacttaacaaaaggtgagaatatttcattaaaatctaccccttcttattgtgagaacccctttgaaactactgtagctttgaatcttgttccttctattcctggaatgccatccttctgcctgaaaaatccatttacaacctatcactctctggtttgtaggcttaggaaccactatccaggtcttat

SEQ ID NO: 10235 - DNA, 667 bp, Cannabis sativa
tctttctttttctcttttcttttgctaaaatcgacactcatttctattaaaattaagccaaagtgctatttgtcatagaattattttaaatatgatttttctttgtttgagaagttttaaatatgatttttagccggtcatatttactcccaaattatcactaggataaaataaggttacaaaatttgtgcatataaatattatctcctattattttttttaaaagaaaaaattattcctaaaatttgaaagataaattatttgttatgctatattttctttcttttttgtctcaacatacggtgagaaatttggtatattatcaacacacttcaggtttagtggcggaattttttcactttataacgaaacatcacaaagtgttccaataaatatatatacacatatataggattatttgtcctctcacaaggaagtagttgagaaattgcaaatagatttaaaaattattatcatattttttgctataacgtaatggattcatggtagcatataaaaaaatgataacataattttaatatcttatcttacacaattgtatttgtaggtgattttgcaaatagtcccatatgttcatgcggagccgggatttcacccgttcctcggagatcaaaaatacaaacaactgacttaatttacataaaac

SEQ ID NO: 10236 - DNA, 533 bp, Cannabis sativa
tgttacttgcatactatgagaaaacatcaggaaagagtattagagttagtcccccattgctaatgtgtagaaataaattgtgacgtataagataaatgggctactcctcctattgctaattggttttgaaatagaaccaatccatcttattctcaaattcgctaatgtgaatagcagtgttttcaagttacttcgcaagttgtattggtcatagcttcaatgaatattgagaaacaataggctatttttttgacttccaagagacaagagaagagcctaaaaaaatacaataaccaaaaatggaacgccttgtatatatcctggcagccaccctagtctgtgtctgagaagaaagacacgagaacattctgaggggaaaggatggtttctgcataagcagagagttttgtagttgttttggatgagaaaaaaataccttgacccggagtagctttaagatattgtagaaccctttgtgtagcatgtaaatggggtacttggggagaagttagaaattgactcaacctattgac

SEQ ID NO: 10237 - DNA, 1031 bp, Cannabis sativa
tcttgtgggcaaactattgtctgaccgtcctactgattttgattcactaaggaatgtttggcatcgctatggcatccagggagaggaatgtacgtcaaggagttggaaacaaatcgatatttgtttcaattctttcatgaggtagacatcagtagagttcttgaaggtactccatggacatttaacagaggtccgctaattgttgaaagactacaggaaaaggaaaatcctagaaacaagttattgaatactatggaaatatgggtccaagtttacaatcttgaagtgggatatcgatccgatcgagccttacaagctgtggtagcgtatattggaacgtatgtttcctcatgcccgaaaatttttgcgggtatctggagtgattattttagagtccgtgtcttgatcaatgtggagaaacctctcaagcggagaatgcgaatatacaagaacaaggtggagtggttctgggctaattttaaatatgagagggtgcctactttttgtttcaattatggtatcattggccattccgaaatattttgccatagattgtttgaggagtccttggaaactattgctaaaccatacggtttattcatgaaagcgcctaatagacgacaatcaagacaaatcagagctcgttggctaagagacaatatggggcaacctttggaggctgatgccggccaattctcaccgggaaaacagagtgcgggggtggttgattcaaactgtgattgtagggatgtaattatggttgatggcgtggctagtggagagaattctgggaagattagggaggcaggtttgcaatcggctgatggcaaaaataatggagaaaatcagggaagaatagatgttgatttgcaggagggaaataatgaagatattcaaaaagatggtcttcttattgctgatttgaaaagaaggcgcataaatgaagagaggggattggatcaattaaatggtgaagatgggggcccaaaccgtattagtgaggaggagttcagaggcccacttctaagtgg

SEQ ID NO: 10238 - DNA, 595 bp, Cannabis sativa
tgggtgtattttgcaggaagttttagatgaatttaccaacacatcagggacagaatttgatctgcccgaaaactttgatgaccagatatcagtgtttaacagtctaacgtcaaatattggagactaacgataacaatacaggatttgggtaatagaactagctctaaatttttataaaggtgaagaaggtacgtacaggttgggatatatatataggtactattactactcacttcactaaagccaatagtagtatggtaactttgtgaatttaatgtatttgtgaaatctggaagaagaagcaccacacatggtttttatgacccagaacctaggtgtgcactactgatcactactcttactaacagtacacttgattatcagagaatgaatggtttatgtttatagacacaggttccttcatctgtattatagtgaagaagaaattttcattctatacatagtgtgattaagtttctggattatgatctcttccctcttaatattattcatgcttgttgtatttttcttatataaagttttctatgaaaagcattacatttattacattaatttcaagtattaaattttttat

SEQ ID NO: 10239 - DNA, 585 bp, Cannabis sativa
actatgttttctaagctcattttttcattatttttaataataaagtattattaaaataaataaataccctctaaagaaaaatagaggaaacccatccaaattccaaactttctaattcactgtgtggtacagtggtagaaaattttttactagcacccttttttgtttgggtaaggatttaaatttcatcacaatatttattgtgagagaattatgcttggtcctttcgaaagctagcttgttgtggagtgtcatctttagtgcaactccaatgcagttgctaatgagaggtagttgtcagaaaatgagattaaatgtcaaaaaaaatatattaatttttcaaccttaaatataaggtgcataactgttgttgaacacagctcactttttttttttttcaattgattagtttattaatattctaattaaaaaataattaaatacaaccactaagtagctagtattggagcgggccttaatagaatgggaaccatcatgatatatatgcatactaatgacctaattaaagtaagatgtggtataagacccttaacacataattcttataattgtcaaagctaatta

SEQ ID NO: 10240 - DNA, 783 bp, Cannabis sativa
ttgcattaactcatcgaatccatagacaatcatgcttggttgaaataactcaaatatacttggccattaacgcaataatctatttttttcctatctctaaaattcaatacgccatgatcttttggaagacaaacttgatcagaagtcaagtgaggtttacttcggttcccttttctctcccaaagaaagttacaacacattctatctatttcagcgataatattttgaggtaagataaagatactcatccaaaagttacaaatctccaaaagcccataatgaattaactgggctctctctacaaacgacaaatactaactggtccaaccatggagattcttttgtttctcttctattatgtatccacaatccgagtattttcactttgtaggacgaaagttaacccctaaatacattaaagagaaaaaggcctcatgcatattagaaatattaagcagtcttattttacaatcagaatcaattcctccaaaaatatgtagatgatttaaataagttgactcaaatccataatatcacagaagttaaattatataaatttttattacaattatttatgacataaatttaagcaactagaattacaaatgaaatgaaaacgaggagaaatagtaatcagcataccctcgcctagttaattataaaattgagggtttttcttaatttgtttttttttttcctttgtgtaaattttctttttactaatttatatgaaaaacaaaaatcgacacggatagagcttttatagggttctctagcggacac

SEQ ID NO: 10241 - DNA, 652 bp, Cannabis sativa
aaaaaaaaaaactacaaataaaaagatgaacatggagagacaataatgagaagtaattggaagtagaataatgaaatagtgtacataatgaatgatatatttgattattaaattaaattacaaggaaaaaaaaaaaaagaaatactgtcataaatgtgacaaccaaacatcacatcaaacttttactatttttttatttttttttaaaaaaattatagatattaaatagaatcctattaaatatgagacaagtgttaaagtgaggtattataagttttatattgcttacaaaaagattgtacataaagtaacaataaaaatattaacaaacgtgtgccacggtataaaagtaataaatatataaaaaaaaaaaatcaatacaccatgtaaaagccctatgatatttgagttaacggtgtacaaatgggtcagtctaacccgtatttatataagtctgtgtttttaatagaaacccaacacaatctgtataacaatatgggttgtatcaggtctatctcatattttgatggtcagcctcagcacaaccgataagcacaaattactcgtgtcctgctcaggctcgtgtcgggttttaacgagctagacattatcattaaatgggtcaatttattttctttgtgggccataatat

SEQ ID NO: 10242 - DNA, 657 bp, Cannabis sativa
gatcatggactttactttgagttaaattaaactttaaaattttataatttagtcacacgtgtgtgggttgtgtttcgtagtttgatgaggtaaaaaaagagtgcttacccatagtatagccaccatgtccgaatcacttaattggtcctcttttggcaaagctagcaaagcactaagaaaatcattatcatcaggttcagattcagtagtaccaaatgatattttcctttcttttactatttgactcacgacatcattgaccttagccgctaatatgttgcactttcttttgaccccaaaaaagtccaaaaattttagaggaaaataatcctccaaattaaatttggaaattaattcatatccttcgttgaccatatcccctaaacgttgaccagcttgattttctaaacccaaacgactcccaaaaacactctccaacacattagtaagagaacccttttgtaaaatacctctaagacccaccaccacacctctctcatccatttcttgccccacgcgcgccaacatttcgtcagccacgcgctggcggagcccctccagagtggcaatacgccttggggagaacatatgaacggctgcgactctcctaaggtggcgccaataggttccggctggagcgaaacctatggctcgctc

SEQ ID NO: 10243 - DNA, 1037 bp, Cannabis sativa
tgtccctgttctctctctctctctcttgagaatcatgcagatgaacagaagcccagcaattttttccttttcacacttaaatcctgatagtttccacattgtgaaacccatcccaagctccagatctaatgatctcggtggctccgttcccacgttctccgtcgaactgctcagttcagtgagttccaaccgtccttgtcgcgtcaagagatcgaagcccaaccatcccagacgtgtcaacattaactccaaatctcctcttcattcagatgcaagctcaaggacaccattccctcttctcattaatgaaactcattcaggtaatcgagtatttttccccaattttcttcattctgtcaaatcgccactgtcagaggaaattgctatttgtaatttcgtttttaattataagctttaccataaattccctcctgaccggtcttgtaaatgtgttttacaagttaatgtgaatcctctttatgcccaggattttcagaagtggtattatttatgtagtattgcatatttgcttaaatttaatgtgtttcggtcttcttgctgtctgcctattgcctgtagaagacatgatgtatatctactttccctattaaatgctatgccttagccatggattctatacccctcttcgaatatacagataggaaaggctttcaaaatcttgaaaaccttatttattaccatttctatctattttactataaaaggtatcttgctttactttctctgcatgtacgaaacacaccaattaggcaaacattctttgtgtctcatctgctttcccctgtgcacacacaaacacacactcatggatgacttaaccacctctctctcgattgctcttaacctcacagatacagagagcacagtccaaacactctatgaatccacacctgctgaaggaaatgtggctgaccccctccctgctgccccatattttcttgtagccaaactctacactatcaaaactttcaacaagaaagttttcatggaaaaaatgatagagaactggaacaata

SEQ ID NO: 10244 - DNA, 1044 bp, Cannabis sativa
taatacacccagagtttaaaaatatctctggaattatgaaattattactctaatgcccatttctaataatggagcccacaaaaaatcaagttaataaataattataaaatatcagaaattagtgctaattgcctttactaatccaaattactgatgcggtcattacattcctggttgtatattgccccaaatcatacaacaatatcctaggatgtttagtcttggtcgattttagggacatgacttcaattaaaaatttgtgcacgaagttcccttgtgataattgaaggaacaaaatggtcaagggtgactaaagaagtgcaagaagttggtataatgtttcagtttaaactgtgctcatggtctgagaagaaatagattttggtccaagaatagacattcatgcagaagatgaaactatcaatgagtatgaagatgaactagatcccaaggttgggatagattgagaaattgggcaactagatagtagaggaagtcaaaatttgtgatccagatccctctaagaccattaaagtgggtaaaaagttacatttggcggtgaaagaaaagactgtgactgcagtcaagaaaaattaggacgtgctagcatggagccattcgagtatgatggggagtaacgccaacactattttccatgccttgaatatcaatgaagatgaaacacctgtctagatgaaaagaagagcttatgatctggtaatggaaaatgcagtgaaggcaaaagttgataagttaacctgtaatgacttcctcttggtgtcattgtacccagtgtggttggcaaaccaagttttcgtcccaaaaccaaatggcacgtggaggatatgtattgacttcacgaactttaacaaggatttttggaaggattttttccccttttgggaatacacaaaatggtggatgccactttaagatgcgagttgttaagcttcatggatgcctactccagctacaatcaaatcaagatgcaaataggggatcgggaatacaccaacttccaaacatataaggggtgtactatta

SEQ ID NO: 10245 - DNA, 666 bp, Cannabis sativa
aaacttgaacaatcatactccttacgaactactgtttgacaagccccccaactatgagcatctaagaaattttggctgtctagtttttgcttcaaccctcaccgcacacagaactaagtttgattcaagaactagaacttgtgtattcatgggatatccacaaggggtaaaggggtacagactatatgatataaataataaacaattttttatatcaaggaatgttgtttttcatgagaatatatttcctttttataaactaaacaacaacaaacactatactgatcctttcattcatattgtttttccttctaatgaaatcactaacacaaacattgaagattttcccatgttagataaggaagacaatatttctcacaacactaatcaaaatgatcttcctgctgaaaccgaaactcacttgtctgccactcctgaagaagatattgctgctacagaccaactgctgcagcaagacgaaaacaccacagtcccaaggcattcaaccacagatactgctgctacagaccaactgctgcaacaagatgaacacaccacagttccaagacgctcaaacaggataccaagaactccttcttatctccgtgactatgagtgtcattcggttatacaagacaaaaattctactccacattctctaaataa
